United States Patent Application Publication US 2024/0093182 A1 - sequence listing, part 16

SEQ ID NO: 33731 - DNA, 1458 bp, Artificial sequence
  DNA replication origin
atacacaaaactattgcatgcacactcacaggcacatgtgcacataaaaacagacatacacattcagacccatgcacatgcccccacacacctattacacacatgctcacacacacaggtgtgctgacacacaaacacgcactaaggcacacatgtccatgcacatatctagtacacatgtgctcacacacacaaactcagaaatatgcactcaggcacatgtcttcacacatacctattacatgtgttcacatacctattacatgtgttgacacacacctatgtgttcacacacaaaaaaacactcaggcacatgcacacatacactgatgcaaactcacataaacatgcagacacatgagcatgtccaggcacatactgattacacacgtgctcacacgcacacactatgcataaagctgacaggaagatgctagtgcctcttcgccggcacacctcgagggctccaggagggggcgggacacagtgggaaaggaggcggggcctgagggactcagtgggaaaggaggcggggcctgagggatgcggtgggaaaggagagagggcctgagggatacggtgggaaaggaggcagggcctgagggatggggtgggaaaggaggcggggcctgaaggatgcagtgggaaaggaggcagggacagaggggtgtggtgggaaaggaggcggggccagagggatgcagtggaaaaggaggcagggcctgagggatgaagtgagaaaggaggcggggcctgagggatgcagtgggaaaggaggcggggcctgaaggatgcaatgagaaaggaggcggggcctgaagcatgcagtgggaaaggaggcggggcctgaagcatgcagtgggaaagaaggcggggcctgaaggatgcagtgagaaaggaggcggggcctgaaggatgcagtgggaaatgaggcggggcctgaaggatgcagtgggaaaggaggcggggcctgaaggatgcagtgggaaaggaggcggggcctgaaggatgcagtgggaaaggaggcggggcctgaaggatgcagtggaaaggaggcggggcctgagggatgcggtgggaaaggaggcggggcatgaggactaagtgggaaaggaggtggggcctctgagggagggactcatccagcagcaggtgttagtgccccagtcaggaagacggtgaaaggaacaggtctcgtccctggggccccactgtgccctctgctgttactcctctgaggacccctctgtctgggcccactggatagggtccccggcatggagcagtagagacccttatctaccacatggagctcggccggtgcctctggatctgcaccccaaggccgcatggacagcttgcattgatgaccagggttggggaggcccaggggaactgggggccagctaagagtcccccagacctggtcagggcctgcctctcgcctctggatctttc

SEQ ID NO: 33732 - DNA, 1588 bp, Artificial sequence
  DNA replication origin
ccgcctcctttcccaccccatccctcaggccctgcctcctttcccaccgtatccctcaggccctctctcctttcccaccgcatccctcaggccccgcctcctttcccactgagtccctcaggccccgcctcctttcccactgtgtcccgccccctcctggagccctcgaggtgtgccggcgaagaggcactagcatcttcctgtcagctttatgcatagtgtgtgcgtgtgagcacgtgtgtaatcagtatgtgcctggacatgctcatgtgtctgcatgtttatgtgagtttgcatcagtgtatgtgtgcatgtgcctgagtgtttttttgtgtgtgaacacataggtgtgtgtcaacacatgtaataggtatgtgaacacatgtaataggtatgtgtgaagacatgtgcctgagtgcatatttctgagtttgtgtgtgtgagcacatgtgtactagatatgtgcatggacatgtgtgccttagtgcgtgtttgtgtgtcagcacacctgtgtgtgtgagcatgtgtgtaataggtgtgtgggggcatgtgcatgggtctgaatgtgtatgtctgtttttatgtgcacatgtgcctgtgagtgtgcatgcaatagttttgtgtatggatgtgtgagtgcatgtgtgtctgtatgtgtgcaggtgtgtgtaagcatgtagctacataatagttatgtttgtggatgtgtgcatgtgtctgcacatgtgtgcgtgtgtacatgtgtaataggtctgtgtgtatgtgtgtgtacatgtggataataggtttgtgtgtggatgtgtatgtgcctgtgtgtttgggttcgtgtgtgtgcatgagtgtgtgtgagtgcatgtgtaataggtatgtgcgtgtgagtgtgtgagttcatgtggcgtgtgtgtatgcatgtgtgtgtaataggtgtgtgtgcgtgagcttgagtgcacaggtatgtgcttgtatatgcacacgtgtgctgtgtgctctggcctggctgtgtgtgcgtgtgtgtgtgcatgtgtgtaataggcatgtgtctgcttgagtgtgagtgtgcatgtgtgtgcttgcgtgtgcatatgtgtgccatgtggtccggcctggctgtgtatgtgtgcacgtgtgtgtgcatgcactccagcctggctgtgggtgtgtgtgtgtgtgcgcgctggcctggctgcggctatgtgcgtgtgtgtgtgtgtgcactccagcctggctgtgggtgtgtgcgtgtgcactggtctggctgtgggtgtgtgtgtgtgtgtgcatgtatgcatgtgtgtgccgtgtgctccagcctggctgtggacgtgtgcttgtgtgtgcgcgtgttccggcctggctgtgggtgtgtgtgtgcgtgtgcgtgtgtgtgtgcgtgtgtgtcttggcttcaggggctgtgaggcccctgagagttggggctttgttctctgcacactggaaaccctcccccttctcacagatgcctggccgtggtggggctgcggtggggacccacttggtcttgctgagtgatctgtgacggctcgcggggtggctcaggtatcaggggacagccatgtctgtgaggact

SEQ ID NO: 33733 - DNA, 873 bp, Artificial sequence
  DNA replication origin
gacggctcgcggggtggctcaggtatcaggggacagccatgtctgtgaggactccggccccgctcagatgaggcagcccagcccgtcgcccagggtccggctgtgggagctgcagtagggatggctctgcctaggtgggccgaggccgtgcggggctttaggtgagggctgggatctaactcagcgcaggcttcaggtgggagaacgggcagctgggccctcctggtgactcacatcacgtgagacaacactgtgccctggcctttccagtctttcctgcagctgcgcaactggacggcctccctgctctgctccgcagccgacctccccgcccgtggcttcagcaaccagatcccgctggtggcgcgggggaactgcaccttctatgagaaagtgaggctggcccagggcagcggagcacgcgggctgctcatcgtcagcagggagaggctggtacggccctgtgcgtcccccgctgggccagctctcaggggcaggaggggggtgcaggaggcagagatggcagcagctggggctggtcttccgacttctcgctaaaggcagatccatctgtggggaggatctgggccgagtgtgaacatggggaggatccgggccgagtgtggccgtggggagggcggagatgagtctgttcttcctgagctgctggctggggctgtggaactttggccgtggtcttgttgggtgcctgtcctagagcagcccccaggggtgacggagaccacactctctgtggggatgggattggggtggcttctgaggagcaggtggcctggccctgagctggtcctttctgggtaccctggtgcccttgccctctagccggtggggccgtgctcgcctgtggtccta

SEQ ID NO: 33734 - DNA, 2255 bp, Artificial sequence
  DNA replication origin
ggggaggatctgggccgagtgtgaacatggggaggatccgggccgagtgtggccgtggggagggcggagatgagtctgttcttcctgagctgctggctggggctgtggaactttggccgtggtcttgttgggtgcctgtcctagagcagcccccaggggtgacggagaccacactctctgtggggatgggattggggtggcttctgaggagcaggtggcctggccctgagctggtcctttctgggtaccctggtgcccttgccctctagccggtggggccgtgctcgcctgtggtcctagccaggtggcctgaagcctggccccttttccatcttctgtgaaatggggctgtggttgagagctgggggcctggcagggctggtcacagcacagggacatgccgactgctgggctgggcagggtgcgtggccgcccctgaagtgtagttttggagtaagaaggaatggagttcaggaattccctcacagctctgcctgtggctctgggctgcccccgccagtgttgcaccctgagcctggcaatccacggaggcctggtgcaggggctcagggccgagggcagagcaggccgggcagagccgagagtgccatccctgtccgcacacgctgccgtcgtagttgagagaggccctcagtgggtgcggggctcaaggcggcttagtgggcaggcatgggctgtgacaagtatcactcaggacttgtatgtgcggttcgggagtcccacggccgagggagggattagtggcgcttttaggcctggggccctgttgtcaggtgaagaaggcttgatgcccttcggcctccctgttcttgggtcctcctggggggccggaggctgtcagctgcagagggggagccagcaggcgcccccagcctgacccgagcctcgagtgagggtcccaggagaggaggcgaatgggcacagagctgggggcccacccactgctgcgggtgatgcctgccgctccctcctctgggcccccaggtccccccggggggtaataagacgcagtatgatgagattggcattcccgtggccctgctcagctacaaagacatgctggacatcttcacggtaggtctgcgccggctcagacccacgctcccgaggagatggggcagggggcttcgggctggctgccgggggggtttgtgcctcagttggtgggatcagggtggtgggtgaggcgtggcccctgcaggccagggtctccagccccagccccacagcccacagctgcacgtcgacccatggctggcgggtggctctgacgcctgcctccggtgtgttccttgaggcagcgtttcggccgcacggtgagggcggcgctgtatgcgcctaaggagccggtgctggactacaacatggtcatcatcttcatcatggctgtgggcaccgtcgccatcggcggctactgggccgggagtcgggacgtgaagaagtgagtttcgcatcgtgcgtgtgctgtgacggggtcgggcggctctgacacgggccgggacggccagtcttccagaacagcagtgagtgctttggcctcggcaggcacggctcgccccgtggagcccttcgtttcttcctcaggaggtcctgggacagaatcagtctcttttcctgccagggtgggctccgggcacctggtgggtgtgtagggctgggcaggtgtggatgtggcaggtacgggcgtggcaggtgcagggctgggcaggtggctggggccagctaccctcttcctgctgagccgcctgggtctggggaggccccatgtccagggctctttatgcagatccaagctgcggttgctgcccacacgccagcctctggcccggcctagtggccaccccagctcaacccagggacgcgggccctgccaccctctgctgtgtggtctcctctgccctggggacgttcggggcggttccttgcacttcagtcccccccgggtcccctcctgctcccgggttttctgccccgttcccccgggtggctgtgggctcccgagccccgtgtcggccagccggccccagggccccacgaccccatggtgtctcccaagaaggtacatgaagcacaagcgcgacgatgggcccgagaagcaggaggacgaggcggtggacgtgacgccggtgatgacctgcgtgtttgtggtgatgtgctgctccatgctggtgctgctctactatttctacgatctcctcggtgcgcggccccgggcgggtgggccgcggcgtgga

SEQ ID NO: 33735 - DNA, 820 bp, Artificial sequence
  DNA replication origin
ccacggcccctttgccgccccatagccccccatggtgcaatattgctcagagtctacagcaggcgctccctcagtgctggcctggggctcctaggcccaggagcagggcggagtctgggcgagctatcaatggagcccaccagcagccaggcgccaggggtggcggggggagggtgcccttgtccccaggaaccctgccccaggtcgcaggccgaaccctgggttccccagggttctccggggaacccagaaggttccccacagcccagagcttggcctggctcttaggggtaaagggagctgctggggggtctccaacaaagtcagacctgggtctaggaagcggggctagcccagggggagacctttttgtgttgccgtccctgggtgaggaggtgggaggtctggagcaggcagggcctcgggcgaaggggcgcagcgcaggcgaggggctctgtgggtacagcccgtggcccccagcgcctgcccgggtcgggctctgccctgcccttggggtgcctactgttgtcatcgtgtgggatgtggagtttaatgaggacaacagagtgggggctgccactctgcagggggtgcctgggccggtcccaagggtggtgggcagtgggatgaggccgggagctggtgggcttggctctgactgccccgtgccccccaggatccccaacaacagcctgccctacttccacaagcgcccgcaggcccgtatgctgctcctggcgctcttctgcgtggccgtcagcgtggtgtggggcgtcttccgcaacgaggaccagtaagtgctgcttcccccgggccccgg

SEQ ID NO: 33736 - DNA, 2083 bp, Artificial sequence
  DNA replication origin
cagaaggcgatgcccagggcatcctggaggacccaggcccacctgcaagacaaagcagcatcctcgccggggcagaggctggctgaccacccaggacgccgcctcccacgagccacacagggcccttgctctcagccagcacgcagccccactgcccttccacctgcccaggggatgactctgaggaccccagacctgtgggaggacccctgctgttacaactccagcagggctggcggcacaggccccaccccagggcccaccctgcggaagcaggtagaggagcccaccactcggcagccaggacagtggacacaggcctggccggctgcgtctcctcggtcgctgtccccagatggtggggccaggacggtggacacgggcctggccggctgcgtcccctcagtcgctgtccccggatggtggggccaggatggtggacacgggcctggccggctgcgtcccctcagtcactgtccccggatggtgggcgtcacgctgtaggcaggggtcacaggctgtaggcaggggccaggcagagggtgcgtgcgcaggagggcttgggcactgacccctccaaactgtttttattttgtttttgagatggagtctcactctgtcacccaggctggagtttggtggcacgatcttgactcgctgcaacctccacctcccaggttcaagcaattctcctgcctcagcctcccaagtagctgggattacaggcacacaccacaatgccaggcaaatttttttgtatttttagtagagatggggttttgtcatgttggccaggctggtctcaaactcctgacctcaagtgatctgcccgcctcacctcccaaagtgctgggattacaggcatgagcccccgtgcccaaactgtttattaaattaaaacttgtgccacaccaggtttcctcaaagaacctctgggtccacagtgggtggggctgccatgcggttggtgccctggggcaaagcacagaactgcctcctgcacaaggccacggcccctgcagccagccgcaacttcggctctctcctggccccacgaagccccagagtcccctccccgctggcccctgcccccaatgcaggctctgcctgtcacttgctggacgagttccccagcgttcctcagcgtctcaaacatcaaaggcttcatttgaaaatgggataaaaacatctccagggcggggcggctgctaacagcagaggcctccatgggagacgctggtacagccaattccaggcgccacgtacttcaagcacccagagaactgcggccagttattttttctgattttatattatttcttaaatagggcgtctcgcttgttgcccaggctggtcttgaactcctgggcaaagtgatcgtcctgccttggcctaccaaatgctgggatcccaggcgtgagcccctgcgcccagctgactgaggcctgctctaacttcatgtgacggagcgagtttcctggcttggaaataactgaaaagattcattttctctttgtgtacaaaggattcaaaatattttcacatcttccttctgccagttaaacgtgccgtggctccaatacacaccaaagccaagcgtacttggctgcctcaggaaggctgggaggaagtgccagatggtatcagcgacagcggtggggaccgggcggggacgggccagctctgtcctcccaacacggcaccaggcactcggcctcatgggggaggcccggccagcgggaggcagccacaagtccaggccacgtgggaggtgagcgtggggggagcagtgcctgccccacctccaccactgctcagaagccgcagcagtcatgaccaagaggaccgggtgccctggtgcccacaccctgggcctcgaacctgcggcgtgcacgtgggtgccaggaaagggacagcgggggacagactgtggccctgggcagcgatgccccacaaaggagtcccatccaggctggaggacgtggctcctggccacaggggctccggcctctcctcccggattccagtcagggttcccatgacacccggacaaaccccaggtgaaacgccctcgcagccctgt

SEQ ID NO: 33737 - DNA, 1082 bp, Artificial sequence
  DNA replication origin
ggtggctgagtccgagggcccagtggccacctccaccatgatgctgctcccactctgcacagaatggggttgagtgagggagcgtggtgatggggtgggggggcaggggagtggggtgatggggcgagggggcagggtgatgcgatgggggggtgcaaggggcagggtgatggggggtgatggggcaggggagcagggtgatggggtggaggtgagcggggtgatggggtggggggcaggggagcacggtgtggggtggagggggacgagggggcgggacgagggggcggggtgatggggggggtgatggggcgggggttgcgagggggcgggggagcggggtgatggggtggagcagggacaggcagtcgcctaccttggtcaggaagggcgtgatgaacacgaagaagatgtcgtagaggaacagcaccagcagcagcagcgtgcaggcctgcgaagcccacggctgagggcggcccccaccccggcccgtgcctcccccactcccatctcatgaggcccagcgcctcctcctgggaggcagcctttaaaggaacctgagcagagcgtgcccagtgccagggacgcaccacgcaggaggagctttggaagcaacatcaggtagggatttacgggcaaaagtcaggcttttagagtctccacgtaacaggaaggcggggacgggagggcggaggcctgtgccacgcagggccggctctggggatacagagggccatcctgggcattcaaatgccgcttgcttggggtgctgtggggccctcacgggagtgcagccgcctggggcttgacaacatccccgcactcccggtaccacctgaggccagttcctccagccctattcaaccactctcaccaccacctcatctagacatgagttgcccctgccgggaaccgccccgcagccacccacccaggccgcctcagcgggggctttgggacccaatcttcaagccccacccttcacaacaggcctaggcggccatccccagggcagtgagcaggagcacagacctgcaaggaccacagccccacacgggccaggctaggatgaagggccccca

SEQ ID NO: 33738 - DNA, 1339 bp, Artificial sequence
  DNA replication origin
tgaactcccaggctcaagcgatcctcccacctcagcctgcagagtagctggggctacaggcacatgtcaccatgcccggctaatttttgcattcttctgcagagacagggtcttactatgttgcccaggctggtcttgaactcctggactcaagcaatcctcccacttcagcctcccagaaagctgggatcacagacatgagcccccgtacccggcctcagccgtgattttaaaggataatcatgaagacagtaaaatcgggcgaggggaaagccaggggcacctgcagctgcaggaggcaggtgtgaggggacaggccggcctgaactctcctggccctgggagtggccgtttagggagccacgtggagggcagggtcgggggcgtggctcggcagaggaggcctggcctggccctgtgcccaggaaccagaaagcaccacagcttctttccttagggccagctgcggtgggggacatttttcaaaacaatgtgggtcaacagataacagcactttgcgtaaatacgttcataacaaaagaaacagtagaagacaaggcaaagaagaaaaagacaaaaagaggaaaacaggaaagaaaaggaaaagaaaagaacagaacaatggaagccagggaaaatgagaaagacggggacggaggcacaggcccagggagaatgagaaagaccaggatgtggacacaggccaaaggagaatgagaaagacggggacggaggcacaggcccagggagaatgagaaagacagggacggaggcacggacccagggagaatgagaaagacggggatggaggcacgggcccagggagaatgagaaagagggggacggaggcacaggcccagggagaatgagaaagacggggacggaggcacaggcccaggaagaatgagaaagagggggttgcaggcacaggcccggggagaatgagaaagagggggatgcaggcacgggcccaggaagaatgaggaagatggggacagaggcacaggcccaggaagaatgagaaagagggggttgcaggcacaggcccggggagaatgagaaagagggggatgcaggcacaggcccagccacccgagcccagctcccggagtggccagggggttagggttagggtgttatggttacggtgttagagttggaattagggttagggttggggttggggttaggggtcagggtcaggacagaggctaagtcggggtggggctggagccagagaggccagcacgggcccaaccgaggcacttaccgatggtgcaggccacgaagtataccctggaggactgtacctggatgtcaaacctgtggcagtaggcca

SEQ ID NO: 33739 - DNA, 1917 bp, Artificial sequence
  DNA replication origin
aatcaagcgaatgagagcgtgagtgtgtgtggagagagaacggaatcaagcgaatgacagcgcgtgagtgtgtgtggagagagagaacagaatcaagcgaatgagagcgcgtgagtgtgtgtggagagagagaatggaatcaagcgaatgacagcgcgtgagtgtgtgtggagggagagaatggaatcaagcgaatgagaacacgagtgtgtgtggagggagagaacggaatcaagcgaatgagagcgcgtgagtgtgtgtggagagagagaacggaatcaagcgaatgagagcgtgagtgtgtgtggagagagaacggaatcaagcgaatgagagcgtgagtgtgtgtggagagagaacggaatcaagcgaatgacagcgtgtgagtgtgtgtggagagagagaatggaatcaggcgaatgagagtgcatgagtctgtgtggagagagaacggaatcacgcgaatgagaacgtgagtgtgtgtggagggagagagaacggaatcaagcgaatgagagcgtgagtgtgtgtggagagagaacggaatcaagcgaatgacagcgcatgagtgtgtgtggagggagagaatggaatcaagcgaatgagagcgcgtgagtctgtgtgtggagggagagaacggaatcaggcaaatgagagcgcgtgagtgtgtgtgtggagagagaaccgcatcaagcgaatgagagcgcgagtgtgtgtgtggagggagagaacggaatcaggcgaataagagtgcgtgagtgtgtgtggagagagaacggaatcaggcgaatgagagtgtgtgtgtgtggagagagaacggaatcaagcgaatgagagcgcgagtgtgtgtggagagagaacggaatcaagcgaatgagagcgtgagtgtgtgtggagagagaacggaatcaagcgaatgacagcgcatgagtgtgtgtggagggagagaatggaatcaagcgaatgagagcgcgtgagtctgtgtgtggagggagagaacggaatcaggcaaatgagagcgcgtgagtgtgtgtgtggagagagaaccgcatcaagcgaatgagagcgcgagtgtgtgtgtggagggagagaacggaatcaggcgaataagagtgcgtgagtgtgtgtggagagagaacggaatcaggcgaatgagagtgtgtgtgtgtggagagagaacggaatcaggcgaatgagagcgcgtgtgtgtggagagagagaacggaatcaggcgaatgagagtgtgtgtgtgtggagagagaacggaatcaggcgaatgagagcgcgtgagtgtgtgtggagagaaggagaacggaatcaggcgaatgagagtgcgtgagtgtgtgtggagagagaacggcatcaagcgaatgagagcgcgtgagtgtgtgtgtggagggagagaacggaatcaggcgaatgagagtgcgtgagtgtgtgtggagagagaacggcatcaagcgaatgagagcgcgtgagtgtgtgtgtggagggagagaacggaatcaggcgaataagagtgcgtgagtgtgtgtggagagagaacggaatcaggcgaatgagagtgtgtgtgtgtggagagagagaacggaatcaggcgaatgagagcgcgtgtgtggagagagagaacggaatcaggcgaatgagagtgtgtgtgtgtggagagagaacggaatcaggcgaatgagagcgcgtgagtgtgtgtggagagaaggagaacggaatcaggcgaatgagagtgcgtgagtgtgtgtggagagagaacggcatcaagcgaatgagagcgcgtgagtgtgtgtgtggagggagagaacggaatcaggcgaatgagagcgcgtgtgtgtggagagagaacggaatcaggtgaatgagagcgcgtaagtgtgtgtggagggagagagaacggaatcaagcgaa

SEQ ID NO: 33740 - DNA, 2319 bp, Artificial sequence
  DNA replication origin
catccgaggccagcagaggctgggagctgtgcaaagcctctccaaagaaaagcctggactaccgtctctcgcccctgggcctggtccccggcttctcctgaaccttctgaaatgcccatcagaatggggagacctttggggtgggggtgctggccccaggagacttctccctggggcctggtctcaggccatggtcccatctgtgggacccatgagcccagctcggcactggaaccacagctcgacccaatgcatcacaccagtgcggcagggacgggtgtggtttaacctccacaaaaacatgacgtaggaccccatgcgcggccagcaccgctgagaagcgcggcatctcccccagagggagatcagctatgggaggagctgcacccatgcccaacagcctgaggatcgccctatggcgcagggctgctccctgggcggtcatggactccaagaggcgctgcccggaggggcgggggcagctctcgggcgcaatgcgcctgagtcccgggaacccaggaagtcacctgagcggcacactggaagggggggtcccacccactcctgttcacaaaaaatcacaagagcagaaccgacgtggcgtaagccctccctgcatctcacgtttaacccttgccaaccaccccctgccttgccaagggggacaggggacagggcttccacagccagggcaggcctgctcccctcgtccagggccctgcggccccacccccagtcaggcgcctcgctctcggcaggagaggcgatggatgcccgatgcccacgcaggtggggcactactatttgggagaagcaactttagaaaggacatggcacccccgagtcccagccggcacccccgcgtcccacccggcacccctgggccccacccggcacccccgcgtcccacccggcacccccgggccccacctggcacccccgcatcccacccggcacaggagctgcacgcacgtccttccaccggggcctcacgcgcatgacacccaaagcagaaggtaccaggaccctgagccccgtcgcggccgcagggctggctgtggctggaggtctcactcaactttaactctagttagggctcactaggcgagtatttctcacagtcagagcaaactggtattcaccgcaaagccgctgcccgtccagaacacgcccagctcccggcgccagagcgccacagcgcagctcgtcaccagcgtgcagggcaccaggtagaggagagcgggctggccacgctgcatcagggccagtgccacgaatgtcacaaggaggccaacgccataggctgtggggacagaggaggcatcacctcagccaggcaggccagggccaccacccatttccctgggaagaacgtgagcgggctggggttggtggagggcaggggtgtgcgaggacgggagaggtacagtgggggttcagccggcagggccacaggctccccaaagtacatggatccttccggcacctcctgggccacaatcccaccctgaccctaccggagccagggtcaccgaggacatggaagggccagggcaaggagagggacagggaggggcagggtccgggcagctgcaggacagcgggaggcagacgtgatagcggagggggctgcgagacgtgtctgggatgcagtttctatgaacctctgagaaaatcagccgaaggtgacacatgtgcctgaccagaaaacccttgaacactgagctgtgggcatataaactatgttctcaggagacacccagtgaaatgtttggggtcaaagggcacggtgtccacccaccggggccgtgcccccagtcccctgagaacgcagcctgtgatttacatacgtgtgcatgtaaatacacaaacgcacacatggccacccttggcacccgcaggggagggctgccaggacccccttgctcatgtccctgacgtaaactggtgcagtgtctgcctagaacccacccgcgtcctgccaaaccataaatcaccataggttcctacaaacgcaaacgtgatgtcgccgcaggcaatggctgtcgcatggcattgcttcgggaaaactggcccaaaaaatctgcatgtgttcagtacagataagaacacaaatcttttccccaaatattttcaacctacagctagtgaaatccacagctgcaggaacccatggctagtgagggccaactgcagtacacgggggagcgtgagtgtgtgtgtggagagagagagaatggaatcaagcgaatgaaagcgtgagtgtgtgtggagagagagaacggaatcaagcgaatgagagcgcgagtgtgtgtgtgg

SEQ ID NO: 33741 - DNA, 1528 bp, Artificial sequence
  DNA replication origin
ccttagccaggggagcagcttgtccacttactgccagccttgttcacgccccaaaaccccgccccacgggcctgtctcagccagcgtcaggggccagaggccgccccggccactggtccgtgtcctaggcttggaggcagcttccaaacctcccaggggctccgatctgctcaagagggaaaagcgatgccttctgggagacagaaagctgctcttccacccggagagcaggatgccgtggggagggaggtcacctgaaggccgaagcagctggtgagcaccaagtgtggccgcggccagagtccacccacgcctgctcactcatgcagacgacgcttgagggtctgcagagaggccgggcagggcctgcgaggacggaccccggtggggaggatggacccgcagagagcttgtggcagccgggcgagctgggagcagcaggcgtgcagccggggcagctgggctgggcgcgggcacagaccgcaggggtctcggcaaggatgagcaccatgttggggcgggtggggacggcacaggcctcggtcccgggggacaggcgtctgtctgtctgtctccagtgggcgccaggcagccccaacatcttggtgtggcgggcacggcagcgagcgtctcacccctcccctaggccgaggcgccaggctgggttaccggggacggctgggcctggtcccggccctcggattcagctgggctcccaggctcccgcatgggggctccagcccccatctcctcggacgtgcgtgattttggggactgctcagcaggccagggggatgtggctggttcttcgctgggcggctgcggggagagtggcgtggcagagtctttgggaggctgcgggccgtcggctggtgctggggcccacggagatggaggtaggactttctacaggagaagggaggcagaggtgaggcggagacagggacccagaggaggaccctggcaggggccaggacacccagcacccgcaggccacgggggcagggtcaaaatgaggcgccatccccaggggctctggacccaaggagggggccggctccataacctacgggcacccaggaccctgtccatcggcacaggtgccgcgggagggccatccgaggccagcagaggctgggagctgtgcaaagcctctccaaagaaaagcctggactaccgtctctcgcccctgggcctggtccccggcttctcctgaaccttctgaaatgcccatcagaatggggagacctttggggtgggggtgctggccccaggagacttctccctggggcctggtctcaggccatggtcccatctgtgggacccatgagcccagctcggcactggaaccacagctcgacccaatgcatcacaccagtgcggcagggacgggtgtggtttaacctccacaaaaacatgacgtaggaccccatgcgcggccagcaccgctgagaagcgcggcatctcccccagagggagatcagctatgggaggagctgcacccatgcccaacagcctgaggatcgcc

SEQ ID NO: 33742 - DNA, 905 bp, Artificial sequence
  DNA replication origin
gcagaccctcaagcgtcgtctgcatgagtgagcaggcgtgggtggactctggccgcggccacacttggtgctcaccagctgcttcggccttcaggtgacctccctccccacggcatcctgctctccgggtggaagagcagctttctgtctcccagaaggcatcgcttttccctcttgagcagatcggagcccctgggaggtttggaagctgcctccaagcctaggacacggaccagtggccggggcggcctctggcccctgacgctggctgagacaggcccgtggggcggggttttggggcgtgaacaaggctggcagtaagtggacaagctgctcccctggctaaggccctgccctgccctcagccagaggtgcctggccatgcctgcacactcctccccattttaataaatggtcgcaacttctagaagtcctgctggtgccacctggtggggtggacgtctctcagactgcccttctgacaagcaggggtgggcgccaggcaggctgggtcaggccctcaggggtccctggagccctgggagggagggactgggtcgtgggaggtcctggtagctcccggcacccaacctcgcttcccgtgtgggccccgtgttgcttttctgctgagaggggcttgggcctcggttctccctgtggcagcggcattggtgcctgggttcttaaccctctggacccagcagctaggagcttctggaacccacgaggacatctgccactggcatggtctactcactgatggggtcctcctgactccagggcagagacgtccgtgcgggaactgaccgaggcgtggccccaggccccggcatcctcccctcgctgcacgtggtcacttccgaagcagcgctccctgtggccgcagagacagagcccgcaccctg

SEQ ID NO: 33743 - DNA, 1173 bp, Artificial sequence
  DNA replication origin
agggagggactgggtcgtgggaggtcctggtagctcccggcacccaacctcgcttcccgtgtgggccccgtgttgcttttctgctgagaggggcttgggcctcggttctccctgtggcagcggcattggtgcctgggttcttaaccctctggacccagcagctaggagcttctggaacccacgaggacatctgccactggcatggtctactcactgatggggtcctcctgactccagggcagagacgtccgtgcgggaactgaccgaggcgtggccccaggccccggcatcctcccctcgctgcacgtggtcacttccgaagcagcgctccctgtggccgcagagacagagcccgcaccctggctgtctgtggtgcctgggccccagctcccgcccgccacccgccctgttgagtgcggcctccagactcgagtccagaatctgtttctgtcaagtcagtcgtccccagctgcacacggggactgctgagcgctgcgctctcacgggtctgttccggacagagggtggcaggggtgagccctgatcccttacaaaaaataccagcttcccagggagtaatggcgccttcactgaagccattttgtacatggggacggggtggggacgtctcttttttggtgttggacgtttgaccagtggggaggggttcagaggcggcggtcctgtccttggctccgtctgtccgtgtggccttgctgccattccgtctgatcattaaacacagcttttgatacatatggcccggcctctgcctccgcagtgcacggcttggggcatctgctctgtgcaggtcccggtgagcagaactgagagctggcaggccgcctggctgtcctgcagaggacggattggaattgccaccgcagggccggccagtgctgtgaggtgcccagcgtcactcccatgggctctgtgggccatgtggtccctgtcacgcttctcagctctgccactgttgctggaaagcatcacagaccatgtgtaaaatgggccaaaataccttttacaaaattaaaatagagatggggtcttgcagtgttgctgaggctgatctcgaactgctgagctcagacaatcctcctgtctcggcctcccaaagcgctgcaattacaggcacgagccaccacgcccatccctcaagtaattttctcg

SEQ ID NO: 33744 - DNA, 1823 bp, Artificial sequence
  DNA replication origin
caaacactgagtcccggttcctcgtgcagctatagcagctctctgcctgggccagacggggtgcttagtagaggacctggcacacagcagtgaagagtggtgggtggatgagtgtgtgtggatgggtggatgggtggttgggtggatggagggatggatggatggatggacagacggacggtaaatgggtgaatggatagatgggtgtgtgtgtggataaatggatagatgggtgtgtgtgtggataaatggatagatgggtgtgtgtgtggatgggtgggtgagtgggtggatgaatggatgagtggatgggtggatggatggatggatgggtgggtgagtagacaggtggatagatgggtaaatggatgagtgggtgggtgggtggaaggtgggtggatggatggttgaatggaagggcaaatggatggatgggtgggtgggtagatggatggatgggtgggtgggcagatggatggatgggtggaggggtaaataatgggtggatggatgggcaaatggatggatgagtggaggggtgggtagatggatgaatggctagatgggcaggtagatggatggatggattggtgggtgggtggataggtggatggatggataaatgggtgggtgggtggatgaatgaatgggtagatgggtggatgggtggatagatgggtgagtgggtggttgaatggatggatgaatggatggatggatggatggatggatggatggatggatggatagatggatgaatgggtgtgtggatgggtgggtgtgtgggtgagtggatggttgggtgtgtagatggatggatggatggatggatggatggatggatggatggatggatggatgaatagatgtgtgaatgggtaaatggatggacaaatggatggtggatcaatggatggagacggatgggtggataagtaggtggatgggtgtgtggatgggtggctggatggatggatatgtggataagtggatgggtggttggataactgggtggatgggtatgtggataggtggatggatggttggataaatggataggtgtgtggatgggtgggtgggtgggcgggtggatggacggatagatggatgggtgtgtggatggatgttggataaatggatgggtggatagatgaatgagtggatggatgggtagataaatggatgagtgggtggataggtgaatgggtggatgaatgggtggataaatgggtggatgggtgtgtggatagatggttggataaatgagtggatggagggtatgtgtatggacggatggataactgaacagacaggtgggtgaatgggtgggtgtgtggatgaacagatggataaatgtgtggacagatggttgcataaatgggtgggtgggtgggtggatggatgcatggacggatggatggatggacagacggacggacggatggatggatggttacataaatgggtgggtgggtggatggatggatgggtggatggccagttggataaatggatggataggtgggtggataaaaaatgtgtaagctctggtcagcttagtgaaagaaaatcactattgttaccatattgctccactttgtaacttaaactgcaagacagagggatgctccccacgaaaagaaacaaaataccctccccagtgccaacaagcagcctgtttccatttccccagctctacctctccctgacatccctggaccgtgtgtgacctggacagtcgaggtgtgcacaccccccggagctcaggcaccggctgagcctggcaggagcccgtcttcctgaatcaagtgtgtcactagcac

SEQ ID NO: 33745 - DNA, 1051 bp, Artificial sequence
  DNA replication origin
gcagagccctgggacccctgtcctccggagactccaagcctgggcggcacccccggcccggagcaggaggtactggggaaggggcttggcagggggccgggggaggggcggctcccccacccggccccgccccgcccctcccttcctccagccccgggcccagctccggcttctgctccacttcggggtgggcgggatccgggcagtagcggtgcagcctcgtcgtccggagcgcggtgagtcggggtctcctgcgggctcagcctcccctcggaacagcccccacttcctccaaccccggtgagtcggggtctcctgcgggctcagcctcccctcggaacagcccccacttcctccaaccccattcgccaagccccggggctgtttggttgcctctggggctgtgtagaggtggcgtggcgggagtgtgtagatgcagccaggctgtgtagacaccaccggggttgtggagaggcagccggggctgtgtggacgccactggggtgtgtagacatggccaggttgtgtagatgcggccagggttgtgtggactcaggtgccgcgtgtagatgtggccggggttgtgtggacgcaggtgcggcgtgtagatgcggcaggggttgtgtggacgcaggtgtggtgtgtagatgcggcgggggttatgtggacgcaggtgtggcgtgtggatgcggccggggttgtgtggactcaggtgtggtgtgtagatgcacgtagggttgtgtggacgcagccgggattgtgtggatgtatctagcgtgtgtagatgtggctgagatttctagacgaggccaggctgggtagatgccgccagggtgtgtggacgtagccgggattgtgtggatgcagctgagatgtgtagatacagctggggtgtgtagattcggcctagttcctggaggggcctgggaccgccgaagccctccccatccctgttcccacccagagtcctcccttcttttctacccgtgaacttcacctaaagcaagaaccaagcatcagcctggagccctctggggtcaggggtggcggg

SEQ ID NO: 33746 - DNA, 2164 bp, Artificial sequence
  DNA replication origin
tagatgccgccagggtgtgtggacgtagccgggattgtgtggatgcagctgagatgtgtagatacagctggggtgtgtagattcggcctagttcctggaggggcctgggaccgccgaagccctccccatccctgttcccacccagagtcctcccttcttttctacccgtgaacttcacctaaagcaagaaccaagcatcagcctggagccctctggggtcaggggtggcgggaaaggggctgacagctactgggatggggtgcagggctggggtgggaggtgagtctggggtgtggtgcggggctggggtgggaggctggggtgggaggtggggctggggtgggaggctggggtgggaggtggggctggggtagggtgcagggttgggatggggtggggtgctgggatgggttggtggggtgcagggctgggatgggttggtggggtggggtgcggggctgggatggggtgggaggtgagtctggggtgggagggggggctggggtgggaggcggggctggagtgggtgccaggcatctgactggagcctctcctcccgccccagttctcaccctcggagccgcttctgagtaaacacacactgggatgtaacaattggaggtgggtgaagggcctgagatggggtgggttgttggtatttgcctgagggagggtcctcctggattcaattagccccggcaggaaacccaggctggggaccgtggcgttatccccgcatgaccgggaatgacccacattctgggaattagggcggggtccccaggacaggcgtccgtgctcgagggtcctctgtggcccagggaccttcgacttccttccgtcattttatagggggtcaaaccaggcctcggacccaggcatgggctccagaggttgccagaggttttggggacttgccaaagggttcaggcactgccccgcaggactgcatggccggaaacaccttgtgggccgcgtggtggccaccgccttgcagatcagggatgccccgcaggacacctgtggtcctggcttcctgacgccttcctgggggcctggctgggtggggctgtgtgagattctgggtgagttgtctgtgtggctgtgtgtgattgtgtgtgatcatgtgattgtgtgtgatgtgtggttgtgtgtggcaatatatataattgtgtctgtagctgcatatggccatgtgatttgtgtgtgattgtgtattatatgtgtgtgtggggtcatgagtgatcgtttatgttgtgtaattgtgtgattgtgtatggttgtgtgtggtcatgtgtcatgtcatgcgtgattgtgtatggttgtgtaattgtgtggtcgggtgggatcgtatatggttgtgtgtcgatggctgtataactgtgtgtatagttgtgtggtcatgtgtggttgcgtatagttatgtcatgatgtttgtgtgattgtataggattgtgtgtggttgtgcgagattgtgtgactgtgcagccatgtgtgtcattgtgcctgtgattgtggtggaggtgtaattgtgtgtatgggtgtgtgactgcatgtgtgagaccgtgtatggttgtgtgttgtatgggaggtttctgcagctgtgtggttatagtgtacggttgtgtgtgtgattgcatgatgagaattgcatgattttgtggatggctttgtgtggttgtgtatggttgtataattgtgtttgtgtgtgattgcatatgattgtggcaatatgtgtaatcgtgtctgtatgactgtgtatggtggagttgtgattgtatcagtgtatgactatatgtgtgaagttgtgtttagctgtatggtcattgtatgtgagatttgtggagttgtaacgtggttgtgtgtgtacttgcatgatgagattgtgtataatttgtggatggtggagtgaggttgtgtgtggttgtatgtggttgtgtgaggtgtgttttgtgagggtgtgtgtggttgtggtgtgtggttgtgtgaggttgtaatgtgtggttgtgtttggttgtgtgaggttgtgtgtggtaatgtgttgtgtgtggttgtgtgttgtgtgtgtgttgtgtgaggttgtggttgtgtgtgcaaatcccctcttcctagtcttctcatctggggcatggggatcagggtcccagcgctcaggctggcctga

SEQ ID NO: 33747 - DNA, 943 bp, Artificial sequence
  DNA replication origin
tgtgtgtgtacttgcatgatgagattgtgtataatttgtggatggtggagtgaggttgtgtgtggttgtatgtggttgtgtgaggtgtgttttgtgagggtgtgtgtggttgtggtgtgtggttgtgtgaggttgtaatgtgtggttgtgtttggttgtgtgaggttgtgtgtggtaatgtgttgtgtgtggttgtgtgttgtgtgtgtgttgtgtgaggttgtggttgtgtgtgcaaatcccctcttcctagtcttctcatctggggcatggggatcagggtcccagcgctcaggctggcctgaccgtggggtaattgggccctgcagagcctcacgccgcctgcttgtcctgccacgcggaatgggagtccgtgtgtgccccgctgcccacagcgtgtgaacgtgagttggggaccatgtggcccactgcgcgctgggtcccgtccctaaagagcattcttggactgtctaaaattccctttgcagaatttggaatgtttagggtgtaaaatacggagcttggagagtccttaggcaaaaggtgttggtggccggttgcccaggctggggactctgtccgcggggcgagagcttgcaggaacgctggagcatcggagttcaaaccctgttgtcactgtggttggttaagggctttgcggagacgtggaggcatggtagatggatcgcaggtgagggcggaatgaaggcaaaggcgtcccttctctgatggcagacacatgggtggagatttgaggtaggagcagttgtgggggggtggggggacaggcgagagtgtgggagggagtgaggtcgcgtgattccccgtgcatctgtgcgtgcaactgtgggtgatggagctggtgcttggggaggcaggactggaccctgggtgccgacactggggcagggtttagagctcccggccctgcgcccctcggtcc

SEQ ID NO: 33748 - DNA, 1543 bp, Artificial sequence
  DNA replication origin
gaacctgggaaatggagcttgcagtgagccaagatcgcaccaccgcactccagcctgggcgacagagtaaggctccgtcaaaaaaaaaaaaaaaaaaaattagctgggtgtggtggcatgcacctgtaatcccagctactcgggaagctgaggcaggagaattgcttgaacccgggaggcagaagttgcagtgagctgagatcatgccactgcactccagcctgggggacagagccaaactccatctcaaaaaaaaaaaaaaagagagaaaagcccaggcgcggtggcctacacctgtaatcctataatcccagcactttgggaggccgaggcgggcggattacctgaggccaccgtggctaccttggcccatccattggtgagaaggggtcacagccggagctcgcagggggcggagctcgcggagggcggggctcgcggggggcggggctcgcgggggcggggctcgagggggcggggctcgagggggcggggctcgcacagggcttgaatcccaggaggagggatcccagtgctcccggtggagtctgcctgccccaggtgtcctgttacatccctcaggggccgacagctgcccagttctgcttagggatccatgcgacacaggcagtttctcgcggaaaatgggtggatcccctgctccaacgagactgaaagcggcaggagcatggatgaacgttgcggtgttgccgttgcacatggctgccacctggccatgttctgggactcatgcttgtaaatccttttacatttcaaagccttagtgatgactcatcagtgggagaacacccggaacagggactggcaaatgattataaacggtcagagaggtggccgggtacagcggctcacatctggaggccgaggcaggaggatcacttgaggccaggagttcaaggccagactggacaacatagtgagaccccaatctctacagagtataaaaaaattaaccgggtgtggtggcatgcctgtagtcctatctactctggaatctaaggcaggaggatcgtttgagcctgcgaggtagaggctgcagtgagctatgatagcaccactgcattccagcctgggtgacagagcaggaccttgtctctaaaaaataaaaaaagattacgtatctattccaggggtcaggaaacaacatcctgtgggccagagccagatctggtctgcagaattattttttcattttattattattactagagactgggtgttgctctgtcacccaggctggagtgcagtggtgtgatcacaggtccttgcagcctcaacctcctggtctcaagcagtcctcccacctcagccttctgagtagctgggatcacagatacgtgccccaccatgcccagctaatttaatttttattttctgtcgacatggggtcttgctatgttgcccaggctggtctcaaactcctggactcaagcgattgtcctgccgcggcctcttaaggagatgggattggccgggcacggtggctcacgcctgtaatcccagcattttgggaggctgaggt

SEQ ID NO: 33749 - DNA, 903 bp, Artificial sequence
  DNA replication origin
ctgcagcctccgcctccgggttcaagcgattctcttgcctcagcctctgagtagctgggactataggcatgcaccaccacacccggcaactttatttttgtattttttagtagagacaaagtttcaccgtgttggccgggctggtcttgatctcctgacctcgtgatcttcctgcctcagcttcccaaagtgttgggattacaggtgtgagccacctcacccggccaaaaaaattgatcttaatgtactaaaatgcacatctaaatagtcacctgtggccagtggctactatattgggtggtgtagttccagggggttgtcaatcagccacaagatgactgacagagggaaatgaatccagtggagaaaaataaggtgggggtggcagctgcagctttaaatagggaggtcaggagatgcctcctggagagaggagatgaaggagcaagtcaggcaaattctgcagggacaagcatttcagacagcgggaacagcatgtgcaaaggccctggggtgggaggacagcagggcaggggttgatgtgactgatttaatatttagcaagggtggtgctggctgccgggttgggaatggatttcagtggggtgggaccagagtaagagaagtgagtggggaacagctataatgacccgggcaaggatgggcgtgagacaggggctgattctgtgtatatttgggggctgacctgaggccaacttggaatttgaggactgtggacctggaatgaggggcctgagatccctgagatggggaatgctgaggggtggagcttgcggaagggagatgaggacctcgggctgggggtgttaagtctgatgcctcttccttgtccaggcagagagtgttaccaggtggggtgtttaccttttgtagtttcagagc

SEQ ID NO: 33750 - DNA, 1173 bp, Artificial sequence
  DNA replication origin
ggaaggaaagggagggagggaaggaaaggaaaggtagggagggaaggggagggagggaaggaaagggagggagggaaggaaaggaaaggtagggagggaagggaaggaaagggagggagggagggaaggaaacggagggagggaaggaaagggagggagggaaggaatggaaggaaaggccagggagggaaggaaagggagggagggaagggaagggagggaggagagggaaggaaagggagggagggagggaaggaaaggtagggagggaaggggagggagggaaggaaagggagggagggaaggggagggagggaaggaaagggagggagggaaggaatggaaggaaaggccagggagggaaggaaagggagggagggaagggaagggagggagggagggaaagggagggaaggaaagggagggagggagggagggagggaaagggagggaaggaaaggaggaaaggaaaaggagggaaggacaaggagggaaggagggggggaaggaaagaaaggaaaaaaatctaggtctgcacacaaagaactgctgggtgaacggctgtgggcatttcatggaaatattgcccgctttccccctttgaatgcttacctggcaggagtcgactttgccttccaggaagcctgcgcagatcatgcggtctgtgagggagaagttgtagagcacactacaggttttctggtctatgatgcccacggacgccttctgcaggagctcgggcttggtggctaccagggaaagagccagaaaggccacgtgcacagtgatcatcagagcagctccagttccgctccgataacagccccgagatgcagcatccccaccccacagacgaagaaaccagggctcacagagttgcaggaatctcacaaagccacagagtgaggaggaggtgggcctgatggcccgctcagagcgcaagagtctccccactgtccccatggggctgccgccctagcacctgggtaaggtgtaggaggccattctgaggtcaagggaagcattaactgttggagtgggaggggtctcgggatagactagcgcaagcaagcaccagtgagcatttgctttttttgttttttgagacagggtcttgctctgttgcccaggctggagtgcagtggcatgatcatggctcactgcggccttgaa

SEQ ID NO: 33751 - DNA, 1613 bp, Artificial sequence
  DNA replication origin
tctctactaaaaaaatacaaaaaattagccaggcgtggtggtgggcgcctgtagtcccaactacgcgggaggctaaggcaggagaatggcatgaagccgggaggcggagcttgcagtgagctgcatgccactgcactccagcctggcaacaagcgaaactccgtctcaaaaaagaaaaagacataacggcctctctggctgggcgcggtggctcatgcctgtaatcccagcactttgggaggccaaggcgggtggatcgccagaggtcaggagttccagaccagcctggccaacatggtgaaaccccatctctacaaaaaaataaataaaaaaagccaggcatggtgacaggtgcctgtaatcccagctacttgggaggctgaggcaggagaatcgcttgaacccaggaggtggaggttgcagtgagccgagatcgtgccattgcactccagcctgggcaacagagtgagactccagctagataatagtaataaaaataaaaagccaggcgtgatggtgcatgcctgtggttccagctactggggaggctgagacaggagaatcatttgagctcaggaagcagaggctgcagtgagccgagatcatgccattatactccagcctgggtgacacagcctgtctctaaaaaaattaaaaaaaaaaaaaaaaatgaaagcagggactttgatggttcacagctgtgccatgtccttgggtgcgtgtttcttgctaacttggcagctgccctcatgtaggtctgtccctgcagcctgggggctctcactttctcagtctcagctgattttgactttttcaatagctatggcgtgggatctctttgggcccaaaagaggtggagaaggcccccctcaaaatacaggcgggttctgtgtggaggtagctggtgttcccaaggacagcggctgcggctgctgtcagattatccaaggccacctggtcttatgtcagggccagacggtgccaaggctggtggggaactggcatttccccttactggccttggtagctgctgcgggttggatggcggttggtggggggtggggggcgggggggacccagggaagccagctgggtggtgatagagggcggcgggggggcttgcccctgaggaggaaaacacgcctctggagacagcaggtgggtatgggaccccctccatgggtggtaacagggtccctgaaaccccctggaaaccacccacgtgttctttccacagctgggttctgaggaaggcctttgcgcttggcaccgtctggggagggcttggaggtgatcagggatccaggcagagggcaccaaggcagggctggggcctctggggcggggccctggtgtgtgcaaaggccttggggtgggagggaactcctggaagacggagatgtgggaggctgccatgagaggggcctccggcaggggaaacgtatggtcccaaaactgaagtcataggaaacaaatgcatttccaatgttatttgagaaaagcccaaagaccaagcagcaggcccagtgtcctttcctgctgagttttcctgggataggtcccccatcacaacctactccctggggctcccagggggattcgtggagaggcgg

SEQ ID NO: 33752 - DNA, 1274 bp, Artificial sequence
  DNA replication origin
tgggtagaagcggcggcaggtctgctcgctgaggaggcgcacggccgccttctgcagctgccgcgccatggagcctgcgggcgggcgagcgagacggggcgggtggggaccgcgtccggccgccccccgagccccgcaccaccgcggccccgggcgcgcctacctccttcgcgcaccgagccccagccggtgatgacgcagcgcgtgccgtccgggggtcgcggcgcgggctcgggcaggcagatgggacgcaccaggcggctgcgacgcaccggccccgccagctccagcagcgccacgtcgtagtcgagcgtgtagagattgtagaacgggtgcttgtagatgcgcgccacgcgctccagctgcccctccgcgccgctcaggaacggcgtgcctaggaaggccgcccactgcttggggtccccgtagctgcggggcgcgcgaggacaggcgtcggcccgagcccccacgcccccggcccccgcccctgtggtgtcccccagcggccggctggcaccctgggcagggttattggcctcttggtctctggctgtcggtctgggaatgggctcagtctcccccatcaggcaccgaggcggcaccgggaactgcagccgtcaccacctaatatgagcgctctgaaaaggggtctagtggccgtgcgagtcccgccccccgcctgccctccccttctgacctccagccctgcagagcccagagctgggtgtcccctctggaaaaccggacccctcgactgccagggcttgggccctggggagggcagctttctactgggtgggctttggggggctggagccaagtcccaggggcgagggctggggaaagaagtgaccccaatgttcccgtgggcttagcctggagctggagggggggggccgcagcttccgggttaggtggggaccgcggggtaggactcggccttcgcagccccagccccgtgtggtcaggctagggggtgggtggtcaggggagggctgcagggagcgaggatggggagatggggggtgggaggagtggcctggggcagtgggagccggggttggggagggcactcccggcaaaggagggggtcagggtgcgttttcgggcaacagttcggttccgggtgagctacagagacatgtaggggcatttggagcgtttggaactcacacgtcgaagcagtgcgccgccgacagcagccacctctctgccaccagcacggccccgcaacggtgttcccggcgccgcagccacaggctcacctgccacgg

SEQ ID NO: 33753 - DNA, 2222 bp, Artificial sequence
  DNA replication origin
tcggccgcacgtagtagcccccctactccccggccaagtcagggcctccctcttcccgcggagtcgcaaccacgggtagctcgtgtaggtaacggcaggtccaggcctccgcatgagcggagggccccccgcgcgaccttgaatggcccgggcgcgcgcggtcgtgtgggagttgtagtcctccgtccccgtccgcgcggactccgtttcccgtggtgccccgggcggcccgcttccggcgcagttagttacgagtcggcgcacgcggcctcggtccggttgactttgcggagccatggagggcggcttcggctccgatttcgggggctccggcagcgggaagctggacccagggctcataatggagcaggtgaaagtgcagatcgccgtggccaacgcgcaggagctgctgcaggtgcggggctggccggggacgggcgctgggggcgacagggccacccctgggggccgacgtcgcggctaaagcctcgcgtgtctccacagaggatgacggacaagtgtttccggaagtgtatagggaaacctgggggctccctggacaactccgagcaggtgagacccgcggaggttcggggcaagggtcgcgagggcctagattcgaggggggaggtgtctgcgcgtgcgcagactaacggggaggtgcgacggagtggtcactgcacgtgcgtagtctgcagcccgggcgtcctggagccggggtcagggcggtccccggggccgcgaagtcccgagctgagccgtgcgcccctccgctcccgcagaagtgcatcgccatgtgcatggaccgctacatggacgcctggaacaccgtgtctcgcgcctacaactcgcggctgcagcgggaacgagccaacatgtgaccggcgagcgcgggccaccccaccctgttcatttccataaacgtgctttgagaggcggggtccgcatgtacgtactgcctgcccggggcttaggagggtggcaccggtgctgggacacacgggactgtgtcctcgccaccccccgccctgccccctgccagccagtgcagcttggatctcgggggtgtggggccctgtgccttcctgaagtgctggcagcccagtggcacctccttcaggcctttggggtattcccctagtgtgcccaagtcagcctcatattctgggcggacagcttgtctggacttcggagttgggggtggtcagacaccacaggagctgtcacctcctgcggatgggcaaataaattggtggaggacggagagaaacctctttatttccctcctgaggggtctctgggaagaggtgacgcgtgtccctggaaccccagctcggagggtctcagcctcccctgggttgggagaagtccatctttccccttagtgccaccgggctgctgagtcacgaggaatgtgttgctgctgccacccctgccccaaaggctaagggggacagccttccccttgtcagggcttgctttgaccctgcttcgttccaccccgggtcctggtggagcaccaggcaggtggtcctcgctgtgacactgaggtgctgagccagtgagctagggtggaggggctgtgtttattggaacaaagggtggtaccaaaatgcatccccatgacccacagcccccccacacccgtccttgggtagggtacggtggggtggggtgttgggtggcctgctgctcctgttgctttcacgtagagtctcggcctgggcagtcacgtggtggtcactcctggatgtgctgtcctatccagcctctcacagctgccacccgggtatagacacctgggaagtggggccggccacagccatagccccagctagtgaccccagttagcacccaccgtccagagggctccctgcaggccaggggtcccccagcgtcaccctgttggggagagaagaaagggggttcagaggccggtacctcccctacagcagcccttgggtcattggcccctctaggagtgaccctagtgacttcccctgggagccgcattttcactatctggaaaatgggctcaatgcaaaggtggcagacatttatggacacccgccacgtggtcccggagtggaacggtgcctcccactgcagcctctgcctgctctgccgccgaggcccggggatgggatgcggtgggttgcccaataaacggctgtggagtggaaattcctccagagccaaaaaggctccctgcttgatccgct

SEQ ID NO: 33754 - DNA, 1196 bp, Artificial sequence
  DNA replication origin
cctcagtccagcttcccaatgcctggcaccccccttcggcaatagctcaccgtttacaccctccctcatagatacacagaagttatttttttaatggatatttatttttttacattggtcagtacacaggtcaggagctcacgccagggccttgaggacaggctgaccctcctccccggggtggcgtggggctggggcaccctccgacggcagagcctccttcagaaagtgcagctcaagtcttaaagacaccaaaactgagccatgggcacgcgccgtctccgggccatggcgttcactgcagggcgggggcggcaccgctcccctgtgactgcatcccgcctccctggggacctgcctgtggcaggaaggaatggggggccccagccccaggccgggaaggagccagcggccgacaaagcagaaacacccgctgctccacgtagcccctgctcgctgtccttgctctcagaagtcccggtcccatgtagatagaggggggcgcatcttaccaaagcatttcctcctggaggctacgccgctgtgctcccagtcaggcggctggtagggagctttgcctgccccggggataccctctgccagccgctggaagtgggaatgctggcgacagactgtgtcctctttcccaccttcatagcaggaatcacccggacccgactggctgggcttcgtgctagcgagggttctgggggtgggtcttggtgatcttgtcctatggggagtctgcagtggtctcagccacatcctatgtattttggctctggaggagcaaagctgtatcctggagttggtctgtgatttgccgacagccttgcaggctgggctcagggacaaagtcccccccaaaacccgcaggtcctcatgtccagacgctgcccagtcctgtcctgaaaacagcacgccccaggcccacagaaccccccaccctacatttgccttgggtggagctgggggtggtcctaggactgcgggtgcccttagctgaagggggtggggagaagcgtggactgggcagcctgtgggtaattggaggttcattgagaattgagtctttggaaacactaagaaaatcaaatttttaaaagttatttatggcctgggaaacaatttgcatttgtccccaaatacgcttagctgtgtgccgcttagaacgatgcgaaaccatccctctgtgt

SEQ ID NO: 33755 - DNA, 992 bp, Artificial sequence
  DNA replication origin
gaaagaggacacagtctgtcgccagcattcccacttccagcggctggcagagggtatccccggggcaggcaaagctccctaccagccgcctgactgggagcacagcggcgtagcctccaggaggaaatgctttggtaagatgcgcccccctctatctacatgggaccgggacttctgagagcaaggacagcgagcaggggctacgtggagcagcgggtgtttctgctttgtcggccgctggctccttcccggcctggggctggggccccccattccttcctgccacaggcaggtccccagggaggcgggatgcagtcacaggggagcggtgccgcccccgccctgcagtgaacgccatggcccggagacggcgcgtgcccatggctcagttttggtgtctttaagacttgagctgcactttctgaaggaggctctgccgtcggagggtgccccagccccacgccaccccggggaggagggtcagcctgtcctcaaggccctggcgtgagctcctgacctgtgtactgaccaatgtaaaaaaataaatatccattaaaaaaataacttctgtgtatctatgagggagggtgtaaacggtgagctattgccgaaggggggtgccaggcattgggaagctggactgaggggcttgggtgcgtcgtgataggagtcaggtggccttggcctgtctgagaaacatggtttcagcgagaaaatcacagataaaagcacagtatggatagacgcatgtgtatatataggcacagggcagacggagctggaacacgggaggggctccacagcgctctcctccagagggtcaacatggtggcgttccctgcagacagctgttctgaaactcacagcttctgcctccaaggcaaccagatgtgtcccctccacatctcccctccctgcttattgttgtgacaggtcttacgacgggactgtcctcattcttccttccccaggtcttcccctcccctgccctg

SEQ ID NO: 33756 - DNA, 4577 bp, Artificial sequence
  DNA replication origin
gtggcggtgtcagagcctcgctccttttcgtggctgagtcacgttctagcgcgtggacggcccctgggtcgcctctcacctgcacgtgtatcggtttgtaacttgtgcacaaggaaccaggaattgcctggaggttcctcttggcacatttttgagccctcccttgggcctggtgcttggggcccaggcgggaccagagggtcacgaagccttggtccgcaggaggtgcgggagacgcggcggcggcacgagcggcgcctggtggaggtggacagcagccggcagcaggagtacgacttcaagatggcacaggcgctggaggagctgcggagccagcacgacgagcaagtgcggctctacaagctggagctggagcagacctaccaggccaaggtgtggccggcaggcgggtgggcgggggcggccggtgggaaccccgccccgccccgcgcccgcactcacccgcccgtctccccacagctggacagcgccaagctgagctctgaccagaacgacaaggcggccagtgcggctcgcgaggagctgaaggaggcccgcatgcgcctggagtccctcagctaccagctctccggcctccagaagcaggtgatgagcacagcgccaccgtctgccgtccccctggcccaacttctgggccctgccctggatgtgcggggcgtggggctctggcctcttggcatcggatgcagccctcggggcgcccagcgatgccccttccctcccctcccgtgcgccccatgcccaggcctggtctctgccccagtctgtggtgagggcccatctcccgcagtcccaggatcacctgggccttgtgacccatgggctgccctgaccttcgccacccgccccctccgcaggccagtgccgctgaagatcgcattcgggagctggaggaggccatggccggggagcgggacaagttccggaagatgctggacgccaaggagcaggagatgacggagatgcgggacgtgatgcagcagcagctggccgagtaccaggagctgctggacgtgaagctggccctggacatggagatcaacgcctaccggaagctcctggagggcgaggaggagaggtgcggcaggccaggaggcttgggagcacagagtgaggaggaggggcagggcaggaggagaggcgggacggggctgcggggagtgctgggcaggggtggaggtggggccgggccgtggccgccactctgcgtgccctgggctgtctggggctcccactaccagtcccaccttccttgccttccccacaggctgaagctgtcccccagcccatcctcgcgcgtcaccgtctcacgagccacctcgagcagcagcggcagcttgtccgccaccgggcgcctgggccgcagtaagcggaagcggctggaggtggaggagcccttgggcagcggcccaagcgtcctgggcacgggcacgggtggcagcggtggcttccacctggcccagcaggcctcggcctcgggtagcgtcagcatcgaggagatcgacctggagggcaagtttgtgcagctcaagaacaactcggacaaggtgaccggaaagaccggggcatgggggtaacggggtgacccagctgatgggggtgaccagggtcagggtgacggggctgccggccaatgcgaggcaggggacaaggtgaccggaatgaccggggcatgggggtaacggggtgacccagctgatgggggtgatcagggtcagggtgacggggccgccggccaatacgaggcaggggacaaggtgaccggaatgaccggggcatgggggtaacggggtgacccagctgatgggggtgaccagggtcagggtgacggggccgtcggccaatgcgaggcaggggacaaggtgaccggaatgaccggggcatgggggtaacggggtgacccagctgatgggggtgaccagggtcagggtgacggggctgtcggccaatgcgaggcaggggacaaggtgaccggaatgactggggcatgggggtaacggggtgacccagctgatgggggtgatcagggtcagggtgacggggccgccggccaatacgaggcaggggacaaggtgaccggaatgaccggggcatgggggtaacggggtgacccagctgatgggggtgatcagggtcagggtgacggggccgccggccaatacgaggcaggggacaaggtgaccggaaagaccggggcatgggggtaacggggtgacccagctgatgggggtgaccaggatcagggtgacggggccgccggccaatgcgaggcaggggacaaggtgactggaatgaccggggcatgggggtaacggggtgacccagctgatgggggtgatcagggtcagggtgacggggccgccggccaatgcgaggcaggggacaaggtgaccggaaagaccggggcatgggggtaacggggtgacccagctgatggggtgaccagggtcagggtgacggggccgccggccaatgcgaggcaggggacaaggtgaccggaaagaccggggcatgggggtaacggggtgacccagctgatggggtgaccagggtcagggtgacggggctgccggccaatgcgaggcaggggacaagatgactggaaagaccggggcacaggggtaatggagtgacctagctgatgggggtgaccagggtcagggtgacagggccgccggtcaggacgaggcaggggacaaggtgactggaatgaccagggcatgggggtaatggggtgacctagctggtgggggtgaccagggtcagggtgatggggccaccagccagggcgatgggggcggtgtcacagtcctggtggctgagggtcaggtgtgtgccgtgtcttccaggatcagtctctggggaactggagaatcaagaggcaggtcttggagggggaggagatcgcctacaagttcacgcccaagtacatcctgcgcgccggccagatggtcacggtaggtggtggggcaggagggcgagggtggccacggatggggtgtgaggtggggtcaggggactggaggcacaggacttggcgggggtgggtggggatgatggtggcaccaggcaccgtctcagagcggctgccgcagtcatagaacctccatgtgctggtgtcaccccactgggcctccctggagcctgagtggtgtgccctgggtctgagtccaggctgctggggctggcaggcgtccccgtgaagtgttaacagtcaggcgcatgggccatggagcctggtgggtgtcagatcccagttcagcccctgcttgccaagagcccttggcctctgtgaaccctggtctcttcttgtgtatcctggggaccatcaccctggataagcctgcgtcgggctggaaggactgaacgcccagggcattgaagggggctttgtggtaggggccactggctggcccacgtccctggaaccagaggtgaccctgatggggccattgttattgggtcctcaggtgtgggcagctggtgcgggggtggcccacagccccccctcgacgctggtgtggaagggccagagcagctggggcacgggcgagagcttccgcaccgtcctggttaacgcggatggcgaggtgggtgtgtgtggcttggggggtgctcggctggagtcctgggcagggtctgggcaccctcggggccgccacagcagctctgggcccgatcccgggacatgccgccgtgtcctgtcccgcacaggaagtggccatgaggactgtgaagaagtcctcggtgatgcgtgagaatgagaatggggaggaagaggaggaggaagccgagtttggcgaggaggatcttttccaccaacaggtaggacccctgtgcccacttgcggctggggggcagcctctggggcagagtgagctcgtgcacacacatacacatgcgtgctggccgcatccccgacgggagctccatctggctgccgtggctcagggtgaagccagccttggctgttaccagcacggcagagacctgttcttgcctcctgggtcgtgcccatcgtgtgaatttgcgacatcacagacctcagggtagctggccagggggtcccctgagaggtgggtgttgaacagctccccaaatgctctctggtcaaccggcttcctcagtcgaagacacaggtcccttcaatactggcttctggggagaagatgagtgcagaaaccacagctgcattaaacgcgtgcgtcgcaagttcctgtgactgttttggaacccagaacagaatgtgtagctcacaggcgggctcatggggacatggaagtggaatggaaggctctagaaatagacactgttgttgctcagcccctccctggtggggaggtgggggcagccatctacctgccggctgcctccaggctggccctgatcatggccgaccttccttccttccttcctgcagggggacccgaggaccacctcaagaggctgctacgtgatgtgaacccacactcctcatccacacacctttctttacccagagccactgaaaactatttttatatcattggctttctttagttcttgatacatttcta

SEQ ID NO: 33757 - DNA, 1454 bp, Artificial sequence
  DNA replication origin
cagggcccagaagttgggccagggggacggcagacggtggcgctgtgctcatcacctgcttctggaggccggagagctggtagctgagggactccaggcgcatgcgggcctccttcagctcctcgcgagccgcactggccgccttgtcgttctggtcagagctcagcttggcgctgtccagctgtggggagacgggcgggtgagtgcgggcgcggggcggggcggggttcccaccggccgcccccgcccacccgcctgccggccacaccttggcctggtaggtctgctccagctccagcttgtagagccgcacttgctcgtcgtgctggctccgcagctcctccagcgcctgtgccatcttgaagtcgtactcctgctgccggctgctgtccacctccaccaggcgccgctcgtgccgccgccgcgtctcccgcacctcctgcggaccaaggcttcgtgaccctctggtcccgcctgggccccaagcaccaggcccaagggagggctcaaaaatgtgccaagaggaacctccaggcaattcctggttccttgtgcacaagttacaaaccgatacacgtgcaggtgagaggcgacccaggggccgtccacgcgctagaacgtgactcagccacgaaaaggagcgaggctctgacaccgccacagcatggatgcaccttgaggacgtcacactcaatgagagacgccagacacaaaaggccacacggtgcgtgatcccatttccatgaaatgtcctgaaatgtccaggacaggcccatccacagagacagggaggggatgcgtgggggccagggctggggactgctgatggggagggggttctttttgggtgatggaatgttctagaattagaggtggtggttgcacaaccctgtggagatcctgccaatgctgaactgtacactttaaaaaggtggacttaaaatagccaggtgtggtggcgggcacctgtggtcccagctactcaggaggctgagacaagagaatcgcttgaccttgggaggttgcagtgagccaggatcgcaccattgcactccaacctgggtaacaaagtgagactgcgtctcaaaaaaaaaaaaagtgactctctcttataaaagccattattgaagaaagcgggccaggcgtggtggctcatgcctgtaatcccagcactttgggaggctgaggcaggcagatcacgaggtcaggagttcgagaccagcctagccaacatggtgaaaccccatctctattaaaaatacaaaaattaggccgggcacagtggctcaagcctgtaatcccagcactttgggaggctaagacaggtggatcatgaggtcagaagttcaagaccagcctgacaaacatggtgaaaaccccgtctgtactaaaaatacaaaaattagtcgggttggtggcacccgcctataatcccagctactcaggaggctgag

SEQ ID NO: 33758 - DNA, 1749 bp, Artificial sequence
  DNA replication origin
agcctgcttcagacagcttaagtttacaaacaaggctgacccttcaaaggccagggtctttgtaacatttacagaggatgcattaatttctccccaaatggtcgtcctgggtccagaacaggcaggagaggctgggaaagcccatgcctccagggtggtcccaagcgctggtgcctgtcacttgctggactcctgacagtgcagggcagatgatgagggcacgtgtgcctttgcctgggcgcgtggggccgcgtcgtctgcaggacgggaaggtctggggctcggaggcctcggtgaccttgtctttgggcttgcctgacgccccctgaggtgctccctgtggccccatggaccttgcccctccccactcacttgccctcttgactttcagcgccaagaagagggagggcgagcttacggtggcccagggccgtgtgaaggacctggagtccctgttccaccggagcgaggtggagctggcagctgccctcagcgacaagcgcggcctggagagtgacgtggctgagctgcgggcccagctggccaaggtaggtgccaggagccacgggacgccccagcagggtatatgcaacagacagattgtcacaccagctcgctgtcctgtgtctcccaggccgaggacggtcatgcagtggccaaaaagcagctggagaaggagacgctgatgcgtgtggacctggagaaccgctgccagagcctgcaggaggagctggacttccggaagagtgtgttcgaggaggtgagtgagtggcctggcctccagcctggcacagcggaaacgcaaagtccaccctcatggctgtggagggcggaagcctgagggcaccgtgtggccggggtccctcccacggctctagggaggctccttcctgcctcttagggtgcccttggcttcggctgcgtctccccagtgtctgcctctgtcttcccgcggctgcctcccctgtgtccatactctgtgtatcctacaaggacacttgtcattggatttggggcctgcctggatcatccagagtgacctaatggcatctgcagagaccccatttccaaataaggtccattcacagctgctggggatcgggatgtgggcacgtctttttttgagatggagtttcactctgtcacccatgctggagtgcggtggcacgatcttggctcactgcaacctccgcctcccaggttcaagcaattctcctgcctcagcctcccgagtagctggattataggcgtgcaccaccatgcccaggtaatttatgtatttttagtagagacgaggtttcaccacgttggccaggctggtctcgaactcctgacctcaggtgcttcatccgcctcggcctcccaaactgctgggattccaggcgtgagtcaccatgcccagccaaaacatatctcttcagtgtcaaggaaggtctattttgatttcttgcctttctaaaagcttggtgttcccaccctgagagctgaaccctggccgcctgggatcctaactgctagaccatgaggcaggcgtcaggtgcatcttctgggtgccaccgtccagcctcccacagggcctccttgtccaaagcgagggtgaggcccgctctccccacccagcctccttccctgacctgcagcccctcacctggggcctctgcctccgggggctcggagaggggagtggggaggaaaggcgtcagcctgtgtcctttagaaccaattgtgctgtcacagtgcagggtggaa

SEQ ID NO: 33759 - DNA, 1102 bp, Artificial sequence
  DNA replication origin
cccgccagggcagggcggccagccgctctggcgctggacctggtgtagccagggctctccacacactagaggtgtggcatctgcttgcttttgagaggcgtgaaggccagagacttcggccacaaggctgatgcacccctgtccgcagccctcagggacactaagctctacttccccacatggagcagatctccagcagggtctggggtgcagatcccgcatctctgagcacatgccacacaggccaggccctttcgctcagagggctgcgagccctgcggccctgctggggatttttgcaggggtttgggggaaggtggaatctgttgggcaaatcccgagtgcccgctgtgtggaaggcaccgctctcacaccagaggtgcatctagaacccttgccttacactgcgggacgtccttgcggagggaggcatcagcgacacaggctgcctaccagacaggaggttgcctgggggcagggctggagtggggctgggagacaaccctgggggcagagacctgaaggagcagtgctggaggagccagggccaccgctgctgaaagagccttccaggcaggcgagcagcagtgcaaaggcccaggggtgaggtggaagaggcaggctgcagaccagctcagaggactggagcggagatcggggaatccgggaagctcctcagcaactcggtctaaaccacagggttccgcaggactgcagggcacacccagaaggcagggtgcgggctcccagggctcagacccgtttcctaagcgccaggtgctgagttagaatcttcagctgggtgcccggggttttgtggcaggctctggcttgttaggtcctgcacgctgctcccagtgtttctctcattgtggggttttggagataaatttgttaggataagaaaaacattaggcttggcccagtggctcatacctatacccagtgctttgggaggctgaggtgggaggatcactttagcctgggagttgaagaccagcttgagcaacatagcgagacctcatctctacaaataataaaaaaattaggccaggcatggtggtttacatctgtaatcccagcactctgggaggccaaggcg

SEQ ID NO: 33760 - DNA, 2586 bp, Artificial sequence
  DNA replication origin
gtgtggcgttttgtgtctggcgtctcatgagtgtgacatcctcaaggggcatccacactgtggtgtcagaaccttgctccgttacacagctgggtcatgttcctgtgtgtggatggtggagggaccgcattgcttttatttttttatttatttttatttttcattttatttatttatttatttattttgaaactgagtctcgctctgtctcccaggctggagggcagtggtgcgatctcggctcactgcaagttccacctcccgggttcatgccattctcctgcctcagcctcccaagtagctgggaccacaggcgcccaccaccacgcctggctaattttttgtatgtttttttagtagagacggggtttcactgtgttagccaggatggtctcgatctcctgaccttgtgatccgcccgcctcggcttcccaaagtgctgggattacaggtgtgagccactgcgcccggcaccatgtgtagttttcaaacatgcatggatgtgaatttcatgtcttctgggtccacacccaggagtggagttaccgggtcacagggtggctctgtgactcttgggggagcccctggactgttttctgtagagctgtctcagctcaggttcctgccgctgcctgtgaggttccgatttctctgcgtactcgcccgcacctgcgactgtctgtcttcttgacggacgccctggctggtgcgaagtggcatctcactgcggtttgcttccacatatttttaaactcactgagtgcatggccctgtgggaggaggggaggcaggaaggccactagaagcctgagctgtgcccccagctggcgcgtgcagaggccgggcaggtggcggctgtggttgcagcaggattagtaggaagtgaagaggtcgccttccctggcaccgcatgtgcctcgagttcacctggaggccctcgagaggggcgggtttgggggctttgcgcggggcttagggaggggctttctttagctgggcggcccagagggtgttccagtcgcttctgcctgccctggtgacccctggctctccagcccctccccatgtccttgctggctgggctgggtctccgtcgggaaaggtgggggccgctggtggggtggggagctggagactctgactacagatccctgtgatcgaggggtgaaaggtgggggtgactggtggggggggcagctggggactgactacagatccctgtgatcgaggggtgaaaggtgggggcggctggtggggtggggagttggggactctgactacagatccctgtgattgaggggtgaaaggtgggggcagctggtggggtggggagttggggactctgactacagatccctgtgatcgacgggtgaaaggtgggggcggctggttggggggggcagctggggactgactacagatccctgtgatcgaggggtgaaaggtgggggcggctggtggggtggggagttggggactctgactacagatcgctgtgatcgaggggtgaaaggtgggggccgctggtggggtggggagctggggactctgactgcagatccctgtgatcgaggggtgaaacgtgggggccgctggtggggtggggagctggggactctgactgcagatccctgtgatcgaggggtgaaaggtgggggccgctggtggggtagggagctggggactctgactgcagatccctgtgatcgaggggtgaaaggtgggggccgctggtggggtggggagttggggactctgactacagatccctgtgatcgaggggtgaaaggtgggggccgctggtggggtggggagctggggactctgactgcagatctctgtgattgaggggtgggagcttctgtcctggagcctccgagccaccacattggcagctggcctgtcggggggacacagcatgggaaggccagatgctcctccctccatcccagggaacagcccagcctgagcctgggccatgtgcctgcgtgtgaggtaggggcacagaggggcacgggctggcccccggttggcagaagtgggggatcttgggctcagcggggtctgggggagcgggggctccaggttgcagaggcctggggggagtctcaggggcccagaggggtctgggaggggactccaggttgcaaaggctggtgggggcagggggctctcaggcccagtggggtctgggagggccccgggttgctgtcatcaccagttgtccgagagtgatcagcccagtgtccatggtgcccagcgggagagatccttgattaaacatcccaccagttttctggttctgaaaccgagagtgtgaaaaatgcatctaatggccaggcatcgtgtcgctatgacagcggccaaggggctgcatgtccaggtgtggctggtcctccggggaaggggacaggctccatccagctgctgtgctggtccaggcccagggcctttggtctccagcactgggcgccgctgttctgggagctggagctcgtggagagacgatcattccagagggggccgcagcagaggaggaggctcctgggatggctgggacccagggtcgcctggcttcctcctggt

SEQ ID NO: 33761 - DNA, 1315 bp, Artificial sequence
  DNA replication origin
ctccatcttgccatctgtccagtgcggagttgtcccaacttagaggccgcctgctggacccgtggcgtgcagggttagagctggtttcttgtctttgggcctctgttatcccacctgccaatgggacgaacagctgcagggagctttgagggtgcagggcctggtgagtgctggggaggtaccagccccagccccactggacgccccattggaccggccctgtgccctagagggagcctggcccagccacctctcggggccgcagcagcatcctttacaactcagttcactcaggctgggtgaaatgcgggtctgactccagtgaaggcagccatttagcaggtgacacactggcccctccgtgagccctgtcacccagccgtgtctgcagggcatgtggcaggggacagctgggagttccgcctgcgactagtgggccaggaacccggctagtggggagcagagttggaagcctgctggggtgggggccgctggtggggggacgtcatgtgggcccacatggagggagtgacctggaatagctgggggccttctagacacaggtgggccacgtggggttcagagagcagcctcaggctcaggctggcaggatgggggcaggggagggagctctgaacgaggagggacctggggtgtcaggcctaagagcatgcaggtcacctggacagcagggcctctctcacctggccagcttctgcccccaggggactcttggccaaggctgggcatgcccttggttgtcacattgggagggagacggcatcggcacagcgtgggtggaggctgggtactgctcagcgccccgagaagagaatcacctggcccccacgaggatgacgcagccctcacgaggatgacccagccccatgaggatgacccagcccccacgaggatgacccagcccccacgaggatgacccagcccccattaggatgacccagcccccattaggatgacccatcccccattaggatgacccagcccccatgaggatgacgcagcccccatgaggatgacccatcccccacgaggatgacgcagcctccatgagggtaacacggcccccatgagaatggccaggccgaggagcctgctgggaggcgtgagggactcagttcagattttttcaggctcataacacgactcacagcatcctggtgtgtggcggcccccgaggtcctcacacacgcctttctcacttcttttttgagatagagtctcactctgtcgcccaggctggagtgcagtggtgtgatctcggctgactgcaacctctgcctcccaggttcaagca

SEQ ID NO: 33762 - DNA, 2626 bp, Artificial sequence
  DNA replication origin
agtcccaggctgccccgccgcggcgggcggcgggcgcggcgcggcgcggcgccatcttgcagccggcggcgcggattgaatgagcccgccgagcccgggccgccgtcgggagcagcgcaggccgcgagccgccgccaccatggccacgccgctgcccggccgcgcgggcgggcccgccacgccgctgtcgcccacgcgcctgtcgcggctgcaggagaaggaggagctgcgcgagctcaacgaccgcctggcgcactacatcgaccgcgtccgcgcgctggagctggagaacgaccggctcctgctcaagatctcagagaaggaggaggtgaccacgcgcgaggtgggcgccggggcttaggggccgggcgggggtgcagccggcaggccccgcccaccgcggggcgcgcgatcgcggggaccctgggcgggggtgcagacggggacgggccccggcttcgggggtttccgcggggtttcggggggcccctgagtgaggggtgcagctcggccaggtccctcccaccgcggggtgggcaatcgctgggaccctgggtgcagacagggacgggcccgggtctcgagggtctccagggggtttcgaggggcccctgagtgagcggtgcagttcggccaggccccgcccaccgcggggtgcgtgatcgcggggaccctgggcgggggtgcagacggggacaggctccggctcgggggtctccaggaggtttgggggcttctgagtgaggggtgctgctcggctaggcccagcccactgcggggctcccagtcgcggggaaccctgagctgggatgcagacggggacagtccggcctcggggatctccgccgcgtttcggagagtccctgagtgaaaggtgctactcggccaggccccgcccaccacggggcgcgcgatcgcgggggactctgaacgactcccggcttggggtctccagggggtttgcggggggctcctggatgaagggtgcaggtcctggccaccgcggggtgcgcgatcgcggggaccctgggcaggggtgcagaccgggaagggtcccggcttgggggtctccagggggtttcaaggggtccctgagtgaggggtgcagctcggccaggcccagcccaccgcggagtacgcgatcacgggggaccctgagcaggggtggggtcagcctggcctcggggatctccagggggagaccctgagtgaggggtgccacctgggcaggccctgcccaccgcagtttccgagatcttgggggaccccttgggaggggtgcagaccggagtggcccattctcttggggacctccagggggtttctagggcactgagtgaaaagtgcagaccaggaatgccccacctatggagggggtcccaggagatcttccgtgtcctgagtgagggctgcagaggggcctccagctagctctggggacccttccgtgagaggtgcattttggggccatgggggttacagactagggctccccaccaaagagaggtcctggggatttgggggctccctgagtattgggctgcagccccccatatgcctcgtccctcagaggattccaaggagacttggcggaccccccccaactgagggggtgtgagtgggagtctctggggatgaagctgggtattggggtatctggggtggaatgggggtggtctctgggctccaaggagactggggggcccaggccctctgaggaggcccaagatggggtgtgtggggggtctccctggagtctctggggtgagtcacgtggtctcagttctccctggagctttagcgagttccctgatgaatccagaagagattggtgactggggtgggaattaggcccctcatctctcaccaggcccagggtgggtagggggccgagggagaggttctgataccttggggtcccacgggaaatttgggagtcccttatttgtgccctggtgtcagcggtggtctggcaggttctgcccccaagagaatatgaaggaagggtgagagttgggatcttgggtccggtggaaagtgttgaggttctgaatgggccccgaggcttcagtgcagactgaaggagaagaggcgggaaagtctgcccaccaaggggacatgaggtcggggtgtcttggggtctgggtgcaatctgtcctgccccccaacctaaccctggggaggctctttgtccctcccactggccatgcccaatccaaggacaggactccagaacggggggcaggcaggagcacccacttgattcctgccatgggttggggtcctggggtccctaggccccagtgtcctgttgggagagctgggtgccgaagtcgggatttgcagcgcccagtccccactcgcccatctggagatcagaggacgtggtgggcttctgggagaagagctgcttgttgagggggtcgggtcatttctgggagccacttaccctctgtgtgaccttgggctagtcgcttaccctctctgggtctcagtgccctcgcctttggaatgggtgtaattataatacccacctcttacttgtgtgtggggccacagcaggttaacttttgttcagtagctccctgtgggttgttttcacagtgccctggggacagggaacctg

SEQ ID NO: 33763 - DNA, 1306 bp, Artificial sequence
  DNA replication origin
cacccccgcccggcccctaagccccggcgcccacctcgcgcgtggtcacctcctccttctctgagatcttgagcaggagccggtcgttctccagctccagcgcgcggacgcggtcgatgtagtgcgccaggcggtcgttgagctcgcgcagctcctccttctcctgcagccgcgacaggcgcgtgggcgacagcggcgtggcgggcccgcccgcgcggccgggcagcggcgtggccatggtggcggcggctcgcggcctgcgctgctcccgacggcggcccgggctcggcgggctcattcaatccgcgccgccggctgcaagatggcgccgcgccgcgccgcgcccgccgcccgccgcggcggggcagcctgggactggtagtccgaccgccgggcgcgcgcggggcacgccggaagttgaagtctccgtccagctctcgcttcgcagaggcgctgactccagagacagacttcctggctgcaaactcccagctccgccacgaggaaacagcgttgggttgctttctagtacctgtttccccacttagagaacctcaaaacgtgttcaaagaaccagacacaaaaggccatatagggccgggcgtggtggctcacgcctgtaatcccagcactttgggaggccaaggccggtggatcacttgagaaaagaatttcgagatcagcctggaccacatagggagacccccccacaccatctctactacggaggcgcgcgccggtaatcccagctacttgggaggctgaggcaggagaatctcttgaacttgggacgtggaggttgcagtaagccaagatcgcggcactgcactccagcctgggcaacaatgagaaactttgtctcaaaaaaaaaaaaaaaaaaaaaaaaaagccatatagtgtacaatgccactgatataaaatgtccagaagaggctgtcaaggagtatgaatttcaacaaattgagtttaatgatctcattggctcttattagcaattcatgaattggatagcattcaatctattaaataggcactccaatgagctgagcagagaggatgggcattctgcattacaggcagaaaaggctgaagaaaggagaaataagaattaaaataaaagccaggccaggtacagtggtttgctcacgcctgtaatgccagcactttgggaggcggaggtgggaggatagcctgagcccaggagtttgagactggcctgggcaacatagcaagaccccatttctaaaaataaaaataaaaaaattagccaggtgcagtggctcacacctgtattcccagcacttta

SEQ ID NO: 33764 - DNA, 1275 bp, Artificial sequence
  DNA replication origin
ggagggctggggtagattcgagaccccggtttgcagagcgcaagactgaggcccagggccgcgcagtcaggcaggaaacggcgctcctggcggatggaacagcacgggcaaaggctgggtatgggggtatgtggggatggaagtgcccagaggggcagcgcgatggggttgggggcgggaccccgcagggcctccagtaaggggctagttgggggatctggtcagccagtggccaaggccggtggtcagtgagaagttgatgcggagcgggggggcggtttcagatcagtctgagggtggagaataggaaaagtgacccggccgggcgtggtggctcataccagtaatcccagcactttgggaggccgaggctggcagatcacctgagatcaggagttcgagaccagcctggtccaacatggtgaaaccccgtctctactaaaaacacaaaaattagccgggcgttgtggcacatgcctgtagtcccagctactcaggaggctcaggcaggagaatcacaagaacccaggaggcggaggttgcagagagctgagatcgtgcacttcagcctgggctacagagcaagactctgtctcaaaaaaaaaaaaaagtgaccccatttcccacccaaacctcaatcatccttctcccctctggccccgcctcctgtagtattatttatttcccattgtgctttaccatctgtctttatattttatattcctccctttatgaggaaggaaaacagtatcagtcctctaaatacgcagtcactgcttagctccctcttgcctggctggtttatttgttgtttgttttgagaaagagtcttgcagctgggcacggtgtctcacgcctgtaatcccagcactttgcagggccgaggtgggcggatcatttgaggtcaggagttcaagaccagcctggccaacatggtgaaaccccgtctctagcaaaaattagctgggccgtagtggcgcacgcctgtaatcccagctactcgggaggctgaggcaggagaatcacttgaccctgggaggtggaggttgtagtaagccgagatcaagccactgcactgcaatctgggtgacagggtgagaccctgtcccccctgccaaaaaaaaaaaaaaagagagagagagtcttgcgctgtcatccaggctggagtgaaatggtgcaatcatagctcactgcagcctccacctcctgggcttaagccatctccttgactcggcctcccaagtagctggggatacagatgcacgccaccacgac

SEQ ID NO: 33765 - DNA, 803 bp, Artificial sequence
  DNA replication origin
cgcccctggtgcggattccccgaccggtccctaaccttcctgtgcctcagttttccataatggaaatgggcccggagccccctggcgcgtgtggtgccttgggaggcccctcggaatggacggggcagctttgcgggatgccccagacctcgggctctgggcgcagctgccagcagcagcctgggcgtgggtgcccccggggggaccacggtctcagctgtcaccgcccctcccgttcggcgccaaaatttgaaaattgcccagcgcctcccaaactgcgcgctgggagggggaaagccccgggccccacccacgggaagcgcggggctttctgggacttggagtccagtccctgggggtcccgcggggatggctctgggcacccgaagcccctccccagcgccgagacaggagggctggggtagattcgagaccccggtttgcagagcgcaagactgaggcccagggccgcgcagtcaggcaggaaacggcgctcctggcggatggaacagcacgggcaaaggctgggtatgggggtatgtggggatggaagtgcccagaggggcagcgcgatggggttgggggcgggaccccgcagggcctccagtaaggggctagttgggggatctggtcagccagtggccaaggccggtggtcagtgagaagttgatgcggagcgggggggcggtttcagatcagtctgagggtggagaataggaaaagtgacccggccgggcgtggtggctcataccagtaatcccagcactttgggaggccgaggctggcagatcacctgagatcag

SEQ ID NO: 33766 - DNA, 1031 bp, Artificial sequence
  DNA replication origin
ggctgggtgcagtggctcatgcctgtgatcccagcactttggaaggccaaggagggcagatcacttgaggtcaggagttcgagactagcccggacaacatggcgaaaccccgtctctactaaaaatacaaaaagttggccaggcgtggtggcagatgcctgtaatcccagctactcaggaggccgagtcaggagactcacttgagcctgggaggtagacattgcagtgagccgagatcatgccactgcaccccacctggacaacagagcaggactctgtctcaaaaaaaaaaaacggtaaaaagtcaggttcaaggggctctgggggcagaggtcccaggcagcaggcacagtgtttgaaaaggccctgacgcaggacctcacctgttgcatttgaggaatcccaaggaggccctgggggtggaacagagtaagcaagagggagagccgggaagatgagctcacagagacgggctttgggggctgcggggaggggtctgcgtgtcactccggatgtagccaggaagtgattggcagcggctgggctctgacatcatgtttttctgcaaagatgaacaaaacgagcaagacatgactcctgtccccaaggagaggtttcgggatggagctgagtcatcatttgaacttgcagacatttgtaagacaggcctggggtgggaggaggtgggatcaccacgccaggtggcagcggaggctacggcgaaggctgaggcacatttgggaaattctgaggacagtggcaggggaggggcagggaaactgtgcacagcaagaggctggcaggtctgggactatgcctcgcagagagagggagaaggagaggctctgtctgaggtcacgtttgcctggttcaaatcccacctgcagccgtcatcagctgtgtgtccttgggttggtggcttagcctccctgaaactccctcttttcatgggaaaagtcaggttgtggaaatgtttacccaaaacaaggacctagaatgggcttggcatagaaagtgctccgtacacctcc

SEQ ID NO: 33767 - DNA, 1146 bp, Artificial sequence
  DNA replication origin
tattgtattttttgtttgtggcagcaactcaacagattctgctgctgggaagggcctcagcgttcctgaagagagatgtaggggacccactggttgttgccccggctttcttcgcagtagctggccacctccaccaagccgtggctcttccaggcgtccgtgtgagggttctgtaggagggaaaagaaggggtttagtggagcctccctctcccggggcccctgtgtggggaaaacagtcaggctcaaaatagcttcctgggtgaggaggccccagcccggctgcccacgggacatgccaaacgtggctgagcgctgagctgtgcaggaccagtcagcccgactttgttgacaaacaccggcccaggtgcccgggcgtggcggggcagggcagaggcccgactcaccgtgaccaggagacaatgcaggtctcgggcctcggtggtgccctgggtctcggccggctctcccaggagctgcgccaggcgctgcatgcccgacacccgcacgatgttgatgtcgttgtcacagcagaaggactggatgagcgtgaagtggatttgcagggcgatgtcatcctcctcctcctcgtcaatggccaagaggcagaggaccacgctgtctgggtccctgagggggccaaagggtagggatgggtcagccggggacaggggaggggccaccgtgcagggggagtttgcaaaaaaggagcgtgcaagagcaaaagagaaactgcaagggtgcaggggattgcctctgcaagctggtgacggtggggggaggggagggcacacggttcaaagtatggggtagggggagacaggcccacggcgggaggggtgtttgcagacgatacatcaggatacggcagcccccgatccacaaaacggcagagaagctctgcatccacagcggggggcacttggggaagtcccagctccatgcaagacaagcgtgcggaaagcgtccagagcggaggggaggtcccgtcccacccgcgcccagcccgggaagggggtctgactcacacattcatcaacttggccgactcgtacacccccactgtgaggcgatcctggcgctgagcggccaccaaaagctcctccaccgcggcggtcaccgtctgcatcctgagaccaggaaagag

SEQ ID NO: 33768 - DNA, 1783 bp, Artificial sequence
  DNA replication origin
tttttatttccgcaaactaaaatcaacaagcagaaaaataccccaggaagtcggcctccgggccagccgggcttggcgcagtgctgcgttttgcctgtaaaccgaaactgcgagccctggccagccacctcctacttctcccaaagttgcaggcgcggtggtgactccccctgccccgggctgggagcgtggcccagcccttccgtgcccggcctcagtcttcccgccccgggtctgcagagtgggcccgccctggccaggcgccgggacgacctcggttcccctctgccctgcagcccccaagcctgggaactaggggggagtggggagggggtggggtggtcctgcccgcaggccgcgacctttccacggagcctcacgtgggcgcatgaggaaaaccccagcggctccctaggagtcacggggatcgggggagccccgacgggggagggagagagagaaggagggggaagtcccagagggagaagcggggaggggagaggatcccgcctggggctaggaggaggggagaactgaagtggggagaggggagcccaagaaggggaaggggaatcccccacagccctgaaccaacagggaaaccccgggaggggggtagacaggtaggagtcccgaaggggttgggggaggggagaatggaggcgaagaggcgggagccccgagggggtagggggtgatggagtggggatccctgagatggagcccaagaggggagggcacctgggaagagtgacagagggcgaggggctcttgagggattggggtgcgggagaacatgtggggccaaaacccaagggggctccaggtggggaaggaccaggtggggcaagggtgcgcctagcggcggcctggaaaagctctggcttttctttttctttcttttgagacagtctcactccatcgcccaggctggagtgcagtggcacgatctcgcctccctgcagcctccacctcctgggttcaagcgattctcctgagtagctgggaccacaaggacccactaccacacccactagtttttgtatttttagtagagatggggtttcaccatgttggccagactggtctcaaactcctgacctcacgcccgacttggcctgcaaaatgctgagattacaggtctgagccaccgctcccagtctctggctcttcgttggtcaacctcgtagggtagggaggcgaggccagctcggagggctatgcccccggggatcggatggtctgtctccatccggattgttccattcttgctcctcggtctctagaactgtgcagcaggatctcaggctcctgagccccaagtggagacagggcatggaggggccccagtggtgggaccctcagccaggaccttcacctgtctgtgcctcagtttctccctctgaaaaatgggggataatgctacctagctcatagattgttgaggaggttaaatgatatatagattcctgggccggccctgtggctcactctctgtaatcccaagactttgggaggcttgggggaggtggggaggaatccctgaacccaggagtttgagaccagcatgggcaaacatagagagatccagatctctacaaaaaaatttaaaaattagctgggcatggtggtgtgggcctgtggtcccagctacttgggagcctgaggcgggaggagcacttgagccctgaagattgaggctgcagtgagctgtgatggcaccaccacactccagcctgggtgacagagtgagaccctgtctcaaaacaaacaaacaaacaaa

SEQ ID NO: 33769 - DNA, 1278 bp, Artificial sequence
  DNA replication origin
agcacacacccagggccacctggtctcagacacacagatgtgtgcatttgcatatcaaccccctattcatgggtgaacgtgcatctgcaatgacgcagtccagagcacagaaggaaagagacgatggtgcctccctgaagaggtccctgctgtgggcatctggggctgagccccgtagggaactgtgagaggtgtggtcacaatggggcaagacagccagtgggggcatctacttattttattttattttattttattttattttattttattttattttatttttgagacggagtctcactctgtcgcccgggctggagtgcagtggcgcgatctcggctcattgcaagctccgcctcccgggttcacgccattctcctgcctcagcctcccgagtagctgggactacaggcgcccgtcaccacgcccggctaattttttaatattttttagtagagacggggtttcaccatgttagccaggatggtctcgatctcctgaccttgtgatccgcctgtgtcggcctcccaaagtgctgggattacaggcgtgagccaccgcgcccggctattttattttgaggcacagttttgctcttgttgcccaggctggagtgcagtggcacgatctcagctcactcaggttcaaccgattctcctgcctcagcctcccaaatagctgggattacaggtgcgtgccaccttgcccggctaattttttgtatttttagtagagatggggtttcgccatgttggccaggctggtctcgaactcctgaccatgtgatctgcctgcctcggcctcccaaagtgctagattacaagtgtgagccaccgtgcccggctggcatctacttattaaccaactgcatcccccgtttgaggggtgttctggggtgttgactccctggtacttcctgcctacccagagggggttctcggtgagtgtctgtacgcaggtgggtgcctgcacacagtaggtgctgcatgtctctgggtgtctgcacacagtaggcatggcacgcaggtggggctctgcacacagtaggccttgcgtgcaataaagacgctgcacacagcaggtgtttgcatgaaggagaggggctgcacgcagtaggtttgcacactgttagagaaagaccccaggcaaagggacacgggaagccgttggactgtaggaaattgtcggaagccagctcccaggtggccaaggggacatagcagcatctgccatgcccttttgtgcactttaagcactggttctcagacttcagggtgc

SEQ ID NO: 33770 - DNA, 1896 bp, Artificial sequence
  DNA replication origin
tacccagagggggttctcggtgagtgtctgtacgcaggtgggtgcctgcacacagtaggtgctgcatgtctctgggtgtctgcacacagtaggcatggcacgcaggtggggctctgcacacagtaggccttgcgtgcaataaagacgctgcacacagcaggtgtttgcatgaaggagaggggctgcacgcagtaggtttgcacactgttagagaaagaccccaggcaaagggacacgggaagccgttggactgtaggaaattgtcggaagccagctcccaggtggccaaggggacatagcagcatctgccatgcccttttgtgcactttaagcactggttctcagacttcagggtgcattggcaaccccctgggtacccccctttttttttttttaaatagagacaggatctccctatgttgcccaggctggtctggaactcctgggctcaaaggatcctcctgcctcccaaaatgcgaggattacaggtgtgagccaccatggccggcccctgggtacactttcaatgtggtgggttggatgttgtggcaggggaccctaaaccgggtctccccttttctaggacacagcagaaggaatgcagaggcttcctgagccgtcactcttccttactttctcccgggacccccttctctctgcagaccaccgccaagagcccagccctcagagccccagaactccctgcagcttcccagctctaggccttggcccctgtgatctccacctcgtggtcggggcagtgcccagccagggctccggggaggcgagggaggaaccagggtgggtctccttggaggaagcagagagtcacggagtcttgcagagagaggctcagagccctgcacgtcactttctccagcccccaccccagagcctggagcatgctccccggacatgtaggtcacgcgacccacagctttacagatccctagggatccaggagggacccccgagacccagaacgacccatagccacacagtgggaaggccaaggacctgctccccaggacgctgggccagggagaccgcaggcacacgggacagccacaccagagctgcatctggagaaggggtggggggtttcctctcgccgctcctcgctattctttccctacattgttccgttccgtgctcccagttcccaccccactccctccacccggacgccggcggttcccaggccccggagccggggtgcattgggggtgggggtggggtagagtgaggggcctcgtgaagagcgctgcgggccaagaccctcttgcgcatgtgacgagagcgcacgagtgtgggagcttcggcctgcgctcacaggcgtgtgcgtggggaagtgtttgggccgccgtgtacacagcaggcacgccataaacgcttcttggatggctccatgcgagggaagggagggagggcagagttcaggccctacagggaggaaaagggaggggcggaggcctggctttaggtttgaatctccgcggcttactagctccagcagctcagcaaaagcgtgactcagtttccctcgtccataaaagggaaagccgaatcgccctcccacgtgtcgaggtgaaactagacagtgcactaaggcacttagcaaaacgcgctgccttgagaacccttattacgccttccttccttccacctcaccccctggccagacactctgggggtggagaggggcgctgacccaggccccagacgcccctcccgtccgccctccctagcaggcaggagtcccggctttcccgttccttaaattggataattggagacagaggcgggtgctcgagacggagaaatccccaagtgggcgaaaggcaaggggcctgtcctagtttccctgcactgggggcccccaccctcgccagcgct

SEQ ID NO: 33771 - DNA, 1177 bp, Artificial sequence
  DNA replication origin
tccctgcactgggggcccccaccctcgccagcgctccctccggtgcgccctgggcgcgcagtctgtgcgctcgggagcccccagcgccggctgtcgaccccctccagagcccggcggtgccagcctccctctgttgcccgccaggcgcggtgtctgcggccgccccggcaggaggggttggggggtccgggccggcggcagctccggcggcgtctccctcctccaagcccctggcggcgggcggccgggccgagggcggggcgtctgcacagaccctccttttgtgagcggcgccttccccgggcggcctggcgcgcagggctcgggcactgcgccagggcccggaatagcctccctgcccggccgcccgccccacgccccggcggagccgcctgacctgcccggtcgggcgcagaagagcctggggccgcggtggcacaggaaccgggtgcgtgctcagctgcacggggctgcagccgctactctccgctgggccggcactggacgcgtgcagccgggcctactgtgcgcagcccgtcttttgtgtgaaaacgcccgctgtgtgcagatctccgtcttcgtgcagggcctactgtgcgccgcaccccccttccatgcaaagcctactgtgtgcagaaccccatttgcctgcaatgcctactgtgtgcggcccctctcctgcgtgcaaacgcctgctgtgtgtgacccttttcttgcatgcaaggcctactgtgtgcagagccctaccttcttgcagtgcctacagggtgcagcccctctcctgcgtgcagacgtccactgtgtgcagatcgctgtcttcgcgctgggcttactgtatgcagcacctctcttccatgcaaagcccactgtgtgcagagccccacctggccgcaatgcctactgcgtgcagacacccagatacatacaaaaccgactgtgtgcaggcatccacctacatgcaaacacctgcacctgcactcgtgcaaacacccaccgtgcacaggcacccactgacaaacattcatgtgaggagcccccaagctcccacactcccaaacggccttgtctttttgtctttttttttttttttttttttttttaagatggaatcttgctctgtcgcccaggctggggtgcagtggcacgatctcaactcactgcatcctccccctcccag

SEQ ID NO: 33772 - DNA, 2762 bp, Artificial sequence
  DNA replication origin
cggggcgggcagtgcgccggcctcagtttccccatctgtgcaatgggacattaacagcacccgcatcacagcgctcagctcacggtcggacacgcactaagcgctctgcacgggttggcagtcaacgaaagtgggtgtcactgctttctccaagtccccgtcccgcccgggccagctccagaaacgcaggggctgatgtcatccccaggctcaaacctcccagcgtggccgacgcaggcaggcgccgccgtcacgggcgttcctgcgccagggaatcccggccccggcgccggggccccagtggaaacccgtgacgccagcgcccgccgccgtgggtcttccgggctggcggtagcggggcggggcgttctcccgcgccgctgaccccacctccgcgccagccccgggaacgcgcacggcctctctccaccctccgcgagcccagtgtgcttgcgcttgcgcttgccccgcactcagtcgccccctccacgagtgcacactccactcacgcgggatgcgcaggacgccgacaagcaggcgtccacagtgggtctgcagggacgcatcgcatgggcaggcctggtgggtgtaggtgtgcaggagttcgtggacatgcgtgtgcacgatcccgcgtggaaggcacggtggacatgcgtgtgcacaatcccgcgtgaaatgcaaaggtaggcatgcgtgtgcacgatccttcgtggaatgaacagtgggtatgcctgtgcacgttccccttggaaggcgccgtgggtacccgtgcacggtgctggccctttgcaggaggatggggagccctggctggagagtacagattccggacacacacactcacacacacacacacactcattcaccctctctcccggtgcccgtggcctgtgggcgtggagccgtgggcgatgactctcaggctgttcaccgtctccccaccagtctgggagctaattactgtcaggaccagacggggtggctggaaagatgaacaaatcgctgtgtgtctgcagcccgtctggagctgcaggcctcataggcgtctgttccgggggtgtcgggcgtgacgcggccctgggtggagggcgggcagcctgggtgctgcgtgcaccgtgggggagccctgggtttctgcgtgggtcctggagggtctgcggtgagtgatgggaaagtgatggatgagtgatgggggtccgtgtctgccgtatgtgcctttgtgtgaaagcgagagacaggaggcctggcggcgtctattctcccgatcaacaaagtggatgtaataatagtatttaccctataaggttacggggacccagcaacctcacttctcttggtactatctgaaagaaatacacaacttaggagcacacagagaccaggaggtaaatgcacgtagcagctttgttcctcatcaccaaaacctgggaagagctcaaatacccctccattcagaggggaacaggtcaacggaggtcggttcatagaatgaaagttcagcagtcaagaggaacgcactcgccttcaaaacatgctcagtgaggccgggcgcggtggtttatgcctgtaatcccagcactttgggaggcccaggtgggcggatcacttgaggtcaggtgtttgagaccagcctgatcagcgtggtgaaacctcatctctactaaaaatacaaaaaattagccggccatggtggtgggcacctgtagtcccagctactccggaggctgaagcaggagaatcgcttgaacctgggaggcggaggttgcaatgagttgagatagtgccactgcactccagcctgggtgacagaacacgactcagtctcaaaaaatgaaatgaaatgaaataaatgaaatgaaatggaataaataaaatgaaaataaaaataaagcatgtgcacccaacacacaaacacacaggtatgcacactcatgccaaaacaattgcaggggccccagcagcccctagaatccccatcagaggctggggaggaagatcggcggcaggagggacagacagtgcctatgtgccccagattgtgtctctgtcaccagctgccagagcccgtgcctgtctgaggaggtgggtgtctccggaccgcccacctctgtgtctgtctccaggacataggctccacctccccccagggcctcactcccatctcctcctcccaccctggtcccccaccttcctgtccccacccttgttggcggtaggaacctactgtttctggctgcaagaggagatggttgagggggcccagtcagggcatccgtttatcatccctctatttctcttcttagctcaacaagaagaccttcctgtctctgggcctcggtttctccggctgtgaaatggaaggatagtttcttagggtatatgggcatcacctccccacctgtgcagttctaatcccaccaaccctggctgtttctggagcttcctgcaggcaatggtctgagccataggagaactcaaatgatggaaaatcacaggtggggtgtaggactccccacactcccatgaaccccttcaggcatggaaggacagacacctcaggaggggatggctggggtgggtagcacaggtaggcttgcaggggaagagaggggatatttgtgtgtccaaaatcctggccgggcacggtggctgacgtctgttatcccagcactttaggaggccaaggtgggcagatcacttgaggtcaggggttcaagaccagcctgaccaacaaggtgaaaccctgtctctactaaaaatac

SEQ ID NO: 33773 - DNA, 1579 bp, Artificial sequence
  DNA replication origin
ttgagcctggggatgacatcagcccctgcgtttctggagctggcccgggcgggacggggacttggagaaagcagtgacacccactttcgttgactgccaacccgtgcagagcgcttagtgcgtgtccgaccgtgagctgagcgctgtgatgcgggtgctgttaatgtcccattgcacagatggggaaactgaggccggcgcactgcccgccccgccgggcccccagagtgagggcccggggctgggagcagccttttcccagcgccctctgcagtgtagagtcccaccagcttgtctcccgctctctcctgcacaagccggctcagagagggtctgcgggtgtcctggcaccacccagcaagttgggtgctgcagccagctctgtccatacagttggtctctgcccagctgcggtggccaggggcggtgcctgagccagggcgcccgggcggcccggtggggtgtgcccagccgctgccttcctgctgacgccggtgccaagggatctaaatatagcctgggaggaggcaagggctatttttaacgcgagtggcttggcccctcccagttcccgggtcaggagccctttggtccaggattttggggaggggcaggggcgagggggagccaggggccccacacccgcctgggcctgcccctctgcccacacctggccctggaagactctaggggacgaagggccgtagagggagggcagggtgggggggctgtcgcaggtcacctttcttaaacgccacctcctctctagctgccgaccagccctggccttttgttgggcccagagactgctttctattttgggaaggtgttggaataatttccttggctatttttagccggttcggggattcctccactcaggctggccgccctgcctctcctcctcctcctcctcctcctagtcgtcttcctcctcccggcagacccaagggcggcctccttcatggagggcagtcagggacacacagtccctgagccagacccagaatggggagacccctatatttcctgggtcggggagggaagggagctctgaagggcgttcccacgttccaggtgagcaggactttcagacctctgggaatccatgacgccaggtatctgaattctgtctccagggcagggtggggcgacccagcagcctctgacctttcacctcctttcagggttgtcacaggaaagtggcctgctgagaacagaccttgactcccacatccctaggctaggggctcccatgttcccaagaggaagatcagtgtgatgagggtaaactgaggcacagaggggacactgggatgggacacatcttgggctcattccctgatggtttcatttccttccacattctacctttgtttttaatttttttttttgattgttttgagacaagacggagtctcactctgtcacccaggctggaagagtatgcagtggcacaatctcggctctctgcaacctctgtcctctgggttcaagcgattctccagcttcagccccctgagtagctgggattacaggtgcacgccaccatgcccagctaagttttgtatttttagta

SEQ ID NO: 33774 - DNA, 1703 bp, Artificial sequence
  DNA replication origin
tatgcgtggtggggacgcccacaccccaaaccctgccggctcccagcccaaccacaggaggctgcagtctccgggagcctctggggctctcccgggccaacagcaggtttggcgggtagggctccccgaagccccagccctcccggacctgccgtagagagctgggtgccgggggtggggagcccggctgtggcctgtgggagctgcccgaggttgaggagtggaggtcactcccccgacacctgcacacacacccggagccctctagccttggcgaggtgggaaccctggcagtcaccagctcaggaagtgagccaagcagggatccccgcctcacgggcctgcacggaggacctgggcggccgtccaggaaccctctcggcacgggttcttagacgcctgtctccactggggccggagggacaggactaggctagttttattctactacttgcttctaggccagccccgtggagggggtcggggcggccaggcctcctgcgatcagggctgcgtggggtccatctcaggtgtggccgcaggtgatgccggcaggccctggaagatgtggctgcacctgctcccgtccgtgccgcagaggaggacgcagtcatctttcagaagcctccccccgaccccatgacatcttcgatttccacttgccgctgggaggagtggcccatcctgcgtctaaggcatctcccggcctcagacagccgtcctgggttgcacgggggtggaaaagcaaaaagatcgggttcgagcgacagggtaacgttttgagcggacgttttgatctccgggacaacgtctcacctcccagagtccttcagagtcactccaagatcatggaacaattttgtacacacagcagcacagggtagccccacccgccctgccgcggctccccagcctgcattttctgtttgaaaaacgtctatggtggatgccagagggtaggacaacctggaagagccaaggatggtcaaagcctctcccagccacgcggatgcctcatgcttaaaacacactgggcgcggtggctcatgcctgtaatcccagcactttgggaggccgaggtgggcggatcccgaggtcaggagtttgagagcggcctggccaatacggtgaaaccccgtctctactaaaaatacaacaattagccgggcgtagtggcacacgcctgtagtctcagctactcgggaggctgaggcaggagaatcgcttgaaccggggaggcagaggttgcggtgagctgaaatcatgcagctgcactccagcctgggtaacaagaatgaaactccatctcaaaaaaagaaaaaaaaaaaaaatccaaaaacatgatgggccgggccggtgacggcttccctggggcaagtcccgaaaacccatttctggcacagaggggaccctgcagaaaggacccatggctaacatcatgcaggggagtcacacttggcaacttttcatagacgaagccccctccagacccccacactccatcgtgcattcattgcaggatcgtgcagtttagcgacgggttcaaccatcacaatccgagtttagccgtatggagtaacaattttttaaataaagagatatttccaaaaaacttcatgatgtcacctcccgccccccatctcaattttacctctacttaaaaacaacacaaagcattccagtgaccctatgaagtcttttta

SEQ ID NO: 33775 - DNA, 1143 bp, Artificial sequence
  DNA replication origin
cctagccctcagggagaagctccctgggcctgtagttttccgggactttctaacaacaccagggctggagtggggtggccctggagatgtcacacatgatactggtgacctctagccattctgatgatgtgacctggagcccacgggccacagcagagaaccccaggctcgaggtccatccttggccatgtgtgtgcccggacgggccggcccctgctgcagagcccagaggggtgggcctaccaggccacgtgtgcccatgcacagcagcagcacctgctatggatggaggtggggcaggcacttcacatccgagggctgcctgggcctgggagcctctgtcctgggaaggagatcggccctgggaacagagtgggttccaggaagtaacaccctttgtgaactccctgcaccatggcctccagccccttccatccaagtggcatctttggtacccagtgtctgggatgtgctggggttggcagaacaaaggcctcaaagacatccatgtcctaatccctgggagctgtggctgtgtcaccacacatggaaaaagggactctgcaggtgggattgagtgaaggaccacctgagtcatgagagcaccaccgtggatgatccggggtgggggggcgcagtgacctcacaggatcctcacgagaggaggcaggagggtgagagtcagagagagactgaagaggctgtgctgtgtctgtgaagggggaggaagggtcccgagccgagggatacgggcacctctaggcgaaaggcgggaaagagattctcccctggagcctccaggagggaccagccctgcctgtgccttgattttaaaccagtgaggcccatgttggactctgagcccagagctgtgagatgagaaacatgggtcgtgtgcagcagccacaatgtcacaggacacaacgaacgtccagggagctgccagtgtgcggagaaggggttttagtgcagcctggctgtgcatagatggttgcaatcaggggcttctcagaggggatgacatcggtggggctttgcaggatgtgtaggagttttctggggggggggcatgcgtggagaaagacccacctgtgctgaggtgggaaggcccggtactgccctctgttctcttcctaaccctcc

SEQ ID NO: 33776 - DNA, 855 bp, Artificial sequence
  DNA replication origin
tccctggtcaaggaccatggcctggggcagggtcaaagtcctgtgggttctgaggctgacccggggctgcaggtgaggtggccccagcatcctcggtcactgtcctgattttatggatcaggagctgaggtcacaccgggctggcctgggcacatcgcactttgactcagagtttgtgatgggtcagaagtctaacttcccgtctttctctatcacggtcctgaaacggtgctacaactccattcgctgacccggccaggcggagcctctgagtcttttgtgagtgcaggtgcctttgggcaggaggaggaaaagtcctgcagcccctcgtttcttgagtctgtgcatgtttactagcaggaccttgcttcagatgcagggctgggtggaggcgctcgctcctgcgtgcatgtgtgcgtgcacgtgtgtgtgtgtctgtgtgtgtgcacatgtgtgtgtctgtgtgcacatgtgtgtctgtgcgtgtatgtgcacctctgtgtgtgcacgtgtctgtgtgtgcaaatgtgtgtgcacgtgtgtgtgcacatgtgcgtctgtgtgtgcatgtgtgtctgtgtgtgcatgcaaatgtgtgtgcacgtgtcttgtgtgtacgtgtgtgcgcgtgtctttgtgtgcatgtgcgtgagtgtgcagtacacgtgtgtacgtgtgtgcgtgtgtctgagtattcctgtgtgcacgtgtgtgcgtgtgtctgtgtgcgtgcatatgtgtgtgagtgtgcgtgtgtctgtgtgtgcgtgtgtgtgtgtagaggtgggaggggaggcagcccccctggatgtctctaggtcactaagaggttagggatctcacacggagtgattc

SEQ ID NO: 33777 - DNA, 1247 bp, Artificial sequence
  DNA replication origin
gatcgcttgagcccaggaggtggaggctgcattgagctgtgattgcacccctgcactcagcctgggcagtgaagcaagacccctgtttcttaaataaataaataaataaatacataataaaataaaaaagaccaagtttagttcccaagggttcctggtttcccagacgtgtgagggtggccaccagctgctgcagtgcccgtcccccgcctgccgcggcccgccctgtcctccctggggtcagcaagcatccagggaccacggtgaactctaggagggagtgggtcagccccacccagggcggattcccagcacaccgtgtgcaggcctgggtcgaagggttctgctggaatcaacccggcatgtttgtttttgctgcagtcccctggggccgtccgggctgcacgcctgcacgtcatccgaggccgccccactgcggtgggttgggaaactcagtcttggagcctgccagcctcacaactcctgctctgggagcacgtgcccgtgccgcatgtgtctgtgtgtgtctgcatgcatctgtgtgtctggttctgtgtgtgtctgtgtgtgtgtctgcatgtctgcgtgtacctgagtgtgagcatgtgtctgtgtgtgtctgtgtgtgtgtctgcatgtctgcgtgtacctgagtgtgagcatgtgtgtgtctgcctgcatgtgcctgtgtctgcatgtgtctgcctttgtgtgtctgtatgtgcctgtgtgtctgtgtatgcctgcgtgtgcctgcgtgtctgcgtgtgcctgcgtgtgcctgtgtctgcgtgtgcctgcgtgtctgcgtgtgcctgcctgtctgcgtgtgcctgcgtgtgtctgcatgtctgtgtgtgcctgcgtgtctgcatgtgcctgcgtgtgcctgcgtgtctgcgtgtgcctgcgtgtgcgtgtgcctgcgtgtctgcgtgtgcctgcctgtctgcgtgtgtctgcgtgtgcctgcgtgtctgcatgtgcctgcgtgtgcctgcgtgtctgcgtgtgcctgtgtgtgcctgcatgtctgtgtgtgcctgcgtgtgcctgcgtgtctgcgtgtgcctgcgtgtctgcgtgtgcctgcgtgtgtctgcgtgtgcctgcctgtctgcgtgtgcctgcgtgtgtctgcatgtctgtgtgtgcctgcgtgtctgcatgtgcctgcgtgtgcctgcgtgtccacacgccctgaggaggcgcccgttctgctttgtacacttccctggagctttcca

SEQ ID NO: 33778 - DNA, 774 bp, Artificial sequence
  DNA replication origin
tcctgatcttttaataatgttgctagtcattcattgagcacctcctgtttgctgggcgctgggctgggcgagtgcggctttggctcctgcgggcacagggtgggaagcttggaaactcacctccctacaaggacggacggggaggagagcgaggctgtgaggggtgcaggcgcctgcgggggtctctgacctctgggtggcagcctctccaggagagcaggtgcgccgccaagtgagggccgtggctgcctgtcctgatgacaaaaccagcaccgtgatcccctgctcctatccttctgcaggccccagggcaaaacaacaacgacaacagcaaagacgggccgggctcgggggcggggggagcctgttcctggggcctctgaagctcgatttgcagagggctgctgttaccgctggcggccacgagggggcagaggaggcccacggagtttcctggccccgggcctggagccggcagggggctggagatgcggggggtgcaggtagggacgggggtgcagtgggtgtgcaggtgggtgcaggtgaggacaagtggagttggaggtgcaggtggggacagaggtgcaggtggggacggaagtgcaggtgggcgcaggtgggcacaagtggggacggaggtgcagatgggcgcaggtgtgcgtagttgggttcaggtgggtgcaggtggggatggaggtgcaggcagtgcatactgactgtatcccagatgtcttcagtcacccccgagcccctctttaagctctgtcactaccc

SEQ ID NO: 33779 - DNA, 730 bp, Artificial sequence
  DNA replication origin
cggctaacttttgtatatttagtagagacagggtttcaccatgttagccaggctggtcttgaactcctgacctcgtgatccacctgcctcggcctcccaaagtgctggggtgacaggcgtgagccaccgcacccggcccattcattatttcaaaactgacttcagtccctgctcacactggacaccagaataaactcccgatggggcagatggtgtaaatcagggggacccccagctcctgggattcatctcctctctccctcccaactcagggtgtggatttcaatgtgtgcagcctcctgggacctcagcatggcagaggatcatgggacgcggagtctcttgggggtccgtggaatcccctaacccggggggtctcaaccaggggtgattctgcctccaggggacatctgtaattgtcatgatggagggatgctcctggcatggagtggatggaggccagggacgctgctcagcaccctatggtgcccaggacggccccaccccagagaatcatcaggctctgatgtccacacacgcaaggggaggccccagtagaggggacggaattagtggtgagcaggtgtggtgccggctgaccttgaaggggttctctgttacaaagggtggcgtgggatgcgggcttttcctgatcttttaataatgttgctagtcattcattgagcacctcctgtttgctgggcgctgggctgggcgagtgcggctttgg

SEQ ID NO: 33780 - DNA, 941 bp, Artificial sequence
  DNA replication origin
tacttgggaggttgaggcaggagaatctcttaaacctgagaggtggaggttgcaatgagctgagatggcaccactgcactccagcctgggtgacagagtgagactgtcttaaaaaaaaaagagagagagagagagagagaaagggagagagaaaagaaagagaaagaagaaagaaggaaagagagagacaaaggaagacagaaagagagtaagagagagaaagaaaaagagaaagagagggaggaaaggaaggcaggagggagggaggaagaaaggaaggagggaaggagggagggagggatggagggaagggagggagggagggatggagggaagggagggagggagggatggagggaaggtagggagggagggagggagggatggagggaaggtagggagggagggatggagggagggagggaaggaaggaaggaaggaaggaaggaaaggaaggaaggaaggaaggaagtcggacagagatctggagaagtgcctccaggacacagtggggagggccgggaggcggtggcagcccttcgtacacgaggtcccctgaccaccaccactgtccatggcctctgtgtcccaagggggactgatctctccctgctgacattcggcacctgctacctggagtgtttcttgcctgtgtctgagacttgcctgcctgctgggtggaagggccagctgcccataggtgcccagggccctgagctgggtttaaagccgggctattggcgccttgaaatccatactaatttatgaacaggaggtcccagcggttcgtgttgccccagctcggcagtttctgaggggacctaacccccgcggagaggtctctcctccttgtctccactgctggccgcccgggtcgattgtgatttgtccacacagggaacatgaaaacacagcgtttctgtcaggctgagtgagccgct

SEQ ID NO: 33781 - DNA, 813 bp, Artificial sequence
  DNA replication origin
cagaggagctcaaatccgccctcagccccagggggccgagctgcaaaagcgacgtcaaatggacaaaaatcccaccgggcacagaagtgcgaccagcaagtctatgggtttaaaaataaatgatggggccgggcgcggtggctcacgcctgtaatcgcagcacttggagaggctgaagccaggtggctcacttgaggtcaggagttcgagaccagcctggccatttttttttttttttttttgagatggagtctcactctgtcgcccaggctggagtgcaatggtgcgatctcggctcactgcaagctcctcctcctgggttcaagcaattctcctgcctcagcctcgcgagtagctgggattacaggggtccgccaccacgcccggataatttttgtatttttagtagagacggggtttcaccatgttggccaggatggtctcgatctcttgacctcgtgatccgcctgcctcaggctcccaaagtgctgggatgacaggcgtgagccaccgtgcccggcccgcaccagtgctgttgatggaggccccaaagtggtagcgacacaagtgaccctggacggatgcacggatcaacgtagcgtggtccatacacaccccggagtatgattcagccttcaacagcaggcaatcctgacacaggccacgatgaggatgcactttgaggacctcagtctcagtgagagaagccaggcacagaaggacacatcctccgtgatccactcctaagaggttcccagagccctcagattcacagagacggaaagtaggatgggggccgggcacagtggctca

SEQ ID NO: 33782 - DNA, 2799 bp, Artificial sequence
  DNA replication origin
agagggagcctataaagtcttcaagaaagcggtgcagcagttatgatcactgacattcttccccagcaaatgagcccccggagctggcatgcaggattcgaaccagctcacctagcgcgggattcgaactcgcgaaactactcgcgccttcctgacgtcacgaagtcaccctggaaagccgctcttcgccccgcccccggccccgcccgcgcccggagccccgccccactctcctgggcgcagcctaccccgctgcctgccccgcgccccgcccccgctccggcctcccgcagccggggctcgcgattggccttgccgggacgccagggcccgccccccgagtgtcggccccgcccccgcagaggggagcgagcgctcgcgggccggggcggagggttcggctgcgcggcggggctgaggcggccgcggggcccgagcgcaggtaagggcgcccgcgaaccgggccaggggaagtgagggcgcggccggcgtcccggagaggggactgggacagctcggattcggctgcggaccgagttgggggtcggagtcggctgaggaggggggctgggtctggggacccgggctgcaactggaggctggggttggaattggggacggggctgcgcttagggggtcgaagttagctggggaggggctggggttggggattgggactgcacttggggctcagggctagctggggagggggcgggagttgcaggtcgaggttagctggggacggggcagggggtgcagatcgaggttagctggggaaggattgggtctgggcattgggactccacttagaaatcagggccagctggggaggaggctggagttgcaggtccaggttagctggggagggggctggaggtgggattggaggtctgagttagctgaggagggggctgggggtgagactggaggtctgagttatctggggaggggactggagttgcaggtcgaggttagctggggagggagcttggagcgggattggaggtctgagttggctggggaggggtctggaattgcaggtccaggttagctaggaaggggctggtggtggaattggaggtcttgagtttgctggggagggggctagagtcgcaggtcgaggttagctgccgagggggcttggagtgggattggaggtccaagctagctggggagggggctggaattgtaggtcgaggttagctggggagggggctggaagtggaattggaaatctgagttagctggggaggacgctggggatggtgttgggggttgaggttaattggagcggggaacaggggttgagtcaagggtgcagcttctttgaagagggagctgggagtggggttgaggtttgcagggagctggagagggggctggggatggagtttgaagtggggttcattggagagggggctgcagagggaattagatgttgaggttgtctggggagaggactgaggaatggggttggtgaagatgggggggtgtgattgacggcccaggggttagggttagctgaaaaggggcagaaggacaaagctggggtgagccagggagtggctggagcatacaggtgggggtcaggcttgttccagaaagggtctgggggctatcaggggaaatggggagcttgtgagtgtgtggggtggaagggggttcagggagaaggaagttggggtgagttagtgagaagggaggtgggggtaaggtcccaggctggagacacctgggggcaggtgttttgctagacattgactaatcaggaggaaaacggggtgtggggaggtgtctcaggtaggatccagttaaaaggaatttggagaggactcacccctctacttttgggggagatgttaattgtttgctctagaactgggcacggggcagaaccccctggggaacagtgagttgaaggagacgggagttcggaatactttttgaggtttatttctaggatatagggtgccaaggagaacgcttcaggaaggagaaaggctcctgtcggtgactgaatttttcaggaactaaagtgggagtttttgggacggtgctattgagcgacgtgggtggcactttatttttcctggggagcgggggttgctaggggttgggaggtgggcggtggaagacaggcttgatgaacagaggcagcggatccccagctaagcgtcttcacacggttgctaggtgtcagcgaggcaaatgccaagttcacaaacttgttcccgtcgtgggatgctgcgatcttgccttgatggagtgtcgggggcctctgggaggtgcgcctgtgtgtgttccgacccagcctctcgctgcggatttggctgtatcatcttttggaggtgttgtttactcccctgcaaagcgggaataataaaaacagtagcatgtgcctctcagggtcgaattacgggatgtatgcatggactatttcctagcatatagtgagggtacctgaagcatggagaataatggactcaatccagtttttttctttggtgggtttggagatggaggagtgggatgactgggttgtcacagaggagaggaaaggaagtgactggaacttgactctagtcctgcaaccttaggagcacacatcagggtcacccccagaagctttaaaaaataacctgcatggctggttgtggtggctcatgcctgtaatccccgcgctttgggaggccgaggcgggtggatcacctgaggtcaggagtttgagaccagcctggccaatatagcgaaaacctgtctctactaaaaatatcaaaaattagctgggcatagtggcgt

SEQ ID NO: 33783 - DNA, 1153 bp, Artificial sequence
  DNA replication origin
agtgcagtcccaatccccaaccccagcccctccccagctaacttcgaccccctaagcgcagccccgtccccaattccaaccccagcctccagttgcagcccgggtccccagacccagcccccctcctcagccgactccgacccccaactcggtccgcagccgaatccgagctgtcccagtcccctctccgggacgccggccgcgccctcacttcccctggcccggttcgcgggcgcccttacctgcgctcgggccccgcggccgcctcagccccgccgcgcagccgaaccctccgccccggcccgcgagcgctcgctcccctctgcgggggcggggccgacactcggggggcgggccctggcgtcccggcaaggccaatcgcgagccccggctgcgggaggccggagcgggggcggggcgcggggcaggcagcggggtaggctgcgcccaggagagtggggcggggctccgggcgcgggcggggccgggggcggggcgaagagcggctttccagggtgacttcgtgacgtcaggaaggcgcgagtagtttcgcgagttcgaatcccgcgctaggtgagctggttcgaatcctgcatgccagctccgggggctcatttgctggggaagaatgtcagtgatcataactgctgcaccgctttcttgaagactttataggctccctctcgtgggaccctccgcataaggccagaaggcgagattactatccacattttacagaggtggaaactgggtctcagaaaggtgaaacctaaggtcatttgcccaagcctgtctcatcatttccaagatttctcagtttcctaactcatggccctggatccacaaattcctgagccccaacacagatggaatgaaccagaatcctatagggaactggaccctgaaatctgtgttttgtttagttttcgttttgtttttgagacagggtatcactcaattgccgtggctggactgcagtggtgcagtcatagctcactgcagctttgaagtcccaggctcaagcagtccttccacctcagccttccgggtagctggggccacaggcacgcaccaccacatccagctaatttttgtattattagtagagacagggtttcaccgttttggccaggctggtctccaactcctgacc

SEQ ID NO: 33784 - DNA, 759 bp, Artificial sequence
  DNA replication origin
agtggcgttggggcagaggagactgtattagtccattcttggaatgctataaagaaatacccaggccgggcacggtggctcatgcctgtagtcccagcactttgggaggccgagaagggcatattacctgagaccagaagtttgagaccagcctggctcacatggcaaaaccctgtctctactaaaaatacaaaaaattagctgggcgtggtggcgggagtctgtaatcccaactactagggaggctgaggcaggaggatcacttgaacccgggaggcggagcttgcagtgagctgagatcgtgccactacactccagcctgggtgacgagaatgaaactctgtccaaccccccgccgccccacaaaaagaaaagaaatacctgatacaggtaaatgatagagaaaagaggtttaattggctcatagttccacagcctgtgcaggaagcatggcagcagctgcttctgggaggcctcaggaaacttacggtcatgggggaaggcagaggggagcaggcaggtcactcggccggagcaggagcacaggggaggaggtgccataccggatcttgtgagaactctattatgagacaggactgaggggtggatccattcatgaggatccaccgtcatgatccagtcgcctcccatcaggcactacctccaacacgggactacaattcaacatgagatttgggtggggacagagagccaaaccatgtcaggggaccttccctgcttgtcccatctgccagccca

SEQ ID NO: 33785 - DNA, 2396 bp, Artificial sequence
  DNA replication origin
tgggctggcccagggcccaccagcagctgatgttgcctcctctcctgtcctggcagtagcttctgggttctgaaggtgccggagagagtgaggctgggcaggggtctgcggccctttctcagggacacaccctgatagcacaatctccttggggccctgcccacctccaggcctctcccacctcaggccctgcccgaccctggggagagagggcatctgcaataggaggggacccgagcctgtcctggctgctggcccatcctgcctgggcatccctggtgctggggactgtgccaggccatgcttgctgtgactccgcccctgccccctctccccccgcatgtgggtgcccccactcccccatcgtggggtctgtgtagccttcgctctagacatagtcttcctgcaataaaaaagtggatcctgcattccccaccagcatggcgccctgtctctgtggtgggcgtggggtgtcagctcaccgcctgtaaaggatcaagaagggtggggaggtgcaggatggggtgaagggtgaaggaggtgatgggtgtaggaagtgagggatgggatgaagggtggaggaggtgatgggtgtaggaagtgagggatgggatgaagggtggaggaggtgatgggtgtaggaagtgagggatgggatgaagggtggaggaggtggtgggtggaggaagtgagggatggggtgaagggttgagaaggtggtgggtgtaggaagtgagggatgggatgaagggtggaggaggtgacgggtgtaggaagtgagggatggggtgaagggtggaggaggtggtgggtgtaggaagtgagggatgggatgaagggtggaggaagtggtgggtgtaggaagtgagggatggtgtgaagggtggaggaggtgatgggtgtaggaagtgagggatggggtgaagggtggaggaggtggtgggtggaggaagtgagggatgggatgaagggtggaggaggtgatgggtgtaggaagtgagggatgggatgaagggtggaggaggtggtgggtgtaggaagtgaggaatgggatgaagggtggaggaggtggtgggtgtaggaagtgaggaatgggatgaagggtggaggaggtgacgggtgtaggaagtgagggatgggatgaagggtggaggaggtggtgggtgtaggaagtgagggatgggatgaagggtggaggaggtgacgggtgtaggaagtgagggatgggatgaagggtggaggaggtggtgggtgtaggaagtgagggatgggatgaagggtggaggaggtgacgggtgtaggaagtgagggatgggatgaagggtggaggaggtggtgggtgtaggaagtgaggaatgggatgaagggtggaggaggtgacgggtgtaggaagtgagggatgggatgaagggtggaggaggtggtgcgtggaggaagtgagggatgggatgaagggtggaggaggtgatgggtgtagacagtgatggatgggatgaagggtggaggaggtgatgggtgtaggaagtgagagatggcattaagggtggaggaggtggtgggtgtaggaagtgagggatgggatgaagggtggaggaggtgatcggtgtagacagtgacggatgggatgaagggtggaggaggtgatgggtgtaggaagtgagggatgggatgaagggtggaggaggtggtgggtgtaggaagtgaggaatgggatgaagggtggaggaggtggtgggtgtaggaagtgaggtatggggtgaagggtggaggaggtgatgggtgtaggaagtgaggtatggggtgaagggtggaggaggcgatgggtgtaggaagtgagggatgggatgaaggatggaggaggtgatgggtggaggaagtgagggatgggaggaagggtggaggaggtggtgggtgtagaaagtgagggatggggtgaagagtggaggaggggacctgtgtaggaagcgaaggatgggatggtggtggggaggtggagggagtgggttgaggacatgcagcaggggaggcaaggcaggacccgtctgggactctgcttggagatgtctttatgtggcttttttctagggtgttggtttccagattcactctgtgcacattagctggggacatcctcccagctggactttctgtgaacgtggacaatttccttgcaggcccagtggcgttggggcagaggagactgtattagtccattcttggaatgctataaagaaatacccaggccgggcacggtggctcatgcctgtagtcccagcactttgggaggccgagaagggcatattacctgagaccagaagtttgagaccagcctggctcacatggcaaaaccctgtctctactaaaaatacaaaaaattagctgggcgtggtggcggg

SEQ ID NO: 33786 - DNA, 833 bp, Artificial sequence
  DNA replication origin
agaggtgcgtctggaaccggaggagtgggcacagatcagaggtcacgacgggccgggtgggcttgggtgtatgttaacaccaaataggagaaaaaagaaaaaaatatctgaggccgatgtgcattttcaactcccccctcccccagaaggtcacagtgatcaaatgtgagggacaggacgcgcaggtctggctggggacaccccagggaaagagatggaaacggggaaacgcagcctcctctggtcctggtgggaacaagcagctcctcttgccagctccccatcctgttttcccatctgcaggacaagggggccacctccggctcttggttttggagggtacagacagaacaggagggtggagagagagcaggggaggaagaaaagccccagccctgcctcggggtgggcaggggcagcggaggggggggcggtggcctcggtttccccagccgaggtgtcggaggaaggatgagagaagaggaggaggccgaggagggtgtcggtgttgggggaggcagcgggggtcagtgggggtgggcggcgggcaggcgggcgttccgggctcacatgagggtgcatttgcccttgacgcggtctgtcctcttctgcttcccggagcgcttgccgtcgatgttgaggctcatgttccggcgcgtctccagcgtcagcagctcctggaagagctccttgacgttgtagttcatcttggccgaggtctccatgaaagcgcacttccactcctgggccaccgcctgcgcctcgcgcgtgtccacctcccgctgcgtctcatcgcacttgttgcccacgagcatcacggggatgtcctccac

SEQ ID NO: 33787 - DNA, 1987 bp, Artificial sequence
  DNA replication origin
ctcgcctcgggctcccaaagtgctgggattccaggtgtgagacaccgcatccagctggaacttgtattacagggctgctctcctcacctgccataaatgggatcctgaggctgggaatctgagaaccacaatttgcaaatcagggcactgattcccaatagccgccccagggaggaagggtcttgcagcccaggtgggacacaaaaatacaaaatccagaagctgaacgggaaaatcgccactccctaaactctaaaatcaaactatggcctggtgtgccctagcccctcccgttcaggtctgaaggatccttagaatagcacttcctgggaggggcacctcttagcccctctcttccttcttgggctcagagaggtccagcagcctgaggaggtcacacagcacagcagatcctgaaatgatggaggtgggggaagaacgctggggggagggcgggtggcttatctccagaattgatgtcctcccctccccttcctccttccaggctctggggcagcggtggggggtgggggaggggtgttccccagcaaggtggtctacagtgggagaggaggaggaaccagtttctacctgctgcactgggggtgggggtgtgtttatggggagggtccagaggttccccgggggtcagtggtttgaacctaaacaggcaaattcaagtccctaagcctccgttttctcttctgtgaaatgcgagccactgttggggcaagtaaggtgacaaggtggagaaaggccctaggcagtgccctgtacagcggagaccccgatcacaattgtgatcacagtcacaagggcttggggccggtgggcagggcacttggctgtgcctgttggttgcaaaggcaccttctggattatcaagggtaacagatttgccaggaaaagaaaagaggctgatgaaagcgccagctgacacagtccccagttgtgatgagccaggcaaacttctgggcgcctcggcaatgccaactcatgtgattggctgccgggtttgtggactacatgcatagtaatttctcggcattcggaggaggctgggggtgctggtggtgggggggaggcggcctgtgctgcagaccctgccctttcctgggtgggcgccctgagaggcgggcacgctgctgtgcagaaagacgccaccaagaccggcctggggtcctaatggccatgggttctgtggacccagatccagcctttgccttgctgcgggcactgaagctccagcccccatgagcagtactgtcctccccgctgggtctggaatccctgaccagaaaggcgcttgcactcaacagccccgaagcccacgccacttcccacctccaccgcctggggggtgcgggtggagggagggggtcgtgggcaccgaggcaggagcaggaggggctggctcaaggtcacagagcaggggggtggaggcgcacagcggggctggaagcccaccctgcttggctagactcctggggtttcccgcctgtgcggggcagcccacccccagacgtccaggcagggccaatctaccccagccctgggtccctgaagcccggctcccggccgggcacggcgtggttggtgggggcgggggtgtcaaagcaaagctcagggtcaggaaagcagagagagccgcgacccaggggtctagcgggggtcacgcctgaccaagggtggggcgggggtctgacccagggccgcctggccggtgaggggtttgatggagaaagggcctgctctagggggcccgagggcgcagaggcacagtgcggggccagcccaggggcgacccttgactcaggaggacctcagtggtggagaggaggagcccaccccggggagggggcgcggagggaggggcttggctgggcagcggggcggagggcgaagaaggcggctgcaggagggaggaggccctgcccgaggggaccaatgcggagaggggcggcggggtgggcctcggtggggcggg

SEQ ID NO: 33788 - DNA, 1983 bp, Artificial sequence
  DNA replication origin
atgagaggcagcagggaacccaggaaactccagtgccagccccggcttgctcagtgccccagtgtgcaagtgccctggcccctgagatttggatcacggacctttccatggagaggcagagctggggcgcccacccacccccactcacaaaggccaggcggaaccctctgctccccggcccaccatgggggagaagctcctgctgtcctagtttgggtgctcggaagagctcactgccatctgtggcctgggcaccgcgggccatgtgtggagaccccgttcctcagggacagcgaggaggggaacagggcctggcctcgccggctcacgcggcccacagcctggcctgggagctataaatagcagccgcagcgtggagttaccgccctgcccactctcctacgcatgagtcagcctgccccggcctgagctggtgcccggaggagacagggagccggcccgacgccctgccccacgctggtgggtcactcaggagacgaaggcaggcaggcggactgggaaggggcagggctgccgtctgagtgcttgggtgcccagcagccccgtgtaggtgggcgccctgcccatgtgttcccagcaaccctacaggcgggcaacagtgacgtcactcacagatgggggaaccgatgcttgagaaggcacttccctgcaggcagccatgtagagcagaagctgggatttgtctgccctcagggctgtctccatctcctgctgagggcacccccagatgagggtcaggggccgggccatgctctgaggtgctcccgcagggctggggtcagggtgggagggaggtgcacgccaggagcactcaggccgggccatggatgccaggctgagaagctggaccttggcctgggagaagggagccatgggtggcgttagagcaggggaggcccatgttgcagttggagcattgagtggcagagtggaaggagggctggaggaaggggtctggaggccaggagggggagtggggtcaaatcagggagaaatagagctccttgagccccaaagccgcttgaacctcagtgccccagcctcagtggcaacaggagaggggactgagtggtcttggaggcagtgccaagtctccgcagaggcagatgggcccacctcatccagggccatggaaatggtgggtcatggagaaccccaggagctgagggcccaaggggttcacctgctcacaggcctggtgatggggagctcaccaccttccagaccagcctctcacccactgatggctctgactctggagagacccctgtgggtcccagagttggcctctccaccaaggggcgccttcctctgacagccttgcggcctgggactgtcccgcacccacccctgagagcaccttctggcctggtcactagaccccaaagtccagtctcctctgggatctgcccgatgaggccaaaaggaacctcggcctcccggtctccaaaatggaggcggaaccatggtctcttgtggacacacagacgcatcagaaaagccagtgctcccctaagacacctcctgttgggggaacacaaacattttcctaaccgaaaacggcaaacccatccgctgcagagcagcgccagccccctttgctcaccccccacctccctaggcctgactgccatgggctgcctccgcctccacaaaaccagccctacagagcgctgagtccgcttctgcccccatcccgcccctgcccaggcccctgggatgggtgggcctccaggtgcaccccattgacctgaaccctcccgcctctgcccgcttctaaacctgttcattgattgttgattatcgacttactcatttcacaacgcacccctctgattccccgccctgcgtgtgaccgggccccagccggcctcaggggtcccgttctgcaccccctttatccgcatttctgccaaagccctccacccccggctggactctgctcctcccaagccgggctcc

SEQ ID NO: 33789 - DNA, 1268 bp, Artificial sequence
  DNA replication origin
cggctgaggaggaaggattgctcgagcccagaaagtcaaggctgcagtgatctgcgacctcaccacgcactccagcttaggtggcggagtgagaccctgtctcgatagatagatagataagtagatgattaatagataatagatgaacaggtgacagatgattgatagataataggtaaatgattaataaatgatgattgatagattaattgatagatgacagatagatgattgatagatgatagatagataggtggtagattgattgactgattgattgacagatgctaaacttgaaaagcaactgtgtggctgagcccctggggtgactctgccccctgaggccaggatgtgcaacctcggctttgcccacatggtccagagaccactgaagagagctgaggccggaccccactgccctcctctccaaaggctagccggggctcagtgaggcccacgtggccctggtcagggcagcagggtgaggagagcggtcgtggagctgcagggccgggggaggagctggacattgcagatgaacgccgtcccttgctgttctgctgaaaggagatctgtaaggcaggaccggccgagtgtccccaggacaagactgcagatagccagggacagggcaagaggatcacaagggggtggccgtctatccccagcaggctgggctatggcttcagagcctgatggatccggaccgacctctttcccactaggccaccgtgggcgagccgcttcccttctctgagcagcagtttccagatgggagcagggacagtggccttgtacagactgctgagggcccagcacccactacactggcactttgtgtttgcaggacccatgcagactgccccggtgggtttcaccctggggactcaacgtggacgcctgtggatcctgcccagctcgcgagctggagaggttgacaggtcctcttctctttggcaaagatgcagccggcctcagtcctcctcgcccacctctgtgcctctcaggatgccgagggactctccaaagagggactcgggtatgagaggcagcagggaacccaggaaactccagtgccagccccggcttgctcagtgccccagtgtgcaagtgccctggcccctgagatttggatcacggacctttccatggagaggcagagctggggcgcccacccacccccactcacaaaggccaggcggaaccctctgctccccggcccaccatgggggagaagctcctgctgtcctagtttgggtgctcggaag

SEQ ID NO: 33790 - DNA, 2210 bp, Artificial sequence
  DNA replication origin
ctcaaaaaaaaaaaaaaaaaagtgggccgggcacagtggctcacacgtgtaatcccagcactttgggaggccgaggccagcggatcacaaggtcaggagttcgagaccaacctggccaccatggtgaaaccccgtctctactaaaaatacaaaaattagctggccgtggtggtgcgcgcctgtaatcccagctacttgggaggctgaggcaggagaattgtttgaagccgggaggtggagattgcagtaagccgagatcgcgccactgcactccagcctgggcgacagagcgaggctctatctcaaaaaagaaaaaagagtggtgacagccgaccaaaagtggctcaagagacatccttctgccttagggtcccgctggccccaggaaagctcctttcgtgcctcctgaggactctgggacggagaggtctggaggccacagccagctcgcccccgcccccgcctacgtcctgctttctggccgctgcctctggtctgctgcagtcaaaggagcagggccagccctgagctcccacccagcgccagtgggggacaacgtggtgtcagaggctcctctagagggaaggcgaagaagccgcttgggatccttggggtggggtggctgggcctgcaggggtcgacagcttgggtccctcgggccaccctggggagctgatggctggtggagggtagggccccactttgtgcttcctgctgtgatgggcgaaggtggatggggatccctggagcagccggtgctccgccccatgtgggctcctgcgggattcgggggacagggactctgagccttcccatgtggggggcctggatgtctctatcccctggcagtcacgaaaactcaagccacatcccccaccagtgcagggacccagtggcttcacaacccacccacctgggataaaggacaaatggcccaggtggggtgaagccaggggagggacgggcagaaccacgtcaggttcaggacactgcgaagctcctatacccctggggccagggccaggctgcacagggttcagagatggatccccggtaagaggttcagacacaggttcccagaacaggccccaagcttccaacagcagtggggtaaggacctcctggagtggaagttggggggtctcaggagcagaggctgaaccccgggttacttatagaccccctaaagtggaagttggggggtctcaggagcaggggctgaaccccaggttacttacagaccccctggagtggaagttggggggtctcaggagcagaggtggaaccctgggttacgtaccgacctcctggagtggaagttggggggggtctcaggagcagaggctgaaccccaggttacttacagaccccctgaagtggaagttggcggggggtctcaggagcagaggctgaaccccagggtacttacagaccccctggagtggaagttggggggtctcaggagcagaggctgaaccccgggttacgtaccaaccccctggagtggaagttgggggggggtctcaggagcagaggtggaaccccgggttacgtaccgaccccctggagtggaagttacttacaggggctgtgtgactactccggcctcctgggacccccatggcaatgctccaggcagccaccgccctctcgaggtcgtcccttcctgtgactggcacctgggagctgagctggctgcagcagggccaccggccgggacaccccacagagcagtcactggctggccctggagctccccatctgactagattgatggactgatggataggaggccccgccaggcccaagcccacaggccagatgggcacctctccgtgcagccccccccagtcagccttgtgggtaggtgtagggaggcgtggtggcgaggcagggcacgggatgggagaagggtacctggggcctggcactcaaagatgagtgacgaggtgggaggtggggacagccagaggccctcacagccctgatggggctggaagacgccaaggcccagagatggggtccggggctccaggtcagatcaaggaaaaacccagcccaggcgggcatgcccggctcccttccgcggcgccacagcggcttcgagccaggcagagcaaaatccccgaggaaaggcgtccctccccagctctcacctccccagacccggcagggttgccgggacgacggctcaggccttccggaggttg

SEQ ID NO: 33791 - DNA, 1174 bp, Artificial sequence
  DNA replication origin
ctccgtgcagccccccccagtcagccttgtgggtaggtgtagggaggcgtggtggcgaggcagggcacgggatgggagaagggtacctggggcctggcactcaaagatgagtgacgaggtgggaggtggggacagccagaggccctcacagccctgatggggctggaagacgccaaggcccagagatggggtccggggctccaggtcagatcaaggaaaaacccagcccaggcgggcatgcccggctcccttccgcggcgccacagcggcttcgagccaggcagagcaaaatccccgaggaaaggcgtccctccccagctctcacctccccagacccggcagggttgccgggacgacggctcaggccttccggaggttgccacagagccaggagcccagggctgccccagcccacgcccggctgctcgtcccccgtgctcctgccctctcgggagcagcgtccctgtgtccacgggagggatcgcaccgcggggcccctgccccaccgctagtggggtccatcttcctctggagaccccggtgtgtgtaagcagagctgaggactgatctttaagctgcctcctggccctgctcgtgagtctcaggaaactgtgacactcacctggcccgggggtcctggcccaggggtccccgctccaggagccacccagcaaagggaaaaggagagggcactcctgagggtacatggcccactcacagggggtacagccttgtgtggcaggagggacggagcccggctgtcccatcgcagtgactccaacctctaataagcctcaagacactcggggctcgggcggcgagatcctggcaacagagtagggtagacgttggggcctcagggcccccagctggctcctgaggcacaggcggcgcggccctcactctggccacagcagccaaatgctcccgtccttattcacaggctgggggtgtgcggcagggagaggagggtcctgaccgatctcaccgggacccaggtcctggccctcccgcccgtgggttgccacaccccacggcccgaggttgacatggccacacagctttggtaaagacttttaagagaaagaagtattttaaaaagtagcagtgctctgaggctcagggtgtaggatcgggggcacagcctggtcccgggaggccccttgtgcacagg

SEQ ID NO: 33792 - DNA, 1886 bp, Artificial sequence
  DNA replication origin
gcagaggccactgccagccccccttttcccccatggtcatggtgtcacccccgtcaccctctgactgcaggcctgggcgactgcggggagcttgctcttccctccccctcatcacagtggccttctcatggcacccaaacctttcccgccgttctcctgtcctcgggctggtcaggcggatgaggtccctactcccgagcccccagcctcacccactgcagggccaggctctcagtcacccctggaaaatggtgcctggttcacagctcccgtgcatctgcctcatctctcctgatcaacgtctgtctcttgggagtagctagagttcctcatgagcttgtcctcaagcgaggcatgcatgaggcctccagccggtggtcagtgagggagttaagtggcttctccgtggaaacacagccttctgctgcagcagaggctcacccagcgtgaactgcccccagggaacactgggcgatgcctggggacattgtggttgtcacgatggggggtgctcctggcctggagtgggtggaggccagagacactgctcagcagcaccctgcagtgcccaggacggccccgtcccagagaacaatccagccccgaatgtcagcaccttccccctacccgagttgtgaaaataaaaaatgtttccagacattgccaggtgtccacacgggcagaatcgccctggttgagaaccactgtgtgcgcgtgcttgtgtgtgcacctgcgtgtgcgcgtgtgtgtgcgtgcgtgtgtgcacatatgcgtgtgtgtgtgtgtgtgtgcacgtgcgcaggttgtaatgaagtctccgctgggaaggaagcagggaagcaggcattgttgagtgtcgattgtgttgtgattttcctccactttggtctcgaggtctctctggagggtggctgtgaactctggccctgccgtgacgaggctccagggagctgttgtgggcgtttacagcctgcctttcatgagacatttcatcctggcgcatagcctaatgcctgcgtgtccgccccgtgagcagctgtccctcccataggagtgtgtacctcttgcagacgccctgcggctcccgtctgacccacgtctagtttctccccaccaaagtctcccctcgctaggagagccctgaccaggaggagagtcgggcccaggcatgtcggtcagggaagcagagaggaggccccgcggcagaacacgcaaggccagtgcagctctttatgtgtttattttgagccggagtctccctctgtcgcccaggctggagtgcagtggcacgatctcgtctcactgcaacctctgcctcctgggttcaagccattctcctgcctcagcctcctgagtagctgggattacaggtgctcgccaccatgcccagctaatttttgtatttttagtagaaacatgtttccccatattggccaggctggtctcgaactcctgggctcaagcaatccgccagcctcagtctcccaaaatgctggggtcacaggcatgagccaccgcgcttggctggtggtggtggtgttaattcatcacaggcgagcccttcctctcccacttgttttaacctctgtgtgaatcggggatttctggactttgctttgaacggtgacatctggccagccctgtcgccgccacccctgagcgtgggtctctctctctctctcgggtgtccccggctgcagctccagaaggtcctgagcctcggccacatcagcaccgactacccgctggccgaaaccatcctcctgctgggcttcttcatgaccgtcttcctggagcagctgatcctgaccttccgcaaggagaagccgtccttcatcgacctggagaccttcaacgccggatcggacgtgggcagcgactcggag

SEQ ID NO: 33793 - DNA, 1934 bp, Artificial sequence
  DNA replication origin
gacttcattacaacctgcgcacgtgcacacacacacacacacacgcatatgtgcacacacgcacgcacacacacgcgcacacgcaggtgcacacacaagcacgcgcacacagtggttctcaaccagggcgattctgcccgtgtggacacctggcaatgtctggaaacattttttattttcacaactcgggtagggggaaggtgctgacattcggggctggattgttctctgggacggggccgtcctgggcactgcagggtgctgctgagcagtgtctctggcctccacccactccaggccaggagcaccccccatcgtgacaaccacaatgtccccaggcatcgcccagtgttccctgggggcagttcacgctgggtgagcctctgctgcagcagaaggctgtgtttccacggagaagccacttaactccctcactgaccaccggctggaggcctcatgcatgcctcgcttgaggacaagctcatgaggaactctagctactcccaagagacagacgttgatcaggagagatgaggcagatgcacgggagctgtgaaccaggcaccattttccaggggtgactgagagcctggccctgcagtgggtgaggctgggggctcgggagtagggacctcatccgcctgaccagcccgaggacaggagaacggcgggaaaggtttgggtgccatgagaaggccactgtgatgagggggagggaagagcaagctccccgcagtcgcccaggcctgcagtcagagggtgacgggggtgacaccatgaccatgggggaaaaggggggctggcagtggcctctgcgatgcaggagatgtcagagatgaccaagatctccatcctcgcagtgcagatgtcagtcttcacacaccgcgtaacgaacgaatgcagactcagccacgcggaacagcaggaatgcggtgtctcggctctgaacggtggaaatccaggtgcgggctagctgggccctacgctccaggtctcgcagggtgtcatcagggctgagatctcactgacacccagggtcctcttccaagctcactggaggtcggaagagtccacctcctggtggctgtggactgaggccccgtgtcctggctggctgttggcggggatggctcttggcaccgagaggctgccctcgggtcctcgcttcatgcccttctcctggcacaccctggctttttgcttctccaaggccagcaggagggtgagtggctcacctgattaggccaggcccaccccctcccttttgatgaactcagcgctaaccgatctggggcggtcatcacagctgcaacatcccctctgctgggattctgacataatggcaggagtgacacgcacggcagtcccagccctacccacactcgaggggagggaagagcatggggcgtgcggagcaggggctggaagctcagggagccaccctggaactctactctgccacactaacaggctcagatgatttaatcccagacaacagcccttctcctcctttctggacactaggcacgaggaaaagcagggccaggggttgggggataagcttagggcttccatgctttcgttgggaggaagaacagggggtcctcatatctccaccaagtatgtaaccaacacaaattcaatgtcacatctggcactggcccagagagaggaagccactcacccagggtcacccagcaagcatggccagggctggtcacactgtggcctgacaggggacccacactctgggctgctgatatgggggagctcaaggaacaggtcagcagaggatgatgctgtcaggagttggggtggacagactccaagatggccccagaagcccctgcctcttgacagccataccctgtgaggtcctggccacttgagtatgggaaggacttgaacttgcttctaaccagcaggacactggg

SEQ ID NO: 33794 - DNA, 1368 bp, Artificial sequence
  DNA replication origin
gggatcagcagcgaggacgctgagagaggagccgcctccgttggaaatcccttcccatccacctccaagcctctttccaagcgggattcagcaccaggcgcccctggacagctctggaaacccaaccctgccggaaccgttcctcgccaatccgggtttcccgccggggccgcttggtggctgcgcccgccgctcagcgggaggaaacccctttcctgtgccggtaggagaggtggagtcgcatatgagtggcaggtttcgcagccaatagtatggaaagttctgccagcgggtctcggggaggccaatgggcaggggcgtgggcggggcgtggaccagccgcgccgagcggggcctctccgggccgcgtctgtggggtcgagactgcgcggccgttgggcgtgcagcggcgccagtcggcggacgaggggcccccgggaggtaggtgcgggcagagagaggacctggggcggcggggcggggcggcgctgagcggccgggggtctgttggactctacccgcacgttagccgaggcccgtctccggtgcccggtagcgcgaggcacacagaaggcgctcaataagtgctgattgaatgaatgagcccgtgccctcctcatcccggcccgagcagcctccggtttgagagcgtgcaggccaccctcaccttcactgtacagactgaggtatccagatgccggacaggtctttattgggcgcctactgtgtgcctgggtggctctgcgctgggtgcagctggccctgagcaagacagacagcctggtcccgcccagctcaccgccgggggggagggacgactttaaatgacttaaaataatgtaattcctagctccctctgtagcacaaaataaaagaaaataacaccagggaagggggcggggagagctctgagtggagacatctgagcagtgacccgaagacctgaatgcagtgaggtagcggggccatgaggcgcttggggctgatggtgggggagaaaacccagttggggaaaactcaaggacaggggaggagctgagattcctcctaagaacggtgacattttggggtccagggtgaaaccgacttcactttggcccattgcatcaggtaaaatgcggcccttatcagtggccacacgcttcccctcgtccatgtgttcagccagcggtttttgagtatctgttctgcagcaggccttccggcgggtacagggatatggtttagggcaggagtcagccaggggcagagagggaggccctttttttttttttttttttttttttgagacggagtcttgctctgcagcccaggctggagtacaatggcgcgatctcggctcactgcaagctccacctcctgggttga

SEQ ID NO: 33795 - DNA, 1165 bp, Artificial sequence
  DNA replication origin
ctctccggctgctttcctggtggctgttttagggccaaggtgggtggcacctgaggtgtcccgtggcctccacccagcacaggaggggtaagcttccctggggggccccgggcccatgaaacatccaggacagaaggacagcaggatgggacacagacagaaacggcccagctgccttccctgtgcccggggctaaggcggccgggacagaaggtcatgatgtcgcccctggctctcagtcgcgaggaccagaaaatgagggtgggaggaggggaaacatgtctgtcaacatgcccaactggagaaaagtcacagaaactggtcctatgcacccaggacggctcctgagccgcggaggcgtggggtgaccgcagccgtctcttaggtgtctgccactaaagagttcctcatgcaaacacacatggcccgcggtgcccaggccgcagctggcagtgagctcttccgagcaggcacagggccggggtggccgggaggtcgactcggaaagaggcttctcacagacgggagagttcctgcagacagaccacgggatggggggcgggggctgtaaaaggctttggaagccacacgatccgccacacggctgaacgtgaaacctgccacttctctgagagcggcccgggagcaccccaggattctagaaaacactcaagtgaccgagctttctgggggctggaagggaggtcgctgctggtctgtgctcagcttgctggctctcgtttcaagaagggtctgggggctgtaagggagttacaaaaagggagtggaggagggcagagataaaaggggaaaatccatcttgacatgcaggtccgaggtctctctcttcccctctctcaggcagtccaacaggaggaagtggcagacaaccagaaggcttccttcgggtcggccagggaaggacgcggtcacaccgggagcagctggaaggggacagacatgaaggctgtcagagcgcaggtggggaccaaggctgcaccacacactccaggcagcaggagaggcccagagtggacagccaggggccacagcggctatttcaacgaacgtcagagccacagctgcaccagaagcgttccacacactcggggccacgtgtggctggtggcgcagagaacatcgccatgacctagaagggtctaca

SEQ ID NO: 33796 - DNA, 1319 bp, Artificial sequence
  DNA replication origin
atccctcatctacagcgcagaggcctctcccatctcaggtccctgctaagcatcccggaggacgcccccgcacccggccgcccctgccctgggcaggccctgagctggtacctgttgcagaaatagacggcgttggctgggttgagctcgatggcttttccgtagaaatgcacggcagcttcaaagttttccactttcatctgctcgtttcctacagggagagaggaaaacaccggcccggtgtccacacagaccggagggggtgtcagggagagaggaaaacaccggcctggtgtccacacagacccgagggggcgtcacacttggctcttctgggcagccaggactcaacacagatgccggctcaggaggcatctgcatctatagggggttcgctagtcgcaaacaatcatatctacatccactaagggggatggaggtgggggcggcagggcctggcctggcctgtgcctggcgacggtggctgtcactgcctggatggcgaccccgggagcagaacagttaatacagctcaccggcccggggacggaaactgtccctttcgctattgcttttggaaagagcccaagtggaggcctgtattttggaatactcatgtgataccttctcatttcataggcaatggggcttctatctgaggcatgggtcccagctggtaggacggtaaaaaccccagctgctatcctagaactgagagccctgaagacagaaacccactcccgcccccgagatcccaattcaggagggcgtggggggaagatgggtatcagcgtgtgtttccctaaacagttttattgagatataatttacatgccacaaagcttacgctttaaaaatataagcccgggcgcggtggctcatgcttataatcccagcactttgggaggccgacgcaggcggatcgcaagatcaggagaccaagaccatcctggccaacacagtgaaacctgtctctactagaaatacaaaaattagccgggcgtggtggtaggcttctgtagtcccagctactcagaaggctgaggcaggagaattgcttgaaccagggagtcagaggttgcagtgagccgagatcacgccactgcactccagcctgggcgacagagcgagactccatctcaaaaaagaaaaaaaagaaatgggatcacatgctgtgcgtccttttgtgtctggcctctctccctgagtgtgatgtcttcacggtgcatctgcgctggggcctgggtcagagcctcacccatccacattccaccgtgtagatgggccatgctgtgctgaccatttagcgtggacaggca

SEQ ID NO: 33797 - DNA, 1263 bp, Artificial sequence
  DNA replication origin
ggctgcgtgcaatgaatgggaccgcctctgtccccgcttcagtcgccatccagtgcctggagactgcgtttggggtgacggtagaagacagtgaccttgcgctccctcagactctgccggagatatttgaagcggctgccacgggcaaggtgagcctcgatgcttccccagccactgcccccaaaataagaacagcaacagcaggcagccctggggaccccaggagccccgctctcatcgtcccccagcactctgcctgcatcctctcctgggctggggacgtggctgcaggagcacttggccctcctccccctatcggcgggtcctgagacacatagcgctgtggtcactcgcccagggccacatgatggggggccaggagtcccctgcagagcccccgggtccttcggaacttggtggccctctctggcgtcccgagggaagctaaggccggagggtgccaggttgggaggagaggacagcgggccgcctttgcctccgggtccaggagatgccgcaggacctgaggagccccgcgcgaaccccgccttccgaggaggactcagcagaggcagagcgcctcaaaaccgaaggtaagggaggacctccatccccacagacacctcgccctacctggactccggggctgtgggaccctcgcagaggccagctggtccctggggcccagggagctgagggaattgccctgatgaccagcacgctggcttgtggggacggggacggaagggggactggcgaggggactggcgaggtgcagagaaacttgaccttcaggcacagcacggctggtggggttgtcgggagcggcccctgtggaagactggctggtggcccccaaaagttgcacagcttccatgagacccgccggttccaccctgatactagatatgtgcccaagagagacacatgtccaccaaaacccagacacatgttcacagcagctgtattcacaagagtcaaaaagcaagaagaggccgggcgcggtggctcacacctgcagtcccagctctttgggaggccgaggcgggcagattgcctgaggtcaggagttcaagcctagcctgggccaacatggtgaaaccccgtctctactaaaaatgcaaaaaaattagccaggtgcagtggtgggcacctgtaatcccaactactcaggaggctgaggcaggagagttgcttgaacctgggaggcggaggttgcagtgagtccagatcgcgccactgcactccagcctgggcgataag

SEQ ID NO: 33798 - DNA, 1184 bp, Artificial sequence
  DNA replication origin
catcgaggctcaccttgcccgtggcagccgcttcaaatatctccggcagagtctgagggagcgcaaggtcactgtcttctaccgtcaccccaaacgcagtctccaggcactggatggcgactgaagcggggacagaggcggtcccattcattgcacgcagccccgaggttacgtttttgggtctagagggcggggttggtgctcatgcttccccaggtgtgttcattcccaaggaccccagaacgcaggggccgccgcctgtgctctgggctgggacagtggaccctcttccttcccgaaaagaaaagccagacagagacgccccgtgcccctgagagcagcagaggccgtgggcagagtggagcccaggtggtgacctcaggcctctgtggggtcccaatgctggggctgcccggctgcggcgtggtgggggcttggccccacctggagggccacgtcaggggtgaggtgccccggatgctgttgcacctccaagggcgcctggcctgagtaaggagcttgaagccagcccccagtagaaggcctgtatgactgggtctgtaccagggcaggaccattgagagcaggacaagaaacagccacagggcccctctctctgctggcccacctgacagactcagcacccagggggccctcccaccgagccagacaacactagccctggccgcctcctcgtgtggacccagggtcctaacccaggtcagaagtgggggtcagccacttcctgcccagcactgtgtcaaggaccccgggcacatccctacagctgtcactgggtgtccatgctacagaggcctggcaggcccaggacacaggtgagcgaggcataggtggggaaggaggacctagagcagaacctgcagccacacgagggtgcctccccgagccctcctttccctccgagccccggatccaggtgtcgcagaagcgcaagcaagaccagccaggagaccaaggcacctggggagcggacaggccatgcaggatgccaacgagtctgggactctggggcggggccagcactaggagagctttttccccgtgaccgatggtgacacacacacactgggtggtgagaacattccagaacacaccttggtggaagatggggagatggaaaaaagccactggaaggcagctcagcctgaaggcatcaagcagtg

SEQ ID NO: 33799 - DNA, 878 bp, Artificial sequence
  DNA replication origin
ggcgggtgtccgaggggggcacaggagggtgtccgagggggaactagaggggggtctgaggtggaatgaggtaggtaggcctcccagggggaacaagacgggtccccaagaagtccctggggggagtcctctgcaagtcctgtgaaacagtgataccagggcaggcacacctggccccgttgggtacctaagaaatgcttgctgacatgccacaaaagaggtaaattgaggaaaggggcagtggctctggctgaggacaaggtctctccctctcagcactgtggacattggggctggatcgttctctggagtggagctgtcctgggcactgcagggtgctgggcagcatccctggcccccacccacctcatgccagaagcaggggcggaggggacctccgtggcgcctcagtaccaccctgggagtgctcaggaggccctgggagcacgcgggttctctagggcaggccctgcttgcctgctggcctcacactttctggctgtgtgcatagccggattggtgagctctgggcctcaggtcatcatctgtgaaatgggcgtattaaggcctttctacctgggctgtcctggagctgagatcagccagcacccttaaagtgaggcccagctagttaggggcaggcctggggtgcctggagtggggagtgtgagggggcctgatgggggtttttcctgcacccccaggtatcacctcttctgggctcaagatggacaacaagaagcgcctggcctacgccatcatccagttcctgcatgaccagctccggcacgggggcctctcgtccgatgctcaggagagcttggaaggtaggtgggtgcctgccacttccccctctccccgggcagcggccagcacag

SEQ ID NO: 33800 - DNA, 968 bp, Artificial sequence
  DNA replication origin
ccgaggcccctccaagttggcccaggcacccaggaaacctgtgtgaaaggtcttgtactaaaaaaagacctgtccatagactacagctccagattccagaacagcctctcctgatgtcaccatctggcaccctttagagctttggcaggaaactgcagggaccacagacatgagcagaagcagctgtcaagtcctgggaatgaggaacaagacagggtatccgaggggggaccaggcggatgtccgagggggaaccaggagggtttctgagagggaaccaggagggtgtccgagggggcatccaggagggtatccgggggggaaccaggcgggtgtccgaggggggcacaggcgggtgtccgaggggggcacaggcgggtgtccgaggggggaaccaggcgggtgtccgaggggggaactaggcgggtgtccgaggggggaaccaggcgggtgtccggtgggggaaccaggctggtgtccgctgggggaaccaggagggtgtccggtgggggaaccaggctggtgtccgctgggggaaccaggagggtgtccgctgggggaaccaggagggtgtcaggtgggggaaccaggcgggtgtccgaggggggcacaggagggtgtccgagggggaactagaggggggtctgaggtggaatgaggtaggtaggcctcccagggggaacaagacgggtccccaagaagtccctggggggagtcctctgcaagtcctgtgaaacagtgataccagggcaggcacacctggccccgttgggtacctaagaaatgcttgctgacatgccacaaaagaggtaaattgaggaaaggggcagtggctctggctgaggacaaggtctctccctctcagcactgtggacattggggctggatcgttctctggagtggagctgtcctgggcactgcagggtgctgggcagcatccctggcccccacccacctcatgccagaag

SEQ ID NO: 33801 - DNA, 1423 bp, Artificial sequence
  DNA replication origin
ccacacggcagggacaccgagggcagaggtgggtgacgcggccacacggcagggactccgagggcagaggtgggtgacgcggccacacggcagggacaccgagggcagagatgggtgacgcggccacacggcagggacaccgagggcagaggtgggtgacgcggccacagggcagggacaccgagggcagaggtgggtgacgcggccacacggcagggacaccgagggcagaggtgggtgacacggccacacggcagggactccgagggcagagatgggtgacgcggccacagggcagggacaccgagggcagagatgggtgacgcggccacacggcagggacaccgagggcagagatgggtgacgcggccacacggcggggacaccgagggcagaggtgggtgacgcggccacacggcggggacaccgagggcagaggtgggtgacgcggccacacggcagggacaccgagggcagaggtgggtgacgcggccacacggcagggacaccgagggcagaggtgggtgacacggccacacggcagggactccgagggcagagatgggtgacgcggccacacggcagggactccgagggcagagatgggtgacgcggccacagggcagggacaccgagggcagagatgggtgacgcggccacacggcagggacaccagattgccctcacgtcctcacaaggaacgagccccgacagaaccttgatcatggacttccggcctccaggactgagagacgatgaactctgtttcagctgcctggtctatggcactctgtcaccgcggccccagcaaaccgacactaacacctggcaagcaggcatctcaggacgcacctcagtcctcgtgacgactccaacaagcgggtcggccctgtctccagctgaactgagccaggttgggcagggacgcgtggtcgcatgcccaggatcacatagacaggagaacaaacgggctgtcatcacacggaagggagcagtgaagggcggtggccgagggacacggagggagggagcagctgcgcgttgctcactgtgctgcggtcccaggagccagctgcccgaggggcagcttcttttataagaaaacgacacttcctatcacgtctatgcaaatgtccattttaactttaagtgcacagatgtctaatggcccgagacacgtaggttaacacccgtgcacgcgtacacagaggccttcacctacaaccatccccgtgtagacagcatcagaggcagggcaccaaaagcattaaaaccatgcagatgacctacctgagcacttcgcagacctagaacgtcaactatgtaaaatacctgcccatgaacattggcaaactcctggcctcaagcaatcctcccaccctggcctcccaaagcgctgggatcacaggtgtgagccaccata

SEQ ID NO: 33802 - DNA, 1214 bp, Artificial sequence
  DNA replication origin
ggagcagctgcgcgttgctcactgtgctgcggtcccaggagccagctgcccgaggggcagcttcttttataagaaaacgacacttcctatcacgtctatgcaaatgtccattttaactttaagtgcacagatgtctaatggcccgagacacgtaggttaacacccgtgcacgcgtacacagaggccttcacctacaaccatccccgtgtagacagcatcagaggcagggcaccaaaagcattaaaaccatgcagatgacctacctgagcacttcgcagacctagaacgtcaactatgtaaaatacctgcccatgaacattggcaaactcctggcctcaagcaatcctcccaccctggcctcccaaagcgctgggatcacaggtgtgagccaccatacccggcctcctccaggaggcaaatgctgaggaaagccgtggattctactgacccactggattttgctgaagctgtgtgcgcgcgcatgtgtgtgtgtgcgtgcatgtctctccagattctgtctctctcccagaccagcggttctcgatggatgtgctgagacacttggtgttgtctcacatggagtggggggaggccagggacgctgctcagtgccctggagtgcccaggacggctccatcccagaggatgatccggcctcaacatccacagctcccactgggagaaagctggactagaagaggaggacctgaagagcctgtgggtgcaccaggcccttgacacaacaccgtctcatgacctcggcgcagtgacctatgcggcaggactggggatggaggtgttcactcaaggccactggagccacaggcacggcaggatccgcgcccggcaggcgcctgacctgcccccacactcaagatcagaggcgttcagtgtcttggttcccctaaaatgcctctacatgaggtgaacagccaccaccccctagaaaatgaggcgtgggctgcctgaccgcataacccaccccgcgccagagacaagcaaggcattggcccgccacgctttaaacagtggctgacgtcagactcagatgacaccggcgacgtggacctccacgccactaaacaagcatagtcccagacacactgggtgtgcccacagctttgtttccctttcagggaaagcaacatccatcagcaatcattaaaaaacaaaacaaaacagagagcaaaagagccagacccaaagcacacaca

SEQ ID NO: 33803 - DNA, 1458 bp, Artificial sequence
  DNA replication origin
gaaaccgtccgtcctagccaccccagcggctctggaatggtagagcaagaggctccgcccacgcaccgccgagaccaataacggaccgggagggttacggcgagtgcgcagagggctccagcgcactcccggccctcctcctttagctgtgggcggggctcaggggcgcgtgcgtcctgccctccctgtgcgcgcgccgccccagcatgccccgggagcgcgggcggcgggccccttggtcctcaggcggccgtggcggcggtggcggcggttgggccgaggcaggcggcctcagtggccgaggtggctggacgcgtagcaggtggaaggagggagggagccgcaggcgcagacccacccgccatgaagccccccgcaggtaccgactaccccgctcgccggacccgggcgtcccctgcaccctcgctcctcccggggtcgcgacttgggcctaaggctggagcgaagcgacccccgagccaccctcggccgggctggaggggcagcgggggaggtggacgaccctgctctctcgtttgccgaatgaatgaaccagcttttccagcgcttcattcattctgcaaagttgatggcgcttcccttccggatgggtcgggccccgtggcggaccctggggaggccgtgatttaacgactccagtcccgttttcctggaattctagagccacagacagacattcaaaaattaaataagagaggatcgaagatagggagggatcggtgctctggtgcagataaacacgaacggggcagtcccagggacacgtttttagagagagggtggttcctggggggcttttctgaagaggtgagcgtcgacttgcttgattgggagaagcaagtgtcctgccaagaccggggaaggaggcgtcccgggaggagggaacgtgtttggagagcagaaagtcagtttggctggaacgtaacgaggggaccttttaattttgttatttatttactttgtctcccaagcgggagtgcagtggtgcgatcacgactccctgcagcctcgaactcttggactcagtcaatcctcccgcctcagccacctgagtaactgggactacaggcctgcaccaccacacttggctaattttttgtagaaacgaggtttcgccatgttgcccaggctggtcttgaagtcctgggttcaagcaatccacctgcctcggcctcccaaagtgctgggattacagacatgagccactgtacccagccaagacccttttaatttagaggcaaaggggcgatgtgacctgtgtactgtttatttatttatttgttggtttattttttgagacagtctgtgtctcccaggctggggtgtagtggtgcaatctctgctcacacaggctcaccgcaacctccgcctcccgggttcaagctatgctgcttcagcctcccaagcagctgggatttcaggcgcccaccaccacac

SEQ ID NO: 33804 - DNA, 1037 bp, Artificial sequence
  DNA replication origin
caagagccctggacctcactcttctggatgagaagcgggtgatcccttcctttccctctgccctcctgactttgaccctaactgaaccgaaagcagacccgcccggcactgggttttgtttctgcgtagcctgtgcaggagacatggcggacgcagcatctccgtgctctgtggtaaacgacctgcggtgggacctgagtgcccagcagatagaggagcgcaccagggagctcatcgagcagaccaagcgcgtgtatgaccaggttggcacccaggagtttgaggacgtgtcctacgagagcacgctcaaggcgctggccgatgtggaggtcacctacacaggtaagtcccaggcagggtctgtgcgtgggccgcaggtgccgagggaggtggcaccgcaggcgggagtagcccagcccgtggagccggttcagaacctggcttgaagtgtcaccagcaccctgcccctgagcacagggcagcgccacctgctcccaggctggtcgtggtggctaaatcagatggctgggcggaagcgtctggcaggtgctggtcactagaggtgtaggagagaggcagttcctcccgtgctccgctctgcttcacagcctcgtccattcaaaggactccctggttgtgtgatctgagagccggagatgagaaaatatgtctaaacagcacgcctctccagcctctcccagagccagcagccttgaaccctgaccccgtctggcctctttccctggcccgggaaggcgggtatttgtttctctctgaatgactgaacttggcccccttggcttctgcctctgcgccctccggcgggggtgacctcatgtcctcgggcgtcctcctcaccctcagcccgatcctcctcctctccttggggtccctgtgctcacggtgaggagtgaggtgcctagtgacaggggttagggacactgcttcccgagctctgcctaaggctgacagtgtacctgcctgaccaagagacccagagagtctccgcagagagctctgagtgaggcaactcccca

SEQ ID NO: 33805 - DNA, 1188 bp, Artificial sequence
  DNA replication origin
acagacagggtctcacaacgttgcccacgcttgtctcgaactcctgggcccacgcaatcctcccacctccactttccagagtttctgttgagacaatgagaggttcccatgcaggtgcaggaaagaatcgaatgcctttgccaactttgcccaggtccccagtgatgacgttttgcaaaactatggtgtcatctacaccccgataccgacctggagaccaccagcaatctaattcccattcagccatcgcactggtgaaggagctctggactgatgtcagtgtggggctcttccaaacaaagcgaacgtttgcacaggttttatgtagagacaggtcgtcatttctctgagataaatgcccaggagtgcagttgccaagtcacacgggggccggatgatcaggtttttaagaaactgccaaactgctctttggagcggctgcactggcccacgtcctacatgctttgatgtttttattccaggagaaagttcagaaggactcactgaggcccgaggctgcgcggtacctggagcggctaatcaagctgggccggagaaatgggcttcacctccccagagagactcaggaagtgagtgctgggtgtagggagtgctgggcgtgggcaatggtcgatcccggggagtgctgggcacagggagtgctcagtcccagggagtggtgggagcaagaagcgcagggcagggggagtgctgggctcggggagtgctcggctcagggagtgcttggggcatcaggagtgctgggttcagggagtgctgcgtcccggggagtgctggactcagggagtgcttgggcacagggagtgctgggtgccgggagtgctgggtgtgaggagtgctcggtcccagggagcactgggcatggggagtactgagctcagggagtgcttgggcttggggagtgctgggtggggggagtgctcggtcccagggagtactgggtgtggggagtgctcagtctggggagtactcggcatggggagtactgggcacggggagtgctcagtcctggggagtgctcagttgcggggagtgctgggctcagggagtactgggtgcggggagtgctgggcgtggccagtggagcttctgtggccccctgcccctgcctcctcgggagcgtccccccttcagggctgacccccggcctgatgtccatctttcttc

SEQ ID NO: 33806 - DNA, 1379 bp, Artificial sequence
  DNA replication origin
tgggcacagggagtgctgggtgccgggagtgctgggtgtgaggagtgctcggtcccagggagcactgggcatggggagtactgagctcagggagtgcttgggcttggggagtgctgggtggggggagtgctcggtcccagggagtactgggtgtggggagtgctcagtctggggagtactcggcatggggagtactgggcacggggagtgctcagtcctggggagtgctcagttgcggggagtgctgggctcagggagtactgggtgcggggagtgctgggcgtggccagtggagcttctgtggccccctgcccctgcctcctcgggagcgtccccccttcagggctgacccccggcctgatgtccatctttcttctgcctgaggacctgaactctggcaaggcaggtccacacagacatggggcgcagaggctcggtaacgaggggagcccctccacccactgcccggtgtgcctgatgtgggcgtctcaggggtgacatgagttagttggtgcagagctgggagcgcagcgctgaagtcaagcgtagtgtgttagcagaagcccagtgttcagcggcaccaacagagcagtggcgaccgccactggaaagatgcgtgtcacagttcccaggaactggcagctcgccacatgggaagcatggctgggtcaggaggtgtgctctgggcagggccttcgctggggtcccttgtgaaggcatgggtgtagcggggagtgggctcagggttggccggctggaccatctcagccagccctggcatgggggctgcccctcatcgggtgcctggccctagggtaatgggggccggtggatggtgccccagagtgtaggggctcgagactagttgatttgcacgtgaaagatgtttgcaggcgagctgttggctgtctctgggaggggccatttctcgagggccagcaaggcacccaaatgtcaaagcatcagaatacaggcccctgattcaccatggtgtgtgttcagtagaaaccgtgcttggaatgctgatctttccgaggccggccacttgggcacttgctgtcctgtgacgctgggcgccagccacagctaccagctagcctgcaatgacgcaggcaaactgaaaaccgaagttacatgagatacccaacacctcatatccgatagcctttgccttcggcgatctcaccagaatgtgggctgctgtgagttcctgagcacgcttaagacaggccaggttaagctgtgatgttcgctcctattaaatgcatttgtgatttatgatattcacaactcacgatgggattattgggacatacccctgtcctaagtcagggagcatctgtacaggaaagaaagcacacagttcaatcaggtcccag

SEQ ID NO: 33807 - DNA, 1163 bp, Artificial sequence
  DNA replication origin
aacccgggggacggaggttgcagtgagtggaggtcgcaccactgcactccagcctgggcaacagagcaagactccatctcaaaataaattaattaattaattaaattaaataaataaaggcaggcaggaagtggggtctcaagggaaaattgtggttccctcagggccatggctgagactggcacccttggccaccccgtccggcctgggcttccgccactgccagggacattttctatcagggtggaatcttggtgggacagaccatggccctccccaaggagggctcagagcttttggctgtaaacggccctggagcgcttccggtgaggaaagtcctcagcccagggcggtcaggtccacgtacttcggcctcccgccgcccttcagcacagaagcccacaggaggaagcggcggcccccgagggcctggcaggcctgcactgagtcccaggaccgatggccacccgtgccccactgctcggcccctacctagctcctggagcgtgaagggcaggaaggtcgtgtcctcgttcaggttcttgttgaagtcgatgcacagaaggctcagcttcttcttgatgcgtttgatgttctggagagaaaggcggggcgtgaggggagggagagaccggggcgggctccgcggggagacgcaacgcctgggaaccctctcgccgagggctgagggatttccccaagaaccaggccgaaagaagaggcaaccgaggaggaaagagtgagacgggaggcggaggacagacagacacggaggccacgaggctgcgcagtgtggatttcaacaccagctgcggcatccaaagctgggtgacctcgggcaacctcagggatgtgctccggtctgtcaggtgtggccctggccaagagtgctccagaccctcctatccattaaggaatcaccttcagagcctgcagcctaagcttttcaacattcttctgagacagggactcgctctgttgcccaggctggaatgcagtggcatgatctcgactcactgcagcctcaacctcccaactcaattgatcctcctgccttagcctcctgagtagctaggactacaggtacacgccactacacccagctaatttttgtatgtttggtacagacggggtttcaccatgttgctcaggctggtttcgaa

SEQ ID NO: 33808 - DNA, 1729 bp, Artificial sequence
  DNA replication origin
agaaaaagggtcttgctctgttgcccaggctgcaatggatagttcacgaatgcatagttcacgttcactgtggccctgaactcccagactcaagcaatccccctgcctcagcctcccgagtggctgggacctcaggtgtgtgccggcatgccccgctgcacttgtggatttgatatacagacacagaatagaagagtgtgtgtgtccatgtgtggtgcagagatgcgtgtctgcttcctaactgttaacggtgcccaggaatgctgctccctggcagtggtgaacacatccggtgcctaagtcaccctccactcaaaggcgccaggtctcctccaagaaatggagcatctgagggctggggcagggagagcatgggacgagcctgcgacatcacatgtccaacagtaagagtgggctcagaggccgagcctgcggtaccgcgcgccccacagtaagcgcgggctcagaggccgagcctgcggtaccatgtgccccacagtaagagcaggttcagaggacagcaggtgcattacaaggacacagggattgttcggagggactcctgagggtccatgtgggacgatttgagcactgggataaatgataatgaatgataacccgggaataagacagaagcctcatgcacacggacagaaacaaatcagtaagaagacaggcaaggagggaaggttcggagtcacggcaggatgactgatgcccagagggtgagggcggcagaagtcatccatggacatggcaactagtgtatgacaatgtgcgagtgatggacactcacaggtctctgctctggttgggtgcgtcccctccaaaatgcaccaggaacttaatgccagagatggtggtgtcgggagatgcgggtatcgggaggtggcggtgtcgggaggtgggggtgtcggaaggtgttggtgtcgggaggtgttggtgtcgggaggtgtgggtgtcgtgaggtgttggtgtcgggaggtgttggtgtcgggaggtgttggtgtcgggaggtgggggtgtcgggaggtgttggtgttgggaggtgggggtgtcgggaggtgggggtgtcaggaggtgttagtgttgggaggtgggggtgtggggaagtgttggtgttgggaggtgttggtgtcgggaggtgggggtgtcgggaagtgggggtgtcgggaggtgttggtattgggaggtgggggtgtcgggaggtgggtgtgtcgggaggtgttggtgttgggaggtgggtgggtcaggaggtgggggtgtccggaggtggaggtatcgggagacggcggtgttggaggtggcggtgttggagatggtggtgttggaggtggcagtgttggagatggtggtgttggaggtggtggtattgagaggtagcagtattgggagatgtgggtatcgggagatggcagtgttgggaggtggcggtattgagaggtagcggtatcgggagatgtgggtattgggagatgtgggtatcgggagatggcggtgttggagatggtggtattgggagatggcaggattaggtactggggccttcaagaggcagctgggtcatgtggcctctgccttcaggaatggatgaatccattcatggattcatggatgaagggacagatgggttaatgtggcagagggcctggggctttgtgaggaggagagacctgggtggaaccggctcgcttagccccctccccttgccatgtgacaccctggccgc

SEQ ID NO: 33809 - DNA, 2386 bp, Artificial sequence
  DNA replication origin
tcattatcatttatcccagtgctcaaatcgtcccacatggaccctcaggagtccctccgaacaatccctgtgtccttgtaatgcacctgctgtcctctgaacctgctcttactgtggggcacatggtaccgcaggctcggcctctgagcccgcgcttactgtggggcgcgcggtaccgcaggctcggcctctgagcccactcttactgttggacatgtgatgtcgcaggctcgtcccatgctctccctgccccagccctcagatgctccatttcttggaggagacctggcgcctttgagtggagggtgacttaggcaccggatgtgttcaccactgccagggagcagcattcctgggcaccgttaacagttaggaagcagacacgcatctctgcaccacacatggacacacacactcttctattctgtgtctgtatatcaaatccacaagtgcagcggggcatgccggcacacacctgaggtcccagccactcgggaggctgaggcagggggattgcttgagtctgggagttcagggccacagtgaacgtgaactatgcattcgtgaactatccattgcagcctgggcaacagagcaagaccctttttctaaaaaaataaaaacttccaggagtccactttgcagcttctcttccagtccagcgctgctgggccccccagctgtctcccttgctgtcctttaactcccgtctccgaccgccagccgtcactcctgggtgacacactgtcgagatggagagctgctgtttgaaggcccgtggtccttggaaaggacgatgtgcaggtcccgggaggcctccccctcatgctgcagtcactcggcagacaattgccaggcccacgctggtgctggggtacaaacgggaaggcgggggctctgccggccacaggactctcagctccctcatcaccacccacacccacgggctggcctcccaaaatttcccccatctgcctctggccccccaaccggatcattctttccacccttgcctccctggggtccccgtgagctcccgatcattctttccacccctactgccctggggtcggggtgagctcccaatcattctttccaccctgaccgccctggggtcggcgtgagctcccgatcgttctttctacccctactgctctggggtccgtgtgagctccggatcattctttccaccctgactcccctggggtcggagtgagctcccgatcattctttccactctgaccgccctggggttgaggtgaaccagtctttgcattgaagctgcaagcctgaggcacggtggccctggcgtctcccgagccatgaggtaggaaccccagagggtttcagtccgggatgctgccgcccccacttctcttgaggctgtcgggcaggggccaggtgggagggtgtggctgccgggcagcggggtgaactgtgtcctgccaggggttttgtgggtggagaagggacagcagggctccagtgagaagctctgggagtaggaattgggtctctctggagggacacacttgaaagtggttgagccgtggggctgcgtgctgagatctcagctctgagcgggaggctctgcctgggggtggttcttcaggaaaagcaaagcaggacctccctctccacgtggggcctccctctccgcccagggcccagcgtgctcagctctcctgctgtttttgtctttgatgggaggcactgcctctaacgctggtttccttgtgcagtggccgggccacccttcccgccaccctcctcccttcacacatgaggttggtgacggcgccctggaagcccacgatgtccgggggttgggctggatttagctttaacctctctggggcaggagatcctgctctgaggatgctggggggtttcctggtggggttagaggcgggacgtgagaaacgtggcaggtggtggccaggctgtgggggagccagggtatttcttgatggggttagatgggggatgtaagaattgcagcgggtggtggccaggctgcagctgctcgctgagggcccccttgtagctttccaggcagaggggaagcccaccccttccctcacacgctgtgtgcaggctgtgggcccatcagtcctgtcaaagccaccctggttctgtccccataggagggctccccgaggactttctgaactccctggagaagatggaggacggcaagttgaaggtcaccctcaagtacccccattacttccccctcctgaagaaatgccacgtgcctgagaccaggaggaaagtggaggaggccttcaactgccggtgcaaggaggtgagaaggcacggccagggggccccagaacagtgggtctggagcttgtggggcccgtctgctccatgtgtgtgaggc

SEQ ID NO: 33810 - DNA, 1744 bp, Artificial sequence
  DNA replication origin
caggtgtgtcagcccagatcattccttttgtcttaaatgatggtgcccggacctgagcctgggtccacaggtgggttgtgactgggctatctcgctgtgactggcgtcagacggccgttcccacagggacacatgtaactgtccacggcgccatggtgtggtcggtcaggtggtctctgcacgtctcccattcgccatctggaacaggcagaggctctaggagtgggcctcttggtcccctgacgacaccaagttggtgcttgtgcggctggcaaaagggggatacacgctgatcactgcaaagggatgggcgggcactgatcactgcaaggggacgggcgggtgcccatcactgcggggggacgggcgggtgcccatcactgcggggggacgggcgggtgcccatcactgcggggggacgggcgggtgcccatcactgcggggggacgggcgggtgcccatcactgcggggggatgggcgggtgcccatcactgcggggggtgggggacgggtgggtaccaatgggggtacaggtgggcaccgatcactgcaaggcaggggggtgctcctcgctgttcagggaccgggaactcagtctgctcagatggggcgtggcctgccctctacatgttggctatgaattcatgttgctgttaagcctaagtaggtggacccgtggactgggcacacctcgacttccccactgcgccttagaaggtcaactgggcaatcccgtcctggtccccaggcttgggtcctagtggcagagtgagggccaggccaagagggcgcacacgggtgggctgagttccaggtcccgggggatgtgccgcctcagagaccttgctgctggcggtcggcctggcccctatttggctggctgctctgcacgcacctgctggttacagctgggtttcctgtggacccagctggtgggcacatctgtcctgaacaggcctctgtttctcctcgtaaacgcctcacgtggctttcatgcgtcctcccccacccccactggcttggttggcagtgccagtcctcagaagtgaggctgtgtgcatgtcatttgctggtggcgataggcagagcccgtgagactgggaaccaaggcctggacatggaggtgtccccacatgcagcagtgatgccctcggaggctcctcggacagcccctggtccccataccacgttccgtgtgaggccttagagtcatctgcaccccttctggttccaaaaaggccttgggattatgataacgctggtggcatgaccagaggagttgtgtagtaacacaggccgagaggggcagggaccggaggtcagacggagctggatatgagcctttggccctgggacagggcgtgctggccctggaggtggagggagtggcgcccctgggtgacagtgtggtggtgtcggttgcaggagaactgcgctatcctcaaggagctggtgacgctgcgggcccagaagtcccgcctgctggggttccacacgcacgccgactatgtcctggagatgaacatggccaagaccagccagaccgtggccaccttcctaggtagcccttccttcctcctccactggggtccctgtggggaaggttctcagggtcaccccaggggacagtcggtgctacccctagagccttgtcctttccctccatgaagagggacttctgacgcctgccctggctccctcactccccccgagggacccttacagaacagggaagcgcccggg

SEQ ID NO: 33811 - DNA, 2305 bp, Artificial sequence
  DNA replication origin
accccggccctgggtctcctcggagcccggtgtgcccgtctgagatgggaaggaagtcgttgcctgctccatggggcctcggggatgaaccccgagacgtagcacccgtgggcacaccacaggggccgaaaatgcagctgtccccgtttccagtctcactcagccaccccgacagggcgcagctctgcccaggccggagtcctttaggggagggatggcagccggggcctggccgtggttttcatgctgccctgcgccaagccacctctgctgagagggaggtttagaacctcagaggtgcccggcggtctgggttagcagtcaggtgggctgagggatgcggagtcagggactcttgcggtgtctctagtccctgcggggcctgacgctgcctccctccccagggaaggaaagtacgggcacgcggcctgctttggcctgcagcccggctgcctgcggcaggatgggagccgccagatcgccatcgcggccatggtggccaacttcaccaagcccacagccgacgcgccctcgctgctgcagcatgacgaggtggagacctacttccatgagtttggccacgtgatgcaccagctctgctcccaggtgggtgcgggcccgggcaggggcaggggcaggggcaggggcaggggctgcctgtggtcagcgaggcccaagcctggggcttcggcttccggctctctctgcacccgtccggtggctccttcatccaatgccacccaaagatggtgactccctgtcatgcccgtgtcctggggctgccccagcaaaacaccacagaccagggcttacacaaggtgcgtgtatttcctcatggtcctagaggctggagtcggaggtcacagtgtcagcagggttggctccctcgaggtccctccttggcttgtggccgccaccacctccccgcatcctcatgtggtcgtccttctgtgtgggtccccatctcgtcttcttacagggaccccagtcatgccggatcagggcccgcccaacaacctcacttgaccgtagtgacctccttagacatcctgtctctaagtagtcacatcctggccaggcgtggtggtccacgcctgtaatcccagcactttgggaggccgaggtgggtagatcacctgaggtcaggagctcaagaccagcctggccaacatggtgccatcttgttgcaagcatctgtcctagcacacagtcagcaatcgctcctcagaaaggctctgtcctatgaagtcactgagaaccctgagaagtgcatgcagacctgtccctccaaggggaccctggtcacgtgttcgccaactgatcattccagaaccttactgtgtgtgttttgggttcaagacaccttactgctgtacagcgctgacgggttcacgttgaacacatggctggtggctctgtcacccacacctgagcacagcttgcacacacagggtgtccccatgaggcacatcatggcctcctggtgctgaaggagacgagacagtgctctgcacaacgcttggggccttttaaacacaaaatcaccaagagcagaaagatgcaaacaccgtgcccccactagactgagaaaaggacgcttgctcataaaatgagccgaagtgagaagacagagtgcggcccttctgaggaccgtctgctcaggggcgccgcagtgctggcctctggggtttttgtggatcttagtaggcgagtttgaaaacacggagtccaggaatgaggatcgaccgtgtgtccacctttcctggcttccctgccacactgtttgcacagcactcgtagccagcacacgcgtgtgcacatccacacaggtgctcacacaggtgcccacgcacgtgcctgcaggcctgctttgcatgctgctttctgcgtgtccctggcgcctggcacggcgagtcccttggtgcattccgtcgggacaaggagtgtggctgcgtggtccttggaacagaaaagcctcggtgttgcagagaggaccttgaggatcacccaggagttccctcgccgttggctgcctgccatggttccagcgggactcagtcaagggctgtgcttttagggaaggttccacacacacacgagcagggagatgcagcatgcctcacagcgtccccacccggacctggccgtccccaggtcccaacccctcggggtgcggagctttcagggagcagcagctctgtggctagaggagaagcgtgggtggcctccagggacggggtcatgtggccggcatcttcaggtgtgtcctgctgccaccggcagccagcagcagcccaggggcctc

SEQ ID NO: 33812 - DNA, 2006 bp, Artificial sequence
  DNA replication origin
aacacaggtgcacccgccccgtccggggaagggtgctaacctcggggggcggcacacagctggggcctggcatgtgccccgggtgggggtcggagctctgggcagagtgggccggggcaggtgcagaggccagctctctccttccctcccgcccaggcctcttcaacctgcgccagatcgtcctcgccaaggtggaccaggccctgcacacgcagacggacgcagaccccgccgaggagtatgcgcggctctgccaggagatcctcggggtcccggccacgccaggtagccacccttgagccgggcacaccctggaatttggagcctcagctgcttccctgggaaggtgaagggagttggtccccatgcttcacttagcaagtgcaggagtccctgctggggagccacggagcgcgtcccaggctcctcgggggacagccccagctgagatgcagctgcaggcccagggtcggggacgggtgtgcggccccagcccccaggaggagtgtgttccctggagcctctgctttgaatgaagctggcgttttcctgattgaaatgtatgacacatgctttgtaaaaagcctggagaagtacaggaaggcctaggaatttccgatcctaatgatgagaagtgggccctgtttccatgctcacctgttgtcctgtgtgcatgtgtgttcacacacgcttgcgaggatccagaatttggaaatacagcatgattttaacatgggtggtgttttgctggcttaacactccatagacttcaaaaatctttccaaaagcgttttcagcagcgtggcctgtgatgttgcgtgggcgtgccttgctttattgacgcagtctcaaaatggggactttgctctgtggcagctgacagccccgttaaatgagctcctgtccttccaggagagggggcggagacttgtggccctcgctttgtggctgactctggttctagaagtatccagctggtctcggccctcaccgtgatcctccagcttctccctgttccgggcaggggtctcaggagtctggctggttgtcttctcctggaggaggagcatggggtgggggctacagcgtgaaccctgccatgtgtccgccccaggaaccaacatgcctgcaaccttcggccatctggcaggtggctacgacgcccagtactacgggtacctgtggagcgaggtgtattccatggacatgttccacacgcgcttcaagcaggagggtgtcctgaacagcaaggtacgcggggactggggacagggagggcgtcctgaacggcaaggtacgcggggactggggacagggagggcgtcctgaatggcaaggtacgcggggactggggacagggagggcgtcctgaacggcaaggtacgcggggactggggacagggagggcgtcctcaacagcagggtggggccgagaaaagcacacctttggcctgggcctgggtgtgccgggtgagccatcccggccgaggcacctgctggtcttggtgcggtgctgcccacagctcctccctgggccctgcaggaagctccacactggcccctcaggcctcgggctgtgagtgctgggagctccgtgtcttcccatacgagtccttccgggatctgcgtgatcggcctcagagccatgggctgagacagacccttctctggagaaggcttggcgtttgccattcatttgctcctccaacctccagtttcctcactatgaagtgcggccgttacgccatgtgagcctgtgcctcccgctgacttggtgtgacccaggctcgggacagccgccagagtccctcacaaggaacaggtggctaccagctttgagggccggccctgccctgcctgggtgcaacattgcactgggcagcctgcaggtacctcggagccaccaagcaggcactcagctgctccctttatagaggtgcagaggccaggacctgggggagcaatggtccgacaagccccctgtcttcacagcccagcagggacct

SEQ ID NO: 33813 - DNA, 1285 bp, Artificial sequence
  DNA replication origin
atttcccccttttttttccactggggagcagcaaggggccaaggagagtgacaacctggacgggcaggggatgctaatgccacactgtcctctgagcccactgctggagccctgagtggggagcatggggcagaggagccaggagacacagcagctctgcagccccctccctgtgatcaaagcccccgctctgtcctggagtgtttggggaaacccgggtgcccccggtgtgggcatttgggaaggctctgaggacgcccagctccctggggaacagggccctggaccgagactctgtgctactacctccacatccctgggtgtccacagagcaggggacatgctgggggaggcggcccaacttgcgaagcaccgcggggggctgcctggggtatccggcaactaagcccagttggtgacttccaggggagtggggtgtggatggtccaggccatccgcccacggcccagcagcccaaggctgtgaccccagctctgctgtgatgggccaggctgtgtgtgtgacaaggctgtgatggcccagggcccagctggggtgctcttgcacaactgggacttcgctggggaccaggtggaggccacctgagggctcggggcaggggaagatgagggagcccccagacttgccatctccacctctgcccagtgcggtcggctttgccttccagcttttcttttctgaaccccaggtattttattattattgttattttagagacagtcttgctctgttgcccaggctgcagtgcagtggtgggatcacggcttactgcagccttgacctcctaggctcaagcgatcctcctgcctcagcctcccaaaaaacagaccacaggcactggccccacacccaccgaacttattttttttagagatggggtcttgccacgttgcccaggctggccttgccctcctgggctcaagcaatccttccgcctcagcctcctgagtagttggggcttcaggtgcaagctatgggacccgctctgagctgtgagtatctgaaacgtgaccactgtggtgttcccacttatggattcccgcctcgctggcataaccctcctggccacaggctgtgccgtccagctctgcaaagacaagactcaccccttagcccccagagttggaaagacacagaagcaggtgcatggagcagagccaggcgtgcgtaaggtgcaaagcaggccccatggcagtggccacagccacactgacctgggctgggtgggaatgggacaggaggggctgaagcagatggcacagcc

SEQ ID NO: 33814 - DNA, 1334 bp, Artificial sequence
  DNA replication origin
ctcctctgccccatgctccccactcagggctccagcagtgggctcagaggacagtgtggcattagcatcccctgcccgtccaggttgtcactctccttggccccttgctgctccccagtggaaaaaaaagggggaaataaagaatcgtaaaaaatacatatattggaacctgtatgttttgtgatcttcgcaacatttctctgtaaactctccttctttaggtttttgacaaaacctgaatgcagaagtggtctcctccccagtcacccgtccagcccccgtgggctgtccccaggtgtccctggctcttcatccccacaatcctgtccctgcctgtgctgcctccaacacacgcgccccaggctttgtgcctgtggttccattttggtccttcacgaagtatttctccaaccgagaagctgctgggatctctgtggttggtggccccgagcggccccactcctctcaaggatgataccagtggggccgttgtaggcaggctccatgctgcgggctgggcaggcgcggtcgtccccatcctccccatgggacttgtgttactgtccccgtgtcccagatggggcatctcaggagcagagccagcgtcccccctcctctccccaatgagcaacaccggctgaaggccacagccttgaaagggacaggggcctcactctccagggctgtccctacttcaagggacaaaatgttttgtgaaactcagttcgattctgagattaatggccagcttgcgggtggtttgagccctgggctggaaggcaggaggtctgggttcaagtctccaggtagacagggcccagggatgagttccagcatgggctaggggccagggtgctgcccacgtggctccctggggaactgggctccctgtggccatgcagagagctttctggcttttccaggctgcaccagaccggtgtgatgctctcctcttcagaccccagactgcccttgtgtgttccctcttgccccatcctcagctcaggaggtcagggagacggagctctgtcccaaaggccatcctgtgcccccggccacctctcatcgttggtttgcggatgggctggtgacctattttggagcacctacatcagtgccgtcctccagtctgactcggtttgaacgattagagaattttatttttccctgaacttgaaattgggaggagggaatgctgtcggcacgtggaggtgcttggagtggggcctgccaacccggaggacgctacggctgtgatgaaggctaccccactacatcgtccaagcacctccaacccagtttacggtggggtccggacctgcccctgaacttgg

SEQ ID NO: 33815 - DNA, 2344 bp, Artificial sequence
  DNA replication origin
ttaaaggtgtgagacgccacacacatccatggccaggggtcttaaaggccccattttatggatgaaggtcctgaggcccttggaagcaaacaagtttacaaaacacccaggctccattaggaagtgaagcgctccatgcatttcctgaggctgttttcacaaggtgccagtaacccgggggcttaaaataacaggaatatatcctttcccagttctggaagtctgagatcaaggtgtgggcagggctgtactccctctgaaggctctagggaaaagctcgggtatggtggctcatacttgtaatcccagcactttgggaggctgaggcgcgaggatcacttgagcccaggggttcaagaccagcctggccaacatggtgaaacctcgtctactaaaaatacaaaaaaaatagccaggtgtggtggcacatccctgtaaacccagctactcaggaggctgaggcacgataattatttgaacctgggagacaggggttacagtgagccaagactgtgccactgcactccagcctgggcaatggagcaagactctatctcaaaaagaaaagataaggaaaagaagaaacaaaagctctcaggaaaaatccttccgcctcttccagctactggggtcatgagtattgtccttataagagaaagagacagctggactaggtgactcacgtctgtaatcccagcattttgaaaggccaaggcgggcagaccacgaggtcaggagttcgagaccagcctggccaacatggcaaaacccccgtctctactaaaaatacaaaaattagctgggtgtggtggcgtgcacctgtaatcccagctactcgagaggctgaggcagaattgcttgatcctgtggggtagagattgcagtgagccgagatcgtgccactgcactccagccaggtgacagaccgagaccccatctcaaaaaataaaaataaaaacaaaaaaggagaaagagacacagggaagaaggccacatgatgatgcaggcagagcttggagtgatgtggccccaagccaagggacaccaactatggcaggccacccccagaagctggaagagacagagaagatcctcccgccagagccttcagaagcaccacggccccaccacatcttcatgttgggcttctggcctccagacttgtgagagaataaatttcaagcctccccctgccccctggtttgtggtgcattgtcacagcagctccaggaggctcatgtaagaaccaaaggcgccgggcgcagtggtcactttgggaggccgaggtaggtggatcacctgaggtcaggagttcgataccagcctggctggccaacatggagaaactctgtatctactaaaaatataaaaattagccaggcggggtggcgtgcacctgtaatcccagctacttgggaggctgaggcaggagaatcacttgaacccacgaggtggatgcagtgagccgagatcgtgcaactgcactccagcctgggcaatagggcgagactgtctcaagaaaaaaaaaagaagaagaaaaagaaaccaacctgtttgggtaggggagagttcagggaggttggggttgctagagcagcagaaaggtcagctgcctccctcattcctcaacatgggtggtgggtataaacagaatagacccttgcagctgcgcggtggctcacgcctgtaatcccagcactttgggaggctgaggcgggtggatcacctgaggtgggagttcgagaccagcctggccaacatggtgaaaccccgtctctactaaaaatgcaaaaattagccgggcgtggtggcatacgcctgtaatcccagctacttgggaggctgaggcaggacaatggcttgaacccgggaggcggaggttgcagtgagccgagatcatgccattgcactccagactccgtctcaaaaaaaaaaaaaaaaggacccttgctgtcttatcaccaggacagcggtgctaacgtataagtgaggtctctccctcagggcgctgtggacactggagcctgggtcattctctgggctgggcagggtgctgagttgcatccctggcctccacctactccatgccaggaactgcccccagttatgacaaccacagacgtccccagacatcgcccggtgtcccctggagggcaggaccgcccctcgctcagaccctctgatgtggcctcactgcagtgcgagcgtggcagcccctctctgcctttagggtagagtcaatgcgtcttctccctctccttgcaggctgggcctcggaaagcttatgcgtctctcacccaggggcgttttcacagggcaagggcagaccgtgccatcctgggcg

SEQ ID NO: 33816 - DNA, 1013 bp, Artificial sequence
  DNA replication origin
acagaggcgtcccgtcccaggggcctgattagacagagctcgggaagccgcgcttctgattggacagtgctgccaacgtcggcgactctgattggagaattccccagtccgtcccctggcgctgtaaattgggcagttccccggattccgattgggcgtccctcattggatacttgtctcggccccgcccccgcccgtcctgactgggtagttccctagggcccaccccctgccggtgagtgacgggagcgttgcgaacacgcgtggctgtcccgccctgcggggacactggcttctgggcgaactggtttcagcccggggcggaatcgccctctccccgcagttcgggcgccccgcccgcgtcctcctccgggacgggcgtgggaactccagactagtttcctcacgaggcgaccccttgtccggacaggaggtggatgcaagcgggcggcccgggcctggcagggcgaacgggggctgggcgccgggtccgaagggccgagacctacgtgggggcgggacccgcagacgtgacgtcatcgcgctgcgggcgacatggagaccccgcccagggggctgcgaatccggagacccggtctgggggaggccgaacccaaagcctggcagggggcaggagctttgctcaaatcaaccagaagatatgagatgttcattaaaaccctcacatttggctgggcgcagtggctcacgcctgtaatcccagcactttgggagaccgaggtggacggatcatctgagttcaggagtttgagaccatcgtggccaatatggtgaaaccctttctctactaaaaatacagaaatcagcccggcgtggtgccgggcgcctgtaatctcagctactggggatgctggggcaggagaattgcttgaacccgagaggtggaggttgtagtgacccgagatcgccccactgcagtctagcctgggcgacagagtgagactccatattaaaaaacaaaaaaactctcaagttcatattttaaactctaa

SEQ ID NO: 33817 - DNA, 959 bp, Artificial sequence
  DNA replication origin
agagaccgcggccggaggcgcggggcctccaaggagctgagccgcgggagcgcgagcggaggcggcaccgaccagggacccgcaccccaggaggcaccgcggcgtcggccccagggcgggtcccgggggagcctggaccgcacctcggggtctcgggcgactctgcctcccgcggcccgggggtcccgaagccgcagcgaaacgctccgaggcgtcgcggccccgggcggggcgtggggggtcgggagcgcagggacgcggggaccccgggacgacggggacggagtcgggctccgggcgccgctccccgctctgcagccttggggccagaggcgggcggggacccggagctcggagcgccctagccgcgacctcagcgcgggaggcggggccgggcgggacccccggggcccaggctcccgtcctgcgccgccctcgccggggccgccccccgcgtccctcagctccccccaagccgcggtctcgggcggtcgccggttcctgctgccccgcaccgggatcctctcctgcgccacactcaccatgtcccggggcgatttcttcgctaccggcgcaggtgagcgcgacaggaaccgggacgccagggaccgctaggggcaggcggggcactcacggctaggacagaggcgtcccgtcccaggggcctgattagacagagctcgggaagccgcgcttctgattggacagtgctgccaacgtcggcgactctgattggagaattccccagtccgtcccctggcgctgtaaattgggcagttccccggattccgattgggcgtccctcattggatacttgtctcggccccgcccccgcccgtcctgactgggtagttccctagggcccaccccctgccggtgagtgacgggagcgttgcgaacacgcgtggctgtcccgccctgcggggacactggcttctgggcgaactggtttcagcccg

SEQ ID NO: 33818 - DNA, 1716 bp, Artificial sequence
  DNA replication origin
ggggtcccgcccggccccgcctcccgcgctgaggtcgcggctagggcgctccgagctccgggtccccgcccgcctctggccccaaggctgcagagcggggagcggcgcccggagcccgactccgtccccgtcgtcccggggtccccgcgtccctgcgctcccgaccccccacgccccgcccggggccgcgacgcctcggagcgtttcgctgcggcttcgggacccccgggccgcgggaggcagagtcgcccgagaccccgaggtgcggtccaggctcccccgggacccgccctggggccgacgccgcggtgcctcctggggtgcgggtccctggtcggtgccgcctccgctcgcgctcccgcggctcagctccttggaggccccgcgcctccggccgcggtctctgggggaccctgggttcctcccgggacagcccgggagcggtggggcctcggcgggggcggagacgcccccacctgcaaaggcagcccctggggcgtgcgaggtttcctcccctgagtcccggttttccttcttgaggacttcttgtcccctctgaccccaagatgcctggggtaggtaaggggaaaaaaaacaagggttcctggtccctgggctctcacacacaaggaagaaaagtaactgaaaagactagagaaacaagggagagcgaggaccccaaaagcaaacgcacgcagacccacagcggggacgcccgggaggctggtgcattagtgtcctcggactgctgtagcaactgactgcaaacgagggggctaaaaccacggaaatatattctttcacggttccctagaaagtgtggatttgaagacgtttctcagttctgttttgagtactagcaatgggattccttgctgaggcaacacctgagttgggggtgggagggcgtccgtcgtggtagcctggccagacttgacccctccctgggtttgtcactgtgaaaagattttccttttttcgagtcagcagtttttaggaagtgaaacgtacatttaattagtagaagttggaagataaaatatttccaggccgggcgcggtggctcaagcctgtcatcccagcactgtgacaggccgaggggagcagattacttgaggtcaggagttggggaccagcctggccaacatggagaaaccccgtctctgctagaaatacaaaaattagctgggcgtggtggcgggtgcctgtagtcccagctactcgggaggctgaggcgggaaaatcacttgaacgcagaaggcggaggttgcggtgagctgagaacgcgccattgcactccagcctgggtgacagagcgagactccgtctcaaaaaaaaaaaaaaacttccaacggggtgaatttcaggaaaaaaattaaaatctgtgtcttacattccatttgttaaacattccctggagtgtgtgtcgtttctcagatctgttattttctgttttcttttattactattatttttttgggagctctgttgcccatgctggagtgcactggtgcgatcacagctcactgcagcctccacctcctgggctcaagcaatcttcctgcctcagccttctgaacacagggactccaggtgtgtgccgccatgcctaagcttttgtatttttttgtttctagggatggggtctcattctgttacccaggctggtctcgaactcctgagctcaggtgattctccctcctcgaccagccttgt

SEQ ID NO: 33819 - DNA, 1295 bp, Artificial sequence
  DNA replication origin
tgggcaggaggggggctggaggtagtttggggggacggtaggggcggtcaggggtcagggaccagtttggggggacggcaagggacggtcagcaggttggggatgttacgcgtgtccgtataagaggtcacctgagcaggcttagtgtgagccacaaggctgtttactcacttgggtgcaagtgggctgagtctgagaaaggactcagcaaagggtgatgggattattattggttttatttttttattttttttatttttgggacggagtcccgctctgtcgccaggctggagtgcagtggcgtgatctcggctcactgcaacttccgcctcccgggttcaagcgattctcctgcctcagcctccggagtagctgagattacaggcgcccgccctcacgcccggctaatttttgtttttagtagagacagggtttcaccatgttggccagaatggtctcgatctcttgaccttgtgatccgcccgcctcggcctcccaaagtgctgggattacaggcgtgagccaccgcgcccggcaatcattagtccttataggtttgggacaggcatcggagttaggagcagtttttttgaggacagttggtgggtgttacaaagtacattctcaagggcggcgacgatgtttcaaagtacattcacaagggcttgggggatgtattgtcacaagggctgggaggaatattacaaagtaccttcacaagggcgcgagcgtgtattgtcacaagggcggggtacattcacaagggcgaggaggacgtatcgtacaaagtacattcacaagggcgggggaatatcacaaagtacattatcacaagggcggggggcttgaccatggtgcggccagctcagagaaccttacaggggacagcttggggggatggcaagggacggcctgggggtcagaggcagtttgggggacgacctcagcggtgggagttagctgccctgggggttttgttgcagggtatcactaatgctgtgaaagctttattcgggcagccggtgtcagtaaatgtactgtactgttctcctgtttggcttttttcttctccttagtgacaataggaaaatgttcaagtgtgttttctgccttctggtccgtcaggataacacctgtttatcgtggggtacaggctaagcatggcctaaggaagtctctcaggaatattctgtctcccaccagaattgtagagaaagtgtgcgcagttccacatcttatagcagctagagatggattaaaatgttcataaaaatagtagtttttcaaatgccaaa

SEQ ID NO: 33820 - DNA, 1318 bp, Artificial sequence
  DNA replication origin
acggacacacccacaaatcatcgcccccactcttcagcctcacagcggccccctggtccctccagaatctctgtcatcagtcacccccatacacagagcatcgtccatcgtgggtgggggccccgccacagatgccactccccagacccagaagatgaccgcaagctgctgcaacgcggggcaggggttcaggatgtccgtaatctcccgcctcgccctgtctgagtccccttttctgtcgcctggaaaaaccacagcagccgccctcgcagaagtagggaagttcgcccgtgctacagcggcgtccgcaatcccagggggccccacgggacgaggcttaagaggcgaggcgcgctgcatgccgggaggagctcgatgggcggggctttgagcgactgtgcagcctccgtttgaggtcgccgtttcccacaagcccccggggcagggacctcgccggcgcagttgtcgggctgggactgcgcgggtgctgcggtgagcttcggggtctggtatggctggtgcttgtgcagccactgcctccggcctcggtgattgcgaaactgaggggcagttgggtgcaggtgcgcctgcaggtgtgagggaccgaggggcggtgggtgtgggtgggcctgctggtgagggtgggtgtgggtgcgcctgtgggtgtgggggaccgaggggcagtgcatttgggtgtggctgccggtgtgggggacagagggtgggtgtgggtgcgcctgcagatgtcggggaccgagaggcagtgggtcgggggaacctagggtgggtgtgggtgcgtctgcgctggtcgtggtggggcgcctttgaggttggtggttgcggttgtcctggggagccgaggtggctacgcggctgtggggtggctgtggccgtggtcggcgggtgtccgtggaacatggacccaaccactctttttccagctctttctcccggcagccgcaactgtgctcccgagagggtgcaggtgcgggtctttaatgaggcttgttgggaagaagtcgtggaactgggttgttatgggagctggagagtcgaaactggcctgaagccaagtcctcggctgatgcttgaggattaggaccccccactaggaagggtccccctttgggagaactggagtgcgcttttaggttttcaaaaccacagcatctccaaagatctgaccctggggacgtgaataaactgaaatctcacagaagcgttcttagcaggcgcggcccgaaagggcatttcctaacatcagtacaggcaaatttggggcatgagccctccttcctcagaccttcagtgcttcctg

SEQ ID NO: 33821 - DNA, 996 bp, Artificial sequence
  DNA replication origin
acccactgcctctcggtccccgacatctgcaggcgcacccacacccaccctctgtcccccacaccggcagccacacccaaatgcactgcccctcggtcccccacacccacaggcgcacccacacccaccctcaccagcaggcccacccacacccaccgcccctcggtccctcacacctgcaggcgcacctgcacccaactgcccctcagtttcgcaatcaccgaggccggaggcagtggctgcacaagcaccagccataccagaccccgaagctcaccgcagcacccgcgcagtcccagcccgacaactgcgccggcgaggtccctgccccgggggcttgtgggaaacggcgacctcaaacggaggctgcacagtcgctcaaagccccgcccatcgagctcctcccggcatgcagcgcgcctcgcctcttaagcctcgtcccgtggggccccctgggattgcggacgccgctgtagcacgggcgaacttccctacttctgcgagggcggctgctgtggtttttccaggcgacagaaaaggggactcagacagggcgaggcgggagattacggacatcctgaacccctgccccgcgttgcagcagcttgcggtcatcttctgggtctggggagtggcatctgtggcggggcccccacccacgatggacgatgctctgtgtatgggggtgactgatgacagagattctggagggaccagggggccgctgtgaggctgaagagtgggggcgatgatttgtgggtgtgtccgtgtctctggatgtgtccatccttttgtccctggaacaaatgtgatttttgtcagccttgggggctactcctgcgtgtctgggaggactcgcttgttcgtggcggtccctgtacctggagtgcggtgactcccaagtgtcagtggtctcagtgcacagctgtagttttctgcgtctctgtattcctagtctgaaataaccaaaatagaaaatagggccgggtgtggcgg

SEQ ID NO: 33822 - DNA, 1074 bp, Artificial sequence
  DNA replication origin
gagtgggaggagagggcaggagccgtcaggggcttggtggtcagtttgggaaggtctgccaaggaggaggtggtgccctgtcctggagcctgtcaaataataaaatcctgggccgggcgcggtggctcacgcctgtaatcccagcactttgggaggccgaggcgggcggatcacctgaggtcaggagttccagaccagcctggacaacatggcgaaatcccgtctctactaaaaatacaaaaattagcccggcgtggtggcgggcgcctgcaatcccagctaccagggaggctgagacaggagaatggcgtgaacctgggaggtggagcttgcagtgagccgacatggcgccgctgcactccagcctggcgacagagaaagactccgtctcaaaaacaaaaaccaaaaaaaaaaaaaaaaaaaaaaatcctggctagagaaggagagagaaaaatagggataagccccagcctccgaaacctgccaggtctcaaaatcaaccaggaaaaggctttactttcatacacaagaaaaggtttggaggaacgttttaggggacaagcagaaaggaggttgacagtaaatgtacctcctcgtggtcagctagctcaggggaggtgacaggggactccacacttactgcttgctcagactcgggggggccaaagttcaggggcctgcggagaggacagaaggctgagtaaagtttggggaagaaacgggaggctgcgaacatgtggtcaagcttgtgtaaacccaaacgtagtaaggaaacttttatgaaaaaggattattgcgaggtattgggggagggggagaaggggctgttgcaatagggagaagggttagttggattagaggcaggagagtaatgccagaggcttgaggttctattgcagtggggtgggggtataagcaacaggggcatggggacagttgatgattgagctgcgggactaatgctgtagccacagggagacagctgcagggggagagctctgtgaccgtcaagtatgcaggcatctgaagagttggctaggcctggcgcggtggctcatgcctgtactcccagca

SEQ ID NO: 33823 - DNA, 1516 bp, Artificial sequence
  DNA replication origin
gcccgtcactgaggagagaattatccaatcaggacaggcaggggcggggcctagggaactgtccaatcagagacgttaatccgaagcggagccctgcccaatcaagggcgctagggggacggactggagaattctccaatcaggggtgcggagtcgacagcactgtccaatcagagtctccacttcccgagatctgtccaatcagaccccgaggacggtaagccgagttcccctctgccttgcgcgcttccccgcctaccccgagcggctcaggtgtcctgtcgtgctcacctgcgccggtcgctggaccgcggggcgctaaccctggagagcccaggagcgggcgggacatggtgagtgccgggcgggagccgagcccgggcccagggcgaggtggggcggcaggaaccggcttccgcccgagttcgcagccggagaaagctgagggacgcgcggggcggcgcacgacgagcgcctgggccccggggacgtggtcacagcggccgaggggtagggctgggggcagtctggggtgacagcaaaagcggtcaggggctcgaggggtagtttctggggacagtacaggtcaggagtttggggagagcttgtggggacagcagaggtggtcaggggcttgaggcaatttaagtggacagtagaggtttaaggggcacaggggcagtttgcgggaacagacacggtcaggggctcggcggcagtttgggggttcagtggaagggagtcaggctcaagggcagattagggggccaatagcagcggtcaggaactcggggacagtttgagggggccgtagaggcggtcatgggtttgaaggggcagttttgggggacaggtgatcaggggctcgaaggcagtttagggggacagtagctgcagtcgggagtttgggggcagctcgaggggacagcagaagcagtcaggggctcaggggcactttaaggggggcagtagaggcgatcaggggcttgagggaagtttggggggacagtaaagggagtcgggctcgagggatgtgttgggggacagtagaggcagtcaggggatcggggagagtgggaggagagggcaggagccgtcaggggcttggtggtcagtttgggaaggtctgccaaggaggaggtggtgccctgtcctggagcctgtcaaataataaaatcctgggccgggcgcggtggctcacgcctgtaatcccagcactttgggaggccgaggcgggcggatcacctgaggtcaggagttccagaccagcctggacaacatggcgaaatcccgtctctactaaaaatacaaaaattagcccggcgtggtggcgggcgcctgcaatcccagctaccagggaggctgagacaggagaatggcgtgaacctgggaggtggagcttgcagtgagccgacatggcgccgctgcactccagcctggcgacagagaaagactccgtctcaaaaacaaaaaccaaaaaaaaaaaaaaaaaaaaaaatcctggctagagaaggag

SEQ ID NO: 33824 - DNA, 792 bp, Artificial sequence
  DNA replication origin
aagcgattctcctgcctcagcctccggagtagctgggattacaggcgcccgccaccgtgcccagctaatttttgtatttttaggagagaagtggttttcgccattttggtcaggctggacttgaactcctgacctctgatgatccgccggtctccgcctctcacggtgctgggattaccggcgtgaaccaccgcgcccggccgagagttttaagaacacagggagcgcctggtggggtccggcctcctggggcctcgtcgtctggtctccagatctccaggtctctggaccccaggcgtccgcgcccacgcgggacagcacggtgacgtcacgcacgcgggtcccgcccccacgcaggactccgccccatgggactccgtgcccttcctctcctccccgcacgaggggccgctccgaggggaaactgagtctggagttgccgtgcagtcagggaggaggacgccgcgccctccctggactggagtgagttctcccagatccgcggctgcccggctagagggtcagccacgcgtgttctcgacgagcccgtcactgaggagagaattatccaatcaggacaggcaggggcggggcctagggaactgtccaatcagagacgttaatccgaagcggagccctgcccaatcaagggcgctagggggacggactggagaattctccaatcaggggtgcggagtcgacagcactgtccaatcagagtctccacttcccgagatctgtccaatcagaccccgaggacggtaagccgagttcccctctgccttgcgcgct

SEQ ID NO: 33825 - DNA, 1354 bp, Artificial sequence
  DNA replication origin
cttgggctttgaccccaagggaggtgggagccatggaggactgctggcagaggagggacatgccctgacttggaagcccccgtgatattagtggaggccccatatcttggggagcatctcctgtcctgtctctgagctgcttccaagagagggtcagtcctgctccttccgctccctgggcccctgcgcaacctagatgaccctttgccggtcagttgctttggacagagagagcctgtgatggggcaggcacccggctgtgttcccctgcgtgtctgagtgttcaatgaggggccatatgacatgggagtgaggggagctctgcatgggagggggcgcccgggctcccatctcccagcccagggcgcctggcccaagcagaagtacgccttccagccctgcctgtcctcccgccacctggccttttctcccaggcgctggcaggattttccgcctgtgccagatgtaactggcaggggcccagggccgtgtctgcaacttagcagggcctgggaggaggggggcagcgaagggaacagggtgagggggggccaggaagcaaccaaaacatggttattcattcagcagatatttatccatcacctccttgccaaatactgttgtagaagccaggaaaatagcaaagaacgacgcagagcttcccacccttggggcgagtggagcctggtagatggagtgttaggggatgagggctgggcaaggcgggggatggaagagagcagccccaaggggattggggaggccagggtgggcgagggttgcaattcagggtggtcagggaaggcatgcgagaaggtgacatctgagcggaggcttaaaggacatcaaagaggaagtgtggctgtctgggatgggagggatatttcaggcagagggcacagcctgtgtgaaggccctgaggcaggacggtgcctgttgtgttggtcctgaaggcactacgaggaagcccgcatggctggagcagagtgagaggaggagggggggagggcaggccacgcatggccctgtgagcttcagggaggacttgggctttgaaccctgagggagggaggtgggagccatggagggcttcagacagagggcaggccctggctactgcggagaggacagagaagaaggaggagggatgagggcagaagcccgggaaccagttaggacagtccaggtgtggaatgctggttgcttagtgatgagaagtaattgaataattgtggacgtgttttgggaggaacttgaccgcagctgctgagcatcaggatacgcagggggtgagggctccagagcaaaggagccacttcggttgcagccagacccaggagggtccctgcccagc

SEQ ID NO: 33826 - DNA, 2221 bp, Artificial sequence
  DNA replication origin
ttgaggcaagagaatcgcttgaacccaggaggcagaggttgcagtgagctgagatcgggccactgcactccagcctgggcgacacggcgagactccctctcaaaaaacaaaacaaaaaataaaaaacacatcagagggtgccaggcaggacaaaggcgtctccctgccctcccaggtgcgggtgcgggggcgtggtgcccagggctgggtcatgccccggctttctctccagggcctactccttccacgtgtctgcggacgggcagatgcagccggttcccttcccctcggatgcactggtaggcgcgggcatcccgcggcacgcccggcagctgcacacgctggcccatggcgaggtggtctgcgcggtcaccatcagcggctccacacagcatgtgtacacgggcggcaagggctgtgtgaaggtgtgggacgtgggccagcctggggccaagacgcccgtggcccagctcgactgcctggtgagggcggggtgggacagtgggcgggactcacaggtgaggggtggggcttatgttccaatggggcggtgttcgcaggctggccgtgggtggggctacaggtgaagggcggggcttataggtgaggggcggagctcgtagtcgcatgggacaaggcttgcaggccaaaggggtggggctctggccaatctgaattggacttgcaagacaatcaggacagggtttgcaggccaaccatgggtggggcttataggtaaaggatggagcttatagtcagatggggcagtgtttgcaggtcaaaggggcggggctcaccagccaatcagggtagggcttgcaggctaatcaggatgaggctacattgggctccagagacccccacgttgagctaggctcctagagacctcacctgggaccaacccccagcccctgcttctctccccgaccccagaaccgagacaactacattcgttcctgcaagttgctgccggatggccggagtctgatcgtgggcggtgaggccagcaccttgtccatttgggacctggcggcgcccaccccccgtatcaaggccgagctgacttcctcagccccagcctgctacgccctggccgtcagccccgacgccaaggtttgcttctcctgctgcagcgatggcaacattgtggtctgggacctgcagaatcagactatggtcaggtgggtggcaggtgcgctgggaccttgggcaagcccccggccgctctcggtgcagggggagtggaggagtgtgacctgggacgatgctggggcagctcgaattccaggatggacgcctgggcccttctccctccaggcagttccagggccacacggacggcgccagctgcattgatatttccgattacggcactcggctctggacagggggcctggacaacacggtgcgctgctgggacctgcgggagggccgccagctgcagcagcatgacttcagctcccaggtgctgttcggttctggcaggagggggatggaagctctaggaatacagcatcccttcctctccttgtgaggtgcccacttccagaggcaggacaggacaggactcccatctgctgtggtgtccatctttcttgtcccccagacacatccacaggcttcccctgtaactctctaaagatgtaggggaacacaaaagagctgattcataggaagctgtggggctactgagacccccagatcatcttccccacctgcttttgtccagccatacccttatatgtgcctttcctcgtgtagctgggtggttcttctagcctttaatctctggacgccgccgagagcgcgggacacacacttcccaactgaggactaaccatgggggagctactggccaggaggacagagtggaggttgatgtaggaggagctgggcatggagagatccccattgaaggtggagtctaagctgaaggacatggtgaacaggctggacagagctgggggctcctcagggctgggcaaagagagtgaatcttcaggcaccgtgaccccagatcctgcctctcactgctttgggggcagctgtgagctccttcttctgtcattcagggtttccatgggctggtctcatgcacaccatactccgggacagctctgaggcctctgcacatttgttccctgtggctgaaatgcctttctcttctttctgtaattggcaaactcctattcatccctcaagacccatctcatttgcccct

SEQ ID NO: 33827 - DNA, 1203 bp, Artificial sequence
  DNA replication origin
agctgagcccagcacctctgagtgtctgcgtctgagttgggtgtctgagcgtctgcctcctgcaaatccctggcgggtgtgcgtctggcgggtggtgtatctgtgactcgtaggacctcagccctggtcttcccagctccaggccaccctgggcctcgctcagctgagcacgcagcctggtggggctctgaatcccacctcggcccatgccatgctagcctgagttccctctgtgcacctgcgggcgtcacctccccaacccttcggctttgccaacacctggtccgcctgggagtccagagctgggttgcaaatctctaccccgctccaagcttcctctcattgcttcctgccaggcggagattgtgaagcgtctgagcggtatctgcgctcagattatccccttcctgacccaggaggtgagtgggcctgggggtggggggaggaggggaagggagccggaagaagacgggagggggtaggtctgggcgaggacgccccaggcactgattctgccgcgtagcctgcagcacggatagagaccattttcactgcagtagtcccgcagccctgaggccaggcatcccgctggggcaggggctgcagggatggagggaggtgttggctgagggtgaggactgggggctgttttcccccttgatgggaagcaaggcatagagctgaccccctcaagccctgcaagttggctgcctgggtctgaatcctggctgtgtggcctcaggcaggacacttgtctctgttttttcagtagcgtaggtgtgaagttgagatgagctcatacacccagggtgctggagatgatgggtacgcttactcagcacctgatgaaagttaaccctaccgtcttgctagaagaagtcactgagggacaaacactgggtgatccactcctaggaggtcccagggtcgtcaggttcactgagacagaaagcagaatggggggtgccaggggttggggaggggacggggagtgagagttttatggggacagaaattcagtttgggaagatgggaaaattctggagatggtgctggggatggctgcacaaccgtgtgtgtgctttatgctgctgagctgtgcacttacaaatggttaaaatggactgtaattcggccaggtgcggtggctcctgcctgtaatcccagcattttgggaggctgaggcaggtggatcaccagagg

SEQ ID NO: 33828 - DNA, 1901 bp, Artificial sequence
  DNA replication origin
tgcccgccccgctcgccccgcgcaccccaacccggggaggggctcccacgaccccgggcgcgcgcgcttgggggcgcgccagggactccagggtcccttgccccgcgccgcttctccctcctccctctttcttcgggcagcctccccaccaccccacttcagcctcccccactcttgccgcctccatatcatcaagctctggtggcgcctggggggcttttcggatcggcaggatgtacccccagggaaggcacccggtgagtgcggactgcggggagggggcccccagtgtccgggaactcagaccctgacgtttcccccacaccccccccagaccccgctccagtccggccagcccttcaagttctcgatcttggagatctgcgaccgcatcaaagaagaattccagtttcttcaggctcaataccacaggtgaggggggccgccccaggggccgcgggagttcacctgggcgccggggcggggcgaggcctccggggtatagggcggggaggaggggctcccggttggagggggggcgcgacaaaggcctccaggtggaagcgcaggtgcagaggggtctggggacagtcagagctggggcatttggagcccaggaaggggcggggagggactgggacaggaggtggggggaggtctgtaaggaagtcgggagggggagatccagcctctcactttggaagccggcccacatggggcgggtgggagccccttgccctctctcttcttctcagcctcaagctagaatgtgagaagctggccagcgagaagacggaaatgcagcgacattatgtcatggtgagggcacttatgatgccagggtgaggggagaggcgggcagggctttgagtcacggtggactctggggtaggtccctgccccactccgaacctcgtcttccccgtctgtacattgggcaggttgggatttcaggctctctaggagggtcctcccagctctgggaatggggagacagggaggacccctcgcctgatgggagtctctgtcgggccagggcctctggacacttcctacctgccctgcctctctggggagagtagagggggcccttccaggcagagcccccgcttcctcctctgggaccccgtggagctggggggggctctgcttcctgctgtgattcccctgaacctggggactcttggaagaccctggcatcacctatctggaggagggcacccatctccaccctagacgttcttacttggtttttcctttgcagtattatgagatgtcgtacgggctcaacattgaaatgcataagcaggtaactgggttggggttacgcgtgttcaggagggagggtgggggtctggaagccctgagaaggacccagagtgggcagccggggccagagcagacctagggaacacgggtctcatcctgaaatctccgcagaggtcacagagggcccatctgggaccaggaagacagatttcagcctcgtggaaggaaaatgagtcccaccttctgaagacagtatctagcagttggagcgtccagcagagatgcaggcagtgggcaggggccaccaggcatccccatcaaggagggcacatagcagaggcagggcagccaggccagggaggctgtggaagtgacttctgtcctaggagggagctggatggccactcttagaggtccctttcaacccagaaagtctgaagttttgagatggaccccaggttctgttgctgctttgaagcttctgagattggtctcagtgtgattggctggaaggttccaagattgttctccaggccctgaatttgatgccatggttcagactgtgaccccactactccaaaatagacctcaaaactctgtggctgtcttcagggctttgagattgactccag

SEQ ID NO: 33829 - DNA, 1509 bp, Artificial sequence
  DNA replication origin
gggaggagggagaagcggcgcggggcaagggaccctggagtccctggcgcgcccccaagcgcgcgcgcccggggtcgtgggagcccctccccgggttggggtgcgcggggcgagcggggcgggcaggggcagcggccggggcgggagcgcggcgagggcggccgcggcagccggcgcagaaggtcgggcgcgccgcggccgggtttcggtggcggcggcgcgggcggcgggccccgcgcggagccgcctccctccggcggggctcggccgggagccgcgggctgagccgccttaaggtggcgccgccgcccccacgcgcccgcggcccgccccgcgcccacccccgcgcaccgcccctccccgcgcccgcgccccccccggcccccgggcacccgcccccttccttcagtccctgggccgttggggaaactgaggccgggtggggaggcgcccagtgccttaaaacagggtccccaccccctcccggaggggcgggagaagaaaaaccagtgaagaaattcacaccgtgttacccaccgtgggagcgggggggggggcttgcggggagcggggaccagtctggagtcggaaatggcttttctgagcaagtgacattgggttgagattgaagggtcagcaggacgcagccttgccaagcgctggcagggaaccctgccagaaagggaatctcacagcaaacactgcttcccagatcatgccgggccctcgccctctgggggcctcagtagtctctgcaaaaggtcaggggtggtgcgctatctttagggtttaattttttgcagagatagggtctccctgtgttgcccaggctggagtacagtggggcaatcatggctcactgcagcctcgaactcctgggctcaagcgatccttccccctcagcttctccagtagctgggactacaggtgtgcaccaccacgcccagctaattttttaattttttgcagagatggagtaggggggcgtctcactatgttgcccaggctggtcttgaactcctggactcaagcctctctcttcggccttccaaagtgctgggattacgggcgggagccaccgcactgggcactgcacttaaatgagatagtgcatgaacgctgtcagcctctccctacacagagcaaacttccacagatgggaattgtgttcctactgccatcaccagtggactgggctgtctcccctctcagactgggtttcttgaaggcaggagccgtgtcccactcagaactggaagaaccacagctctgccatcagactcaagtctctcccacggcaaaggctccagccccgaccagagaccacagacatccagccagcatccttcaggcccacccggggagtgggaagttcttattctctttggagaaacctcaggagaggtttgtgaagtcaatcaacaaacgtgtactaaatgcatactgtggaccacacactgctgtagacactggggcacagctgggaacaaaacagagaaaaatccatgc

SEQ ID NO: 33830 - DNA, 1668 bp, Artificial sequence
  DNA replication origin
gatgttgctgcccagagcaaaaactcctccttcctggcggatcacacactaagggatggggtgtgttcctgtgtgcgtgtgtggtcttgtggcttctcgggcaatccacaaatctgtatttaccctccccggtgcagtgtgcctgttagagggatctgaagactgctgggtaaagatcccctgctctagggagcctcagctcactcaccgggcaatgcccctgttcctcgcccggctctgccttcatccttagctcgctcctgtgctgacactgaccctatgtgaccctgggagggtacgtgtccctgtacctctgtccccaccagatgctctgggagcccctccctggaaggcctagggctggatcttctctaggaatccagcctcttgcagcatgtggaggtgttcgtagactaaacatccatttatccaccaacaccaagcagtttatatccagtgtgtgtatgtgtgtgtgtgtgtgtacgcgcgtatggagaagacaggaggcgaagaagacaggaggctgggggagaaggcttttgcaggagacagtttttgggttgggccttgaaaaaaatggactttctccaggcataaaaggagggggagggaattccaggaagagataacaagcagggaaaggctcagaggtgggaaagaaaggacacaaattaggtgatctggccagggtggctggagggggttgggggtgtggtgtgatctggtggaggaaggtgaagctggctggggcagggttgcagaggttccagtgctagggtgaagagctggaaatttatccctagggcaatagggagccaggggagggtttgagggaaggagggccaggctccaattgaagatcaccaaaaacaaaggctgctcagagggaggaggtggctgtggtccagatgggagagaggacaaaggcctggtcagggtgggggctgctggggtggggagaacggaggagggttgcaggccaggtgttgggaatagagggctagggtgatgctctggtttagagtatctgggggatgtgtgtgggaaccctgataggagcagggggtaagagtctgagatctgggggacctctaggggagatgcccagttggtggctggacccacagggctgggtctcagagtaggaaccggaggtggtgccagagcttgcagccatcctcacgaggcggtcactgaagcctggagggagaggcggtgtctcagagccctggaagccagaggtgtgagtcaagttgacattcaagtgaccgggctaaggaaggacagagacctacgtttgttattttactttttgtagagatggggggtgggggttgggtctcgctatgttgcccaggctggtctcaaactcctggcctctttggcctcccaaagtgctgggattacaagtttgagccaccacacctgtgcttagagagggaagagggccgcccggacaggagagccccgcagagggaggtgaggctgctctgagcaagcattgtaatggaggtcaagaaggagccattgggtttccagagccaggggcttaggcagaagaaggaagatctggaggggcgcggtggctcacacctgtaatcctagcacttgggaggctgaagcaggcagatcgcctgccaggagatcaagaccagcctggccaacatg

SEQ ID NO: 33831 - DNA, 931 bp, Artificial sequence
  DNA replication origin
gtgccagccccagctctgcttccgcaccccaaattgtccccgctgggccgcacacactcccacacaataataacggtcggggccttttcatctatcgagctatttgatcgtgtgatgactcaatgagacgtttctataattatcccactgtacaggatcacagtgacgcagtggcggaggtggggtttgaacccaggcttgcacatcagtgacactgggtctcacagcctctggaggtagtgtgatctctgcgatctcagctgacccctacaggttgtgttagcgctgggcaggttagcaggggacctggcatcgcgtccgtcatgctgggtgaccttggtgaggctctatccctctatgggcttgtccacttactctcccaataaatacagtgtagccggtggtgtgttggggcctgggcagaccgtacacacaggagggagcagatagtatgtgttcccagagccacgaggcctcggaagactgagggaagctgagcaggtaggaggaggggagctactctagccaggctggcctctctaggatgtgatgtttgatctgaaaggaagagaaaggctggccgtggttcaggcagagggaacaaccaatgcagtgcagaggtcttgaggctagactctggtttgaggaagagggagaaggcctgtgtggctggaacagagggggagaagtgggaggaggtgagaggagggaggcgatggaagtcagatcacatagacagaggtagggagtttggattttatgttgagggcaatagggagctatggaaggttcttgagcaagggagggatggactctgattcactttttttttttttttttttggagtggggaaaggatagagttttgctcttcttggccagcctggagtgcaatggcacggtctcagctcactgcaacctccgcctcccgg

SEQ ID NO: 33832 - DNA, 1325 bp, Artificial sequence
  DNA replication origin
acttggtgttctctgcaatggtcttgacctattttccaaaccttccccatgactctgtgagctccacgagggtcgagaggcgctccgtctgggtccgtgatacccaagcctggcacacagtaggcgcccaataaatacaggaatgaaaggcccgctgctgccccaggttggtttttcttccccaccaatccagttgctgggaattgaggctttgggggcagccaggcccagagaggcctagggacctgcccacggtcacacagccacgcgctccagctgggagctctgtggctgcctttgcggggggccccgagtcccagggttgggcaggcctagggcagggtcgcccgccccctcctcccgcggtgctgcgggggaacccaccattagccacgcgggcccggcccagcgtgttccccgacaggcccgggcaggcccagcaggggagtgaggggattgcggggagtagggggagcgcagggagcgtggggaccgcccctccccgggacccgagaagggggtgtaggagggaagaggagggggaggaggagagaatggaggaggaaacggagggacaaagggggaggcggcaaaggggaggggaggggagaggaggggagaggaggaggcccccgggtggaggggaccctgtggaggggcagggaggaagggggggcggtgaggtgcgggggaggggcagaggggcggaggtggcgggagagggagggggcggaggagggacgggctttcaggcctggcaggctcccagcaactgcgggaggggtaagggggcctgggaggacggtgggcctgggtgggtgggagaggtttgcagggggaggtcagcggctgggggcgggagcggggacggggatggtagggagggaggcgccaatgaagagatccagggaaggttaggggacccaagctggagactttgaaggacagagggagaagcccagagatggcagaaagagggagacgagaccatcagagacccccgagacagagggggcgaggcgagggagattgttggataatctgtttcaaacctgagttctatttgcttcatattaggggtttgtcccttctccccaagtccccagagatcctatgtagaagctgttctcattaagcaccaaacagttaagtccattctccagtactagctcggaagtcggtttcatattcgacttaacaatttaaatgaaaggaaattttttttaacggcagtggggacttggagaaggagggggacaaagacagacattacccaggagagaaagttagaggggaatcctaggccctcagaggggaaaccaggc

SEQ ID NO: 33833 - DNA, 1777 bp, Artificial sequence
  DNA replication origin
ggccccaggatctatagtagaaacccaaatcagacaaactctcttcgccaaagtcatattagagtggagaaaagcagtggacaagagaatatttgttgggataaattgtgcggagcaaaaaatgctgtgaagataaagaatgcagggaaagccgggcgcggtggctcatgactgtcatcccagcactttgggaggccgaggtgggtggatcacttgaggtcaggagtttcagaccagcctggccaacatggcaagaccttgtccctacaaaaaaaaaattagctggatgtggtggtgtgtgcctgtagtcttggctacttaggaggccgacatgggaggatcacctgagcccgggaggttgaggctgcagtgagctatgatagcgccactgaacttcagcctggttgcccaggtgagaccttgtctcaaaataataaaaataaagaatgcaggaaaaagtgattgtgatggggatgactgaagtaggaacagcgtgttccaggcagagggaaaggccctacctgggaccatgcgtgaacaccttcagccacagggaaggtgccaggaagggtcagactgaggcagtgactacggggcaggggtcgtgagcctccaaggtcagccctgcctcagccaatcctgctgcaccccaactctgcctggaatcggtctttcaagtccttcctcctcccccaccagtcagtgagtccagaaacttctttctcttaaaccaaatggttaagatcctggctgggtgcagtggcttacacctgtaatcccaacactttgggaggccaaggcgggcggatcacttgaggtcaggagttcgagaccagcctggccaacatggtgaaaccaccccccaccccaccccgtctctactaaaaatacaaaattaaccaggtgtggtggcgggcgcctgtaatcccagctactcgcctgtaatcctgaagcaggagaatcttgggaggcggaggttgcagtgagccgtgattgcaccattgcacttcagcctgggcaacaagagtgaaactctgtctcaaaaaacaaccaatcaaatggttaagatcctgaatttcctgcatttgaatccagattccctggctctgtgaccacttagagcctcagtttccttatctgtaaaacagaccctccttcagagagaatcctttgagagatccaattttcactgtaccactcaagcactgctggaggcgtgatagatgttcaggacaacacagccggtattactgttgttatctttatgatatctttgccttcctaattagtctggttgcccctaggggggcaaagaggtccctgagcagccagcaggagactcagctacagccctgacttattcctgcccttgagcaatgttctgatgtccgtgggcctcagttttcccatctgcaccatgggaagagagcgggatcatttctagctccctaattccaccagcactgcaggtgcagcttttattttctcccccaagactgcctgaagggcacacagagggacggagaaggctcagctgcagacaattcagccagcgcaggcacctggccggcctgactgtgaatgtctaatgcgtcctagctttagctcctattccccgctccttttcctccacccctccccgcccccaaccgggctggggatggggaagggggattctgtaagtgctcccaccctctgctggaggccagagcctggccctttggggtgcagatggggggaaatggaggatttcagaccccggagtccccagtcccct

SEQ ID NO: 33834 - DNA, 1075 bp, Artificial sequence
  DNA replication origin
gaagcagttggagagagggagggtgctttctgatggggttgaaaaccactgggaggagcagacatgatggcccacttggtagtggggctcctcctggcctcagggccgtccccctctcctctcccaggatcaggaggaatcactgcctctcctctcccccgacccccttccagcaccagcagcaggtcttgggagccattgagagggccaagcaggtcaccgctcccgagctgaactctatcatccgagtatgtatggggacctgggcgggtgggcgggggacaggtgggccccaggcagctaatgttcccctcccccgccctgcagcagcagctccaagcccaccagctgtcccagctgcaggccctggccctgcccttgaccccactacccgtggggctgcagccgccttcgctgccggcggtcagcgcaggcaccggcctcctctcgctgtccgcgctgggttcccaggcccacctctccaaggaagacaagaacgggcacgatggtgacacccaccaggaggatgatggcgagaagtcggattagcagggggccgggacagggaggttgggaggggggacagaggggagacagaggcacggagagaaaggaatgtttagcacaagacacagcggagctcgggattggctaaactcccatagtatttatggtggccgccggcgggggccccagcccagcttgcaggccacctctagctttcttcctaccccattcccggcttccctcctcctcccctgcagcctggttaggtggatacctgccctgacatgtgaggcaagctaaggcctggagggtcagatgggagaccaggtcccaagggagcaagacctcgcgaagcgcagcagccccggcccttcccccgttttgaacatgtgtaaccgacagtctgcctgggccacagccctctcaccctggtactgcatgcacgcaatgctagctgcccctttcccgtcctgggcaccccgagtctcccccgaccccgggtcccaggtatgctcccacctccacctgccccactcaccacctctgctagttccagacacctccacgc

SEQ ID NO: 33835 - DNA, 1138 bp, Artificial sequence
  DNA replication origin
aggggaggaggagggaagccgggaatggggtaggaagaaagctagaggtggcctgcaagctgggctggggcccccgccggcggccaccataaatactatgggagtttagccaatcccgagctccgctgtgtcttgtgctaaacattcctttctctccgtgcctctgtctcccctctgtcccccctcccaacctccctgtcccggccccctgctaatccgacttctcgccatcatcctcctggtgggtgtcaccatcgtgcccgttcttgtcttccttggagaggtgggcctgggaacccagcgcggacagcgagaggaggccggtgcctgcgctgaccgccggcagcgaaggcggctgcagccccacgggtagtggggtcaagggcagggccagggcctgcagctgggacagctggtgggcttggagctgctgctgcagggcgggggaggggaacattagctgcctggggcccacctgtcccccgcccacccgcccaggtccccatacatactcggatgatagagttcagctcgggagcggtgacctgcttggccctctcaatggctcccaagacctgctgctggtgctggaagggggtcgggggagaggagaggcagtgattcctcctgatcctgggagaggagagggggacggccctgaggccaggaggagccccactaccaagtgggccatcatgtctgctcctcccagtggttttcaaccccatcagaaagcaccctccctctctccaactgcttcctttcaccaagctcgtctcttcgtctggccaacagagacaaatggaaaagtgcagaaaacaattaaaagggttttgtgctaagtagttaggaaacagcttttgagtgagcccgggagaaaccctggatcctgacctatcctatgtgcacagccacctgcaaagatgtgaaacatgtgaatgtttgtgcagtacacaacctgcccaactgtacagggacgtcctgatcctaggagctccaagactgtgccctgagtctggccaaattgagcccttctcctaccatggctggggagggcccaatgaattctggcagggctggctggggaatgggctcagattcagggcagttcctccctgagctctccccaaacacctga

SEQ ID NO: 33836 - DNA, 1229 bp, Artificial sequence
  DNA replication origin
cgcggggcccggcccagccctgccacttgcggcttctaagaggggctaggtctggccagggtgggatgagcaaagccgtgttcgggcccgagggcagccagtcagtggcaaaggtggggctggacaccggctgtcgcctgcagcttagagtgaggtaagtgcaggatgaggccagactgcacattcctcgggggtcggccactcaggcccctggcaggtagtaagcgcttgtgcgaatgtagggagggctgggggccgtaggctgtggggaaggtctctgcccctccccaccaccgggagaaacactcccagggaggcctgaaaaagaggcggggcgggggggaggagagcgggagcttggggagggcttaggaggtaacaggataaccgggctggcttggtgcccagccgagggccggccgctacctgcctgggggtgcccaaggcggggctggaggtggggggaggagggggaaggaggaggaggaggaggaggaggaggagatgggcgtacctgtttgtgcatctcgatgttcaagccgtaggacatctcgtagtactgtatgggggagagagagggggagcgggagatgggggtggggaaggatggggggacacggagacaaagagataggggagtggcagagacagacaaaggggggagacagcaagagacagctgagggcaggaaagaaaggagaggcaggtgggagggaaagaggagggagagacgcccacacccagcatcccagcccgccctggagaggggcagggggccgctggggctgcggatggagactgggggcactttaggtccctagccctggcctggctcctcccccactccatgtgcaccgcgagaacacgcattccagggctcctaatcttgtatctttctatgtcttgtctgcgggtgggcccagacgccagggaagtttgcctgcctaggtataaacagtgaggggtaaacaaagcctgctggctctggggccagcagctacccccaccccaagccccagatctcaccctgcccctcccctgctctaaaccctcccatggctccctgtcacccctgggggaaaaccaagttcattcccaggccttcacgtagtttctctgtctctgtctggtgaactcctactcatcctgcaagaccccagctgtgtgccccatttctccatatagtcttcctcaggcaggtcctaggtccctctctctgaccccagccc

SEQ ID NO: 33837 - DNA, 1287 bp, Artificial sequence
  DNA replication origin
gctgcggaggcttcggctccacctgccgccgcccgtgccccgtgcgcgccgccgaggggggggacgcgcgcgcccggggaggcctgcggatccccacgccggcccgcctccccgtggcccgcccgccgcggtgaccttgggcccggcccgcccccgccccgggcagcggcccccgccaccctctcctacccggcagccggccgggcctcggtttccccatctgtcaaagaaaagggacccggctgcccgcgtcgaagccgccggccctgctgtggcacgacctggacgcgtgccacggacgtgctctgtgaccttggctctggctgggcggtggttcttgctgagccttagtttccttttctgcagaaaggcagcggtaatgccgccttcctgagggaagccattcttgtgacacatttatagaacgcctactgtgtgccaggccccgctgctccagggccctggggtggggcggggcgggggtgggtccctgccctggtggtggtgcctggagacagacagagacaaattcacaagctgaattcctggcaggtcagatggtggggacagttctgcagaaaaaccagccgggagaatggcagggtaggaaggtgcaaagttaaagaggtgggagggaggatcagagacggcttcctccacccctaaagcgacctgaagaaggagggagaacagggggatggggtacagaggtagtcagaggcaggaccaacaggtgcaaaggccctggggcaggactgtgcctggcagcagagtgcccggggggaggtcaggaaggccggagggaggcagggccgggggcttcgtgcttttgtccagggcccccccaccccacagcagggcttgtgcttgggttaatatttactgctgcattttgagatttctaatcatttttgaacaaggggcctttgagttttcttttgcactgggccctgctaactctgtagctggtgaagcaggccagtccagcaaggacttgtgggtcttggggaggacttgggattttgctctgagtgaggtaggagccctggaaggctgtgggaggaggagggacgggacctggtggttggttggtttgttttttgagatggagtttcgctcttgttgcccaggctggagtacaatggcacaatctcagctcaccgcatcctgggttcaagtgattcctgcctcagcctcccgagtagctggattacaggcacgtgccaccacgccccgctaattttggagttttagtagagacggggtttctccatgttggtcaggctg

SEQ ID NO: 33838 - DNA, 992 bp, Artificial sequence
  DNA replication origin
gtgcttgggttaatatttactgctgcattttgagatttctaatcatttttgaacaaggggcctttgagttttcttttgcactgggccctgctaactctgtagctggtgaagcaggccagtccagcaaggacttgtgggtcttggggaggacttgggattttgctctgagtgaggtaggagccctggaaggctgtgggaggaggagggacgggacctggtggttggttggtttgttttttgagatggagtttcgctcttgttgcccaggctggagtacaatggcacaatctcagctcaccgcatcctgggttcaagtgattcctgcctcagcctcccgagtagctggattacaggcacgtgccaccacgccccgctaattttggagttttagtagagacggggtttctccatgttggtcaggctggtcttgaactcccgacctcagatgatctgcccgcctcggcctcccaaagtgctgggattacaggcgtgagccaccgtgatcagctgtttgtttgtttttgagatggagtctcactctgttgcccaggctggagtgcagtgatgtgatgttggctgactgcagcctctgccacccggattcaagtgattctcctgcctctgcctcctgagtagctgggattacaggtgcgcatcaccacgcctggctaatttttgtatatttagtagagacaggtttcaccatattggccagactggtcttgaaatcctgacatcaggtgatcctcccgcctccacctcccagagtgcagggattacaggtgtgagccactgcgcctggccctggacttgggcttttgctctgagtgaggtgggaatcctggagagccgtgggaagaggagggatgggacctggtggcggttattaaaggatccctctctctgccacgcagagaacaggtcccaaagaggctactgaaataaggctatgacattaaggtccccctttggcaggtgcgaaacacagtctc

SEQ ID NO: 33839 - DNA, 1876 bp, Artificial sequence
  DNA replication origin
ccgggtccccgctcgggccgcgccagccgcggactcccgcgcggccgcactcagcccgcgccgccgccgcagccaccgccaaccgcagccgccgcaaccgagcgacagcgccggacaacctagcaggctgggagcgcagcccgcgacgggcagacggtgcggccaatgggaggggccggcggccaagcgcgcccaccatgggggcgggactagcggcctgggcggggcgtcggcgggcgcgaaaggggcggggcggggcgagggcggggggcccgcgggtttggttgcgccgacgtgggaagggggacgcgcagccgggagccggggcggggccgcccgggattgtgggaatgtggcggactcggcccggccaggctcggctccgctcggctccgttcggccccgctcggtcccgctcggctcggcccaggcgcggtggcggaggcgcgcacgcggccgctgcgctctctgggtctccaggtgcctgggcagcagtcgctgcccccgggaagcgccctgacattgcctgacaggaaccttcactcatccattaaaaagcgttaatggaggtcgggcgcggtggctcacgcctgtaatcccagcactttggaaggccgaggcgggcggatcacctgaggtctggagttcgagaccagcctgaccaacagggagaaacgccgtctctactaaaactacaaaattagcccggcgtggtggtgcacgcccgtaatcccagctactcgggaggctgaggcaggagaatcacttgaacccaggaggcggaggttgcagtgagccgagatcacgccattgcactccagcctgggcaacaagaacgaaactccgtctccaaagaaaaaaaaaaaaaaagagggccgggcgcggtggctcacgcctgtaatcccagcactttgggaggccgaggcgggtggatcacgaggtcaggagatcgagactatcctggctgacacggtgaaaccccgtctctactaaaaatacaaaaaattagccgggcgtggtggcgggcgcctgtagtcccagctactcgggaggctgaggcaggagaatggcgtgaacccgggagacggaacttgcagtgagctgagatcatgccactgcactccagcctgggcgacagagcgagactctgtctcaaaaaaaaaaattaaaaagcgttaatgggacacctactgtgtatcaggcattaatgggacacattctatatgccaggcacggaccagagattaatggagtgcctgctgtccatcaggtgtcaatcaggccttactgcagtgcctgcaccattccaggccaggtatacgcattcatgaaatgcctacaggataccaggcactgctgtaagcccgttaagctaaccctacccaagggatatcttttttttcttcttctttttttgagatggagtcttgctctgtcgcccaggctggagtgcaggggcgtgatctaggttcattgcaccctctgcctcacaggctctagtgattctcctgcctcaccctcccaagtagctgggattacaggcgcgccaccatgcctggctaattttgtatttttagtagagagcgggtttcgccacgttggccaggctggtctcaaactcctggcctctagtgatctgccctcctcggcctcccaaagcgctgggattatagatgtgagccacctcacccagccatatctttatccttactttgcagatgaaatggaagtggccaccagaatttataaaaacgtgtgttcccaccaccttgctgactactgaaaacccttttccctctctggcctccttggccaacccctgagcatcctctccgtttcaattcagacgtcagctcctcagggagacttctcctga

SEQ ID NO: 33840 - DNA, 1437 bp, Artificial sequence
  DNA replication origin
ccaaacgtgaggaccacggctctgcctacccgcggccccctggaaagatggcccattttagaacccttaggtaaatcaaaacacaagtttggggaaaaaaatcaggaaggcgtttcatccaaggcacctctgtaacccgggacacggagggccctaagaggctcacggcaggagaggcaacgtgttccccacacaacatgcgacctgcctcctccccaagagccaccgccaccagcacgccccctcctccgtcaccgctgcctctcacgcatttccgaccttccccaccgccccgcccccggcccaggagctaacctaggagctcgggagggcaggggcggggcagggcaagagcttctgttttgtaaaccactgaaggggcccttatttggagtgacaacactttacagctggcccgactggctccctgcagcaggtgtgccttggggagaaggaggttcaccagcaaaccttctccaggacggtggggaggagccggcaggtggggggctgctctcaacgaggactcagcgtggctcccaccaggactctaaggaagggggcgggggaggctgccgagatagctgcttgggacaacaagcaaaggctccctcaggtgtcaaccgccccaccctcagctgagcggaaccctgaggagaggaaagactgtctttttcccacagggtgcattccagccaagaggagtacggggtttcccggaacaggaaggcaggagaatggccctgaagggaatgtggggataggggacacggaggagtcttcggggggatgggggggtgtacagggcctgcatggagggtacagggcctgcatggagtgtacagggctctgcctggagggaagggtcaacgcggggccctgagcagtgaggggtgagtgtgccctgtgggttacagcccaaaggtctggccctgaaggggtagcgaggggtgggtactccggtggggtaaggtcagaaggtccctgtgcagggagggactggtcccttgagaaggaacagagggcaaatcctgaagagtcctggaggcccaatgtagacagcagaagctgggagctgacctaggagtgatcgggggcctgatccagacaggacagacacaggctgacaccggagagtcccaggtgccaacatgaacagttaaggcaggggctgaccccaaagaaatcaggggcccgcagctgaccccggagggtcccaggtgccgacctagacagcaaaggcagggctgaccccagagggtcccgagccgacccagacgacacaggcagggctgatcccggagggccccgccccgacccggacaggcagtgaaggcacaggcagggctgacactcgagggtcccgcgacccggacaggcagggaaggcacaggcagggctgaccccggagggtctcgcgacccggacggcacaggc

SEQ ID NO: 33841 - DNA, 996 bp, Artificial sequence
  DNA replication origin
cccgaagactcctccgtgtcccctatccccacattcccttcagggccattctcctgccttcctgttccgggaaaccccgtactcctcttggctggaatgcaccctgtgggaaaaagacagtctttcctctcctcagggttccgctcagctgagggtggggcggttgacacctgagggagcctttgcttgttgtcccaagcagctatctcggcagcctcccccgcccccttccttagagtcctggtgggagccacgctgagtcctcgttgagagcagccccccacctgccggctcctccccaccgtcctggagaaggtttgctggtgaacctccttctccccaaggcacacctgctgcagggagccagtcgggccagctgtaaagtgttgtcactccaaataagggccccttcagtggtttacaaaacagaagctcttgccctgccccgcccctgccctcccgagctcctaggttagctcctgggccgggggcggggcggtggggaaggtcggaaatgcgtgagaggcagcggtgacggaggagggggcgtgctggtggcggtggctcttggggaggaggcaggtcgcatgttgtgtggggaacacgttgcctctcctgccgtgagcctcttagggccctccgtgtcccgggttacagaggtgccttggatgaaacgccttcctgatttttttccccaaacttgtgttttgatttacctaagggttctaaaatgggccatctttccagggggccgcgggtaggcagagccgtggtcctcacgtttggaggaaatgtgcagtgcggcccgcgtggtggcactttgcacagagtggcactggctggcttttgtagtgggtcgtggactttgtttggatggaggggagttaggaattactggtgtcataaagatcttaccagatggccttgccctgtggctctgtgacctccagaacccccgccgccatccctgcatgcacccggtcttctgtgcctgca

SEQ ID NO: 33842 - DNA, 1618 bp, Artificial sequence
  DNA replication origin
tgtttacatgtaatcagttatgatgattgtggctgaaagggtctgcttttcccgggcatggtccgggaagctccgttccacagctgtgagctccgtggagcttcctcccgagcctcctgcccggctctgccggtgctgtagtgagagtggaggaagtgctttcctccgagatttaaccacgagaggtttcactttctgagtcttgtggtggagcctgtctctgtctgggacctggaccctgggcagcacggggaggacgccgtggcatcaggaggttggagaggtgtgtggtggagtcggacggatcttagaggggcgctcgcggggcctgctcggccctaccctgtagacagctgggacccagcgccccttctgggtccccagcagggctgtgttctccccactgggcaccccagcttgtgcgtggaggatgggaagccttgtatggcttgcccacctgggtgactgagagcggtggatgcgattaggggcggccaggggctctgggaaggcccacgtgcagggtcattatctggcagaaattaagtcctttcgcagaaccgggatcctaagtgccggtttgctggcgtgcaggtggttgcaggtgcatgtagctcctgccgccaggccctgtgtggagcatcccgcccggggggcctcccaccatgtctgtcatctgtagggcacctggcaggtcttagaattggctgccctggatccagactctcgctgtcatctgggcctggccacatccctcccctgccatcaagatgtctgtggtccagtctcccaccctccatccccactccctgcctctgggtcagaagcctccgatggtctctgctgtgggggttcctggtccagcctggcctcccgcagtctgccgacaggcgctttcaggacagcactggtgggtgggtcttcgggccacctgcagggcctgggagcagtgtggtgtccggatcaggtacgtggcctggggagactcaggttcagagcctacctctgcctcttgtaactgtgggacttcaggtctgtgcctcagtttcctcagggggcggtggggtgaggactcggtggtgatccccatcctgccgcacgtggggacccacggaatgctggctgctgcttccgctgccggtgtggtgatatcttgtcgcgtccacagcacctggcgtgtgtggcacacattgggtgctctgagaaactgctccatgggggatcctgccctgggatctgggatctgggatctgcccacagacaccttgatcaggattccccagcctcggctccgtgggtgttttacactggatcgttctctggggtggagctgtcttgggcactgcagggtactgagcagcgtccctggcctccacccacaccagaccaggagcacccccaagttgtgacaaccacagaagtccccagacatcgcctagtgtccctgggagcaggacccctgacccgtgtgtcttagcagcccccttcccttctcgtcgccatcgtcagctgcgtgtccttggtcccctgcttccctgcccatgtcattgagctgtgcaggtctcagagatgcttggcgagtgaccgtcattggctgactgaaggcagatcacgcagg

SEQ ID NO: 33843 - DNA, 1564 bp, Artificial sequence
  DNA replication origin
ggtctcagagatgcttggcgagtgaccgtcattggctgactgaaggcagatcacgcagggaagtggagaggagtggcccgacacctccccaatgccctgcaggctggtctggtgcacgccaggggtctctgctggggcaggctcggttgccacctgcctgtgggcctgtgcactgggcagaaggggtctccggggacagtgcgcagctggctctcagaagcttctttctgagtcctgcctgtggcctgggctgccctgggctggccagcacggggcagtgggggcacactctggagggagccaggggcgagtcacttccctctcccggcctcagtttccccatcggtcacgtgggaaggctgtccctccccctgtaggattgtggaaggattaaatgagctgaggccagtgcggcagacagcggggagggagccctcttgtcccctgtggctgcccttcctgctggctgctttgcaccgaaaagctgcggagtaaccctgggcggtggtgctccctggatggcgtccacatggggaccccaaggcctgggaggctccaggagggacggtgctggcccaggtttctgtccctgtctgacctcggagttggtgttctgggtaccgcaccgtccggtggcccaggctccgttttctcttctgtcaaactgtgtggtcaccctgatgtttcaggggccctgcagggacggagtggggtggggggctgaagggtgtggtcaaactggagggcgctgtgtctgttgctattgttaaccgtgtccacactgatgggtgctgggccccgccaccgagcgggacttgtgcggcctgcagagatgtggctgttctgttgcctgtcttaatccccagggactgtggggccaggtccacactgtgggatgagtgcagcccccacggctgtggtggggctgggtccacgctgtgggatgaatgcagcccccagggactgtggggccgggtccacgctgtgggatgaatgaagcagccttttctccagccacactggtttgctcggccttagtcccactggatgcggcgagggttgaccggtcaggcccttgctggtggcctgggtagatgtctggagagggggcctgggctccggactcctgcccttcccccatcagtgatcctatcccacactctttggcgatggtcagtgagctgggcaggggcgggggtctgtccctgtccctcaggtggagatgtccaggccagtgcccacaactgggttagatgggctgcacaaggctggggaccagtctcccaggctgtcggggggcttcagtaatggctgtgggaagacccagcacgtgaggagacgggagcttagaaattttgtatggccaggtgcggtggctcatgcctgtaatccaagtactttgagaggccgagtcaggcagatcactcaagtccaggagttcgagaccagcctgggcaacatgacgagacccctgtctctactaaaaatgcaaaaaattagccagacttggtgatgtgcacctgtagtcccagctacctgggtggctaaggtgggaggatcactt

SEQ ID NO: 33844 - DNA, 1005 bp, Artificial sequence
  DNA replication origin
catggccggacccctggctggatccctggcttcctgcagtgttctcttttcctaacattttgtcaccgtctcagtcagctcgggctgctgtgacaatactgcaggcacagtggcttgtaaactacccgagtttgtctcatggttctggaggctggacgtccaagatcaaggttctgtggatttggggggttggggggaagggggggttgtgcttcctggtacatagacagcggcgctgtggatttggtgtagggggtggttgtgtttcctggttcatagacagcggtgccttcttgctgtgtcctcatgcggacgggatccctcctggaaccatcagtgccctcatgaaagagccccccaagagctccgtggcggaagaagctgatcccgcctcccaacaccactgtcttaggggtgagaattttaacataggaatttggggggatcacagacattcattgctatgggtgggaccacttggtgcgttgcccttggggtggcggtgtggtcagtggtccattcctgcccagcgccgagcagcggtctgtgcgtggggtctttgcacccgtgcacctgctgaagggtctctggagctttggctttttggcttttacgagtaaagctgccgtggtgcttggtgtgcggtgaggagtggacagaaggctctgtcctggcaggtgccctgcagtggcctgagaccgggagatgagggccggcaaggggctgtggacgagtccagagtgaggcggcatctcggaggggctcacacattgtctcaggaggagtgggctggcatttctttccagtgggcagctgttgaagattttggagccaaaagagcgttccagctcagatgtctttcaggtggagtgtggctgcaggtggggcaggctgggtcagggtggagccatgtgggctgaggcccgagttggggctgtggctttggggccacatggctgccggtcgggtgggagcgagtctctgctgaccagggccctggatgtt

SEQ ID NO: 33845 - DNA, 1710 bp, Artificial sequence
  DNA replication origin
ctcagattgcatcccctccatgccaccgcccttctcttcagggcgcggtgagggaagggcgtgtgggggtccctctggggagaaggtgttttcaccttcacactcaccctcactcctcctgtcctggaacttgggtgggtttgaccttttgtggatgaggtgagggctgagaggtggattactacctgagacaatcaaaatcaattttctttcttctgaaaaggactcagggtgtttgagaaaagtactggggagaggcagctgccaccggggctccccactcgggatgtgttgggtgttttgcgagaccccccacagggagctcaggtgctgtgggcagttcctgggctttgtcgagggcctcccgaaggcagcactgtggccaccgtgggacacatgcagcctgtctcatctctaggagctgccaggtgaggggtcctgcgacaggcacctgtgcaaagatatctaccatgggcagcaaggaaggttccagaaagtaccggagggagagttgtgttggggcttgggggctttctagagcagaggctgtgagaggaagtgagctgggtcccagcaccaggcagcctttaggcagctgtgattggaacagcactgtgggcagagggcaacagcgtaggacgtgtgtggaagtggggaggtgccggaagattcagagacacagggtggtgaaggcgagcctggagaagtgggctgggggcatgctgggagggggcggtgacgcttgagtctctagggcaccgggggcctgagcaaggttaatacctgagtagagagttgaggcagtctctttttagaaattagaagttaactattgctgtgtaatggggtcaccccaaaacttcgcaacttaaattaacaaaacttatttcagatagtttctgagggttgggaatgtgggagcactttgttgagtgatcctggcttggggtctctcagaagttgtagtcaggataccagccaagcaggggccacatcatttgaaggctggactggagctggaggagccactcacaagttggctccctctagtggctgttggtgggaggcctcagttcctcaccacgtgggcctctccgtgaagctgcttgagggtcctcacagcgtggcggctgcctaccccagagcccctgacccgagactgagggcaaggaggaaggcctgtgccttttgtgaactggccttggagatggcacactgtcacttccatcacattctgtttgctagaagcaggtcactaagtgtagcccatgctcaaggggaggggaattaggttccagtatggaagggatgagcatcagagatttgtggacacactggaaaacccagcattggcatcccagcgtgtgagggtgaagaaaagtggggagacggagtctctgcccaggaggtgaccaggtgagaggcagaggcaggagaggggctggagtgaggacccccatgtcacccagaatgtgtggggggctcatctggaggctggggtggagcgacagctggccacatgggcccccttcccgatagtttttccaggctgacttgctaatccttttcatcctctggggccctgggaccatcagtgtgcccatctctgagatggggtggtagcgtactcgtctctggaagcattgtgggtattagcaaggtcgtggcaggcgtggagacgtaaaggggttcagggatgtgctcagggcc

SEQ ID NO: 33846 - DNA, 1234 bp, Artificial sequence
  DNA replication origin
ctcaaggggaggggaattaggttccagtatggaagggatgagcatcagagatttgtggacacactggaaaacccagcattggcatcccagcgtgtgagggtgaagaaaagtggggagacggagtctctgcccaggaggtgaccaggtgagaggcagaggcaggagaggggctggagtgaggacccccatgtcacccagaatgtgtggggggctcatctggaggctggggtggagcgacagctggccacatgggcccccttcccgatagtttttccaggctgacttgctaatccttttcatcctctggggccctgggaccatcagtgtgcccatctctgagatggggtggtagcgtactcgtctctggaagcattgtgggtattagcaaggtcgtggcaggcgtggagacgtaaaggggttcagggatgtgctcagggccacctgtggcaggcacaacggtcctggctgaccccgccacagcaccaagagggagaggggagagcctcgtgggtgcttggtgcgcagggggcagtgtggccgtggccgctgagcaaagctctggggaagggggcgcccagcccttggggtggtctgtgcagagatgccgttggggtgagtccgtctgtcagggcaccgccgccacgtctgtgtgctgtccctctggtgagcattggtcatgaactggcgtgaccgtggtggagctgcacagtcccagctgcggggccggtgccgtgcgacttgatttggcctgagaccgtgtggtctttgacgtaaataccaacaattggcccccaggaaagtgtgtccttgcagaacttctggaaaaggggtggttccagtaagaccctggcttggtggaagatgggaagggcgctttgtaaactctttccgaggagtcaggaggccgtggcgtctggtggagagacggtcagcctcacgtgccttggtttcctgtgctgggtgctgcagcacggcagggtctgggtaagagggggcagcagcacgagagtcaggccccggctgccgcccgccctcacgtgccccgtcccccaggcacgggcgagagcgggaagagcacgttcatcaagcagatgcgcatcatccacggcgccggctactcggaggaggacaagcgcggcttcaccaagctcgtctaccagaacatcttcaccgccatgcaggccatgatccgggccatggagacgctcaagatcctctacaagtacgagcagaa

SEQ ID NO: 33847 - DNA, 2797 bp, Artificial sequence
  DNA replication origin
ctcctggttccggccccttccccaggctgagcagcctaccaggcacctcgtttcggccctgacactcacccatggggctgtacttctcaccttctcacactgtttttttgttttgttttgttttgttttgttttgaaaacagggtctcgctctgtcgcccaggctggagtgcagtggaatggtcaaggctcatcacagcctggaccttctgggctcaggtgatcccaccacagcctcccgggtagctgggactgcaggtgcatcaccacgcctagctaatttttgtattttttgtagagatggaatttcaccatgttgcccaggctggtcttgaactcctgggctcaagcagtcctcccgctttggcctcccaaagtgctgggattacaggtatgagccaccatgcctggcctccgccctggttttttttcttttttttttgataaagtagaggtcatttgatgccctgtttttaaatcacagctttattgagttataattcacattctatgcacttcacttgcttaaagtgtataatttggtggttttcgatatgtttgcatagtcgtgcagccatcaccgctgtcggattccagatttcattttctcaaaggaagccccttccccatcggccgtcactcccaccccctcctccagccccggcacccacacatccccttcctgcctctgtggatcggtctgtcctgaacatttcatagaaatgggattgcacgccatgtggccttttgtgtccggcgtctctcactgagtgtgacgtcctcaaggtgcatccacacagtggcctgtgtcagagcctcgtccctgttcatggctgagtcatgttccagtgcatggagggaccgcgtatttgcccatttatcccctggaggacatttgagtgccttcatgtgtgggctgttgggaacggagctgccgtgaccgtctgtggacgtgtgtttatgtggatgatgtgttcccttccctcagttgcatgctacgcctgggagcagaattgctgggtcccagggtgactctggctttgccctctgagaagcgtccagagagtttgccccagtggccgccctatggggcaggcccagcagccgtgcagccgtggctcctgccagtggcctccctggggcctttcagctgaggggccattgatcccgctttcgtagccctgctttcaggggtagggctcttgcccttagatcttggtttgccacttgccctgtctcccgctgtgatctcttccagctgtggccctctctgagagtccatattcatatttgggcttagatctccatcagcttctgaaacacgcatctgcaaactgcagactgattttgtcgataaagttttattggcacatacccatttctgccatgttgcccatggtgcttcagcagcagcagcagagccgagtgctggagacagtccgtgtggtcgggaaggctgggtgtgctctctggctctctgcagaagcagattgctgctgtctaatctggaagtttccagggagtgggatttttggggtttgtgtctctttttccaagtccccctaggtgtgcttatcccagcccagattgagaggctgggggcagggcaaggggagggctgaagtcggagtccggggcagggagcgttgctcagaggggacaagcaagggctgagtctccactctggggggcctgggagggccccgtggctcccagagcccagggcaaggctcccttctttcccatctgggtcccacccagtatgtcccctccccagtccctcagccaaactgtggctggtcatgtcggcctgtgcgccccggggacggggacacagagcatcaggaggggaaaggatggcccccccacagtgtctgccccaaagggtgttcacatgtgtgtgcaagcacgtgtctgtgcggttggccttcctttgtgacagggcagcaagctggggcctgatgccacccgccgcccagggttccgtgagggggaggcggctcgtgttggggcaccatgtaaactgttgagtgcggcagctcgggggccacacgccgtccttagcaccgggtgtggtatctgctcttgatgatgtttgataagcatttttcggacgaaagagagaagccggcggggcagaaaccgagtctggagctgcacactgcaggcgatgccgctggttgcaacgtcctgtgactgggcttcctgcctcccggtgtgtctggagaattcgaggcagcgagtgctggggctgttggttagttctgtcgtcgtgcttggtcgtgctcggcgctgcactgccctcctgtgggtcctgggtttgaagtgtgtgtgttctacacgtgcttgttccccacaccgtcccctccccacctctaagaagtgaatcgaagcccggcctccccggcaccctgcagaccgcaccgccgggaggctttgcttgtggggccttgttcggaggaaccacaccgccaggcggcctcgcgtttttctgacacgtgttcacacggaactgtcagtggtcctgactgcacagcctgcggaatgccgcccgggccagccgaggcctggaagaggggccgtcacaagctttctggtggatgtgtggccccagcgagctctcgacgtctcccctgcccgccctcgcaggccaatgcgctcctgatccgggaggtggacgtggagaaggtgaccaccttcgagcatcagtacgtcagtgccatcaagaccctgtgggaggacccgggcatccaggaatgctacgaccgcaggcgcgagtaccagctctccgactctgc

SEQ ID NO: 33848 - DNA, 1924 bp, Artificial sequence
  DNA replication origin
atgtggccacgccccccacacccccacagctccttccctgtgtggccctggctcacacatacttagagataaatcttatcccctgacctggtcaaacacacactgaggatgaagaccaatgggctttcttttgtttaataagacgaaacagggtctccctctgtcgcccaggctggagtccagtggtgccatcatggctcacttcagcctcaacctcctgggcttgagcgatcctcctgcctcagcctcctgagtagctgggaccacaggtgcacacaaccacgcccagctaatttttaaaattttttttagatatgaggtctggctatgttgcccagggtggtctcaaactcctggactcaggcgatcctcccgccttggcctcccaaagcactgggtgcgcaggcatgagccggcacaccgggcaaatgagcctctcagtgccccctccccgcctgctgtggcccgggcggtaccggaagatgatgttctccaggtcgaaagggtactcgatgatgccggtggtgggcacgcggacccgcagcacgtcctgctgggtgggcaggtagcccaaggtggcgatgcggtcaacgtcggtcaggtagctgcaacacagcggtgggtgctcaggccggctgccgggggtgggggggcaggacagggacacagcacccaaaccagcgggaggacggaaagccaccaggagggggtggaccgcgcactgcgccacctacggcagtgtctgaagcagcccggagggctcgggccaatggagaccctggggtcgggatacgagcctcccaacctctatcctctctggggtctcaggggacagaaatgacccagcacaagagaaagtcccaggacgaggactccagctggttcggggggtttgtagtagagctgtccagagacggccaccaaggagggagacggtgacccagggcaggggacttcccgagagaggcctggctggccccagggatgaggcttcacaaacaagcgcatcattaggagagtcgcagctgcagaggctgcagaggtcccagcagatccccgtgcccgtctccctgctgctccctgtacgtgggtgcggcacccaccacgagcaatgagccagtgtctacacagcgcagctactgaagtccacgcttgattccggcttccttggttcccctcatgccttttcctgcccagccctctgggttgggacagtttcccgtttttgacgccctgggcagtcctgagtggggcgcccctcgagtggtctgcctggggtgggggttgtaagaggccgggtgcctgctcagacctttccggcaccgcgaggaggccctggcgttttgttccaagtgcttggttatctgggccctcccacaacctcccagaggcagggaacacacagaggacgggcaggaggggcgggggacaggcctgtccctgtcgccttagggtctctcccggtgctgggggagggccggggcctctgcctgccaagcatggagggcagcagtgcacagcctgccacgcgggggcctccacctgcggccatggcccggccacctgtcagcacacaagtcaccccctatcccaggcccagagactgggagaaccctgacatcagtcaaggtcacagccagtcactagtgggagacgtggctctggggacgatgtcccaggcaggagcgagacggcccaggttgtgtctacctcccatcccacggccctcctaggagaccctgggtttcccccacaggccacaggccgggctccagcaccgagggtggccaggagctcactcctgacccagggagggcagcggcagggccaggcatacaagcaggccagtgtcacaccagagtccaccggctcctgccaaggcgtggcccctccagggatctgctctggtccctccatccggcca

SEQ ID NO: 33849 - DNA, 3031 bp, Artificial sequence
  DNA replication origin
tcgggaagtcccctgccctgggtcaccgtctccctccttggtggccgtctctggacagctctactacaaaccccccgaaccagctggagtcctcgtcctgggactttctcttgtgctgggtcatttctgtcccctgagaccccagagaggatagaggttgggaggctcgtatcccgaccccagggtctccattggcccgagccctccgggctgcttcagacactgccgtaggtggcgcagtgcgcggtccaccccctcctggtggctttccgtcctcccgctggtttgggtgctgtgtccctgtcctgcccccccacccccggcagccggcctgagcacccaccgctgtgttgcagctacctgaccgacgttgaccgcatcgccaccttgggctacctgcccacccagcaggacgtgctgcgggtccgcgtgcccaccaccggcatcatcgagtaccctttcgacctggagaacatcatcttccggtaccgcccgggccacagcaggcggggagggggcactgagaggctcatttgcccggtgtgccggctcatgcctgcgcacccagtgctttgggaggccaaggcgggaggatcgcctgagtccaggagtttgagaccaccctgggcaacatagccagacctcatatctaaaaaaaattttaaaaattagctgggcgtggttgtgtgcacctgtggtcccagctactcaggaggctgaggcaggaggatcgctcaagcccaggaggttgaggctgaagtgagccatgatggcaccactggactccagcctgggcgacagagggagaccctgtttcgtcttattaaacaaaagaaagcccattggtcttcatcctcagtgtgtgtttgaccaggtcaggggataagatttatctctaagtatgtgtgagccagggccacacagggaaggagctgtgggggtgtggggggcgtggccacatccatccagaccggcagccgaagagacctggcagggaggacatttgacagggcctccaggacgggccgggggcctggttggagccagcatggggctggggtctggagtgctggccggagcagggggtgccgcatggtgcgggaggggtcatagggactgaggctgccaggggagggggctcatggggaccgaggctgtgaggggaggaggggtcatagggaccgaggctgtgaggggagggggggggtcacggggaccgaggctgtgagtggaggaggggtcatagggactgagtggggaggaggggtcatagggactgaggctgtgaggggaggaggggtcataggggccgaggctgtcagggaagaggggtcatggggaccgaggctgtgaggggaggaggggtcgtggggaccgaggctttgaggggaggaggggtcatagggactgagtggggaggagggctccaggctggggtggaggagctgggtggtgtggggtggattctgttcttcacgggctgcccctgcggatcctgctgggcctccggggctccaggtccactgtggctgggggccggccagcagagccgggttctccctggggaccctcagtgggtcctgtgtctggtaggctgctcagctggctggactctgctgtccctgggaacgtggaccctgcctgcctgtctcctggccccatataacatctccagcgctgaggtcccggctttatgcgtgcctgtcctgggctgctggtgtcgggcgtgagactcccaccgcaggccttattcccgcccagtgctggaggccagaaggctgagatgcaggtgtgggccgggccaggtccttctgaggctgaggggatctgcccaggcctcactcggctcctagtggcggccgcatccttggcatccttggcatccttggcatccttggcttgtggccgggttgcctcatccctgcccccatcctcatgcagcgtcctccccgcctgcgcctttgcctctgttctcttataacctgtccttggccagggccaccctacctctgtgtgacgttatcctaaccagtgacatccgcacagaccctgtttccagatcagagccgtccccgggttctggtgttcgtgcgtgtggggcgctagacggctctgtcctggagggcctcgcggtggctccggttgcgggtgccttctcctgcagtgcaagctcgccctggcactggccctcatgagggaatgacgcctccctgccagggtgtccccacccagctggtgcactgccgaggccattgtgagggttccgggaagtctgtggggttttcctcgagagccctgccttgagacccaccccagggctgggggtgccaccccctgccatctgcctgttctccccacccgtcctcccagctcggcctcccagcgcaggcagggaggatgcggcgtgaagatggaggcagggatggagcaatgtggccacaagccaaggaatgccaagctctgggatggttcccggggacccgagcaggcgctgggccctcagaagctgcggtgtcctctctggacatgggcgatggtgtatattgttacgagaattcaagtttttcttcttttttattcacacggggcccatgaccccaggatacagctgaggcgagccaggcataggccaggttgtggcatgaatgtcccctcacagccccacgctggcctcttaacagcgcaggcctctgtgtcctctgtcagaaatgtcctgtcccctccctgagctgagctcaggctgggtgtgtcaccccctctccaccatcttccaggcccttcccagctccagctgtgcccttttcttttttttgagacggagtcttgctctgtcgcccaggctggagtgcagctgtgcaatctgggctcactgcaagctccgcctcccgggttcacgccattctcctgcctcagcctcccgagtagctgggactatagacgcccgccaccacgcctggctaattttttgtactttttagtagagatgtggtttcaccatgttagccaggatggtctcgacctcctgacctcg

SEQ ID NO: 33850 - DNA, 1948 bp, Artificial sequence
  DNA replication origin
tagaaaagtcacaagtagaaagaggcaaacgtcccgtaaggaacgcacgcccgcagacatcgtctgagctgattttctttctcccgcctgtgcgtggcctgagagtgtgaggttgagctgctcaccacgcggggcagggcgctgcgcctgctcttctgccccaggaggataccggcaactctgccctctgcagccgtcactggagggtccctgcagggagcaactgtggcatcagtgtttactcctgcgagtgacgcttggtgaacatctgtgtccctggcccagtgaggggaaaggcttctgtgctcagggtgacatccagatgccagatgtagggtccctgggcacccatcgcaggttcccgcagcagctggcgcccagaatcctctgggttctcacacccccacactagcgcccgcttccctgggcccagtggtctcaggcccctttgccagtgagggaagggtctgcggtggtcacccctggaggcggtgcggccgctctctgagagcgtccttgcccgttctaagagtgggggctcttcctgctccagccgatgtcagtctggtgtggcaggaggggcttgggtgggagccgtcctgggattgcagattgggccttggggcgccaggtggctgagtcctggcgctgtgtcctttcaggatggtggatgtggggggccagcggtcggagcggaggaagtggatccactgctttgagaacgtgacatccatcatgtttctcgtcgccctcagcgaatacgaccaagtcctggtggagtcggacaacgaggtgggccctgccctgagcaggggcagcgttgggggccgggccttccccacctgccaagcctgggtcccctcacctgggtccccccagctgccccttgggctgtgtgcagtggggagggcccctctgattccctctgccttcgctcccgccagaaccggatggaggagagcaaagccctgttccggaccatcatcacctacccctggttccagaactcctccgtcatcctcttcctcaacaagaaggacctgctggaggacaagatcctgtactcgcacctggtggactacttccccgagttcgatggtgcgccgggctgcggcatggggaggggctcgcgggcagggccttactggggggagggggctgatatgggagaggggctcatacaggccgggagctctaagggagggcgtctgatgggaggtgtcatgtatgggagtggagtctcagggaagggagatctcgtatgaggggggcctgtacgggaatgagttctccgacgcgggtgtctcatacccgtgggagatctgttaatgcagggactccttatacaggaggggtctcgggtgggaggggtctcgggcagggggatctcgggtgggaggagtcttgtacaaggagggcaccatgggagggggagtcttgtattggtgggtcttgtacgggagggagttgtcgtatgggggtgtcctgtataggtgatcccatatgggaggggtctcacaggaagggttcacgcacactgccagcgcagccccgtggggaccttggtggtagtccctgcatcctcctctgtgccctactgcccccaccctcggacccgtccctccctacgtggcccctgccccacggggtgtgtcagggcagctgagcactgagggtcttcacatgcccagccctctctgggcctggggatggcggccaggggagggtgttgtgtgccctcgtctgtgtggtcagtggctgccgttagtgctgtcaccactcagagctgtccctgccaggcacagtgaggccctgggcagctctggcgccctcatttccaccccggatctgtgctcctcccgtgagtctcgggtgtcatcttcgggagggcccctcagggtgccctgcctctggatgtgcagcgagagggaggggtctggcacacggt

SEQ ID NO: 33851 - DNA, 2072 bp, Artificial sequence
  DNA replication origin
accaccttccacgcgcccctggccaaagtgcgagtgctggcttcccgctccccgggggcggcgctcgggggcgggcgcaagtgcttgggacaaggccacgcacagagctgccggccacgtccctctctctgcctctcgggtacacacctgagaatattctgtaaaagtccccacccaccctcgctgtttccaaattggtgacatcacaaagcggaacaaaacagaaacgcccccatccaagtggcctttctcccagtgtcaccgggggaccatccctccagccgcccagcccacgtgggctccggtggggtgcgctctagccagggcagggtggccgtgcagccctctggagtccccgggcagccccaagcagccagtgttggccccggaggcacagcccagagaagcccccgtggctccagcccggggacccttcccagcctctgcagagggacggggaacccggccatgagagagggcccagggtgtttcttcaacctgtgagtcaggcgttctttttcctcaaaaaaataaaataaaataaaaggttaggcacttcccagggtgggcgaccgagggagccccccaccccctcttcaggagtccagtgggcaaagcacagcgttgatgggtgaagaggcgaggcgcgctgggcgtcaataacttaaaaaaggggaaaaacgtccgtctccgagtctccacgccttttgtgatgaagaaaagaagcgggcaggagaaagaaaaagcacgtggggttggaaggacagccacggggggctgcggtgtgggggcgcgtgactggctgcagggcggggccccatgctggctggcgggggctctgtgaggcccagagtcactgggggcacggggcgcttgtgtgttttatgtttcgttgctttttttctttctttcttttttttttttttttagaaaaaagcgagccataagtcaaggccagaaaaaggctgcctttgccgttgacaaaaggtgagaaggtgcgcgaagtgtacggagggagagatgtacatcccctgataactgtgaaataaaaaccatttgttaaaaatatgaaaaaaaaaaatctcctcccgcgggcagaggccccggcccggactcggcagcgccacccgcccggcagccgcaggctccgtggaaggaaggtcctgccccgtgtctccatcccgtctccctgggcctgggcgctcagaccaggttgtactccttgaggttgagctgcaggatggtgtccttcacggccgcgaacacgaagcggatgttctccgtgtcggtggcacacgtgaagtgtgagtagatgatcttgtcgctgtcggggttcaggtccacgaacatcttcaggatgaactcccgcgccgcctgggcgtcccgctggggacctgggggagggcagagggtgaggctgtgccccagcccggcccagggcaagggactcgtgggcccctttgtcactcccaggggatgagcgagtaaggcccacggcccacccagctcgacccccagcccactgcatgcctgacgggccgcagctcccctccctccccaggtgagctgcggtgccaatcccactgtagccccagggcactactgtcacggcccaggcctccaacctggggctctgcacccaccgctgctccctctgctcagccctctgccggcctctatccactcagctccacagccacagccttccagggcaggcctctggcatggctgccctgcgaaggcccagggtgagaggagaggcccccagggctgggcacagagcctacagagcaggaacagtggcccccacccacccacggtgcccctgctgcagccaggcctcagagacatccaggggctccagcaggggcgctgcttcccaccggccacccctgcccctccaccaccctggacaatgcaggcgacccgcccagtaactcctgcctgccccggtggaaaggcccctgggggtgttcaaggggctgctctggggactggtgggacaggggtctatgccccagtcccttggcctccccccaccagggctctctgagcccacaggacaggctgct

SEQ ID NO: 33852 - DNA, 1105 bp, Artificial sequence
  DNA replication origin
ctggctgcttggggctgcccggggactccagagggctgcacggccaccctgccctggctagagcgcaccccaccggagcccacgtgggctgggcggctggagggatggtcccccggtgacactgggagaaaggccacttggatgggggcgtttctgttttgttccgctttgtgatgtcaccaatttggaaacagcgagggtgggtggggacttttacagaatattctcaggtgtgtacccgagaggcagagagagggacgtggccggcagctctgtgcgtggccttgtcccaagcacttgcgcccgcccccgagcgccgcccccggggagcgggaagccagcactcgcactttggccaggggcgcgtggaaggtggtggcaggcaccggcctgggcagcttccaggcctggctggccacgaccacggcccgagggggagcccgccaggccacgccgcactgagccacagccccgggggccgcctcccggggccccttgaggcactgaggcaccgagactggttctccccgagagactcggaaggtggggaacgaggggactgtgtttggggaggtggctttttcgtctgctgttgactgaacactacagcgccctgtggttccgggcttcgcacagctgtcccagggatggatcgcctgtgctgccttcgcccgccgccacaccgggaccctgcacggctgcttctggcctcgacagatgacaaaagaaacagccccaaaatacgaccactccaaccagcagttcccgcctgcctgcccgccactgtcaggcctgccctggcctcctcgtccgcagggctgtctgctggcttctgggggcagaagagcggggagccccgtggaagggtcaggggagaccaggtcagggcagctacatttctggtgatcagccccatggggagacggggctggcgggataccccccccccggcttccccacaccacttctgtctcacccggaagcgtcctttttttgtgccaggtgtctacctaagagggttggtgccagaagccccccatggcgagtgctggggcccggcggtgccctgggggagcagatggggccacccctggcagggccgcta

SEQ ID NO: 33853 - DNA, 1299 bp, Artificial sequence
  DNA replication origin
gcctcgacagatgacaaaagaaacagccccaaaatacgaccactccaaccagcagttcccgcctgcctgcccgccactgtcaggcctgccctggcctcctcgtccgcagggctgtctgctggcttctgggggcagaagagcggggagccccgtggaagggtcaggggagaccaggtcagggcagctacatttctggtgatcagccccatggggagacggggctggcgggataccccccccccggcttccccacaccacttctgtctcacccggaagcgtcctttttttgtgccaggtgtctacctaagagggttggtgccagaagccccccatggcgagtgctggggcccggcggtgccctgggggagcagatggggccacccctggcagggccgctacaaccttttccagcagcggagccctctggggggcctgtgcttgtggcatctctgagggcctagattgcacaaggtgacctggccgtggcctgagggtggagtcgcccagcacgcaggccggggcgctgcggggctaagtattaggccttcccagggagggggcgtgccaagcatcccagagccgggctgggaccgccaaaacgtcgtggcctggatcctctgggtctgagtgcctgatcccctgccccccaaaaaagcagaggtaggtgttgcaggcccagggcaggggtgcctgccccaggagagtcccaggcagtggttctcgtgccagtggcacccaggggcaaggacagccaacccccacccttgccacgtgtggggccacgtgggcatgtggggtgtgtgtttttaccttggtgaatctcacctgccaacgatttctcgtgagtgccgaccaccttctccgaccatgttacgcccgggcggcagcagcccccggccactgcaaacccatgccctgggtcccccggctcccccagggaggcatccccgtgccaatgtcccccagtggtggcagcagatcctgtggccggcctggcggacgggacccagtgatacttgtatattacacagtcctgatttcagacaatttcaaccttaatctatttaaaaaagaatattctatacaagctgtttttaagccttttaccatttgaaatgcatgtgttgtgcgcgttggggatgggaggaggggctgaggagcggctcagtgtcacctcccacagccaccggccctgacccttaatccagacaccgatggaagtcgacttttcatatctttctcctgaaatgaactctgttttaaattggaataaattttgttcctaaatgctggcggccc

SEQ ID NO: 33854 - DNA, 1890 bp, Artificial sequence
  DNA replication origin
cagctccgggtgaagcctgaggagaatccgccccttctccagaaggaggaagaagggccctgctggtcacacaggacccagtctgcggtgggggttttcccgccaccgccccgccctccctggggcccccacctcaccctctcctggcacccttcaccgtcaacctgtcgggccgggtctgagcaggtctggaggtgggcggggagccctggcctccccacctcctcccgtccccaccctgttcccagcactcaagccttgccaccgccgagccgggcttcctgggtgtttcaggcaaggaagtctaggtccctggggggtgacccccaaggaaaaggcagcctccctgcgcacccggttgcccggagccctctccagggccggctgggctgggggttgccctggccagcaggggcccgggggcgatgccacccggtgccgactgaggccaccgcaccatggcccgctcgctgacctggcgctgctgcccctggtgcctgacggaggatgagaaggccgccgcccgggtggaccaggagatcaacaggatcctcttggagcagaagaagcaggaccgcggggagctgaagctgctgcttttgggtgagtccagggtcggtgggcggtgggtggtgggcagtgggcggtggccagccggcaggggtgtcggggcaaggaggcggatcaggctaggtcagacattggcatcgtggagccgtcgcctcctcccagggaatggggagcctggaacccattttccagatgagaaagactgaggttcagagaagccaagttccttgtccaacgtgcgaccagcggccaggtgcccaggcctgtccactgtgtggggcatatacaatagcagacgtggctctaccgggcccctgccgggcaggcccagcacgccctacctgtctgtgtcatggcgagggaatgatgagctcaggtgtgcaacccgttctggccagcccacccgtaagggaggggccggctccagcctctccttcaccaggacgctccctctcgcctttacctccctgccatggctggagagggcttgtctagggctcctttgggggctagaaaggatggattgattggttcattggttcattcattcattattcattcatttaagatttattgggtagctcccaggaacgaggcagccaaacaggggaagatatttctgtcttcctggatctcatttcctgtgaaggagccaagacatttagtctgtaaactcataagcagataaaataattctggcaacaagaattatctaggagaaaacaaaacagggtgatggcttccatgcggaggcttcagatgggggagtcgacgtcagtaacggttcaagattctgaactctggctgggtgcagtggctcaagcctgtgatttcagcactttgggaggcccaggcgggtgggatcacttgaggtcaggagttcaagacacagccaggccaacatggtgaagccccgtctctactaaaataccaaaaatttgccaggcatggtggctcatgcctgtaatcccagcactttgggaggccgaggtgggtggatcacaaggtcgggagatcgagaccagcctgaccaacacggtgaaaccccatctctaccaaaataccaaaaattagccagatgtggtggtgcgtgcctgtagtccctgctactcgggaggctgaggcaggggaattgcatgaaaccaggaggtggagactgcagtgagctgagatcatgccactgcactccagactggcgacagagtgagacgccatctcaaacaaataaacaaacaaacaaaaccaaaaattagctgggcatggtggcacacagctataatcccagctactcgggaggctgaggcatgagaatcgcttgaa

SEQ ID NO: 33855 - DNA, 1528 bp, Artificial sequence
  DNA replication origin
tgatttgtgagcagtcaaggaaggcctctcagtgaaagtgatttgtgaaggccggaaggtggctgtcaaaatcttagagggcacaccaggtgacagtaacagcttgtgcaaaggccctggggcagggccgcacctggcatattggaggaacagtgaggaggcccttgtggctggagcagagtgaggagggggagagaggaaggaggggagggtgggttgtgctgggccttgtgggttgcagggaagtcttgggctttgaccctgagggacttgggagccatggagggctgtgggcagaggagggactggccctgactcaggtgctcacaggcgccctctggtggctgctgcagggaggacaggctgtggggggtggtctgggggagcccggaccagggcagtggggactgcgttggttcaggtgagcaaccgtggggctggaccaatgtggctgtcatggagctggagaggagaggacatatttgagagacactggggagacagaatcgacctgaccttgctgacagatggtacaaaatctggcagggtccttgcagggccagccacagattttctggggctgggtgcaagctgaaacttcaggctcttctgagcctggaaccctctgggacagcccagttcgcgcacctgccaaaccggccctgggtccgggatactgatgctggagtcttcaagagcctgggactagaggttcaaagacaccagctcagccccccgctaagctctgacatcccaaggctgcccttccccctctctgtgtctcaattttctcatctgtaaaatgggtatgatccaccaggtgggaggtgggggctggaggcttgcccagcatctcgtctggctcctgggggcaccagcatgggccccaaccagcgatgggagaggggatgggactgcttctgcctccagggttggcgtgcagagggcgggggtaggggtcggtgcaggcaggacttgatcgagcaagcggcagcaaaaagggaaggagtggcttggttggggcccagaaagaggaaatgggagcagaggagaaggccggagcacggagaaggggcgggggtgtcacctcccatctccccaaagggctgtctccaacgcctccaactccacctagcaggtgccacctgcacactggagagccatgggggcaggtcgggggtggccgcctcgactctccagtcctcagtttctccaggggtcatgtctatttggctcaaagtcaagaaacaggcttttctcggctgggcacagtggctcacgcctataatctccgcactttgggaggctgaggtggccagatcacttgaggtcaggagttcgagaccagcctggccaacacggtgaaactctgtctctactaaatatacaaaaattagcggggcatgctggtgggcgcctgtaatcccagctattcgggaggctgaggcagaagaattgcttgaactcgaggcagaggttgcagtgagctgagatcgtgccactacactccagcctgggtgacagagtg

SEQ ID NO: 33856 - DNA, 1207 bp, Artificial sequence
  DNA replication origin
tgagtggatagatgggtagatggatgtatgagtagatggataatgggtgaacagatgggtggatggatagatgagtagatgaagcgatggatggatgggtggattgagtaaatgggtggacaggcaggtggatgatggatggatgaatagatgggtagatggatagacggatagatggatggatgagtgaatgaatagatggatgggtggatggatagatggatggatgggtgggatggatggatggatggatggatgaatgggtggatggatgggtggatgagtggatggatggatgaatgaatgggtagatgggtggtgggtgatggatggatggatgaatgggtggatggatgggtggatgagtggatggatggatgaatgaatgggtagatgggtggtgggtgacggatgaatggatgaatgggtggatgggtgagtggatgaatggatgagtggatgggtgggagggtgggtggatgggtacatgggtggatgagtgagtggatagatgggtagatggatggatgggtagctgggtaatgggtggacagatgggtggatggatggatggatgagtaaatggagagatggatgggtgggtcggtgggtggatttcgtaaatgggtggacaggtggatggatgatggatggatggatagatgggtagatggatagatggatggatgagtgaatggctggatgggtggatggatgggtgggtggatggatgatggatggatggatagatgggtagatggatagatggatggatgagtgaatggctggatgggtggatggatgagtgggtgggtggatgggtggatggatgagtgaataaatcgatgaatggggtgggtgggtggataaaagtttaggagtgaaggtagaggctgggaaatcatggggaagtctgggccaaggaagtgatttttaggtgtggcccaggagtgagacgaatgaatggagtgagggctcagaggacactgagacccgagatgagaggtgatgcccacagttcccaactggtcagttgctgatcccactcccgtctcagtctccagagccccctctcgacggctgcttaccctgtctggctctggatgtggggtttgagggactctgaggatgcatgggaggagtgggtctcagggatcaggagacacatccagcagctgcagcctaactgcttcatcatcagtcccgg

SEQ ID NO: 33857 - DNA, 2738 bp, Artificial sequence
  DNA replication origin
ggccccgctctcggccaccggccgcaccatggtggcaaagcgctcccctgcagtgaagagcaggctgaaggtggaggcggccagggcggtgaagagcaggccctcccgtaggaaccactgggcgggcgccagacggaaggtgcgggcccccgacagcagcacgttggccaggtaggccgcgcccgtgagcaggtcactcagcgtgatgttcaccaggcaatagtagacccagcgtcgcgaccgcatgtggctggtgatggccgccagcaccagcaagttctccagcaccaccaggcagctggcggccaccgacagcccccgcagggcccccaggccgccatcctccggccccccgcgcccggccagccggcccgagtggttgtagtgcagaacaatgagccggctgtgcccgccggccgccagctgttggcaggactcgggggccaccggggtccccgtggcgttcatggcctcccccgggggctgactgaggcccgacgcagggtggagccacccgccttgctggtcttggtttcctgttatttgaaatttcctgttatgttcaaggtgccctccagggtggaggtaaggccgaggacagggaggggcaccccaacggtcggcccccacccgggctcctggagccaacgcgctggggctgccctggctgtgaggacccccacccctgccctggctgccttcttcctgtcctcgaaagccggagacccgcagggagccccggagccgtcagtcacggaggggaaatgagtccccactcgggatgggccacccctttccagccggacgactcctccccaccagccctgatcacccccgaagcacccgtcggctccactgaggtctccccacatgctccaccggcgctcagcacacagcaggtgcctaataaatgtcaagtgcctgcatgcccttgagcactgactcatccgacttgatccccgaaacagggcctgatgcgttacagaagaggaaactgaggcccagagagcccggtgcgttgcagaaggggaaactgaggcccagagagcccgatgcgttgcagaaggggaaactgaggcccagagagcccgatgcgttgcagaaggggaaactgaggcccagagagcccgaggcgttgcagaaggggaaactgaggcccagagagcccgaggcgttgcagaaggggaaactgaggcccagagagcccgatgcgttgcagaaggggaaactgaggcccagagagcccgatgcgttgcagaaggggaaactgaggcccagagagcccgatgcgttgcagaaggggaaactgaggcccagagagcccgaggcgttgcagaaggggaaactgaggcccagagagcccgaggcgttgcagaaggggaaactgaggcccagagagcccgatgcgttgcagaaggggaaactgaggcccagagagcccgaggcgttgcagaaggggaaactgaggcccagagagcccgatgcgttgcagaaggggaaactgaggcccagagagcccgatgcgttgcagaaggggaaactgaggcccagagagcccgatgcgttgcagaaggggaaactgaggcccagagagcctgatgcgttacagaagggaaaactgaggcccacaaaggcggcctgaggccaactttctgcccatgggaggacacacaggtccagggagagagacccccagggacaagctggtagggtctcggggccaggcgcccattttgggattcatggttgcctctcctgcccctgagctcaccctgctgggagcagagctgctggccccctggggcagccccccactgggattgaggtgcataggaaaagtagggacttgctcaccccatccccatggccctgctgacaacggctcacggtgactcagcctgaggtgaggtggctgtgggtctaagtgggagacacaccctgctctggcgtctgaggagggaggcaggctctgccctggcgtctgagggggaagcttggacctgcctggggtctgaggggggagggttggccttgccctaggttctgagaggggaggcatgaccttaccctggggtctgagcggagaggctcagccttgtcctggggtctgaggagggatgcgaggccctgtgctgtggtctgagaggggagacacaccctgccctgggtctgaggagggaggtatgccctgccctgaggtttgagcggggaggcttgaacctgcctggggtctaggggtgagggttggccttgccttggggtctgagtggggaggcatggccctgtcctgagtctgaggggggaggcgaggccctgccttggggtctgaggggagaggtgaggccctgtcctggggtccaagggaggaggcgaggccctaccctgaggtctgagtggggatgctcagccttgccctggggtctgaggagggaggctcagccttgccctggggtctggggcatgtaggggcttggacatcatctgtcacggatggagtgtgaggtctctgctctccagctcccccagtgtctgtgaccccccactcgtccccatccagaaggccttggggtgtggggtgatttgggaaataatgcaggccccagaagtgtgagtaggacccaggataagtccctgctgggagcctcctcccgcctgcaatcacccccaggccaggcccacttaccaccaaggagggtcctgaggggccccacctgccctctgtccccccaggagcctgt

SEQ ID NO: 33858 - DNA, 1281 bp, Artificial sequence
  DNA replication origin
acttccccagaatcacacagaagcggggttgtggggaacccactcgcccccacaccagggtgctctctgctcctacggggaggtggggtggttgcctccttgtccagggtgaccatgggaagcccatttggcgtcagaagccccgagaggccaccgggaagaccatgggggcctgtcccgttccctgctccccatacaggcgaggctgcgtgcacacagcttcctgtaccccaggagggcctgcctggcacgcacccggtggctgcaccatccacacgcaagactgcaacttcagatgctccgcacgctggagatgctggacaggggctcccgcatccgaaagctgagcgagcgggagccgcgaaagctgtcccttggcctcagagagctgtcggtggtggaagctccggagtgagcctcgacggcccgggccaggcagtccccgggccctcgcatgcccagccggagacacccgcagcagaggaagctgagcacggctctgcacacctccctgctgcggaaggagtagatgatggggttgaccgccgagttgaggacggccagggccaggatccagtccatgccccgcaggtactcctgggcccagaggttggagccaaagacgtcggccagcagcagcccgaagagtgggccccagcacaccaggaaggccagcaggatcatcagcaccgtcttcagcaggcggcgggccttgcggcgggccgctgggcgtggggccttctgcccgctggcctgcaccaggcggaagatggccccatagaggcccatgatggtggccaggacgccggcgaagatcaccaggcagaagaggatgtagcgcttggagtagaggggcagaaggctggagcagcggtcaaaggcgcacaggcagttccagcccagcaaaggcagcatccccagcagcgcggccagcagccagcagaggccgatgaagccgtagacgcggctggtcttggtggccccgctctcggccaccggccgcaccatggtggcaaagcgctcccctgcagtgaagagcaggctgaaggtggaggcggccagggcggtgaagagcaggccctcccgtaggaaccactgggcgggcgccagacggaaggtgcgggcccccgacagcagcacgttggccaggtaggccgcgcccgtgagcaggtcactcagcgtgatgttcaccaggcaatagtagacccagcgtcgcgaccgcatgtggctggtgatggccgccagcaccagcaagttctccagcaccaccaggcagctggc

SEQ ID NO: 33859 - DNA, 1960 bp, Artificial sequence
  DNA replication origin
ctctatggggccatcttccgcctggtgcaggccagcgggcagaaggccccacgcccagcggcccgccgcaaggcccgccgcctgctgaagacggtgctgatgatcctgctggccttcctggtgtgctggggcccactcttcgggctgctgctggccgacgtctttggctccaacctctgggcccaggagtacctgcggggcatggactggatcctggccctggccgtcctcaactcggcggtcaaccccatcatctactccttccgcagcagggaggtgtgcagagccgtgctcagcttcctctgctgcgggtgtctccggctgggcatgcgagggcccggggactgcctggcccgggccgtcgaggctcactccggagcttccaccaccgacagctctctgaggccaagggacagctttcgcggctcccgctcgctcagctttcggatgcgggagcccctgtccagcatctccagcgtgcggagcatctgaagttgcagtcttgcgtgtggatggtgcagccaccgggtgcgtgccaggcaggccctcctggggtacaggaagctgtgtgcacgcagcctcgcctgtatggggagcagggaacgggacaggcccccatggtcttcccggtggcctctcggggcttctgacgccaaatgggcttcccatggtcaccctggacaaggaggcaaccaccccacctccccgtaggagcagagagcaccctggtgtgggggcgagtgggttccccacaaccccgcttctgtgtgattctggggaagtcccggcccctctctgggcctcagtagggctcccaggctgcaaggggtggactgtgggatgcatgccctggcaacattgaagttcgatcatggtacgtgatgttgcggcctcttattccctggtgcgtgcatgcgtgggggccgtggctcaggggggctgtggatctaggggcagccgggtgtgtctttgctagagagggccacgggccagtgccctgtgagggtggagtgtgtgtgtgtgtgtgtgtgtgtgtgtgtgtgtgtggacaacctctgggcgttgcgggaagtgggggtgacaatgacagttaatgccgcctcttcttgttcacttcccctttagaaatggcagggcccatgccccatctctggcctctgcatcttttggggacccactctctggggctggcagaggcaccaccttggcttcctgggctgggggaatcttccctcacatccccttcagcatgaacggcctcggctttcccggtgggtaaaacagtttaatcactgaagccgaagcacagggttgattgtacacgctccccgccagccacaggggctgacaactgcctgccccgtgaaactccagtggagacgtttcagctccacaccattcagtatgggagacgccagccccacggggctacggtgcaagcagataactgaatttcgaagtgtaggttgtgtttaatttgaatctgtttatatttcggtagccccatggggcgggtggccacagtttcagtgcagatgtaaatccggaagcctccagcacctgcagctcatagacagctctcgcccaccttctcccaggaccaagccagtcccgtccagtccagtgtctgagcagagtcagaatccacaccacccgccgcctgggctcagaaagttctgctttaagtcattatttctccactgtacgatggggaatgcggtgtgtgggggccatttacccaccaacacagcagctgtgaggcacacacggctattgaaaattcatggaaattgctgggtgtggtggctcatgcctgtaatcccagcactttgggaggccgaggcaggaggattgcttgagtgcaggagttccagaccagcctgggcaacatagcgaaaccacatctctacaaaaaaatcctccaaaattaaaaaaattagcccgagcatgttgttgcatg

SEQ ID NO: 33860 - DNA, 1522 bp, Artificial sequence
  DNA replication origin
tagggatcggcctggggatcgccgggccggagtggcgtggccggggagcccggggagccccgagggtgggccggggacacgcaccgtagggctggccctgcaggtcgtactgctgcatgcggtacacggtgaactcgtgcgcggcgtcggcggcaggcagcggcggcgccaccagcagcagcacagcgggcaggaagacgatgaagccgagcggcagacaagacgccttcagcatgttctccagcacctcgcccgcttcctccagcatcctggccggcggcggggccgcgcggggcggcagctgggacgggacggcggcggcggcggctcccgcggactcacctcggcatgggtagccgccggggtcctgcgggcgccgcgcggggcagcccgcactcgccctgaggtcctgtgggcaccgcggcgaaccgccccgccagccgcgctgcctgtcgggaattgtagtccgtccgtccggcgctcgcggagccctgtgggagttgtaggcccactctggaactcccggaaggtgcggcaggctgttcggctaataccgttgaggtttcacataaactccaagtcataaaatgcaataaaatgctttaaaaaactatttcgcgatatcactttcttaaccttgtctttggcgttgggggagctagggtgaggggcgaaaggtggggacaggacgtgaccttgcgacctggaaggaagttggggataaagagaaaaggaagtgcctgcctggcgcgctaggtcttctgggagttgtagtcccgtcaaacacacaaagggtcacgggaactgtagtcgtcctggcagaaattgctgagaaaaacaaaaatcacttaaaactcccgaggatgtagatgtcaaactccacgaaggcaaaaacttttgtctgttttgtgcatatgatgtatccccggcatctagcacaagacctggcgcacggcgggtggcctataccatttttgaatgaatgaatgaaaaatagaaagtcatgatagtcagttcctaagggaggccgcagtgggttgtgggacttgtagtctggaacctgcggtttgtgcaggggtcggtggcaggtatttatatttatctttattcatatttggggcatacttatactaaaaaagtatttgttgttcatcagaaatttaaagttaaaacccagtgtctcagggctggaggtacctaaggaacgtccctttgtacagatggggagactgagccccagggtgcagcagacagtagccctggctctcagcacgttatcatcccaggctccgtacagctgcctaaggagtcagggcttcctttctgtcccaagtgagaagtggcattggtgccgattaagagcctgggctcaaatcccaactcctccatttcccagctgtgtggctttgggcaagtcgcttcacctctcagagtctcagtttcctcagatataatgataaagaatcaagcactctccctgccagcagcatgtgagaattctgtttgtttgtttgtttgtttg

SEQ ID NO: 33861 - DNA, 1560 bp, Artificial sequence
  DNA replication origin
ggttgcacaggccacgctttgggggctcggcagcctcctgtggctgctggctcctgtgccaggcagcaaagatggaggcgattctacaggatggtgcccgtcaggacccttcccccgggaaaatcccaagcagcacggaaaacgcggtcactgcatgaggagcctctggccttccactcccaccctccagagcctgggccttgggtttatacaccaccactgtggccccagggcgcttcccctggacactgtggacattagggccggatcgttctctggggtggggccgtcctgggcactacagggaattgagcagcgtccctggcctccacccactccatgccaggagcacccgtggtcgtgacaaccacagatgtccccagacatcacccagcgtcccctcggttgacaacaatggctctaagtaaaaaaatcgtaactctggggcaaaatgggacctgaggccaaagtctggttccatctccagagatgggctccccaagggctggcagaagctgggggtccccgcgcctcaggttgagcctgagatgtgacgagagggaccaatccaagagaatccgggctgggaactaagggggccaggagaacaagcggacgggactccttcacagggaaggccaggccttgacttccagggacctgaggggccaggctgaaaagaagaaaaaccagggaccaggttctggaatgtcagggacagctatagccaggcaaagacaaggggatgtggaatggtctagacactggggtcagggccacgacgggagggggcgaggctgttgagtgggagacttgcagaatgcaagggcaagggggtgcgaatttggaaagggaagaggaaatcctggaaagatggaacaagtggggttctgggaagtgggtgtgaggaggctgagctgagggcgtgggtatgcatcaaaggcgggacagaaagggggtcaaagggaaccccaggcgagtggactgaactggggacgtgggaggagaccagggaagctgggctagcagattctgaaacatgactcacgaactgggaccagagagcgtcaggggtctggggacaaatgtgcccttgacgtgggggccggtgactagagcgagaaaattcaggggagttgaatttgggcactggacaaaatgcacttggcacccagggccgtgggagggggtggggaatgctggaccaccgcgtcgggtggctcagcctggcagaaatcagtgcagggacctttaactccaaacgcagtcagctaaaggcgagaggcctgggaacacggacgtgacccagtgaatccagagaccaaccagatggtctccagaacaggaccctgggagctggaggtcaggacgggagcgtctgctcaagtgagcccggaccaggaagcctaaggggcggagggggcccaggagggagaaactcggcaaggcaggcagacgccggcccagctggggacaggagagaggggacttagggctccagggacgcgggacgcttggcccggccatgggttccggggcagggagacctaggcaggggcc

SEQ ID NO: 33862 - DNA, 1609 bp, Artificial sequence
  DNA replication origin
cccggcagggccagagtccactcccaggagaggggtgctgtgcacctggccagtgagacccagatcacacccaaacacaaagggcaccgccccgccctgtgcctctcaacagcagcaggaaggaagttgggaaaggactccccagcgagtaagggttgcagctcctccgggtagtgggcccgggggtgaaagcacaccgggaagatggtggtggagggtggcctcaaaggcagcacgctggggcttctcaagggcctgtcctcggcagggctctggcccaaaccacccccagtctctcaggggcggccagagtgacacagaggggtgtgctggctgggcctcgcctaccctgcgagagctggactgtgcttcccagggcgcagatgaggagcatggaggctgaggcagggcggctgccccatgggctcctccgctcaccccgggagcccacggaccagctgggcgaatgccacatacagggaaagctgcgtccagcttcctcactaggagaaagaaaagctggggtccagggaggagggtacaggggaggaggccagtgaaaagaagactcagaagaaaacccaggattgtgggcaaaggccccagagaagcgaggaaagagagaaaggactgcaggggaaagggagggaggcgccaccaaaaaggggccgagggaatcggggaaggaaaacggggtgaacgtcaggaggctgcgaagaacaagaggccacacaaggaaactgggagggactctaggaggctggagagggcgtccgtctggccgtggaacggggagacatctgctcactcgatagacaacatgcattccctgggcggacttgcggggagagaaagggggcccacatctgcccagggacagtgtagggagccgccaacatgcattccctgggtgggttcttggggagagaaagggggcccacacctgcccagggacagtgtagcagccaccagatcacacctgcccggggggctggagggaggccgggtgagctggaggaccaggcaggagatgccaagagtgtgaacagggtatctcgagctctaggagtggggtctttggggtgcagactgccctggaaaccccacggaagccgctatgagagccgcaggcacgcgtggctacttgcgtttattaccctcaagcagcgctgaaaatcctgccccccggttgcacaggccacgctttgggggctcggcagcctcctgtggctgctggctcctgtgccaggcagcaaagatggaggcgattctacaggatggtgcccgtcaggacccttcccccgggaaaatcccaagcagcacggaaaacgcggtcactgcatgaggagcctctggccttccactcccaccctccagagcctgggccttgggtttatacaccaccactgtggccccagggcgcttcccctggacactgtggacattagggccggatcgttctctggggtggggccgtcctgggcactacagggaattgagcagcgtccctggcctccacccactccatgccaggagcacccgtggtcgtgacaaccacagatgtccccagacatcacccagcgtcccctcggttgacaacaatggctct

SEQ ID NO: 33863 - DNA, 1364 bp, Artificial sequence
  DNA replication origin
gcagcaaagacctcgagggagtccttggggctcctgcagtgctgggagcacccctcccctgcaccccacctgtccccacatgccctggcctcccaggggtgactcgaatgtcacccctttggggccgggagatgaggccaactggcaggcacccccgttctccgggcctcgagctcccgcaggcgggatagggagtgagcgaggagggagaagggaaggagcagcagcaagtcagaggaacggagggggacaccagcacccagagctccctgaaggccacggcctcccattccgaagccccgcccatcggagccccgcctcgcgtcagcaccagccaaggccacactgccctctggatcccagcccccgctcgctcggggcccaatggcaagggctctctgtggccaaggcccatctccccaggagaacagatggccttgggtggccccagcctccctcgagggccagggtcgggccgggtggccacaagctagtgtggacacggccctctgcggaggcgaaaccagcaccaactccctcagacccgcgtctgaatgggctgagaccacttgtggtggacgccatggagggcaccgggcatcctgagagaagtcaccagttggcgtgacaggactggacctgaacagtggcctgggcacctgtctatctatcgggggccagacggccaacctttcccctctcgggccatagggctctggcacaatcactgggctcagctgtttctgcgtggaagcagccagcgacaagatgccaatggatgggcatgaccgcgtgccgataaaactttattaacaacaacaggcagagagccagacgtgacctacaggctgcagttagctgtatcccagatgaaggagttttggcaagtctgatggacttgacgggtcctgggagctgggcgctccaaggggtgctaaggttcccacctcacatgggccataagctcaacgagccccacctgctgtgaacggccaccgagccgagaaagccttcacccggcagggccagagtccactcccaggagaggggtgctgtgcacctggccagtgagacccagatcacacccaaacacaaagggcaccgccccgccctgtgcctctcaacagcagcaggaaggaagttgggaaaggactccccagcgagtaagggttgcagctcctccgggtagtgggcccgggggtgaaagcacaccgggaagatggtggtggagggtggcctcaaaggcagcacgctggggcttctcaagggcctgtcctcggcagggctctggcccaaaccacccccagtctctcaggggcggccagagtgacacagaggggtgtgctggctgggcctcgcctacc

SEQ ID NO: 33864 - DNA, 3121 bp, Artificial sequence
  DNA replication origin
cttcatctgggatacagctaactgcagcctgtaggtcacgtctggctctctgcctgttgttgttaataaagttttatcggcacgcggtcatgcccatccattggcatcttgtcgctggctgcttccacgcagaaacagctgagcccagtgattgtgccagagccctatggcccgagaggggaaaggttggccgtctggcccccgatagatagacaggtgcccaggccactgttcaggtccagtcctgtcacgccaactggtgacttctctcaggatgcccggtgccctccatggcgtccaccacaagtggtctcagcccattcagacgcgggtctgagggagttggtgctggtttcgcctccgcagagggccgtgtccacactagcttgtggccacccggcccgaccctggccctcgagggaggctggggccacccaaggccatctgttctcctggggagatgggccttggccacagagagcccttgccattgggccccgagcgagcgggggctgggatccagagggcagtgtggccttggctggtgctgacgcgaggcggggctccgatgggcggggcttcggaatgggaggccgtggccttcagggagctctgggtgctggtgtccccctccgttcctctgacttgctgctgctccttcccttctccctcctcgctcactccctatcccgcctgcgggagctcgaggcccggagaacgggggtgcctgccagttggcctcatctcccggccccaaaggggtgacattcgagtcacccctgggaggccagggcatgtggggacaggtggggtgcaggggaggggtgctcccagcactgcaggagccccaaggactccctcgaggtctttgctgccatgtccctgaggggcctcccaagggcagaggaaaggctcccagcaggcctggtgatgtcaggctctgagaggggagcaggggtgaggctgctgggcctggggtgcgtgggcccctgtggctcctccatcccaggcctcagagctggttctctgtgcccacctccttgtgctgcacccgagaccccgcccattcccacctgagacctgtgtcccgcctgtccccccatgcacccagctcagcccatcagacaccccgttggagcaggctgcttccctcccaccgcttcccagacagcacattgctggacacagagctggggactcatgcacgcccctggccccaagcccgaggctcagcgcaggccccgggaagagctgcgtctgtggggagatgagagaatgagggtccccagcatccagcatccaccttcagagcgaggctggctcccacggggacgctggagtcggtcctgggcatcgtgattttgagtgcttcctgcacgggtctcacacgggaggctccggggcccgcccccggcccccctgcgtcaggcctgtacccggcccccctgcgtcaggtctgcttgcgggctttgcgtggcattctgttggcttgtgcagcgctgagatgttttagagcgttgcttgtcttttaacatttgggtgatgtgacgtaagaattgggatttccggcttctggggtggtccactgaggtccgtgtccccagctgaacgtgggtggcccttttagaggggccggtgctctccagggtctttccagggcaactcaggtggccatcgcggtgtgtggcgggcagcagggagatcgtcgtggtgcgtggcgggcagcagggagatcgtcgcggtgtgtggcgggcagcagggagatcgtcgcggtgcgtggcgggcagcagggagatcgtcgcggtgctgagacttgcaggggtgaagtggcagcaagtggggggtccgtgtgcagctcaggtgtgcggagcagggacccctgagctgcgtcttgttgggtggaggacgttttgctgagagaggagggaagagcagtcccaggaagcaaaaggcagcggcgaaaccagaagccctggcgagtttccagagcggtgaccgtggggagcgccaccgcagaagtgaataagcccgtgatggagcgacagccccaggctctcagcgacggccgtggccttccagggaagaccccgcctcgccccagagacaccatagcccaagctgctgagccttctgccaccccagcccctggatttctagaaagcttacgtgtccaaggcgcagtagggtggtcctagagcaggcgagcccgaggggcgctccatgctggtcttgtggctcaacacaggggtttaacctggggcccatcaacaggcttcagggaagggccgtccccatctgggaccccctgtaacaggagttgaatccagcctgcccttggcctatttaagagttttgttggcacacagtcccacttgttggcttacctgttgtatatggctgcactcaccctgcctgcagttttacagctgagtggttgagacacagaccggaaatactcactctctggcctgttgtagaagaggtttgccgagccctggtctaggatcctgtgtagacttcggtgtggggtgggaagtgtgggtttctcccaggagaaggggctctgctgtcattagaaaggggccgggcacggtggctcacgcctgaaatccctgaactttgggaggccaaggtgcgagtatcacctggggtcgggagtttgagaccagcctggccaacaggcaaaaccccgtctctactaaaaatacaaaaattagccgggcatggtggtgggtgccggtaatcccagctactcgggaggctgcggcaggagaatagattgaacccgggaggtggaggctgcagtgagccgagattgtgctgctgcactccggcctgggcaacagagtgagaccctgtctcaaaaacaaaaccaaaaaacaaagattctcaggaggtctgagacccagggttcgcgtggcactgagcctgtgggcatggacccggcacgcgttcatggcccctgtgacccgttatgtcgggggcaggctggggggaccctgggagcttctcgaatcggtggtcttccaggttgtgggctggggctggggctggggctgctgagtgggtccctggcctggatctgtcccctcccgtcggcctggccacccgccgaggctca

SEQ ID NO: 33865 - DNA, 2375 bp, Artificial sequence
  DNA replication origin
aaaaaacaaagattctcaggaggtctgagacccagggttcgcgtggcactgagcctgtgggcatggacccggcacgcgttcatggcccctgtgacccgttatgtcgggggcaggctggggggaccctgggagcttctcgaatcggtggtcttccaggttgtgggctggggctggggctggggctgctgagtgggtccctggcctggatctgtcccctcccgtcggcctggccacccgccgaggctcacgaccccgcccctgtgcccacaggcacacggaatgcagtgctgaacacggaggcgcgcacgatggcggcggaggtgctgagccgccgctgcgtgctcatgcggctactggacttctcctacgagcagtaccagaaggccctgcggcagtcggcgggcgccgtggtcatcatcctgcccagggccatggccgccgtgccccaggacgtcgtccgggtgagcgtctgccctgccccgcccggctcaggtccagagctgcggcgggagttggaggcaactgtgtgaccctaggcgggtcacttcgcctctctgagccctttggaaagtaggatggactgttcccctgctccattgatctccaaggggtgattctgtcttcagaggacgctgggtgatgaccggaggtgttcagggagggccgctccgggcgtggagtggatggaggccagggatactgctcagcaccctgcagtgcccaggacggccccgccccagacagtgatctggccccagggtccacagggctgcgcaggagaacctgcctagagtgaacaagacctggtagaatccagcagacgccctgggtgaagatacttttgcagatgagaaggggtgggtgggttgggggaagccctggttttctgtgagtgcctcatggttcatgccgccctctgagggcctgcctgccctccagggacagtcactgggccccctgctaccccctccagggacagtcactgggccccctgctacccccaccagggacagtcactgggccccctgctaccttgccacccccaccaggccagcagccccctaagtgtgtgtctgctccacagcaattcatggagatcgagccggagatgctggccatggagaccgccgtccccgtgtactttgccgtggaggacgaggccctgctgtctatctacaagcagacccaggctgcctccgcctcccagggctccgcctctgctgctgaaggtgtgctctgggctgcagggacggggcccgtgggcgtgggtgtggggaggcgtccccatcccaagggctgcggtcaccctgggctgtttctgctctcagcgtgtggcatcccttcgccggggttaacagtgggggttcctgggccccgtgtggacctgctacatcaccacctccgggctgggacctgggactctgcatttttgcagccgcctgtcccccctcccagctgctggctctgtgcacacgaaagaccagaaccacggactcaggaggagcctttccgatcctcaggggctcggggtttatgaaacacacgggcatctgttcagttctctacctgccaaggacattctcagcatcacatctcgagtgggcggcgtgggtgcgtcggcggtgtccttacggagaaggggcacacgcctttcctccagccccgtgaacgggggccctggcagcgaactcagagcaggaacccggagctctgtggtgggacctgtggtggggaaagatgggagttgccgctgtggagagtgaggagaaagaggaactggagaagccagctgaggggcttgcccggggctgtcatcagctactgggggagcagggctgagaagggaggccagagcccagggccgcagagaacaggcaggtgtgtcctggcccagccccaacaaaaacagtttggtgctgtggtttcaagctatagtaaaggaggctgaggcgggtgggtcccctgaggtcaggagttcgagaccagcctggccaacctggcgaaagcctgtctttactaaaaaaatagaaaaagttagccgggcgcggtggcaggtgcctgtaattccagcaacttgggaggctgaggcaggagaatcacttgaacccggaaggcggaggttgtggtgagctgaggtcacaccattgcactccagcctgggcaacaagagcaaatgtccatctcaaaaaaaaaaagtttcatcctacacagccagatcagtggaattccagatgcagagttggctaacactggccaggggccacctgtttttgttgataaagttttattggcactgggccacattcatttatgcacagtccacggtggctttcccagcagcagaactgaattgccgtggctgcggcagagaccat

SEQ ID NO: 33866 - DNA, 2039 bp, Artificial sequence
  DNA replication origin
cccgggttcgcgccattctcctgcctcagcctccagagtagctgggactacaggtgcccaccaccacgcccagctaattttttgtatttttagtagagacggggtttcaccgtgttagccaggagggtctcgatctcctgacgtcgtgattcgcccgcctcggcctcccaaagtgctggtattccaggtgtgagccaccgcgcccggccgatcatatcttacatacctatgatgattgtgttttcatttttattttattctttcttattatcttttattttatttcaaaagattgtatttttaggccaggcacagtggctcattgcctgtaatcttagcactttgggagggtgagacaggaggatcgcttgatcctgggaggtagaggctgcagtgagccatgtttgcgtcactgtactccagcctgggtgacagcatgagaccctgtctcaaattaaaaaaaaagttgtgtttttaaaatgctttaaagcacagaagtgcggactcaaagttgtgtgaactcacaggcattttcgggcaggtcctggccctaagtccctaagtgaacagctgttattgagggcccgggaggaaaggatcagaatggcatggaggagaaattccccagcagaacgttccagaaaggagatgtgaataatttcgagagaaggttgtcctagggggagcacgggcatcctgtggtatcgaaatctgctggtcacgtccccacacccggctggttggctctgcccgagcccccaacctggggtgtcagtgctggggatgccccctggctggggccctggctgggccaaggctgatgcgccctctccctctccctagtactgctgcgcacggccactgccaacggcttccagatggtcaccagcggggtacagagcaaggccgtgagtgactggctgattgccagcgtggaggtgagtgccgcctgccccggagccagccccacgtccccaggggttcctgccatccgcctggctccccggctcggccgtactagaggggagccgctgatgggaaactggagtcggatcgcccccctgcctggctgaaaacctcctgtggctccgctggcagctgcaggaacccaaactcctcacatggccggggagtcgctctgtggagtgcccaggcccctgccagcccccggcccatctccttccttccatcatggacccccacacaccaagccgctgcctcccaccccagggcctttgcaccggctgcccctcccaggaagccccctccaggctgcagtgtcgccagccccctctcatcacataacctcacccgtcagcccagacgctgcgtcctcacagacccttccgagcaccccgggatatcagcagagtcaagagagggtggggagctgccggtgcggaagtagcctctcggatcatcagggcagatccagagggtgaagcctgtgtcgctgctgctgcagcactggcaggggccttaaaacccgaggaagcacccaccgactcctctagcatttccctgcgggacggcgccggtgaggggtgcagatgagtccacacagatgaggggttgcctcactgtcgggggagccctgaacaagacgtgcttgctgttttggggacccaggccttgttggggggtgcccgagtggaaaagcagcggcttaggccggggtggggaaagtgtcctggaggccccggctccccatagacaggccttggcggaggagccctggggtttgtcgatggcggctgttctgtttgttcctgttggattgtactgtgggcccgggaggcgcgtcctattcccagcgccagttagtgtgcagtgagacccggtagcctggcctgcgtcactccacagtggcacaggcgctgggctccgcatcccatggggccatgtcgattccctttcccctggctgtgccctttctcctgtgagcagagccctcttggcagctgggctttgagttcagccgttgaaggatctccaagtggaaaagcatgttgcaaaaacagcaagtagactcccacagc

SEQ ID NO: 33867 - DNA, 1050 bp, Artificial sequence
  DNA replication origin
gggagtccccaggccacagccggccctctacctgcttttgtaaataaagtttttgcttgtttgtttttgttttttgagacagagtctctctctgtcacccaggctggagtgcagtggcgcgatctctgctaactgcaacctccgcctcccaggttcaggcgattgtcttgcctcggcctcccgagtagctgggattactgtcatgtgccaccacgcccagctaatcttttgtaattcttttttttttttttttgagatggagtttcgctcctgttgcctaggctggagtgcaatggtgcgatctcagctcactgcaacctccgcctcctaggttcaagcgattctcctgcctcagcctcctaagtagctgggattacaggtgcccgccaccacggccagctaatttttgtatttttggtagagacggggtttcaccatgctggccaggctggtctggaactcctgacctcaggtgatctacccgccttggcctcccaaagtgctgggattacaggcgtgagccaccgtgccgggctgtgtaaataaagttttatggcacacagccatgctgatgcatgtgcaagccgtccatggcagtttcttagttgtaacagacaccatctggtccccaaggctgaaaatatcccctctggccctttatgaaagtctgctggcccccgggctagagcagaatccgactttggtggggtaagaggcagggaggggtgcacacagaccctgaaggaacccgaatgcctggctgaggggctcagccccgttcccacaaacagttatcctcctgaggggctcagccccgttcctataaaaacttaacctcctggccgggcgcggtggctcacacctgtaatcccagcactttgggaggccgaggtgggcggatcatgagatcaggagatcaagaccatcctggctaacatgatgaaaccccgtctctactaaaaagtacaaaaaattagccggatgtggtggcgggtgcctgtagtcccaactactctggaggccgaggcaggagaatggcgtgaacccggg

SEQ ID NO: 33868 - DNA, 1753 bp, Artificial sequence
  DNA replication origin
agtctcccgagtagctgggaccacaggcacccgccaccacacctggctaattttttttatttttagtagagacggggtttcaccacgttagccaggatggtctcgatctcctgacctcatgatttgccctcctcagcctcccaaagtgctcggattacaggcctgagccaccgcacccagtcctgcctcctttgaacacaaatcagctgaaccaggcagagtgcggagggtctgggcagatctgctgcctggctgagtgcccgaccccttggagggccaggcccccagccttgagaatgcctggtcccgctgggcccacacaaactcaagctgctcagagcaatgcctcttgaactcctgacctcaggcaatccacccgcctcggcctcctaacctgctgggattacaggcatgagccaccgcgcccactgcctttctctgtcctcattgtcccctatgaagctttttttgttttaaatttattttatttatgtatttttttttttttttttgagacggagtctcgctctgtcaccaggctggagtgtagtggcgagatctgggctcactgcaaccttcgcctcccgggttcaagcgattttcctgcctcaacctccggagtagctgggactacaggcgcgtgccaccacacctggctcattttttgtatttttagtagagatagggtttcaccatgttggccaggatggtcttgaactccagaccttgtaatctgcccatcttggcctcccaaagtgctgggattacaggcgtgagccaccgagcccaggcaaatttattttttgagataatgatagaacataaagttcaccattttagagcgtacgagtgggttttagtacatccaaagttgtacggtctccacctctaattccagaacattccatcaccccaaaaagcagcccctccccatcagcagtcactcctggtcccctccccagccccagaaccccagcatgtgcgcatccgtcccagtgcctgtggactggcctgttggacgggtcctatgaacagatcctacactgtggacaaagtcttttggatctggcttctctcactgaggagggtgtttattgtccccctgaattcagtgccaccgaggtcccctttatatgctgtggccttgggacggtcccaagccattgcaatgtccaagaaacagtgtggccttattgagaatgctgctttagatcacaaaggtgcatccaagggcgggaagggcatgtggtcgggctgtgcaggtctctccacagccggggctcgagggtggaagggtgggtcccacagaggggaccccgcacagagaccagggctggacagatgctgccctctgtgagcgaatctggcctggccctgggctccaaattctgcatgtagcttctcccgggcgcgggccgagccgaggtggatgaggagagtcctgggcttggcggggccccgcagaccccaggccatcagtcggggattgaatacaggaggggagcgaccacagctgcccactggacgtggcagaggggctgggggacagcacagagatgaccgtggctgctgtgggcagaggtcatggggctacgggagtagggtgggggtgacggagagatgactgtggctgctgtgggcggaggtcatggggtgcgggagccgggcgggggtgactgtggccttgcctctcccgtccctgtagtggctgtcgctgggcgcggactccaacgggagcggcgtctctgtgctg

SEQ ID NO: 33869 - DNA, 3497 bp, Artificial sequence
  DNA replication origin
gctccaaattctgcatgtagcttctcccgggcgcgggccgagccgaggtggatgaggagagtcctgggcttggcggggccccgcagaccccaggccatcagtcggggattgaatacaggaggggagcgaccacagctgcccactggacgtggcagaggggctgggggacagcacagagatgaccgtggctgctgtgggcagaggtcatggggctacgggagtagggtgggggtgacggagagatgactgtggctgctgtgggcggaggtcatggggtgcgggagccgggcgggggtgactgtggccttgcctctcccgtccctgtagtggctgtcgctgggcgcggactccaacgggagcggcgtctctgtgctgctggagctggcacgcctcttctcccggctctacacctacaagcgcacgcacgccgcgtgagtgccggggtgggcagggggatgggggtgcgggggccacactgccggacagcgctgcccaccaggcacctctgcagatgtttctctggagcctcctggccccaaagtgggcctgagcccaggaattggggcgccttatttatcgagggctaagctgagccctcgcaggctctgtctcttggagtcccacagggcccagctgctgctcaccccaggaacctgctgggaatgctgtcagctgcaagtgttagagacgcccggttaagggccctggaactaggggatcccctcagccctgtgtggtcggggccggatttttcgctgggggtgggggccgtcctgggcactgcagggcgctgagcagcatccctgccccactcactccatgccaggaacacgccatagtcatgatagccacaggtgccctccgacatcacccactgtccgctgggggcagaagcacccctggttgagacccccctgggttagggaattccacgggcccccgagagactatgtcccgtgatcatctgccccgctgaggtcccaggaggctgcacacattgaaatccacaccctgagtaggaagggagagaggaggtgaatcccaggagctggggtccccctggtttatcccgtctaccccgttgggagtttatcctggtgtctggtgtgagcagggggcagacttgatttttccccagataatgaatgcaggcttcgtccccgtggccctgtggatgtcttctgtgcatgactctctcctgggtgccacccactccatcccaggagcacccccagacgtagcaaccacagatgtctccagacatgactgtgtctcctgtgcggggtggggtagaatcacctccgggtgagaccccggcccagtcacctgctcccgagatggtactgctgcagtcattgtgtcagcagctcagagaggccagggccactgtggctgagacgtttctcagccttctcacagtcacaaggcgccgggagtcatgtcctggttcaggcaggaacttggactcgaactcctggcctcaagcgatcctcctgcctcagcctcctaaagcactaggattacaggtgtgagccaccatgtccagccaaaacttgtttttttttttttaagctgcagaacctcttcccccagccccccactgatgccttttgagaagctcatgctgtcaaaaacgtgtgaacggggctggtttctgccaggcctgggggcttcttggcagctggggagaggttgggtttctggggcagagggaaactgggttggagagagtccggggcagatgtgggaagatgggggtagggggcgtgctgagcagtttccttctctgactctggtgacccttctaatagccaaggctgtgttccattagaatttttggcctgcctgggtggcttatgcctataatcccagcactttggaagcctgcggcaggtggatcacctgtcaggagttcgagacctgcctaacgtgttgaaaccctgtctctactaaaaatacaaaattagccaggtgtggtgctgcatgcctgtaatcccagctacttgggaggctcaggcaggataattgcttgaacccgggaggcagaggttgcagtgagccgagactgcaccattgcactccagcctgggcagaaagagcgaaactccgtcccaaaagaaaaaaaaaaaagaattcttcttctttaagtgaatagactttatttttttgatctcctcgtgtctgttgcctggtcggtcaccccggttcctcctgggctcagagaagcctctagagctggggtctaacgtggggtggccctgctgcctggagacactgagtgatttgcagttgtcattgggggaagctcccggtatggggtgggtgaggccagggatgccactcagcaccctgaagtgcccaggacagcctcacctcagagaaccatccagccccagtgtccacagggccgaggggtcatgccccgccctaaggggctggtcaggatttcctgctttggggagaccttcatacccttcctgggggacctgtgacctggcctggtccctcctccaccccaggcgcttgcccgtcaaagctaacactgggtcttccctcccagctacaacctcctgttctttgcgtctggaggaggcaagtttaactaccagggaaccaagcgctggctggaagacaacctggaccacacaggtgagcggccccgggtgggggtgggggtgccgcggtggtggtgccgtggggaggcacggaggcccaggggttgccatgggggcagccaggaggcacagagggagggccgggggccacttcctggtccccacccaccccgccagctctcggtgtcctgcagactccagcctgcttcaggacaatgtggccttcgtgctgtgcctggacaccgtgggccggggcagcagcctgcacctgcacgtgtccaagccgcctcgggagggcaccctgcagcacgccttcctgcgggagctggagacggtgggtgcccctttcatggatgggtccggagctctgcggagcacacacatcggggccgggttggggcatcctgtcccagggtgtccttgctgtccgcccctcaggctctgagggccacactgtgtcggggtcgggctggggtgttctgtcctggggtgtccttgctgtccaaccccggggctctgaggggcacactgcgtcagggccgggctggggtgtcctgtcccagagtgtccccttgtccctccttacccactgctcattgcccgccggggctccagcaggccttagggggaccccgggggcaggtggatttctcctcattttgcaccctcgggggttctgggaggcccctggagcatttggggaatgggctggggtggccgccatccccgcctgccctctgctaatggcgcctccggctgcaggtggccgcgcaccagttccctgaggtacggttctccatggtgcacaagcggatcaacctggcggaggacgtgctggcctgggagcacgagcgcttcgccatccgccgactgcccgccttc

SEQ ID NO: 33870 - DNA, 1750 bp, Artificial sequence
  DNA replication origin
ggggctctgaggggcacactgcgtcagggccgggctggggtgtcctgtcccagagtgtccccttgtccctccttacccactgctcattgcccgccggggctccagcaggccttagggggaccccgggggcaggtggatttctcctcattttgcaccctcgggggttctgggaggcccctggagcatttggggaatgggctggggtggccgccatccccgcctgccctctgctaatggcgcctccggctgcaggtggccgcgcaccagttccctgaggtacggttctccatggtgcacaagcggatcaacctggcggaggacgtgctggcctgggagcacgagcgcttcgccatccgccgactgcccgccttcacgctgtcccacctggagagccaccgtgacggccagcgcagcagcatcatggacgtgcggtgagcgcggcagcacctgcccggcccctcctagggctttcctgggggctgagccactggtcgcaactgcagaggccatgagagcctggagggagcggcccccacacacaggctgcgaggaaggggccggtgcgtggccaaggccggctgcacggtcaggccgttcgcaagctcttccttactggggctagggagggcgaggccagcagcctgaggtcgtggccccatataggacccccagaccccgtcacctgttgagttaggagcaagcagctcctgcctctgggcctcttcagggccctgccacagcccgaaagtcctgcctggccccggccaccgtcttggggagcctggcccgccaccacaccccggcccttcctcgccccgcctccctctgggcactgtgtctctggcttcttatgtcctctgaccctgtgtcctgcccgtctctctgccatcatgtgagcccctgggcaggcttttgtggagcctggaactgtctggccaccccaggcacactcctggccagtcctggcaccagcaggtgggcgccgtctcctcccccagcgcccgcagtcccggcatagatccttcccgttcatccactctgctctgcggtcactgggccctcaggagtggtttgagctcagccatcggaggcctgcagaagccagtggcgggagggaggggcacatccctgggtaatcgcagtcctggaaaggatggaggtggcggtcgcccaccagccaggaaagattgccaggaaatgagggtgggtgcacggctgtcccagctgtgctgagctctctcaagaccaccaggggtcagcccaggagggccacctgggatttgcagagggtcccagaatggattcttccaccaggacggaatagtccagtttaaattctggaagagcagaaaaccgagtcagaaggaaccaaggcctcagggcgtgagccttacctgcgcacagggacgggtcagggcaaggggcctggaggtgtggggcccccagtgaatctgcatctacatgttagccaagtagttaaagctaagcttaatttttttttttttttaaagacagagtctcacggtctcctaggctggagtgctgggattacaagtgtgagagctaccttgcctggcccaaagtccacattttaaaacattgtttttgaatcgtgaaggtcccgggtggattctaagaccctgacccgtaacacgaggatcattgcagaggccctgactcgagtcatctacaacctgacagagaaggtgagccctgagccctctgtgccgccagacccagccccagccct

SEQ ID NO: 33871 - DNA, 1518 bp, Artificial sequence
  DNA replication origin
cttctagggctcccagcatcctcggcttgtggccgcgtcattccagcccccaccttgtccctgtcttccaaggacctccgtcacattggatcagggcccatcttgctccaggaagatgttccccctaactaatgacctctgccaagatcccatttccagttgaggctaaaggctgaggttgttttggacatgaatctgggaggactctgcaaccctggatggcgggcagtgggctgtgtgaagtcggcttccaaccccagccccaggttcagagaggtcccagcagggcaccatactcggctagctttggtttactgagaacctacacagcaggtgcagaactagggttggtccctcctggtcagaagccccggggaccctcccaggttctgcccggtgcccaggcccccttcctggcctgcccagctgtcgggctcagtaaatgctggtggagctgccatgtgtccctggcctgagatccgtgctctcggggaaggaggagaggcagagatgtgccggtgagaagaagcagggagaggtgggggcgtggggaggccagggcagctgaggaagctgccctgagggaggcagtgtcctgcagactggctggaagggagggtgtctgagctgcgacctgaatgatgaggcagccggggtgaaacctggaggagaagattgcaagcagaggcacagcccacctgtgcaaaggccctggtgcaggacggcaccgggcgtgttggaggaacagcaggaaggcctgtgtggctcgagcagagggagtgagggtggggaagggacagggcaggttgtgcagggcctggtgggccacggggaggacttgggctttgaccccagggcagctgggagccatggagggctgtgggtagaagagcgacaggccctgactcaggtgctcccaggcgccctctgacggctaccgcagggaggacagacgggagtggcgagggtttagcctaggaccgggtagaggtgactgggctggcacaagtggaggcagagaaggatgggctcatcctgttccccctccaccgctgtgttcctggagtgcagaggaggggctacagagatgcttccagaaccagtgtgtggcctggaccaagacctggactgctgggggcttcctgagcaagacccacatccctgcagtcaaagctgcctcttctcagaccagggaacttcagaaacaggcagggaacccacccccccaccagggtcccctaggaatcggcaacagagcctcaaacccagcacggggtctctgcctccccaaaacatgtggcaggagaagcttgttcaggagggagaggagggaggggatggacccagagcgaaaggcaggcagggcagggttgcaggaaaagaaagaggctcacctgactccggagcatggggccgctggccactggggatggaatggcgggggcagtgcttacctgaccccggagcatggggccgctggccactggggatggaatggtgggggcagtgcttgggctt

SEQ ID NO: 33872 - DNA, 796 bp, Artificial sequence
  DNA replication origin
gtttgatggcgtccaggtccttcatgccgtcgggctgccccccggggggctcgggcccgctgctgcccacgggcgagggccgcggctgcaggagctgctgctgctgccggcgcgcctcgctctccgtcaggcgggccatggcgggcgcgggaccgagccggcggcggcggcggcgggcggcgggcggactcgcagctggagcggcggccgcgcctcccgcctccctcccgggcccccgcgccctcctcccgcccgcgcccgccccggcatcgggaccacaaaggcggctccgcagcggcccctggcggccgcgccgcgcggggcagccggcgcctccccgcatccccgggccgcggggggaaactgaggccggaaggccccgggccccgcctacgggtgggcgagggcggagctgcgggcgggacgggccttagccggcttcccaggggtccccgccggctcccgcggagggcatcggccggaagaatgtcaaaagttgctgggataatgtagggggcttgtcgttgaaagcgcccgtgatccttaaagtaggtaactcatcaataatattaataacactaataatatggctgggcgcggtggctcacgcctgtcatctcagcactttgggaggccgaggtgggtggatcacttgaggtcaggagttcgagaccagactggctaacacggtgaaaccccgtctctactaaagaatacaaaaattagctgggctcggtggcggggggtgcctgtaatcccagctactcgggaggctgaggcaggataatcacttgaa

SEQ ID NO: 33873 - DNA, 1640 bp, Artificial sequence
  DNA replication origin
ttcctgccccggggaccctccctccaaggcaggcacctctggagctgtggctgcccctgtctatggatggtggctgcctgggtgcccaccctgccaggggaaggtgcccacggtggtactggtccgccgctgccactgggccccccgtttatggtaatcgcatatacatttgcatgttaatgacaatatttgtcttaaagcggaggttgcgctgggggacggtgcaggtggggggggggcccggcgggggcccgggtgggggcccgcggtttccatgggagcaccagctgccggctcgactcgggagggggggaggaggaggctgtagcaggctgagctctgaggcgtgagattccgcgtgtgacgcaccagctccagggagaaggcgggctgggcggcctggcggggggaccgcgggagcagttggcacccctggtggtggcggggacagcggcagggggctgggggtggctggcagggttggccggcgtgtgtgtgtgtgtgtgtgtgtgtgtgtgtgtgtgtgtgtacgcgggcgcgcgcctgggaaggactcctgccggggtgctgtgtggcttcaagctgagcgcgcccctctctgtgcctcgttttcccctgctgcatattctctcctttatttaacagactttcataaggccccggagcctcacacctgtgactgtgacatcgtttctgcacctccctccccccgccccccgcttcaggcaaagagcatttattgaacgcctactgttttccagcatttatgcagagctgggcatttggtgtgaacagaattccttgtaggattcatgatggagtgggctagatgttaatccgtccacctgtatgaccaacatttattgagagcttgctgtgtaccaggccctgttctagaccctgggctactgggttgggcaaaacaaataaaatctgccatccctaccccccatccagacctcccctcccaccagattccagtttaggggacggagacagctggggaactgggcttacaaggcaccgagctcaggaatatgatggcaaaacacacaccagcagtgacagcccagaggggggccctgcccccgcaggagtggaggccaggagggccgcctggaggaggcagttagtgtaggagagtcgttgagagcttggagatgagatgagtctggtttccctgcgtcttgtggccttgggcagatgtcttcatccctccaggctgcagtgggtcttcccgtttcagaggaaatgagggaggtgagagcagaagtggcagggagagcagagaacagaagaggctgttggcatggggccgggcacagagtatgtgcttggtcagtgggagcgggcttgttacatgactacgctgaggcccgaagcgtgaggaggatgcactgacggggaaaggtgttcctgacaatgtgcgagggcccagaggggcgctaactccagggaagctcaggtgcagggaggatggagtttttgccctggtaggaaaggagcagaggggcttgggagctcagggtccccttcttctatggggctcacctgttgaggctcttccgaggggtcttagcttggggctggacccgggaggttatctctgaagtgggcttgtgtctctctctttcacccct

SEQ ID NO: 33874 - DNA, 815 bp, Artificial sequence
  DNA replication origin
gcttgggagctcagggtccccttcttctatggggctcacctgttgaggctcttccgaggggtcttagcttggggctggacccgggaggttatctctgaagtgggcttgtgtctctctctttcacccctcaaattggcaagtgaggccttggccattggaaacacctggtaggaccacactcattcattcattcattcattcattcattcattcattcacacaacacttcttgaaaaccttctgtggccttacctcgtactgagcaagaggggtctgaggccagagctagacattggcacctatagtccagtggtctggcttgggtcagagggaggggtgcagggttgagggaactggataatgaagcaggagctctgcctggaggaggggcattagaaatggggctttgaaggatcgacaggagctttccaggtggagaaagcattttatttatgcattcacagaaacacttactgtgttccaggccctatgatgggcatgaaacacagcagtgaacaagataggtacatgtcttgacttcctggatatagggagagggaactggatctatgaaggcctggaggcatgaagaatttgcacagctagggtagaggacggattaggtgaggcgtgggagatgaggctggagagtcagcatgggctggaccaggaaagcctctgatgctggactgagcttggactctttcctgagggcactggggagccatggaagagtttagagcagggaggaactcaggcagacctgcatgggaagcgggcttcacatcctgttaactcccattgccaccaccagc

SEQ ID NO: 33875 - DNA, 750 bp, Artificial sequence
  DNA replication origin
ggatacagacatggatggatggatgaatgggtgacagtgactctagatatgagtggatttgatggatagaaaagtgggtagatcagtggaaggtttgaatggattgatggatgggtgaacggatggatggatggatggatggatggatggatggatggatggatgggtggatgaatggatttatggatggatgggtggatgagtagtggatggatggatttgtagatgggtgggtggatggatggatggatttgtagatgggtgggtggatggatggatggatggatagatggatggatggtagatgggtggatggatggatggatggattggtgggtgaatggatgagcaggtgggtggatggatggatggatgggcggatgaatagattggtggatgatgggggagcgatggatgggcatatggatgggtgggtgggtgggttggtgggtcaatgagtgcatggatggatggatgggtaggtgggtggatagatgagtggatggatggatggatggatgcatgaatgaatgagtgaatgagtgaatgaatagatggatggatgatgggtagatggagaaattaatggttggatggatggatgaaaagatggatgggtaattggtggatggaatactagatagatgggtgggtgcatggatgaatggatggatggatgatggatagaagatgggatagactgaaggatggaaggatgcttcctcaacctttactaccttcctcctcacc

SEQ ID NO: 33876 - DNA, 1629 bp, Artificial sequence
  DNA replication origin
tcccctgccccctctctcctcctcgctccctctgttccagccacactggcctccttgctgtttctgcaacaggcaaggcgtggtcctactccaggacctttgcatgggctgtgccctctgcataaatgttcttcccccagatactcacatagctccttcctttctcttctgtaagcttcacctttttttgtgaaacccctgtgatggcaggatttgtaatctagtcactcccagaactccaagttcctttttcctcctttccttttttttttcctgtgcaaatgaagacctctaacatactatatatatcgcttttaattttatttgctttttctccttcctaatagactgtaagcctcattagcacagagattttcacctttgtgtgtactgctgtgtcaccagtgcctaaaagagtgctttgaacatcacgcgaggatagatgggtgggtgggtggatggatggatggatgaataggtgggtgggtggatgggtggatgagtggatgggtggatggatgtgtggatgggtgggtggatggatgaatgaatggatgggtggatgaataggtgggtgggtggatgggtggatgagtggatggatggatggatggatggatggatggatgtgtggatgggtggatggatggatggatggatggatgtgtggatgggtggatggatggatggatggatggatggatgtgtggatgggtggatagatggatggatggatgaatggatggatggatggatggatggatgtgtggatggatggatggatggatgaatgaatggatggatggatgaataggtgggaggatggttgattggatgatggacaagtggatgggtggacagttgggtgggtgtatggatggggaaatttctggtgtagtgatggggactgaagccgtaggagtcaagatgcctgggcgagagatctggggtctagaatgagcctcaaggaacccccatatgtcaggctgtggagaggagcaggcagcatggaggctgaggagccacagccagcagggctggacctcatttggaggcagcatggttgacatagggtccaggaggaggacaccagggcctcagcacaggaatcaaggcatttatgcgtgcattgagggacagtaaaaagggggcagagagcccgtctgtctcggttttcctagtgaagttggggagaactttgggctaggaaggtggaggaggaagtggagaggatgagcagcaaagctgagtaggtggagaagggagggtcctgtgtccttttcagtgcatgtgtggcctcgtggttcccatttggtggatgagactgtgaaggctcagagaggttaagtggctggcccaagagcacacagcagaaaggtactgagctggctttgatccttatctccaatcactagattacagaactgagttaaagactaagaacttggagacccctgccatgcagggggttcgggatcaaaggggttgagatgggaggggggttcctggctggggagagaagaagaggatgaacagcaatgtattccctgtctctgtttccccaccaccatcggtgcatcgtaggtgctcaggaatattgaatgactctgagctaggcatggcagggag

SEQ ID NO: 33877 - DNA, 904 bp, Artificial sequence
  DNA replication origin
aagaaaaagaagggccaggtgcagtggctcatgcctgtaataccagcactttgggaggcagaggcaggcggatcatttgaggtaaggagttcaagaccagtctggccaacatgatgaaaccccgtctctactaaaaatacaaaaattggctaggtgtggtggcgtgcacctataattccagctactcagctactcaggaggctgaggcaggagaatcacttgaacttgggaggtaaagtttgcagtgagccgagatctcgccactgcgctccagcctgagcaacagagcaaaactcttgcctcaaaaaaaaaaaaaaaagtgtgttgcaggagatgggggatgccattggaggggacagatgagggtgaaacaggcaaagaactgctggactgatgtcaagggcagtggggagccatggaaggtgtttgagcaggggttgggcatagtcagaggtgtgtgcgggaaagagcctcctggggccagcacgaagaagggactggagtgcaggacagaagactggaggccagtgagggggcagagtcaaggtcagtatgggagaaggtgaagactaccccagagggccatggggacaaagacaggaaaatctaaggtagggctttggtgggggacgaggggaggggagggaggaggcaaggatggctgggatgcacttggatggtagggtgtgaggatgtaatgggttgaatggtggctccctgaaaaagagctacatccatcctgagcctgggcaacatagtgagaccccaactctactgaaaaaaaaaaaaagttagccgggcatgatggctcacatctgtagtcccaggtactcgggaggctgaagtgggaggatggcttgagcccaggagtttgagacgagcctgggcaacacagtgagacccc

SEQ ID NO: 33878 - DNA, 1299 bp, Artificial sequence
  DNA replication origin
gggccaagagatcacggaagccataaggaagattttcagcaccagggacagcgtcagggcgggcttttgtgagcatgcgtctgtgtgtggcgtgtgcatgggcctgtgcgtgcgagtgtgtgtgtgtatggtatgcatgcagtatgtgtgtgtgcgtagtgtatatggtgtgcatgcattattgcattgtgtgtgtagtgtgtggtgtgtgcatctgtatgtgtgtagtgtgtgtggtgtgcatgcattgtgtgtatgtgtgtgtagtgtgtggtgtgtgcatgcatctctgtgtgtagtgtgtggtgtgtgcatgcatctgtgtgtgcggtgtgcatgcatctgtgtggtgtgcatgcgtcttgtctgcgtgtgtgtgtagtgtgttttgcatgcattgcgtgtgatgtgtgtggtatgtgcatgcatctatgtgtggtgcacatgtgtcttgtctgcgtgtgtgtgcgtgtgtggtgtgtgtatgtatctgtgtgcatagtgtgtgttgtgcatgcatcgtgtgtgtagtgtgtggtgtgtatgcatctgtgcatgtgtgtgtggtgtgttgtgcgtgccttgtgtgtagtgtgtggtgtgtgcatgcatctatgcgtgtgtgtatggtatttgcatgcgtcttgtctggtatatgtgtgcgtatgtggtgtgtgtatgcatctgtgcatgtgtgtgtgtagtgtgtggtgtgtgtatgtgtcttgtctgcatatatgtgtgtgtggtgtgtgcatacatctgtacgtgtgtgtgtggtgtgtggtgtgtgcatgcatcttgtctgcgtgtgtgtgtgcatgtgtggtgtgtatatgcatctgtgcgtgtgtgtgtagtgtgtggtgtgtgcatgcatcttgtccacgtgtgcgtatgtgttgtgtgtgtatgcatctgtgtgtgtgtagcgtttggtgtgtgcatgcacctgtgcatgtgtgtgtgtagtgtgtggtgtgtgcgtgcatctctgtgtgtgttgtgcatgtgtctttgcgtgtgtgtgtggtgtgtgtttgcatctgtgcatgtgtgggtgtgtgatgtgtatatgcatctgtgcgtgtgtatgtggtgtgtgtatgcatctctgtgtgtgtgcgtgtgtgtttgcatctgtgtgtgtgtggtgtgtgtatgcatctgtgtgtgtgcgtgtgtttgtgtgcatgcatctgtgtgtgtgtgcgtgtgtgtgtatgcatctgtgtgtgtgtgcgtgtgtgtgtggtgtgtggtgtgtgtgtgtgtggtgtttctttccctttcactgca

SEQ ID NO: 33879 - DNA, 861 bp, Artificial sequence
  DNA replication origin
agtgtagatgggtgaatggatgtgtgggtggatgggaggatagataggtggatggatgtatacatgaattaatagatggatgggtggaagagtgagtgatgaatgaatggatggatggaagggtagatggatggacagatgaatggatagacaagtgggtggatgagtaatggatagatggatggatgaatggatggatggatgggtggatggatggatggataaaagggcaaatgggtgaacagatggatggatagatgagtgggtggatagatgagtgagtgactcaatggatgaatggtagatggatggatgtgtgggtgaatggatgggtgtgtggctggatgggagaatggagggatgcataatagatgtgtgggtgggtgggtaggtaatgagtagatgggtgaatgaatgcatggatggatggatggatggatgaattgatgggtggatgggtggatgaatggatagaaacatggatcagtgtgtgaatggatggatgaaagggtaaatcagtggatggatggatagatgggtgggtggatggatagatggatggatggatggatgcgtagatggatggacgtgtggctggatgagaggatgggtggatgatggatgtgtgggtgggtaggtggatgagtagatggatgaatgaatgaatggataggcaggtagatgggtgacaggtaggcaggcatgtagacacatgggcagatgggtgatgggtggatggaaaggtgcatggatggatggaagctatgaatttatgggctgacccagggagagtaggcatggagagaaggacagagtcccctcaagatggatgcagagaaggagctgctggtgattgcggca

SEQ ID NO: 33880 - DNA, 1358 bp, Artificial sequence
  DNA replication origin
ctgcaggacttggcccagagtgaaaccaaacctgagaatgggcaaggggccttaagacgcccagtgtgacagtttcacctccccagacctcagttttgtcatctataaaatggggccctagaagtagatttttgttttgttttgttttgcttttttgagatggagtctcgctctgtcgcccaggctggagtgcagtgatttgatctcagctcactgcaacctcggcctcctgggttcaagcaattcttctgcctcagcctcccgagtagctgggattacaggtgcccgccaccacgcccagctactttttgtatttttagtagagatgcggttttaccgtgttggccaggctggtctcgaactcctgacctcaggtgatccgcccgcctcagcctcccaaagtgctaaagtgctggggttacaggtgtgagccaccacacccggcacctagaagtgtttggaggactctgtaaggtgaggcctgtcaggtgctgaacgcagaacccgagctcggcacacaggcacagaataaatgaatgaataatgaataaatgaatgaaccatcctgggcacgtcaagctgcgagactcggggcgtcgtgtcatctttctgggcctgtgcagacaccaaattgtaagacactgcctggcaccagctcttgggtgacttcccgtgccaggcactgtgcccggcatgctcttggctgatggggatggagcctgggttttgctttccgaggagtctacaaacccgtgtatcatttccgctgtcatttgtggaccctgggctaagggtcttggtggggaacggagggtcacaaagcccagtgcccttgtgcccctgcctcccaccggagctaccccaagtgaggggcagtgtgtgtgtttagtggggaggggtcgtaatcaaggtaatgcctgggcaagacaatggaagcagatggagagagagcacggaagacttcagggaggaggtggcgtttgaggggtaaggatggggtgcagcgggggggcattctgtcaccagccacgttcagggggccatggcaggaggagcggggaggaatgactggggctgagcagcaaagggccctcaaatgccaggatcaagggctgagcctctacccagagagcaatagggagccacagcagcgtttagagcaggggaggggcttggcctgggtgtttcagagaggctggactggggcctaggtgggaggggaggaaggtcaatgggtgtctggggcagcccagataaggggtccaccttccttccttctctccacaccacttggaaataacccatctggggcttccactaaatctcttttttgagacggagtatcactcttattgccc

SEQ ID NO: 33881 - DNA, 1564 bp, Artificial sequence
  DNA replication origin
gagagaagctgcccccatcaccgaaccctccacccccaccttgttctggggttggggggctggtgtacctgctccccatctccccacccgccacagagcctgggaccttccgcctcctactgggaggtcccttccccccaccgctgggtcagctcggggagagggtcggccggggagagggggtcctggtctggtccagtgaagccagttgggtagccccctcctctccaggcctccactctaaagccgagctccgcggcccggccgtccccaccccgcggcccggcgcccgccttacccaccggcctggagacgcgcgccaggctggcatccacgtgccgccgcccgcccgcccggccgccccgggcgcacaggcgcgcacccgccgcactgcacgctcgggccccgcgccgcgcgccctgcgcccgacgcccaggcgggccctgcccgcgctgcccgcccgagccgggaggaggcgtgccaggcggggatctgggtctccccacaccccacccctcctgtcgcccctgcccgtccatctggctctgcccacctcctcccggctccctctctccatctgtcccaccgaggtctctgccgagtgcactccctccctcctccaccttctctggctccccatggctgcgtcccttccctgacccttcccttcctctccgtttcttcagcagtattcctgctgtgccccatgactctctggttctggggcccccaaggctgagttcaattttggaactccaggaaggacccttcaccagcctggcggagcgggagacagagccagacacaaactctcccatggggtcagggttggagctgggagagctgagggtagaggagagtgaagagccaaaggctgtcctgggcctgcactgaagatggaaaattcactgtgaattttggagtaggagtcggagtttggaacgattggaaacaatttttcatgttggagcaacacccacatctgctgacccgtttagtcttaagacaacttaatgagatgaaaacatgcatttccattttacagatgggcaaaccaagaccagaaagaagggagaggtcgggaggccaaggagggaggatcgtttgaacccaaggagtttgaggccacagtgagctatgatcgcttccactgcactccggcgtggacgacagagccagaccctatctccaaaaaagggagagggggaagggagaggtgtcctaaggacctagacatccctccaaccaaggggtcctgtgggctggggagcgttttggcactgtgggcatgggtgggcttgcactggctggccgagaaacagtcctttctgtctgacctgtgtatgctagagatggggaaactgaggccccttggggggtggggaatgggaacgactgcaggaggagtgtcttgcagtgaggctggggcagccaaggagtctctgggatctgcaaagttgtgcctttggaagagtagaggttcagaggaggggccgggcgcggtggctcacgcctgtaaccccagcagtttgagaggtcgaggcaggtggatcacctgaggtca

SEQ ID NO: 33882 - DNA, 917 bp, Artificial sequence
  DNA replication origin
cttgggggccccagaaccagagagtcatggggcacagcaggaatactgctgaagaaacggagaggaagggaagggtcagggaagggacgcagccatggggagccagagaaggtggaggagggagggagtgcactcggcagagacctcggtgggacagatggagagagggagccgggaggaggtgggcagagccagatggacgggcaggggcgacaggaggggtggggtgtggggagacccagatccccgcctggcacgcctcctcccggctcgggcgggcagcgcgggcagggcccgcctgggcgtcgggcgcagggcgcgcggcgcggggcccgagcgtgcagtgcggcgggtgcgcgcctgtgcgcccggggcggccgggcgggcgggcggcggcacgtggatgccagcctggcgcgcgtctccaggccggtgggtaaggcgggcgccgggccgcggggtggggacggccgggccgcggagctcggctttagagtggaggcctggagaggagggggctacccaactggcttcactggaccagaccaggaccccctctccccggccgaccctctccccgagctgacccagcggtggggggaagggacctcccagtaggaggcggaaggtcccaggctctgtggcgggtggggagatggggagcaggtacaccagccccccaaccccagaacaaggtgggggtggagggttcggtgatgggggcagcttctctccccgcggccgcccctccctccctccctcgtccatctccagaagattatatttaaatatctcttttgtgcaaggcaggagctgggctcgcccctaagaggcggtttccatggcaacaacaattgccagcttccgtgtggtgaatcagcgttgccatggcaaccccatcctcatctgcccaaggt

SEQ ID NO: 33883 - DNA, 2239 bp, Artificial sequence
  DNA replication origin
gcttcactggaccagaccaggaccccctctccccggccgaccctctccccgagctgacccagcggtggggggaagggacctcccagtaggaggcggaaggtcccaggctctgtggcgggtggggagatggggagcaggtacaccagccccccaaccccagaacaaggtgggggtggagggttcggtgatgggggcagcttctctccccgcggccgcccctccctccctccctcgtccatctccagaagattatatttaaatatctcttttgtgcaaggcaggagctgggctcgcccctaagaggcggtttccatggcaacaacaattgccagcttccgtgtggtgaatcagcgttgccatggcaaccccatcctcatctgcccaaggtgctgggaggggggaggaggtgagggccaacggaggtggggtgggaggggtggggggagcaggagtctggagctcctgcaggtgcccccccatctctccccacctcccctggcacccccccgcttccagcccagaagctggtcccatctggttgaaaccatctcccctcctgcctccagcctagcagggtgtggtacccaggtggaaagggccccggtgtgtatgcatgggtgatgtggggtgggaaaggggtccagctggctgggtgggggaagagcatggaggttttcctctcctaggtgatcagggtccctctgagggtgcggctgggcggcaggaaggttgggctgggaggattgggggcacaggatcagggaggcaggggcctcttggtttctggggccccaaagactgagttcaaattgaggaaagcatatgtgcccgggacatacactcaggaaggagggtgtcagaatgggagagggtcttagagaggggaggggacccagagatgaggaagggcctctgaagcaggagaggctcagcgagaggagggaagctgagggggtgggaggtggaaatccagaggggtctctgaggaggggagtgcaaaataaggggttgctgagggtggaagagtgggcacggagctggaacgggtcttagagaaggtgtcagatcacgagggacagagctcagtggggagactttgggggtcccaaaatggggaggaggcattatttatggcagtgggtggacagatcactgaatctggagtccagaaactcttcactcaccatggccttacacaaataacttctctcttagacaaataacagaaatctcaatgttgacatctgtagaaaggggtgaaaattgcacctctctctgaagcttgttgggcagctatgctgtgattagaaaacctggcatttggccgggtgcaggggctcacgcctgtaatcccagcaatttgggaggctgaggtgggcggatcacgaactcagcagatcgagaccatcctggccaacatggtgaaaccccatctctactaaaaatacaaaaaaaattagctgggcgtattggtgcgtgcctgtagtcccagctgcttgggaggctgaggctggagaattgcttgaacccaggaggtggaggctgcagtaagccgagatcacgtcactgcattccagcctggcaacagagtgagagtccgtcccaagaaaaaaaaagaaaaaaagaaaagaaaaaaaagaaaacctggcactttttcaagcgtattctctgctgaaactcaaaagtcagaagatcagaaagagcactttggaacccataggactcaggggatgtgggaatctatttcaagtttgtctgacttggaaaaaggtctgagagtagcactcattcccattccagacgcctttctgtgttggtggaagttggccacttccttctggcccattctgttcagcaggtttctccaattcctccatgtgtccttccccatgtggggagatgccgtggttccctgtctggagagagacagagcaagacatagacacttacagcctgagggagggggaggaaggagcccagaagagtgggaagagtccctgcatgggggcttttaagttgggttttgaaggttgagtgggagtttgccacagacatcaggttgggagaaggattgtgtcccaggaccagtggagatgcaaatgcctccccaactctcacatccctggagcctgttctcaacgatccaaaatagctcatacctaggacttggtatgttgtgagagttggtgccagtgagaatttttttttcattaaatatcattttcaatgcctggggtgg

SEQ ID NO: 33884 - DNA, 905 bp, Artificial sequence
  DNA replication origin
atctctccaccctcccacgggccctgcacgctcccatctcccggcctttgcccaggtggcgcccccgcctggaatgccctccctgcagtcttttggggtctctgctccactgctccccctccaggcggagatgacctttccctctggtgcactcagagagcccgcaccgagtactagggctaggagctgcctcgccgggcctgggtccctgtctgtctgtctgtctgtctttctgtctgctccccggacctgccaggcggaggtgggcactgatggtccccgcactttcacggtgcccagcagaggcccctgcccaactttgtcgggatcaagaggggccaggcagtcaccatctgtggagtggagtgagggttcacgtgctcagtggaccaggggccttggcaggctggaccccctgctgggtggggctgggctggaacctggtctgaggccggagctgggccagcctctcctgtgtgagctctgcccccttgggtaactgcatgctccctggtaatggggaacgtggtggcttcatctcctagggacggtgagctgggttactatggaaaccgctctcggcagctgtcactcatgggggtgggagggagagagagaaaccagcagagagactgagaatcagggagagagagagacagatcagagagagagtgcgcgcgaaagagactgtgagagacagagagaataagagggatgaagagacaagagaagagaaaaaggagaaggagatacagagggagatggagagagagacagagaaatagagacaaaaatggagacatacagaccccacctcgctactccctgtcccacgctggcagccagggtggagagtgtgaaaggggctcccatcccagagggcctttaccggactcctacatata

SEQ ID NO: 33885 - DNA, 1446 bp, Artificial sequence
  DNA replication origin
cgtcttcctgccctgccgcctccactctgctggagggagggaggaatcccggaggccctcccggaggccggggactcggctgaggtgggtgtcgccgcccacaggggaccggaagctgttcgtggggatgctgaacaagcagcagtcggaggaggacgtgctgcggctgttccagcccttcggggtcattgacgagtgcaccgtgctccgggggcctgacggcagcagcaaaggtgactggcgggggccggggcgggactgcgagaggggccgggctagctctgggggcggggcctgtggggagggtggggcctgcagcatggggaggagctggctctggggtgggaccctggggaggggcggggcttctccaggggtggagtctgtgggtgaggctgcaggggcggggccttggagaggggcggaattgcaggggcggggcctggggaggggatggggctgcagggtggggaggagctgcctctgagggcggggcctgtggggcagggccctggggaggggtggggcttctccaaaggtgggcccttggggagaggtgtggctgcaggggtggggaggagctggctctgaggatgtagccctggagaggcccgaggcttctccagagctgaagtctgtgggtgaggctgcaagggtggggtcttgggtaggggaggtactgcagggaggggtgaaatacgtagagttaggagggactggctccagggggagaggccctgggaagggtcggggctgagcatatagggggtggggctggccaggtggggcggggccaggccaataggaggctggggctggctgggagaagctggttcacaggggttgggtggagcagagactggtcccgcttgatcctacctgcatgctctctctgcatgctggctgtggggacgggccctgaagaggggcggggctgcggtggggtgggcggagatgcagaggcgtggccttggggaagggcaaggcttctccaggggctgcttatggatggggatgcaggggcagtaccttgggatgaggcggtgtctggtgggaggcgggggggcttctccaggtgctgcctgtgagtagggatgcaggggcgtggcttgtgatggggcggggtctggggaggggcggggcttctccacggacagagttacctgtgccctgtggtctcagattcctccacctgactattcgtaaaactgtttcctcctggttctgtctatgtgatttgtccatatgactgactggtggtctctggttgtgtctgtctgtctatcttcctgcctgagagtccaaatgacggtgtctggcggtctctgtccacagagctcatcatgtgggaccgactccactctggtctttcttaccttactagaactgaatgtgtctgacggtttcagaccattacctggttcttcctttttaaaattgagggct

SEQ ID NO: 33886 - DNA, 1091 bp, Artificial sequence
  DNA replication origin
gcctggctggctgtgtgggtgaccaggtctttgtctaactgtggctgtctgtctgtgtgattctcctccattctgacccttgatctggctgattgtccagctgtccgtctgagcaaacggctggctgtctttctgttatcagttctctctggctgcatgtgtctgacactggccatgtaggtctctgtgtcccctctcctgtggcccccgctcagccagtcctgtgaccccatcaccctctacctcttcttcttctcttggagcaggctgtgctttcgtgaagttctcctcccacacggaggcgcaggcggccatccacgccttgcatgggagccagaccatgccggtgagttggagctgcccttggccgtgggggtgggggtgggaaaggggtgagggggacagggatgaaacaggccatattcctaccgtcgctgtcatccggtagcccctggctgtccttcagagggggcacaggtggagaaagaggcgcagtccctggctgtggtccctggagtgggtatacacgtgtgagtgtgtgcagatgtggaggtgagtaggcaagcgaagtgtatgtgtgtgcatggatgtattacaagtgtgtgcgtgtgggtgagtgtgcatgtctgggtgtgagtgtgcccgagactgcatgcatgtgtgtgtgtgagtgcgtgtttgagtgtgtcattactagtaggcgagtgttatgtgagtgctgtgtgcacgaggggtgtgcgtaaatatgtatggataagtgtgccattgtgtgctagtgtagagatactagtgcgtgtgcgtgtatgagagtgtacatgtgtgtttctatgtgtgtgagcgtgtgtgtgagtatgcctgggccacgggggaggaagcacatgtgtgtgcatctgcaggtgcatttgtgggcaggtttgtgtgtgtgtgtgtgtgtgtttgtgtgtgtgcatgactgtgagtgtgtcagtattgtgggtgattgtgtacacgtttgtgagtatatgcaggtctgtgtgagtataggttgtgagtgggtgagtgtgtatgtgtgtacatgtaagggtatcctaaggggatgacacctgggttgg

SEQ ID NO: 33887 - DNA, 2236 bp, Artificial sequence
  DNA replication origin
ctttccaaaaaatccagagaatcactcttggttctggagagggctggtaggaagtcactgctattcctacggggtcggggcgagcatggttctcttttcggaggaggaaacagagagggagattcccaggggtcagcggctgcaccgggactcaactctggcctgtccagcccccaggccgcactctcagccccgcgggtcccagaggcccgggccagacacggagcctgcaggtggacagggcgggcagagggcggggctggcgcccaggggaggttgcggccgcctcaccttctcgctgctgctgctgcaggaggggcggcggctgggggacgctgtgcgcgatgggcgtgatggccgcggtggggtacatggctgcggagaccggagcgagacacagggcgaggaggggcgtgaggccacgtgggcggcctgggccgctgggcggggagggggcggggccataagagggtggggccaaggcaggagtgggtgtgatcatggcctttgtggggagggtttgggggcggggccaggccagagggcggggccaagatcacagacgaaacggggaggggctattgcctgaggggcggggccatggtggagggcagggccaataccgagacggggcggggaagggggggtgggggcggaccccatggcgtgaggggaggggtataggggttgggccacagtagagggcggggccaaggctacaggacagtccagagtgggcgggaccattgcttgaggggtggggtcacagtggagggcgggggcaagactgggatgaagggcatgagtggggcggggccgtgacttgatggagggctatgtgggcaggaccatgagttaaggggcggggccgcagcagagggcggggtcacagccaggccttaagaagtagagccagaggtaggggcggggctttatcagagaggcgtggtcagagtaaaggcaggaagtgaggggcggggctaggagctgcaggagggagggtaaggggcagggccgagagctggggttgggtcagagctagagacgtggtcaaggggaattccctctccccaacacagaacatgagagggtaaggccatgggtaagcgctgtccttaaaggacaagggaaggtcctgtttgcgggtataggtggtggtggggtgggaccagtaacagggcccggggttgaatacaggacaaggggctaagggtgggccctgaggggcggggccagaggtaggaggcgcggctaggcacagaagaacgacacgtccggggcgggccctgggggcggggccctaggcgggggcggggccagggcccagcgcgggcacgcgggctgcctcctacctgtgtactgctggactccggagaaggcaggatgcagtgtctcggccacagtcgggctctgagctgcgggcagacagaggggctgagtggggcgggagcagcagaagtcttccatccacccccgatccttaagagccgcaaggacagcaacaaacaccccgcccagcttctcctctgtgctaaaccctctgtaggaccaggaagctgaggccgaggaaggtgaagccacttgcacagggccactcagatagcaaatggcagaagctgaactggaatccgggtttctcggactccagagagagatcaccatcgtccccatctccctctccctatcccgacccggttgcctcccaagggggacccttcactcctctctactccctggattcaccaggacttcagcctccacctcaaatcaccacctgcccccatcccctgccccgtctccctctccacatgagtttcctcatcagacaccctgtagctcccccatctagctgtagccttcctgctaccgctagggaaaggggtaggggagggaagaagttgtccaggccaccaaagctgatgattctggggaaaaattcagccaaacaattctgcccgaatggagagtgtgctggagggcaggggatagtggtggtgactgtgacttcaaaggggtggcaggaaggagttcactttgtgggcaagaagcagttctgtatcttcactgtgggagatccacaagtctgcatctgtgacaaaatggcaattaaccgcccctgcacacacacacacacacgtgcacagagtgcatacaaaaactcgtgaaatcagctgggtgtggtggctcacacttgtgatcccaacactttgggaggccgaggaaggaggatcgcttg

SEQ ID NO: 33888 - DNA, 1863 bp, Artificial sequence
  DNA replication origin
ggagagagagagagagagagagagagagagagagagagagagagatatggagagggagatggagagatggagacagggagatagagggagagatggagagatggagagagagatggagagagggagagagagagatggagagagggagggagagagaatgacagagagggagagacagagataaagggagggagggggagagagggagggagggaaggggagagagagatgaaaggagggagggagaagggggagagagaatgagagagtgatggagagagagatggagaaatggagagagagtgatggagagagagatggagaaatggagagagagagatggaaagagagatggaaagagggagagagagatggagagagggagggagagagggaaggagagatggagagagggagggagagagggagggagggagagatggagggagggagggagacagaatgagagacagagagatggagagagggagagagagataaagggagggaggggaagagagagggagggagggaaggggagagagagatgaaaggagggagggagaagggggaaagagaatgagagagagatggagagagatggagagagagattgacagagatggagagagatggagagatgaagacagagacggagatagagagatggagagatggagagagagatggagagatggagagagagaagaagagagagatggagatagatggagagatgcagaggcagatagagagatggagagagagatgaagagagagatggagatagagagatggagagatagatggagaaatggagagatggagagatggagagagatgagacagagatggagagagagatggaaagagggagagagagatggagggagggagggagagagaaagagagggagatggagagagggagagagagataaagagagggagggggagagagagggagggagggaaggggagagagagatgaaaggagggagggagaaggggagagagaatgagagatggagagagaggaagagacatggagacagggagggagggagggagagagagagatggagggagggagagagggatggagggagggagagagagaagggaggagagagagatggagggagggagagagggatggagggagggagggggaagaaggaaagagggagagggagaaagggagagagggaggaagagagagagagggatagagagaagagacagaaagggagagagagggaggaagagaaagaaacagagagacatcacggaaaaagacagagatgagaggcagagaaacagacatgaacagagaggcagggaaagacagagacacacaaagacatgcagaaagagtgaaagagagagatagaggggagagagacagagacaaagatacagagacaaggagagacagcaagatttagagggaaacagtgatagagaaagacagagatacagagataatgagacagagagggagagagttagggagagagagagacagtgagaaagacagatgggaaagacaagccacccagccgtgcacagtcaacggggtgggctgtggaccgtccactgtgtagcacagcctatgcccccaccagagacacccgattgaccagccacattttccactctgagaactgaggcccaagagggtcagcccagtgatcaaaactgcagcagctgctgcgctgggccagcacctggatcttcgtgaggatcctccatctgcaccacacccccaaccccggttcctgtccccccgtaccaaggacagaaggcccaggtctacacgtctttttttgttttttagatggagtttcactcttgatgcct

SEQ ID NO: 33889 - DNA, 1177 bp, Artificial sequence
  DNA replication origin
ggcctccgttagctccgggcagggctcggctgtcttcatgggaccctggaggggtaagtcttttttttttttttttgagacagagtttcactcttgttgcccaggctggagtgcagtggcgcaatctcggctcactgcaacctccgcctctcaggttcaagcaattctcctgccacagcctcccgggtagctgggattacaggcacctggccaccacacctggctaatttttgtatttttagtagagatggagttttgccatgttggccaggctggtctcaaactcctgacctcaggtgatctgcccgcctcggcctcccaaagtgctgggactacaggcgcgagccactgctcccggcgtgactgtcactattttatcttctccttccttctcctggcctccaagcagagacaagttggggggtttgggtggtagggggtgggggggttccttttgtttcataatgtaacagtcgctgtgcatttatggagcatgaagtgtatgcccgggtgaggcgagaaggggctggtcactggtgtgtatgtgggggctggatgtcctggcccgcaggtagcaggagggactgcagatagactgcaggaagaacttccctggggagggactgccccttagctctgacatggcaatgacagggcccacccggaactcctctggcctctgcttttctgtgtcctctccgagtgctcggagggaagtggaggctgagcagctggcgcaggacatgaatggggaccaggcgcctcgctgtgtcattggggctgaggacggggtggcgtgctggggaacgtggccaccccagtctcgtctcctctgctcagtccccggcaccgtggaggaatcttcctaaagtgcagctgtggctggttccctcctctcttggcctcccttcatggtctccaacataagaacccgacggcgactggacccggcttcccactcatcccccttctctcactaatgcatgtcaccgtcccacttcctgatgacaccacgttcttctacagctccgggcctttgcttctgcctgggatgcctttcctctttgcaccgctgagcaactcctatgcatctgtcaaaacccagcccagacattgccccaacccttgaggacagagacaaaggcaaacagacacagagacaaatggagggacagag

SEQ ID NO: 33890 - DNA, 862 bp, Artificial sequence
  DNA replication origin
ccaccctggtgccctcgtgggccacagaaacaggcactttcgggcccttagcggtgcctgggcagccgcggactcgtctccaggtggaagatgcaagaattattctgctctccatgatctgggctcggtttcaccacctctgaccaccttccccgacttcacagctccccagtgggggggtcaccgccgccccccaaccacgcctggctggagaagcctcctcggccggccgccccctcctgcccccggccccgggccacggcgggccccgctccactcaccatccaccacattttagccgtcgtgtcgtagcacagttgccatttgaccgaggtctctcccggcttgctggacacggggggcccgggcacctccatgctggggcggacggcgagggcggccccgaatcgccttatggggaccggagtgcgggctgggccggccgcctgggaggcaggtccgggcacccggcttccatgatgccgtcacacaagcagcttttctctggggagtcggaggagggtgccggggacactgggagctggagagcatagacgagagagtgagagagagagagagagagagaaagagagacagagagagaggagagaagagagaagagagagaggcaggagggcttgggatgcgttaatgtgagacacaccaggccactctcaactaagtgaccacccacagcccggcgaggctgtcacaggccgtgtgtgtgtgtgtgtgtgtgtgtgtgtgtgtgtgtgtgcagcagccgttggtgcaatcagacggggccatggatttgtgaatgaagctcaaactctgattggaaaatcccccctcccgccccccggaaggagcgtggcttctc

SEQ ID NO: 33891 - DNA, 1671 bp, Artificial sequence
  DNA replication origin
tgggtggtcacttagttgagagtggcctggtgtgtctcacattaacgcatcccaagccctcctgcctctctctcttctctcttctctcctctctctctgtctctctttctctctctctctctctctctcactctctcgtctatgctctccagctcccagtgtccccggcaccctcctccgactccccagagaaaagctgcttgtgtgacggcatcatggaagccgggtgcccggacctgcctcccaggcggccggcccagcccgcactccggtccccataaggcgattcggggccgccctcgccgtccgccccagcatggaggtgcccgggccccccgtgtccagcaagccgggagagacctcggtcaaatggcaactgtgctacgacacgacggctaaaatgtggtggatggtgagtggagcggggcccgccgtggcccggggccgggggcaggagggggcggccggccgaggaggcttctccagccaggcgtggttggggggcggcggtgacccccccactggggagctgtgaagtcggggaaggtggtcagaggtggtgaaaccgagcccagatcatggagagcagaataattcttgcatcttccacctggagacgagtccgcggctgcccaggcaccgctaagggcccgaaagtgcctgtttctgtggcccacgagggcaccagggtggccgttcccttggacggttttgcagaggatcagtggtcctggagatgcttgtgctgggcccagggcctgtgatgggatgttctgagggtggggaggtctcagcgggctggggagcgtgaggcccagggactgggctgctgtgtgaccccggccaagccctcgcctgcctctgtgccctgtggtcccagaaaacggggtggacaccctcctcgctctggctggatgatggccaagggccgagggaaggtggggtggggctgtcgcctgctttggcccagaggaggactatggcatcacccctaagattgggcacccttccggaagcttccagtggtggtggtggggggtggttaaggccacgtcccttgaaactgggacccaccggatggggtaagaagcaattccggggcagctctgtgtgtaagacagggcacagttatggagcctggctgggggccagtgtccacggcccttggggtccgcgcgagaccgtcacactgtccgcctctcagtccgtcggtccatccagctgtctgggagctggccggtgatccatggggaacttgaaaacccgtcaacacaggtctgcatcatgcagatgtgtgtttcaacctgggcttactgtgtgaccttgggacagtggctcaccctctctggcccgcaggttctcccatcagggaaatgatgagcggcctagacttctcgggtttcatggcaggtgctctgtgggtcgccaaggaaagttgggcctcgaggtgggacatggcacctcatgacctgctgtgacctctcatagctgctgtctctggggtgtgtctgcttcaggtggggtcagagcctctggggtcatttccttagtctctgagcaccaaagtcttggggtttacaaggacagagagacctttcccacagccctggggagtgtcctgcattggtttcacttttcattcttcatacaaccaacatttgagtactcgct

SEQ ID NO: 33892 - DNA, 1403 bp, Artificial sequence
  DNA replication origin
gcaggtgctctgtgggtcgccaaggaaagttgggcctcgaggtgggacatggcacctcatgacctgctgtgacctctcatagctgctgtctctggggtgtgtctgcttcaggtggggtcagagcctctggggtcatttccttagtctctgagcaccaaagtcttggggtttacaaggacagagagacctttcccacagccctggggagtgtcctgcattggtttcacttttcattcttcatacaaccaacatttgagtactcgctgtaccccaggccccatttctccatacgggggacacagcagtgacccagacaggaaaaaaaaagtccctgccttcttggggcaaatgtcccagagcgggagacagaggataaaaatatctgtgcacaaagtaggagtgaactacgattgtaggaggaagcagtgagaaggcgctgggggcctgagtgagcccaggcaatctgggagggctttcctgaggaggtgacatctgacctgagacctggtggatgacagaattcattcagataagagaaatgggaatagagttccaggcatgggtcgtggcatgtggaaaggccctggggcaggaccacatctggcctgttggaggaacagcgaggaggcctgtgtggctggaccagagtgaggagggggagaaagggaggaggagagggcagggaagggacggggcaggtcacgcagacctgatggcctctgggaggacttgggctgtgacaccgaggaaggtgggagccatggagggctgcgggcagaggagggacgggacctattttatatttttaaagcttccttgggcttctgtggggagaaagggtggctggggctgatgtggcagccagagaccaggggaggctgaggcggcttctaggcgagggatgatggggacttggaggtgcagggaagggagcaggtttcagatgaaaaaaggctgggacttggcaattaaactgaaggcccagagaagctgagtgatttgctcaaagtcacccagcaagtgaagaacagagctgggagtgggagaagggcctgaggtcagaggtcagaggtgggggaggtggggagcccttcctcatctccatctcctgggtccttagcgagccaagcagaactggcagtttgagaaaaggagaacatttcagtgcaaacttgaggtcttatcaatagaggtagaagccccagtataggggaggttatggacccactcattagtcaaggggaggtatcaaaccggagtatgtccagacagggaaagcggatagggcagccttcagggaaagactgagagactcagggctttagcccaagaaaagaagatgcctaggggtggaattcagttcagctctccaagctctccctgacatttctctggcattggct

SEQ ID NO: 33893 - DNA, 2025 bp, Artificial sequence
  DNA replication origin
gctgagcctcccatgttgtatctccttcaatcctcccaacaagtcgatagggaaggaaccattattatcaccattttatagatggggaaactgaggcttggcaaggggcagccgctgcaggaggtggccgggaagcgaccagggtaatgtggccactctctggatcagctgagcagagggaccaacttgttactctgccacctgtgatgggggtgatatgaagccatggctgccaggggtcatatcacccaggtgtcgtgtgtctaccccagccacacgctaagtcctcatagctgcctggccacgtggtttcgcccacctttgcagctggtggctttgcaaggttccatgaaacccctagcagggcggaggcaccttgtcctttgatagaaacccactgggcagggagaagccactggctaggggctccctggagatggtgacatttgagccaggcccagagggatgctaaagctttcaacacaagaaggtagcagggagggcattcctggcagaaggaactgctcagacaaaggtgtggtggtgcgaatgtgcccccgtgtgacagagctaaaatggggcctgaggcgggggcaggtaagagagacatgtaaagccaggctgtgatgggtgggtctcaaatgcgaggctgcggaggtggggctttctctccagggtaatggggagccatgggaggtgtctgagcgaacaggaccagagggacagatgggagagaggatctaaggggagagtgagcagatgttgggatggacagactatggggagccaggaggagggagaagatggggctgatgccagagatccctacctcagggatggggagtgatggtggaattgtccctgacatggggacatggaaggaggagggggtttgaggaagacgctgagtctggagaccttgaggaaagtcctggaagaagctgaataagggagagagatcgctggagtctaagataatgactagaacatctgtgatcagtaactgcttgtgaattggatggagggagggagggaggagtcgataggtgggtgggttgatgggtggacagatggatgagtggatggctagatgaggggatagatgggtgggcaggtgggtgggtggatggatagatgagtagagtgatggatggatggatggatggatggatgggagggaggtggatggatggatggattgataagtggttggatggttggatggatggatgagtggatggatggatgagtggatgagtggatggatgagtggagagatgaatcaatggctggatggatggacggatggatggatgaatgggcaaacggatgggtaggtggatggttgcatggatgaatggatggatgaatgcatggatggatgggtgggtggatggatggatggatggatggatggatggatgggtggatgaatggaaggatggttgagtgtatggctgagtgagtgaatggatgagtggagagatgaatggatgggctgatggatggatgcaggcatgggtggatggacagacgaatgggcaaatggatgggtacatggatgcatggatgaacgaatgcatggatggatgggtggatggatggatgagtagagggatggatgggtggatgggtgaatggatgggaaggtggatggatagatggataaagggatgaagggagtggtggatagatggatggatggatggatggatgaatagagggaaggatgggtgaatggatgggaaggtggatggatagatggacaaagggatgaagggagtggtggacagatggatggatggatggatagagggatggatgggtggatgggtgaatggatgggaaggtggatagatagatggataaagggctgaagggagtggttgatagatggatggatggttggttggctgcatgtgtgggtggatcaatgggtaggtggagcctgaagacagaagtggctgccctgagtgtgaaggcaaaggcacagccctgggaagcccccacatcagggccaggaag

SEQ ID NO: 33894 - DNA, 1066 bp, Artificial sequence
  DNA replication origin
ggaaggaaggaaggaaggaaaggaaggaagaaaagaaggaaggaacgaaagaaggaaggaaggaaaggaaggaaagaagaaaggaaggaaggaagggaaggaagggaaggaaggagggaaggaaggaaggagggaaggaaggaaggagggacggagggaaggaaggaaggagggaaggaagggaaggaaggagggaaggaaggaaggagggaaggaaggaaggagggacggagggaaggaaggaaggagggaaggaaggaaggaaaggaaggaagtagggaaggaaggatggagggaaggaaggaaggagggaaggaaggagggaaggaaggagggaaggaaggagggagggaaggaaggaaggagggaaggaaggaaggagggacggagggaaggaaggaaggagggaaggaaggaaggagggaaggaaggaaggaaaggaaggaaggagggaaggaaggagggagggaaggaaggaaaggaaggaaggagggaaggaagggaaggaaggagggaaggaaggaaggaaagaaggaaggaaggaaaggaggaaggaagcaaggaaggaaaaaaggaaggaaggaaggagggaaggaaggaaggaaagaaggaaggaaggaaaggaggaaggaagcaaggaaggaaagaaggagggaaggaaggaaggaaagaaggtaggaagcaaggaaggaaagaaggaaagaaggaaggacgggaaggaaagaaggaaggagggaaggaaggaaggaagggcacatgtatatactgaaagacatgcatggaaatgttcatatcggttttatttgtaagagcccagaactggaactaattgaaatgaacatccacactagaatgggtggaaacaggaatgaaaaaaaagaaaacctacatggacaacagggtgattatgcattgaattgtgctgccccccaaattcatatgttgaagttctaaccccaggacctcagaaggtgactttattaggatgcagggtctttacagaggtaatcaaaataaaatgaggccattagaggccaggcacgatggctcacgcctgtaatcccag

SEQ ID NO: 33895 - DNA, 1249 bp, Artificial sequence
  DNA replication origin
atctggaacatggaggggtaaggataatggcagccgcctttcagcaattcatgcacccgcatttattgagcacctgctgtgtgccaggccctgttcttttttttgagacagagtctcgtactgtcacccaggctggagtgcaatggtacaatgtcagttcactgcaacctccgcctcctgggttcaagcaattctgcctcagcttcccagtagctggattttaggcgcccaccaccatgcccagctaattttttgtatttttagtagacatggggtttcgccatgttggccaggctggcctcgaactcctgacctcaggtgatccgtcccccttggcctcccaaactgttgagattacaggcgtgagctactacgcctggccaagggtgcaattttaagaagctgagaattgaaggaggcaagggaggagccatggggagccgggcggcgggaggggggggcgggggggggggaagagcgtttcaggtctgtgcaaaggccctggggcaggatggcacctggcgtgttggaggaacagcaaggaggcctgtgtggctggagcagagtgagcgacaaggagtaagcggggaggggagggcagggaggggacagaacaggttgtgcagggcctcgtaggctgcaaggaggacttgggctttgatcctgagggaggtgggagccatggaaggctgcgggcagaggagggatgggccctgacttgggtgctcacaggcaccctctggctgcttcagggaggacaggccgtggaggggcgagggtgggagtgggagcatccaggcggaggggacggcacaggtccaggcgggctatgacagggctggaccttggtgggagctgtgtacctgccatgtgccggccactgtgcagggtccttccctcccccctgcatccggcccccaggtaggcattctcattcccccatttgacggatgaggagactgaggctcagagagggaaaggacctggctctagtcccacatcacatctctccactgcctaaagccctccatggctcctcactgccctccaggcgacagagtcctccccgagggctacaaagccctgcctgacccaccctgtccctccctgccctcgcctcctccctctctccctctcctccctccgctgcagccacacgggcctcctcgctgttcctccacatcaggtgccgtcctgccccaggctgtttgcatgggctgttccctctgcttggaatgcccttcctcca

SEQ ID NO: 33896 - DNA, 1395 bp, Artificial sequence
  DNA replication origin
tccagatcccaggtggtgcctgggaggagactgaggtggatgaggaaggcattccaggaggagaggacggcccaagctgaggtctggaggtagaaagcctgtcaagccactcgtgggagaggtggcagctgccagctgcgggccgtgaaggccacgtctgatgccctttgagtgggccaccccctttccgcctttgcaaaatgctggaaagggggtggaagagcctctgtcctctcttcccgcccagagtgtgatttttcagggtgagcccagcctcggcttggctccaattccttcttcctgccaacagctctctctctcctctttttgattctgtcgcggagttggtgggggtgaggatgcaggggagacaaaaaaaagcactgcctctccttcccccaccgctcccgggaggaatttgacatggcagtgggcccggtcctcgccctccccggagctgccctcgccaactatgacgtggccgctctggggatcttccgaggatggcaccggtttcccagccccaggcacaggggcacggagggggctccctgtctcagtttccccactgggagggcagcaggactgctccagagaccctgggtcccctcagactcagctcagcccccacccccaccgcctgtgaccatctgttcatcgttgaaaacctcgtggcgttggggttttgctggtggagtccagagctaaaggcggggaccctgggccagaaatagggaaagagggggctcgccagggccttgcctaccacccccaccaagatggtctgagctgggcttacaggttgagtgtggggtcgggaccccacggcatttctgcacccacccacgtagaaccatccccaccacctccagggaagccatcccacaggacagcccctggccagaactgagctcaggcaaccgtgtggcatgaagttccccctacacaagcgtggccactgccgggcttataccccctcctctgattcaagaagaaaagcaccaggactcctgcttggccgtcggtgtgacgaggggctgaaggctgctggaggtggctggtcctacctgctcctccctctcccacccaaaggacgtctggggttcccccagggctggggagggtggctggagtgggagaaggagggcaaaaagggggacagggactgatctggaacatggaggggtaaggataatggcagccgcctttcagcaattcatgcacccgcatttattgagcacctgctgtgtgccaggccctgttcttttttttgagacagagtctcgtactgtcacccaggctggagtgcaatggtacaatgtcagttcactgcaacctccgcctcctgggttcaagcaattctgcctcagcttcccagtagctggattttaggcg

SEQ ID NO: 33897 - DNA, 909 bp, Artificial sequence
  DNA replication origin
gagcgccccttcggagcgatggctgagtctgggggttctggaagttgagtctggcactctgggagctgagcagttctaggcgacgttgatgccagcagctctgcccacatggtaggtgctcagtaagtgttgtctacgcgaaggatgtctcagccagccctgaggcatttaccctgtgccctcatcttcagacgctgaggctttcccatttcatttctgcagtcttcgccccatagttcagaaggaaccaatgaggcccagagaggggtcaacctggggtcaaccagcagggacactaatgctttctccaagggtgtggcaggcaccgaggttttgcaggcccccacccctcccgcaaacctgaggcaggaccggcaagggaagggttagtgggttagagaccccccccctccctcccccctcccacccgtctctaatcggcctctgctaatccgcagcttgaatcctcacccgctcccctgcctctgggaattaggtacctgggggtgaggaggggaggggagggatgggttgatagcagccaggaagtaatgaggggcgtagagacagtggagcactggtgtagcgcctctcacccattactttccctacgaaccctgcaactgcctggcattgcgtgaagtgcttgacatgaagctactcacccctcaccgcagccctctgaagtggctgctattaccatcgagcccatttcacagatgaggaaactgaatctcagagaggtttagacacttgcctgaggtcacggagctgagaagtggtgatggtcgggagcatctaattttagcatcttttgtgatctgaatgggcttagaatttcccagatcatcaagtcctggttcctttttacttcacacttcttccctcaatctgtctatttcctctcac

SEQ ID NO: 33898 - DNA, 1076 bp, Artificial sequence
  DNA replication origin
gcaccccgagatctcacagacgcacagtcccagaaagacacccagacctcagagggactcacgcgccgacccccgggacccctccccgagcagccctggccggtgactgcaggtgtccgggggacacgcggctacacacacgcacagcagggagacgggacagacggggacacagacagagactccgacaccgagggcgacagacctggggcgggggtcccctgggggtcccgcaggggctccaggcagggggcggcaggggagcgctcgcagcggcccccgtaggaagtggggggcagcgggcgccccctcccccggtcaggattaatggcgaggcctccgcagcggaggaggggccgggccgaggtgggtcagcgcccccgcccctgccgcgcgagccgctgcgggttgggaccggctgccgcagcgcccccccaagcgctctcccgcagtccccctcctctgacagccgcagagtaggcgccgccccctcgcccccaccggctctgcgtctggcgcagctgggggaggttgcagggggtgtggggggagtgttgctccgacctgacgggtgaaaggggttctgctatggtccttctgtctttccccagttccacccccctccacacacactgaggatccaggatttcagggacccctttggaggagtggttccctgctcccccagggaggacgccagggtgagggtgagagcaggtggcaccccgggaggagaatcagttcccggagcgccccttcggagcgatggctgagtctgggggttctggaagttgagtctggcactctgggagctgagcagttctaggcgacgttgatgccagcagctctgcccacatggtaggtgctcagtaagtgttgtctacgcgaaggatgtctcagccagccctgaggcatttaccctgtgccctcatcttcagacgctgaggctttcccatttcatttctgcagtcttcgccccatagttcagaaggaaccaatgaggcccagagaggggtcaacctggggtcaaccagcagggacactaatgctttctccaagggtgtggcaggcaccga

SEQ ID NO: 33899 - DNA, 883 bp, Artificial sequence
  DNA replication origin
gggggagcagggaaccactcctccaaaggggtccctgaaatcctggatcctcagtgtgtgtggaggggggtggaactggggaaagacagaaggaccatagcagaacccctttcacccgtcaggtcggagcaacactccccccacaccccctgcaacctcccccagctgcgccagacgcagagccggtgggggcgagggggcggcgcctactctgcggctgtcagaggagggggactgcgggagagcgcttgggggggcgctgcggcagccggtcccaacccgcagcggctcgcgcggcaggggcgggggcgctgacccacctcggcccggcccctcctccgctgcggaggcctcgccattaatcctgaccgggggagggggcgcccgctgccccccacttcctacgggggccgctgcgagcgctcccctgccgccccctgcctggagcccctgcgggacccccaggggacccccgccccaggtctgtcgccctcggtgtcggagtctctgtctgtgtccccgtctgtcccgtctccctgctgtgcgtgtgtgtagccgcgtgtcccccggacacctgcagtcaccggccagggctgctcggggaggggtcccgggggtcggcgcgtgagtccctctgaggtctgggtgtctttctgggactgtgcgtctgtgagatctcggggtgccagccccacaggctgcgagtgtgcgtctgtgttgacctcctgcagaaggtgtgtgtcccagatgccccaccggcttcgagcatgggtccccgtgtgcccggcggacacccacgggccgtgtgtccgtcacacgctgtaggcgccgcgcgtggggatctctgcgcgtgtccgtgtgcggtgtgtgtgtgtccgtggct

SEQ ID NO: 33900 - DNA, 993 bp, Artificial sequence
  DNA replication origin
cgggacggcgcgtggggcgggggtcgcggcggcccccgcggggtgccccggcccgggcgagcgcggcgcgccagctagcggaaaatggccgctgcggagaggggcggagagcgcgccgcggccgccgccgggcgccttgaacttggagccgggcgggcggccgcgctcggcgccgcgcaggagcagccgccccgcctgccctcgcaccgcccccgccccgcccctcggcagacccccggccccgctgccgcgcgcgcggggtccccagctgggagggacccccgggtctcggcccggcgcgccccaggccctggagcggcggtggctgcacttggggttccggtgtccggtcgactggcgtcggtgtcgtgcgcacctcgaggggtgcgtgggagcccctgcgctccgtaacgggccggcattggcatctgggggagcgtctggggtgtgcgcggcggggtggtagtgtacctgccttggggccgcgggtcccggcgcgtcggctccgccgctttctgtgtccgcgtgtgtctgcacatccacgtgctggcgcgtgttgtgttgtgagcgccgcccgcattgtgcggctgcgggacacttgtgtctttggataactgggcgactgtgcgcgcgtccctgcgggacggtgttgtgaaactatggctgggctgcgtgtccgcggagccgcgtgtccctgggtgaccgtggggtgtccccgtgtgggtgtgtggcggttggggggggtcgccagggagtggagaactgtcgagtggccgcgttccaggggacagttgggtgccgcttgctgtgtgcgagtgactggcgctgagcctccccctagggaagggtctgccttccactcccggcctcgcctcccccagttccttttttcctgtaactggggactgcctgggcggcggaggaagagcgctccctccaccttttcaaaactctgtccctttatctttcccctacgtcccctccacttccccc

SEQ ID NO: 33901 - DNA, 1871 bp, Artificial sequence
  DNA replication origin
cgtgtccctgggtgaccgtggggtgtccccgtgtgggtgtgtggcggttggggggggtcgccagggagtggagaactgtcgagtggccgcgttccaggggacagttgggtgccgcttgctgtgtgcgagtgactggcgctgagcctccccctagggaagggtctgccttccactcccggcctcgcctcccccagttccttttttcctgtaactggggactgcctgggcggcggaggaagagcgctccctccaccttttcaaaactctgtccctttatctttcccctacgtcccctccacttcccccagccttcggggtcccccatccgcttggcccgagggggtcctggctggaggttcgggcgcgaggtggcgccgggacgcgatcactcggcacgcagacgtcgctcgccaggggttgcgcttgcgcggggacctgccccgagaggggcggggcggcaggggttccccctccctgagaggccgtggaagtcccgaggggtgggtggttacagcagcacaggggttaggacgggcccgggaggtggctaaggagacccctattatcctatgctggggagagcgtaggggcaccgggactggtcccgcagtcccgcctccagcacttgcccccaatggaccagaggccgtgggcacagagagctgttttgtcacctccagggaaatccccgccgctctccacccccaccccacccccagtgcgtttgatataattttctaaatataaaaagcccaaggccaggctggtctctctcgctttcttcttgacatcccatcatggggggctgtttgggatgtcaagaaggagagaaaaccctcccacaatgacacagaggcctcccccaacaacactcaaggtcattctcgggttgtcaccatccctcacacccactcccagcctcagactcacagctatctccctccgcactcccggagggacggttggatgccctggccttcagcacacggcatggccctctgtccccattttgggttctgtgcacagtgggacacacgtgcatgcagtcatagttacacacacacacacacgacactccctcacggtgcctgtgtctgcatgactctgcacacacaaccacacagagactcacatagacacacacaggcctgtctagagacagacgtcacacacacaggcgtgcacagacacacatgggcagacacactcacggacacaaacaccgcacttgcggggggatagacaaccacatctcaccctcctgcccttccctgtccccaccgcgtttctgcagggccgagagcccagctccaggcagagctggtgcaggaggagcagggaggtggcgtgctgtgtgtcattgtgatggtgcgtatgtgactctgtgtgtgcctgtatgggaataccggggggttccacttgtgggtgtgtgtgtgcttgtaagagtgtgtgcttttgtgtggagtgtgtctgtgattgtggacaagtgcccatgtgtttgtggttgtgtctgcacttgtgtgggggcagctatatccatgcgttgtgcttgtcaagaagcgtcctgtggggagttgggagggtgtgtttgtggctgtgtgtgtgccatgtgggtctgtgtgtgtgtgtgtgtgtctctgctcgcccctctttgaggaggtatctgaggtcaggtgtggggggaaggctgtgatgatatatgggtctgtttttatgtgagtctgtgcgtgtatttgtgtctttgtgtatgtagctgtgtgtcgtgtggagtctgtgtctgcagctgcttgagtctgcacgatgtgtgtctgtgtgtctctgtaggtcgtagtgtgtggtgtgtgtgtctatctgtaccagcctcaacggcc

SEQ ID NO: 33902 - DNA, 1109 bp, Artificial sequence
  DNA replication origin
aggcaggggctgcgggtccccagctagaggggcttgtgtgcagctgtcccttccttggccagaagggcccaggctaacacgggaggctccagaatttgctctcttcacccagcacccaaggggcaggggaggggtggcctcgcctgtgtgtctctccagcaccccaggaggacggtgtccaggcgggatctccagctggccagataaacccttgcagcctccccctgggtatccaataatttccacctgcctcaggggtgtgcccttttcacagatctcaagactgaggtatggcaagtgtggcttggagccaggccatctggacctggagcccacattctgttctccttctagacgtaacagggcagagacctggcctgcctccgtctgagcccccagggcatctgatgacagggccccaaccctcccccggttcactccctggatcctcccaggctagctcagaggctgctgtgtctctcattcccatcccaagggttctcccctataaagtggcttaaagatgcccatcctgtgggattgctggggataaggacaatgaccttagcagagccttgaccttgggtcaaatgttcactaaagacacattcttagaaagcttggccatttcacctcatctctctgagcttcccaaggacaaatgataccctctcaccaagctggggcaggtgccccaggcccaggggcgcagaagataccagcacccattatcctcaggcattacaggagaggaaactgaggcccagagaacggaagccacttgcccagggtctgacaggtaaactaggagggagcagaattcctgcagcgtaggttccctaggccccccacaggctcccctctgcatgacggtgacattattcaaacagtgcttagtacatcacgaacggtccataaatgtgtgtgtctgtgtattttaaacccactgtgcagctgtggggagcatttgaattaaatggtgagaagtgtatctggaaatccacataccaatataacgtgaagcaatttattttattaaaacacgctagggacacatacagggtgaaatctaaaattcacagatatttaaaagttgcagttgacttcag

SEQ ID NO: 33903 - DNA, 808 bp, Artificial sequence
  DNA replication origin
aggcaggtggaaattattggatacccagggggaggctgcaagggtttatctggccagctggagatcccgcctggacaccgtcctcctggggtgctggagagacacacaggcgaggccacccctcccctgccccttgggtgctgggtgaagagagcaaattctggagcctcccgtgttagcctgggcccttctggccaaggaagggacagctgcacacaagcccctctagctggggacccgcagcccctgcctggctctggggggagaagggagccagggtgctgtgggaccagctcaccgtgcacccagggtcgtacatctttaaggggaaagaggcgcgctggccggcctctgcgcacgtcacttcttcattccttccctcccccctggctctttcctccaacttcccggccagctcgggggtgatgggggggtggggagggggggccttaaaaatccacccctggcccctcaatgtccagaaacaaccctgtcccccctctccgcttgatccgaattggggtcgccctgcagtcctggggtcctggtctagtgccctggggcattgcgtaaatacgggaggagcgggggggtcctgagacgtcgggggaggctctcctttctcgctcgcgcccttttttccctcgtttctttgaaagttgggtgttgagaagtgggaggttcggggtgggagggggagggtgtcagagggtagagagagagacagagagacagagacgggggagagaggaagagagagacggagggagagagggacagagagcgaggcgggcggcgcgagagaggg

SEQ ID NO: 33904 - DNA, 1508 bp, Artificial sequence
  DNA replication origin
cagctggagagaaagggacctctcatgtgttttccccgtgtccccccaccaaggttgtgcgggccgccctggccctcggtcgcctttccctcgttattggcccacgtgtgcatggagggggagggggcaggagaagttggaggcccaggagggggaagggtgctccggcggcccggctgggtcccccctcctttgcaagccccccagcaccgtcccggtattttcgctgcatcgattctggattctggattctggattctggagccgccgccgggaggagcgggaggcccggcgctccgggtctggcccgggcactgcggcgctgcggacgccctcgccagcccggcacctgccccgtcccctccccctccccctccccctcccgtagcctctcacccctggccgcactcccagactgccccggggccgagccttgtgcaatggccgagggggtgtgtggggagggggcggctccccccggggactccttccagcccaggctcccggggaccccgaggtctgcaagttccgttttctagaccgctgctttcctccttacgcagtgtgtctttaggctggagaggttctggcctcagtttcccctgaagtgaggtgcggctaaggccggttctggagaggggacagtatggcgggcaaactgtaaagtcccggcacgtggggggtgcgattccagcgagggccaggcccgtcttaagaagcactgtgtggggagtatatgagtccccggcttccgctccagggcatggtgcagtgagggaccccccacgccaggcatgctccttggtagggtctttctcaccggccccctgcagccgacagggaatgtgggagctggtgctgagggggtctgaggtctgtcctacctgtgatcccctgagtgaccttgggtaagtccctgtcccagcctcagtttccctttctgagcagctttggggggggggttcccgaagaaggcatctctttgaagttctccaagaacaactagggttcgagtgggcacgctgtgtgacctcgggcagcctttgaagtctctgggcttgtggggtgactgaggtgtccccgctctgtcctcaccagctggaaggagccatttgggagggctgagcggaggggaggctgttccaggctggggaggttggaaggctgcctgtgcaccctggaattcccccatcagggctggttgggagacatcctggttgctggggtgggttgggggttagtaagaaccccagtccaggctttgcctcagagaattgctaactcggcctcagtttctccaggaacagggcaaggaccagccaggagggctgtctgtggaaaccaaaaaacggagaggctaaaaactaaaaactatccaggggtgctgcgtgcaagagacagagatgagaagacagagacaggcagagagacagaggcagagagctcccaggccagagtggggacagcgagtcccaagtgcagggggctccctcctcccctgcgattct

SEQ ID NO: 33905 - DNA, 1168 bp, Artificial sequence
  DNA replication origin
gggggtctggggtgggaggacagcctctcccagcctcggttaccctgctggagaaatggcagcaaagcacattgtgctccgagagggcatgggacgaacgaatgaaggaaacaacgaacgaatgagacagggacccggtggcgggatggaggtggctcggggaatccgccacgctgcggccaagagggacttggccccaaacccggaataactaacgtggcggtggcgccagcgggagggaggcagggagggaggcccagagcaggcgcggggaggccggccttcccgccggcaggatttatgggagccatgggctccacacagttcctcttaagagtaaaagtgaaaaagcgcttgagtcaccgctgagcccggcccggggctcccagaatgccccagggccgccagcacccactccccactcggcgggccgggcccgggtggcacagagcgggctggcaccgagatgccccccaccccccgccagcctcggctcccgagaaggatccgggtcggatcagctaaaagggagctattttcggttgggctcaggttgtaaaattagctgggaaaagggggagagggaggcccagagacagagagagacagagagagaggagtaaggagacacatgcagagatagagagagacagggagagagggggcaaggggagacacgcagagacagaggagaaagggaaggtgagacagagatgaagagacagacagacatattggagagaaacagagacagagaggaagggggcagagagacagagacagagaaacagacagagacacatcggacagacacacaaagaaggcaaagggagggagagacagagagacagagacacatcaaagagacatgcagagacaaagaggagaaagggatggtgagatagacatgaagagacagagacagtgggagagactgagacatcagagagacagaggatgagaaagagagacacaaagagaccaacagtgactgggagtgaaacagaggcggggagagacagagatggagagacagggagaaacagacacacacacacacacacacacacacacacacacagagtcagagcaagacagagagaaagagagaaagacagacaaaaagagaccaagatgagagaaacggaggggacgtgattcgggaaac

SEQ ID NO: 33906 - DNA, 1963 bp, Artificial sequence
  DNA replication origin
cagcccaaagctgggcttacgctgcgcaaatacacacagagggaagggagggaaactggaaaatgcctctggggtgttcaatgcaattactagtttagcaacaaccataagcacagcagcacttatttggcacctactgtataccaggtgtcggactaaggtacatcgatgtctctgaggaaagtgccattatgttttttattttatgttggcggagaaatggaggctcgggaagaccaaagtcccgcctctcaaccaaaaacattcattcattcattcattcattcattcattcgtgcaacaggtatttattgggcacctactgagtaccaagccctgcactgtggacctcagaaatgtcctgcctccccggaggctgcagtgagccaagatcgcaccgctgcactccagcctgggcgacagagcgagactctacctcaaaaaaaaaaaaaaaaaaaaattgtgctgcctccctgaatctgcagcagccctgaggaagtgggggtttctgctgacttcatttcagggcaagaaacggtccgggggtgggggcaggtcacccaccagagtcaggaaagaggagaattagtttagcaacaatcacaagcacagcaacacttatttggcaccactctatagcagttatttggcaccttctctataccaggtactatattgggtttggcacctcctgagcaagattttcaggcagatgtgaggggcactctaggtctgtgtgttggtgacccccatcaaggcagatccgaggcaggcagagctgtgtcctcgtccgtatgggtgtcagggagtgtgcacgcgtgtgcgcccagcgtgtgctcatggatgtgaactggtcaggacttgggtgcccgcacgctgtgtgctcagggcagatgggcacccaggtgaggtcggcgtggacacaggcaggagagtggggggcgggccgtgtccggggcaggaggcccaggcagcatttcccatccatttggtgtgagacagggagggaggccagctcagagagacagagagagagaaagaagaggaggaacagagagagaggaagggagggagaaagaaagagacagacagagagaaagaagaggaacagagagggaggtagggagggagaaagagagagagaagagagaaggagagagggagagaagggagacggggagagagagagaaaggaagagggaaagacggaaagggagacagagaaggagagagggagagaggaggagagagcgagatggggggagaaagggagggagacagagagagagagagagagagaggagaacgctgactctgccagaatcccagctttggtgatttacagggcgcttggccctggcgcgcagaggcacctccgccgcagagaggggagggggagaaacagagagagatgcacagagagacccagagggagatacagcgggagagtggtggagccttgtagagagtgaatcagaggccaccaggccccgggtggggggcacacggggagagagcgcccacctgcccaagccgccagatggaaaatggcctgaaccccagctctgccagccccactgtgccacctcgggcaggccctggccctctctgactcttagcccctctcccggcactgaggggctgcaggccccctgctcctggtaggcaccccccaagctccctctaagaacctacactgggcctgggccctgctgcctcccccacccccacctatccccagggcccaggagatgcttaaggaagatctagaaaatccaacaaaggtcgggggtctggggtgggaggacagcctctcccagcctcggttaccctgctggagaaatggcagcaaagcacattgtgctccgagagggcatgggacgaacgaatgaaggaaacaacgaacgaatgagacagggacccggtggcgggatggaggtggctcggggaatccgccacgctg

SEQ ID NO: 33907 - DNA, 918 bp, Artificial sequence
  DNA replication origin
ttctaatgccttcttctccgggtcggatgacttgtccatggtcccacggacaaccccaggcccatccggcaccagcgtcaggctctaaccttgggccgctccttcccctggctcagaaaatcacagcctgtggacatgtgaacggctcccagagagggaagattcattctgttgctcagcaaacatttagtgagtgcctgctgcatgccggtcccaggtagggtgccgaggacttggcagggacctgggctcggccctcacctggatccagatctggggcagggacggatggttaaaatcagcaaaatatgtaataaaacgtcaagttgggcaaagtgctctgaagaaatttaagagtttgagggaccagagaatctctggggtggggggtgttttttagcttggggggggggtccaggaaggtctcttgcaggaggagacacctgaacaaagtcttgagagatggcactccaggccaggagctttctgatggagaaatgggtcatgcaaaggccctggggcaggaccgcacctggcgtgttagaggaacagcgaggaggcccatgtggctggagcagaatgagcaagggggaaagagagaggaggggagggttgaggaggggacaaggacaggctgggcagggccttgtgggccacagtgaggaatttgggtaaactgagtccacagggttcaaactctctgccaaggcagtgagtcagcaaaatgaaccctgggtcccctacttccctctgtgccttgatgttctgggaggacaatgagggctgagccagaggggccaggaggtggaggagagaggcagggagcgaggctgtgcctcttacaggctgagcgtttgctgagctatcacgtctactacgaaataggggccgggcgcggtggctcacacctgtaatccc

SEQ ID NO: 33908 - DNA, 909 bp, Artificial sequence
  DNA replication origin
gaatttgggataagtgctaagtaggtaatgagctagattctcatgaaggattgttgagtcacttttacctggaaacttttggtttggaaattggagtttcttgtcctggtttgctggcctggactttcagggtgggaggagcacagggaggtgagtgagggcatcacccagtgcatggcgtggtcgttcagcaaggtcttgggtccagatgtctctcccagctgctgctgctctctttggccaggaagtcccagtgggctaagctggggtttccaggaaagacctagccttgttccccttctccccatcaccttgcaaggaacaaggtcaccaggcaagctcccctgtctccagcaggctgcaatattcctttctgcccattgtacagaatgagagactgaggcttatctgaggtgatctgttccccagccattcagatggtgaaaatagaccttactgtcacccagccaccttctccgacagtgggtgcctcaactctgggcctcaggattggagagggagaggtgatagaactggatggtcctggctagatctgggaaaccctgggttgaggaggaaaggctgcttgaaggaggggacactagagatagggcgttgagggatgtgtaggagtttgggaggattttcagcatctagcttgtcttggttatctcttttgccggttgggcctctgagggcagtaggaggtccctggggaagaggccctggttattgcaggtcatgtgggagaaacagagtgacaaccggccaaccaggccctgcctctcacgtggtctgatcccctggggaggacaagggaggatggggcagcaggtccatgacccagttacaagctgtttgtcttcctgcctctgtaactagccggggtcaccactgacgtgggccccc

SEQ ID NO: 33909 - DNA, 1293 bp, Artificial sequence
  DNA replication origin
cagtcgatgcgccgcatcttgcccttctggtcggggttggagagcacgcagcccggcgccttcttgccggtgatgctcagcacgaagtcctcgcggcactcgggccggatgtccttgcgcagcttggccagcagccgcgacgcccacttctgcttgacctcgggcttctcgcccagcagctcgtccttgaccgcacgctcctcgtccttcgacatccgcttctcgtgcttcttgaagtacttgcgcttccgcgcctgcaggttgaaccaggtgtaggcgaaggcgcggacgtgaggcagcagggcctcgatgaacgggtggaactcatcctgcaggccggagaggcgagaggtcaggagcgccagggacgcagagggcggacccactgcccggccccgaaggctgaggtcggaggggccctgaacagacccgcagagtgggaggggctgggcagaggtgggcagggggtcgctgcggacccgtgcacgccgccggaggcacgcaaaaggcccgggggacccaggagaagtttatcagggacctgcaagaacccatcgcccagatgagcaaacagacttggactatgtgagaggcacaaatcaaggcggaagtttgtggaggatcattttttttttttttttttttgagacggagtcttgctcttaacgctaaggctggagtgcagtggcgcaatctcggcccactgcaacctccacctcccgggttcaagcgattctcctgcctcagcctcccgagtagctaggattacagatgcccaccaccacgcccagctaatttttgtatttttaggaaagatggggtttcaccatgttggccaggatggtctcgatctcctgacctctgatccgcccgcctcggctctcggcctccccaagtgctgggatgacaggtgtgagccaccatgcccagccgtggaggacctatgttgaaccccagcatgcagatggagcaagctaagggggccaggtggaggctcatggacaacccattgtacagacgggtaaaactgaggttgggagaacaaagatgtcagggacctattctctgcctattgcagctagggttgggctgggtgtaatggctcacacttgtaatcccagcgcttcgggaggccgaggagggaggactgcttgagcccagaagtttgagaccagtctgagccatatggtaaaaccccatcgctacaaaacaaatgaacaaacaaaatcaaaaaaacaaaaattagccaggtatggtggtttgcaactgtagtcccagctagttgggaggctg

SEQ ID NO: 33910 - DNA, 1425 bp, Artificial sequence
  DNA replication origin
tcatcgaggccctgctgcctcacgtccgcgccttcgcctacacctggttcaacctgcaggcgcggaagcgcaagtacttcaagaagcacgagaagcggatgtcgaaggacgaggagcgtgcggtcaaggacgagctgctgggcgagaagcccgaggtcaagcagaagtgggcgtcgcggctgctggccaagctgcgcaaggacatccggcccgagtgccgcgaggacttcgtgctgagcatcaccggcaagaaggcgccgggctgcgtgctctccaaccccgaccagaagggcaagatgcggcgcatcgactgtctccggcaggcggacaaggtgtggcggctggacctggtcatggtcatcctgttcaagggcatcccgctggagagcaccgacggcgagcgcctggtcaaggctgcgcagtgcggtcacccggtcctgtgcgtgcagccgcaccacattggcgtggccgtcaaggagctggacctctacctggcctacttcgtgcgtgagcgaggtgaggtgtggtggcctgagcggagcggccagcggggagggtgtctgatggtggtgacacggggccaggagggcctgagggaggaggccagtgcgtgtgggtatgatgtggtggtctgagaggggaagtgggccttggagagtgcccaatgggggcgacacggggcacggagcatctgagggaggaggctggtgggtatagatgtgatgtggtggtctgagaggggaggcgagtctaggagaatatgtaaagtaggtgatatggcacaaggagagtctgagagaggaggccagtgcatatagatgtgatgtggtggtccaggcagggcagcaggcctgggagagcatctgatgggggtgacatggtgcaaggagggtctgagggaggaggctggtgcgtgtagatgtgatgtggtggtccaagcggggaggcgggcctgggagagcgtctgacgccgggtgacacggggcaaggagggtctgagggaagaagccagcatgtgtagatgtgatgtggtggtctgaggggggaggcaggcctaggagagcgtctaatgcaagtgatatggtgcaaggagcgtctgagggaggaggccagtgcatgcagggcccagggtggctgctgatgggatgtggaggtcagatggaggaggcaggcctagcagaggtctcaagtgagagatggtacaaggaggtttttttgacagaggaggcaggtgggctgtggcgctccaatggtagaggcaggatctcaccctcacgtctgagggaggaggcaggaaggcccttgaggtctcagggggatgagaatgtcctagatggtcttgggcacaacggacggccttgctgggagcaggggtgaggagaggagagggacaggccatcccagccctccgaggagagccaagag

SEQ ID NO: 33911 - DNA, 1266 bp, Artificial sequence
  DNA replication origin
ctagcagaggtctcaagtgagagatggtacaaggaggtttttttgacagaggaggcaggtgggctgtggcgctccaatggtagaggcaggatctcaccctcacgtctgagggaggaggcaggaaggcccttgaggtctcagggggatgagaatgtcctagatggtcttgggcacaacggacggccttgctgggagcaggggtgaggagaggagagggacaggccatcccagccctccgaggagagccaagagagtcctggcaccgctttctgtgaatgcttgttggttgattgactctcagaccatgccagcagaggcctgatgagcctggccctgccagaggggtgtttgccggtggtcaaatgcctgatgttgagaccagctagctctgtggggttgaggaaatccaaggcggcttcccagaggaggaggtgcagctgagctcagctctgcaggatggccaggccacagtgaacaaggagatgccccaggggtcctggcaggagcgtggagatgagaggcctgatgcctgtgcctctggtcccggtgctaagagcagggttggtcctgcagcttcttggctgcgtggccctcttggacttcagtttctcttgcctgccaaatggtggagatgatcagtctgtagctggatggggctatgggaggttccagaagatcatgcgtgtagccacgtgcgaggtgtcagctgcatcccaagacctgagtgggtgcacagcacacccctgccatgcccatccaggccgtgtctggagcacgcgtgaacccccacacacccaggggctgccagagcatgtgggatgggtgtacgccagacgcagacccacacaggtcaccagcccagccccagcccaggcagcactctatagaaacaggcagttgcacagcctgagagggaggggcatttgcccgaacaggaggaccctggggccagactgcccatgctccagacacagcccttcttttccccagctgtatggacacatcccttttctgtgcctcagtttcctccttggtgcaatgggagtaacagccatgccaccttctagagctggtgcaagggtgagacagggtcacgggctcccaggctctagggtgtgtggaaagacagcagggcagagttacccagtgtttttttttttttttttttcctggagacagggtctcgctctgtcacccacgctggagtgcagtggtgcaatctcggctcactgtagcctcgacctcccaggctcaagcaatcctcct

SEQ ID NO: 33912 - DNA, 1261 bp, Artificial sequence
  DNA replication origin
gcgtcattgcactccagcctgggagacagagcaagagtctgtctcaaaaaaaaaaaaaaaaacaacaacaaccaaaaaaacccccaaaaaacccaaaccaataataacaaacaaacaaaccaatcccgaagaggataatgttagtaacgataaccaccaagggccctagccccctgcctagtgcctggtcttcacgatgccttgtgggtggtttactgagctctcaccctgggcacttgacatttcccacaaggcaaccagttttgagccccccagtttatagacaaggaaatgaagcacagagagggtgagtgactggccccacatcacccagccagtgggcagctgagctggggttggagtccaggcccagctcttacccccatgaggagctggagcacccgcagtgggcaggtgggagggttgggggggggtgtgccctgctggggccaattgggggagggtgtggcctgctggggccaattgaagcagggattcccttggggatgaagggggcaggctgggggcaagggagggtgcagccttcactcagagaggccaacctgacctggggcacaggcctgcctgctgagcagaggcgggaggggcagggtgggggtggggaggcgcccagaggttgtgctgactgcagcagaaaagctcgcttcaaaattgtatcagctcagcacggaggaggtgggggcggggccccgggcgaggaagatgtgtggtggcagagaggtctggccctgtgtgacgatgagaacctccgtccccacggtggcccctgctcccaacaggcagtcacccggcccacctctctgcccccaccgtccccagtgccccctcacagccaaccccagcaggtttgttgctcatcagtgggggtgggggaggagaaagatgctaaggtcaaggtcaaagaatcaagatcaagactgggtaactgccgggcgcggtggctcacgcctgtaatccccgcacttggggaggctgaggccagtggatcgtttgagttcaggagttcaagaccagcctggccaacatggtgaaaccccgtctctactaaaaatacaaaaattagccaggcgtggtggcagtcacctgtaagcccagctactggggaggcaaaggcaggagaatcgcttgaacctgggaggtggagattgcagtgagccgagattgcgtcactggactccagcccggggaacagggcgaaactccatctccaaaaaaagaaagaaaaaaaaaaaagactggg

SEQ ID NO: 33913 - DNA, 1906 bp, Artificial sequence
  DNA replication origin
ctgccagacctttccttatgcattccctggacatagaatgtctttcccatatggaaaaccccaactccggctgggtgtggtggctcatgcctgtaatcccagcactttgggaggccaaggcaggtgactctcctgagctcaggcattcgagaccagcctgggcaaaatggcaaaaccccatctctaccaaatatacaaaaaattagccacctgcctggctgaaaattctttcccattctcacagctgccctgtgaggcaaggatcattgctgtatgccttttttttttttttttttttttttttgagatagggtctcactctgtcacccaggctggagtgcagtggcgcgatcttggcttactgcaacctctacttcctgggttcaagcgattctcatgcctcagcctcccgagtagctgagattacaggcgagcgccaccacacctggccaatttttgtatttttagtagagacgggctttcaccatgttggccagggtggtctggaactcatggcctcaagtgatccgccctcctcggcctcccaaagtgctgggatgacaggcgtgagccaccgcgcccggcctgttgtacgcattttacagaggaggaaacagaggctcagaggagggatttgacctgccgtggtcacacagccgagactgggccaggtgggatttggacccacaagcagcttctgcctctgccctgtccttgacacctgcctcatcctccattattgtcagaaggggatgggcggaagttgtggtgcgtgagggggcagtctgctggcacggtgtggtcaccttctggcagggttgtgtgagggccccacaggctgaggtcttatgtagggtccccaggctgtggctggcctccaggcctcagcgctgatcccagtggttgtcaccctgacagcaggaagactggccaccggcttccttttccgaaccgagagtccccttggctgtggagcgtcctggcccagccagagtgcagtgtctggctttcatcagccctgctgggcagctgaggccctgggatagagggagagggagggacgggcatcaggcatagggccttggctggcctcttggaggggtgcagggtggatggcggtggaggggcacctgccatggggctgaaaggagccaccacttgcaacgtcacaagtgagagaggaggccgggcacagtggctcatacctgcaatcccagcacttcgggaggccgaggcaggcggatcacctgaggtcaggagtttgaggccagcctggccaacatggtgaaaccccatctctactaaaaatacaaaaattagccgggcgtggtggcgggcgtctgtagtaccagctactcgggaggctgaggcaggagaatcgctggaacccgggaggttgcagtgagccaagatcgcgacactgcactccagcctgagcgacagagtgagactctgtctcaaaaaataaaaattaaaattaataagaagagggtgtcagggaactgcaggaaaataaagcagggagggacatggaggggggctgggggccactctggatggggagggcttctctgaggaggcgtctttgaggtgaggcttgaagggggtgagggagtctggagaggctgggtggagggagcagtgagggggttatagccagtgcgaaggcctggagcccaggagcagcacatggagctggctgggatgttcagggggtagtgagtggcgagggccgtcctgtggccttccagtgagggtgaccagccgggggtggggcgggagagggtgacccgggtgctctccgacctgccacgtgctggggaaggagcctgcaggaaccagggcccagagagggaagctgtctgcccgcccagggcctaaacccagccaggcctccccgccccct

SEQ ID NO: 33914 - DNA, 963 bp, Artificial sequence
  DNA replication origin
gcctggagcccaggagcagcacatggagctggctgggatgttcagggggtagtgagtggcgagggccgtcctgtggccttccagtgagggtgaccagccgggggtggggcgggagagggtgacccgggtgctctccgacctgccacgtgctggggaaggagcctgcaggaaccagggcccagagagggaagctgtctgcccgcccagggcctaaacccagccaggcctccccgccccctctggcagcccaagaaatctgaggcgcgggcgggcaccgtgccagggctgggcgggggaggggctgccaggcccgcccgtcccagcagctgccagcccgccccgagccgccagcccagatggtgcccatctgctgacgccgccatgggccagcctcctgttcccgccttgcgtcgtgccaagctcctgcagtccagcgccgggaatggcgcggtgggcagagcccggcccgggaagctcatagcacgccagagaggctgccccgggtgccctggagagggtggcaggagaaacatgggagggggagttccccagcgcttcctggatggaattggggagcaaggaccccaacagcgataatgatggcggcaaacacacatggcgtgccctctgtgtgccaggctccgaggccaccgctcaccctaactggtttaattctctcccccatccaagcaggaagggactttggccttctctcgtgttctagtggaggaagcagagacccagaggtttggacaagagtcacttgtccaaggtcacaaagctcctcaggggcagagccggaatgagaatccagaacccctttgaaaaagggattgaggccaggcgaggtggctcctgcctgtaatcccaacactttgggaggctgaggcaggaggatcacttgaggccaggagttcgagaccagcctgggcaacatagcacgaccatgcccccccccaacaa

SEQ ID NO: 33915 - DNA, 1494 bp, Artificial sequence
  DNA replication origin
ggagggggagttccccagcgcttcctggatggaattggggagcaaggaccccaacagcgataatgatggcggcaaacacacatggcgtgccctctgtgtgccaggctccgaggccaccgctcaccctaactggtttaattctctcccccatccaagcaggaagggactttggccttctctcgtgttctagtggaggaagcagagacccagaggtttggacaagagtcacttgtccaaggtcacaaagctcctcaggggcagagccggaatgagaatccagaacccctttgaaaaagggattgaggccaggcgaggtggctcctgcctgtaatcccaacactttgggaggctgaggcaggaggatcacttgaggccaggagttcgagaccagcctgggcaacatagcacgaccatgcccccccccaacaaaatttttaaaaatgagccaggtgtggtggtgtgtacctgtagtcccagctactcgggaggctgaggcaggaggatggcttgagcccaggagttggaggttgcagtgagctgtgatcccaccactgcactccagcctgggtgacaaggcaagaccttatctctaaaaaccgttttttttaaggggtgattgaggccaggtgtggtggctcacacatgtaatcccagctacacaggaggctgaggcaggagagtcgcttgaacctaggaggcggaggttgcagcgagctgagctcatgccactgcactccagcctgggcgacagagtgagaccctgtctccaataaaagggaggtggtattgaaaccccttaaacctcttttcaaaaacaaactaaaagtgccctttgaggttatctagtggaagccacaccctctgagtcatacagatcatacagtgcaggccgtgcacactcagggagtaaatgaatgaatgaatgaatgaatgaggtgaaccctatggaaggggaccaagcctggggccagggtgtccataaagctcaccctgagcttgatggcaggagaaagggtctcaacctgggagtgagggacctgggtcagccacagtgctgccctggcttgctgtgtggctttgagaaaagtcctgccctctctggtctggggttgaggggagtggagggtgggaaggggcggccttgtgggccacagacaggagcaaggcgggtcttcactgaaagcctcccgtcctcttctgcctttattgatcttcatcccggttgtgggtgctgcactggggagacaggccatgagctcgggtgacggtgcctgtttatttgtatggtggacagaatttgtgttcctgtgtgctccaggcagtgtggggcgcattcttctctttgagccttagtttttgcctctgtagaatggggagaatcagagctgtgcccattgcattaaagattggagtcagtggtctctgagaagcatacaggaggcactcaataaatgctcacttccggccgggcgcagtggctcacacctgtaatcc

SEQ ID NO: 33916 - DNA, 1494 bp, Artificial sequence
  DNA replication origin
gctttgtcatgttgacgaccaggcaagtctcgaatgcctgacctcaggtgatccacccagcctcagcctcccacagtgctgggattacaggctggagccactgcgcccagacggtccttccttttcatgcctcctccttccactcccccatgtaccatgtctccttgtctctctttttctctctgctcatccctccctctcaactttctttctacaaatatttattgagcacctagtctgtatcaggccttattctagccactgagggcacaacagagatctagacagacaaagcctctgccctcaaggaggtgacattccactggggagatgagcaaacacccgtgcagtcactaagcaactaagcaaatccataggcaatcactaacttcctctgaaggaaagaaaacagaaggctgagattgagggtagccagaggctgcttgaggtgaaggggctcagcgtagacctctctgagaagggagcatttgagctgagaccaggagagatctcaagagagagcaagcagttagctgtttagacagagggaacagaatgtgcaaaggccctgaggcaggactgggccaggtgcattggaggaacagcgaggaggcccctgtggctggagcagagtgagtgagggggagagagggaagaggggagggcagaaagcggacaggacaggttgtgcagggcctgtggtcctagtcctccactttgactactcccccaaatctcttaatgttcctcacattcctttccctgacaagcatttattttgcacctgctgtataccagatcctatcaggagaatcccaaatattcatgcaacaagttcatattgggtgcctactgtgtgccaggctctgctggaataatcacactcatttggctgcaggcatttattgagtgccagctgtgtaaaagcatttatcgagcaccacctgtgtagcaggctctggggagagaggccacatgaaagcttgggaaggagaaagtttccttctaccccctttcaggtttgtgccctctggtttccagccccctcccacattcaaggcaacatttaaacctctgggttcaagttccgttgtccaactgcgtggccgtgagatctgcggcaagccccttcctctctcggatcttccgtttccccctttgtaaagcagaacactccacaatctgatgtgtttacaacttgacatctactttttgcagcaagggaaactgaggcacagagcagggcggagatgtgtctacctctccctccccaagcaagactggcatggagtctattctcctgaccccacgccaaagccagggcgtttggtattttgttttttcttggaggcccagagaggggcagggcttgcctgaagccacacagcaccgggcaggcctcggaattgcggagagccctcccctgggcgcctgcccgggctcccgcgccttcctcctgcctcctttggctgggccgccagccttgcctcccgt

SEQ ID NO: 33917 - DNA, 980 bp, Artificial sequence
  DNA replication origin
aaagtttcttttttctttccacccggcccccgccggctccatggcctggctccgggccctcccgggcgctggtggacgcctcggtgtcctgcgggtcaggtcagcggccaccaccgccccggaaccgtccccagcatcgggctgttgggactggaggcccagtgctggcctcgccctcccccaggtctcgggcccgcctctggggacccctggggaccccggtgtcactctttgtgggtgtccggcctgggcagcgggtctggaggtccctggaggccgcagggcccctgctcggaggcctgcgcgtagggactcgccccgtgctggggacgctctgggaggccacgccgcccatgacatcatccctctggcggccattttctcgcctctcccttcccctgttccagatgtttctccggccttggcggccattttgtaggtctgggcggcgcaggctggcaccggcctcgggcacccggccctgccctcctgggtggggtgggggtggggggacaccaggagaaggtgacaagggagcctctggggcaccactgggccctgggccgcctcccccagcccctctgcagcctctgaggggttaaacacgtggtgccaacagcagggcggccttgccaagcgcccacccgcgcacggccacccagggctccccacgcctccgcgccccctccccattatctgccactcggcaccagccactccagggatgtgaggagcaaggttaaaaatacccgcacgcacaccctcacccccaccccctcccggtcccgccaatgtcaaatgtgtcaacgccacccggggtgggggggagtggactgaaaataactcgctgtttacatttggagcaaattcttggcttcccagcagccaagctgaggcctccccacacccccacccccaacaccttcctggcaggcctgactcggcggctgtgacgggggggggagaagggcaggcctcgg

SEQ ID NO: 33918 - DNA, 925 bp, Artificial sequence
  DNA replication origin
ggccggtgccagcctgcgccgcccagacctacaaaatggccgccaaggccggagaaacatctggaacaggggaagggagaggcgagaaaatggccgccagagggatgatgtcatgggcggcgtggcctcccagagcgtccccagcacggggcgagtccctacgcgcaggcctccgagcaggggccctgcggcctccagggacctccagacccgctgcccaggccggacacccacaaagagtgacaccggggtccccaggggtccccagaggcgggcccgagacctgggggagggcgaggccagcactgggcctccagtcccaacagcccgatgctggggacggttccggggcggtggtggccgctgacctgacccgcaggacaccgaggcgtccaccagcgcccgggagggcccggagccaggccatggagccggcgggggccgggtggaaagaaaaaagaaacttttctttgaaagtgattccgaagcaggttggctccggcccaggcggcccggcggcaggggagagggagatggaaagtatgggccagacttaaggaacgcaggaaggacgaggccggggaggcccgggatggaggccagcgtcctggaggtcaccccgtccacgcctctgcctctcgggcccccccaggtcacatccagattttcctccctgtccctggggcgggcggggagtgcggagaacatctatgggcttgtgttttttcctcttttgatttgtccagacaggcgatggacaagggctgggcaggggttttaggtcatctgcactgtcaggatgtggaggctcagagagggagagtgcttttagtgaggtcacacagcactggcaaaactgacagctgcttccctccttagagcatcttggggaggaggaagttctctatggaggatcagggtccgt

SEQ ID NO: 33919 - DNA, 1180 bp, Artificial sequence
  DNA replication origin
tcctctccccatatatcctctcttgtcttcttctctctgcttcatccctccctctctccttcttttctttctacaagtatttattgagcacccactctgcatcaggccccattctaagccctgagggcacaacagagatgtagacagacaaagcctctgccctggaggaggtgacattccactggggagatgagcagacacccgtgcagtcactaaacaactaagcaaatccataggcaatcactaacttcctctgaaggaaagaaaacagagggctgagactgagggtagccaggctgggcgcggtggctcatgcctgtaatcccagcactttgggaggccgaggcgggtgcatcacagggtcaggagatcgagaccatcctggctaccacggtgaaaccccatctctactaaaagtacaaaaaattacccgggtgtggtggtgggcgcctgtagtcccagctactcgggaggctgaggcaggagaatggcgtgaacctaggaggcggggatggcagtgagccgagattgcgccattgcactctagcctgggcgacagagcctgactctgtctcaaaaaaaaaaaaaaaaaaagattgagggtagccagaggctgcttatgctgaaggggtttagggtagacctctctgagaagggggcatttgagctgagaccaggggagatctggagagaacaagcgagcagttagttggctgtttagacagaggtaacagaatgtgcagcggccctgaggcaggactgggtctggtgcactggaggaacggcgaggaggtctgtgtggctgggagtggacgacggggagagagggaggaggggaggacagggcagggatgggacaggttgtgcagggccttgtgggccacagggaggacctgggcttttaccccaagagaggtgggagccgtggatggctgtgcgcagaggagggacgggccctgacttgggggctcacaggtgtcctctggccatagtgagaaggacaaatggtgggggccaagggcaggagctgggggctaggatggaagtgactgctctggtctaagtgaggttaattttcccacttcctatccctacaacatagaattacactgtcctacccatctattagacgccccatgagggctgggtgtggtggctcacacctatgatcccagcgctt

SEQ ID NO: 33920 - DNA, 1742 bp, Artificial sequence
  DNA replication origin
gacctcctcgccgttcctccagtgcaccagacccagtcctgcctcagggccgctgcacattctgttacctctgtctaaacagccaactaactgctcgcttgttctctccagatctcccctggtctcagctcaaatgcccccttctcagagaggtctaccctaaaccccttcagcataagcagcctctggctaccctcaatctttttttttttttttttttgagacagagtcaggctctgtcgcccaggctagagtgcaatggcgcaatctcggctcactgccatccccgcctcctaggttcacgccattctcctgcctcagcctcccgagtagctgggactacaggcgcccaccaccacacccgggtaattttttgtacttttagtagagatggggtttcaccgtggtagccaggatggtctcgatctcctgaccctgtgatgcacccgcctcggcctcccaaagtgctgggattacaggcatgagccaccgcgcccagcctggctaccctcagtctcagccctctgttttctttccttcagaggaagttagtgattgcctatggatttgcttagttgtttagtgactgcacgggtgtctgctcatctccccagtggaatgtcacctcctccagggcagaggctttgtctgtctacatctctgttgtgccctcagggcttagaatggggcctgatgcagagtgggtgctcaataaatacttgtagaaagaaaagaaggagagagggagggatgaagcagagagaagaagacaagagaggatatatggggagaggaaggaggagagatgaaaaagaaggaaggggccaagtgcggtggctcacgcctgtaatcccagcactttgggaggccaaggcaggtggatcacctgaggtcaggagttcgagaccagcctgaccaacatggtgaaaccgtctctactaaaaatacaaaaattagtcgggcatgttggcacacacctataatcccagctagtcgggaggctgaggcaggagaatcgcttgaacccaggaggcagaggttgtggtgagccgagattgtgcaccctgggcgacacagcgagactctgtcaaaaaaaaaaaaaaaaaagaagaagaagaaagaaggaaagaaagaaagaaaagaaagagagagagaaaaagaagggccgggtgcgggggcttacgcctgtaatcccagcactttgggggactgaggtgggtggatcacctgaggtcaggagtttgagactagcctgatcaacatggagaaaccctgtctctactgaatatacaaaaattagccaggcgtggaggcacatgcctgtaatcccagctacccgagaggctgaggcaggagaattgcttgaacccgggagacagaggttgcagtgagctgagatcgcgccattgcactctagcctgggcaacaagagtaaaaactccgtctcaaaaaaaaaaaaaagaaaagaaaagaaaaagaaggaaggggccagggcgcagtggcttacacctgtaatcccagtactttgggaggccgagtcaggtggatgacctgaggtcaggagttcaagaccagcctggccaacatggcgaaaccccatctgtactaggaggacacgggaggctgacgcaggagaattgcttgaacccaggaggaggcggaggttgcagtgagccgagatcacgccactgcactccagcctgggggatagagtgagactgtctcaaaaaaaaaaaaggaaa

SEQ ID NO: 33921 - DNA, 2227 bp, Artificial sequence
  DNA replication origin
aaaaaagtaacctcaagaaggaccccaatgagaagggatccggcatctcaggaccttctagaggggaagaggacaaacagggtccctacagacgagggattctatgacagatcccaggaagaggcgccctgttgatcagagtcactactgagtccatcctgcagctcggggaccccacagagatgtggcattcacggccggagggcaggagagtcaggcaggggacagtctctgccctccttcgccgcagcggaaccaaagagatccgagaacgcgaacccggaccgtacttccagccaagcgcagctcgggacgactacaattcccaggaggccccgcggctccaggccggcttcctgccccgcggcgcccgcgcagtggctgccggaagacgtagttcccgccacggtgactcagaccggaaggccggctccgcccccgccaccagccctacctccttccatgtcctccgtccagttgcggctgctactcgtgggcgagctgggcgaagtgtagtaatcgccgccagggctcgtgtccacgtcttcctccatcgagcccgatttgtgccgcttgctccttatgggcgagggaaggggagaggctggttaccagggagacgcggggcggggggcgcgacggcgggctttgctacttccggtccttaagtgagcgggggcgagggaggtagtatcgcgagacatcgcgggagccgcgggcgttcagcccgttccctacgaacgcctgttccaacctgtccattgcttggatgggacacccgggccagaggcagggagggtctcaacacaggtcggacaccaagctagcatggtggagaccaaaacccaggcagcctggctaatctcctggccacctgtagtcctcagaactgcctgttaggggtatgatcccattttatggatggggaaactggggcacacacagtgtgacctgctcgaggtcacaaagcatatctcagcaacaacctgtgtctgcattcttctgggtggggagggtcctaagggctggctgagccggcaggacttgaggctgggggagcccacggtgggctgtcagggctaggggaagaggcacgtggggctggctgggttttgaaggatgagatgagtaggagtttctcaggccaggtgaatcgtgaaaagaggtattccagggagaggaatgagtcagctcgggccagaggggatgggttgatgaatggggtcatgaaatgcccagaggtggggacctgggtacttacccactggaggaggtgctgggcagcgttcttctgaggccagtgctggctgggttcaggtcgtatgccaggtgcccctgcagctcccccagggagaagttgggtcctgttccagtcaccacgggtgctgcagagggtgacagaggagagtgaggcaggaagcagtgcccagtgctgcggtttgctttagagaggtagggaaagccactgggtgcagtccaaagggggacccccttcccatattggcccggttcctagggtggctgaaaccagttttattctatggatcagaggaccaaggccatggggagaggccaagagcacactgtgaggcagaggtgtagccaaagctggaggccaggctctgctgatctggacagggaaggtgtcagtcagggctaaagaaggacagcgcccaggactcgctggggtgggattcagacagtgtgtgacggaatgtgctgggtccccagcaggtcagcagagaaagcaaggggacaggaggggcggggtcctttggggtctcctgggacaggacagtggaggccccagggaggaggagggatgctggggcagaagtttccttagttgccatccagcatttagattctgtttcctggagaggtgggagggagccctgaccttgggctctgggaagggcctggccacctccctttctaggaaccttggcttagtgacacagggggttgtctggaaaggacaaggagtagggtgaggggggtgggctccttcctccctgcggccccctcccctctccaagacccagctcagggctgacgggaacactcactccgggacacttggatgagctcagtgacgctgaacacgccggaggtgacaaagctctcctggaagtcggtcgtgtctggaacaggaagacagcggggtcagtaggctgagctgggcctgtttcccttccccacactccagggctgcctggactcctgg

SEQ ID NO: 33922 - DNA, 1155 bp, Artificial sequence
  DNA replication origin
gcagaggatcatgggacgcagagtctcttgggggtccatggaatcctctaagacagaggattttacctatgggtgatcctgaccccagaggacactgggtgacatctggggacctgtgtggttgtcacgactgcagggtggtcctggcatggattgggtccagggacaccgcttagcaccctgcagtgctcaggatggccccaccctagagaatgatccggtcccaaatgtccacagggcccagaggagaccttggtgcactgtcaacgccccgtggtcactgctgtcctcatcagattcatgccctgcatcggggcctctgtccactccacacactctgtgtagggcccctcctgaccccggaccctagagacccagccagagtgggccttggccccctgggggagccggcatttcagtgggagatgggcttgtttgttgagcaaacaaatggctgctccgacggggtgatgagggccttttgtcaaatacaaagaggaggtcagatgggcgtgtgtgacaaatggctgctccgacggggtgatgagggccttttgtcaaatagaggaggtcagatgggcgtgtgtgacaaatggctgctccgtcggggtgatgagggccttttgtcaaatacagagaggaggtcagatgggcgtgtgtgttaaacagacaggaagaagctctgatgggggagccctcgggcctgcgtcctcctcacagtcaatattctcagatggggcattcaggatgccgggaggggcgtatggatgtgttccctgagaggaaagatggccactgagatgggcgggggacgcacatgcccgctggctgaacagggaggtcccacaggggtcccaggcatgcctgctgaacagacagaggatgcttggaggcggggtgcagagtcagtgtccgtagagcctgccgggagcgtgccggcttattctttctcgcggtgcctgagctgcgctcccccctccttcctgccctgccctggctgccgctggccccatctcaggaagctctagcggtgcctgcagggatgtggcggccgggggtggagtctgagccagactatttccatccaggacaagcggttctaggaaatcctcctaaatgagcgtctgacaaccctaacctcgttcccgccgtggc

SEQ ID NO: 33923 - DNA, 1214 bp, Artificial sequence
  DNA replication origin
cgcctggctaatttttgtatttttagtagagatggggtttcaccatgttggccaggctggtctcaaactcctgacctcagatgatccacccgcctcagcctcccaaagtgccgggattacaggtgtgagccactgtgcctggcctcattggcagcttctgatcctgcctgtccatcagtgtctggggttggaatggggggattagattgagacgggggtgaggggagtgaggtgaagttaggttgcagccttttgttatacaggggggaaactgaggcccaaagggactgagtccaacctctcagccgggctggaacaaggccctgggcgctctccactacggcacctctatggttttttgcccacctagaaggctacagcaataggactcatggtcagacatccagtgggacttccccggctgtgagaggcctgataggagggcccgccgcccctccccgccaggggcccgtggcgcttaccgctgtgcacggcgatgacgggccggtggtgctgggtgaagctggagaggcggggagagtcctggggggacgggctgttgaatggtgacttgtccatctctgtcttcttcaccggggacgagatgcctgtggaggggatgggacgagagagtcacaggctggtcacaccccatgagccctggaccttccccaaagccagcctccgaagggataggaagcctcatcaccccgcctcctcttaccccagaatcctgagggggagaggctgtgagcccattacacagaggagtaaacgaaggctcagagcagagaaggggctagccagggcggcacagccgggggatggagagctgggtatcaacacgtgcccctgggcctcgctcctggcccttgcctactctccttccagagaaatgggaaggctcagggctgccccatcacctgggagtcacccgagccctagagaaggtggcagggagggcagagacagtcagatccgaagtccagttagaccctgactggctaagggcgcacagacaagccccagctcagctctgccttccctcgtccacgcgggaggaaggaacggagcctccctggggctgaaatgaggtgcatcccccctctgcagtgacttgctggcatcactctgcagacaggggcctcactacctcccaggctgcctgggacaaaagcccccacagcccccaactcagcagctcagcccctcac

SEQ ID NO: 33924 - DNA, 1270 bp, Artificial sequence
  DNA replication origin
gtggtgatgcatgcctgtgatcccagctactcaggaggctgaggcacaagaatttcttgaacccgggaggcggaggctgcagtgagccaagattgtgccattgcactccagcctgggcaacagagcaagactccatctcaaaaaaaaacaaaacagaacaaacaaaaaatcaccttccatggttgccattgggattaaggggggtgaattgtaggaagcctcaaatattgcttaccaccccatgttctagtgatcaactatttagttctttacacagtcatgcacacagagaggcagtcccaaatcaaagcagccatttgggccaggggtcagcaaacgctggccccctggttgcctgttcttacgaataaagttttattggcaaacagccacgaccacgtctttgtatatgtcctgtggcagctctcaccctgtcttggcagggctgagtaattacagcagagaccacgtggccaaaagccaaaaatatttactatctggccagaggctgtggagatgagggagtgactgctataaatagtgaaaatactaaaaatcactgaactgtttagaaagaggaaaaggcaggcaccacaatagaatatgactcagccatgaaaacgcacgaggctctgacgcaggccaccttgaggacgtcatgctcagtaagagaagccagacaaaaaggccacacagcatgtgatctcatttctatgaaatgtccaggacagggccagccacagaggcaggaaggggatgtatgggtgctggggctgggggaggaggtgaggagtgacggctgatggagacggaatttctttatgtgctggaattaggccgggcacagtggctcatgcctgcaatcccagcactttgggaggctgaggtgggtggattgcttgagtccaggagtttgagaccagcttgggcaacatgatgaaaccccatctctactaaaaatacaaaaaattaaccaggcgtggtggcacacgccggcagtccgtgctactcaggccgaggcaggaggatcacctgaggtcaggaggtcaaggctgtagtgagccatgatcatgcccctgcactccagcctgggtgacaaagcgagattctatctcttaaaaaaaaaaaaaaaagatcactattcagccatttgcagaaagagcttgccaaccctagatttatagtgtagactgtggggccagatgggctgggttcaaattcccggtctgccatctgatgccgtgtggccccaggcaggtgacacatcccc

SEQ ID NO: 33925 - DNA, 992 bp, Artificial sequence
  DNA replication origin
cacctcagcctcctgagtagctgggactacaggcgcccgccaccatgcgtggctcatttttaagtattttttttgtagaaactgggtcacgctatgctgcccaggttggtcttgaactctgggcttatgcaatcctcccgccttggcctccgaaagcgctgggatcacaggcatgagccgctatgcccagtccctccctgccttgtgttaacatgagtacgactcacgcagttgctgggacctacgggtgctacccagaccccacagggtgcgacatgatgcgcccgaaaccctgacatccgaaagcatctcaattctgacccaatccagctgcctcccagcacgacagaggaggggacttcagagccaagtcctcaagacccttttaagcagaggttgtgccttcgtgtgagcacgtggcccccgggaggtcacctggagccgccaggagaggcccgaatgcgccccgcccaactcaccggtccaggttgctggctggctgggtcgcaggccagcgagacaagatctttgagcgggtcctgggggttgagatgaggtgggtagcggatggccgtgtgggggaagtaggtggaggccgtctggggtaggatggacgtcgtagggaaatgcagagcggaggacgggtgtgggctccgggcgatccctgcggagacagtgggaagcgggggttacttgggggctccagccggtctgctctgtgaccgtgtgactgtgtgtctgtgggtgtcattcctgccggcatctcagtgcgtttagtaacaataaccaccaaaaaaacccagcagcactgaccacattgacacccaaattccccgactcccacggcaaccccactggggctgtgatattatccttgtgttttaatttaattttttagttttgtagaggtgggggtcttgctatgttgcccaggcaggtctcgaactcctgggctcaagcgatcctccctcctaggcctcccaaagtgcggg

SEQ ID NO: 33926 - DNA, 1618 bp, Artificial sequence
  DNA replication origin
ggaaatgtttatgtaaaacgtcctgattttaaaatgataacaaccgattctctttctccacaaacaaaagaccagtctgggggtcgagtctggccctcgggccgccactgtgagatccgtgtccactgtcagctgcctgacataccagggagggtttctgacggcccacggcgggcaccggggtcccccaggtgactcggcgaaggggacagaccctggactctcaccctggcccgaggcttggtccggccagcccctaaggctgcctcagccctacatgggcccaaccacgtggccactgggctgttttccggagacccaccaaactcgccaggccctgcagggtcgggcctgacctctgacctggcagtggggctggggaggggacaggcccccctgcggacatccgccccaccagggcaccgcttcccgcgtgcttacaaggcgaggtcggcgacgtggctcctccctcggaggtggtggcgggtttggtggcaggggggagcgccagccgtggcagccccgggggcggaggtgccagcatctgagcagaaaggcagtggctgggcattttgagctgaccacttccatttaactgggggaacagagagacacgtggttaaggggtgggctccccctctacctcgggctgctggcgccggccgcccccggctctgtgcacggcccggacggggtggcaggctggggggccagggcgcgggtgtgaccatggcgggtttggtgggtctgaggacggccggaggtggaggggcctggggacacccgcttgctggtgtcactcaaagcccggcactactggggccacgctcactgcatctcctctgtaaaccccctgcacgccaactcgactgatttccttccaaacagtgccaccgcctcctaacagcaggttctccgcgtttttcctaattcactgcgagcacgccatcatccaccatcatccacggcctggcccgtggttccaaagtccgaaaagctctgaacatccaaagcttcctgtggagtctggcaaacgctgtcttgctcgaactgagtttggtggtttttttgtaatcaatgtcttcctgccccccgccccccaaccttttttttctttttgagacagggtctcgttctgtcacccaggctggggtgcagtggcacaatcacagctcacagcagcctcgacctcccaggttcaagcgatcctcccacctcagcctcctgagtagctgggactacaggcgcccgccaccatgcgtggctcatttttaagtattttttttgtagaaactgggtcacgctatgctgcccaggttggtcttgaactctgggcttatgcaatcctcccgccttggcctccgaaagcgctgggatcacaggcatgagccgctatgcccagtccctccctgccttgtgttaacatgagtacgactcacgcagttgctgggacctacgggtgctacccagaccccacagggtgcgacatgatgcgcccgaaaccctgacatccgaaagcatctcaattctgacccaatccagctgcctcccagcacgacagaggaggggacttcagagccaagtcctcaagacccttttaagcagaggttgtgccttc

SEQ ID NO: 33927 - DNA, 1290 bp, Artificial sequence
  DNA replication origin
gtctactgtatgccaggctctgggcataatcccaccgagccctgagtggatcctacgcagtatcctgcatctattaagtgtctactgtatgccaggcactgggcataatcccaccgagccctgagtggatcctacacagtatcctgcatctattaagtgtctactgtatgccaggctctgggcataatcccatcgagccctgagtggatcccacgcagtatcctgcatttattaagtgtctactgaataccaggctctgggcatgatcccactgagccctgactggatcctatgcagtcaacgctcccatttcacagatgagcaggcagggacagccggcaagaatgaccacagctgcctgacaccacgcagcatcaggcgccacatggaatgtcctctctgcctccctgacccatgtcaccggcttgtcccccactgccctgtgaattgggcaccaaggcaaacccactttgcagctgagaaaactgaggctcagagaggggaagacacctgcctgaggtcacacagtgagagagctgcagaggtgggattccagcccagggtggatttggggctgatctcctccagccagtgatcagaagccggtttttatgggcaggcagcctgggttctggcacgcagtggggacggggacaggaacgccggggcagggagaagaggagctgagggcacctagaaggaaccgtggccaccaactgcttgggtggggtggggggtctcatttggagagtgagggacagagatgctcaaaaaggggggtgaggggcagatggagtccatggggagaggtctctgggttcagagatgtctggcgccctgtgagggtgggtgacccacccaagcctgcatgggggtcgtggggagagtctgggggtagagccactgcggacgaatggggtggacctcaggacagggatgccaggaccgaggggccatccagcagccacccagaaccacatccagagagcagaaaaatctagaaggtgcagcagccgccaacccaggggcttccaggtcaggtggacaggcgaagagagtcccatctaaaggtgtggtccagcccaggtcacccaaaggaactgggcctggtgtagctcctttctccccaagaagccagaactctggaaatgtttatgtaaaacgtcctgattttaaaatgataacaaccgattctctttctccacaaacaaaagaccagtctgggggtcgagtctggccctcgggccgccactgtgagatccgtgtccactgtcagctgcctgacatacc

SEQ ID NO: 33928 - DNA, 1171 bp, Artificial sequence
  DNA replication origin
ggtggagggaaatttggcctcagggagaggccaggtgggggctcgaggcccaggtggggtgtgggaggctggcgcccctgtgccaggggtgtggcgtgggacccagcaggccctcttcgccctgagccccccgggccggcccctctgccctgcccctcccaccccaccagccggcctctcggcccctacctgtgcctgataaatgcccgcaggatcccttggtcctaatcccacaaaggaacggtttgcaggggacgtgtcgggcggagagtaggctgcagggaggagagagaccgagagcccgttagcgaggggttgtgggagccggggcggccctggccccagagagggtggccaccgccaggcgtcacacagccgggcctctgcacccagtgcctggggcctccgagcctgccgccctacccccagttgaaccgggcccccctgaaaggcccaaggtccttgggaggcggggatcctgactcgaggggcccgggggtcacggctgagatcgcccaggtgggcggggtgtctgctgagagggaaggcaggatggctctgtaattcacaaaaccgcccgtgaattattcagggtgggcagcgcccgcccggtcctgccactgagggctgcctccgcgcggggtgcatgaattattgagggcgttttatttattaatcttcctcccggagagggcagagggagggctgggtgtgtgcatacatacagatgtgcgtatttatatttcagcctcagcgattatattttgtcggcgtgtgagtaactcacggcctggggctacagcagggatgggggcctcagacaggccgggacccaggtagggggagaagaagctgcaacaggcagggtccccaagttgtcctggctggggttggggggagctggaggcagcgaggcttatggggagaagtaggagtagatttgcagttaagagccccggtgcagggaaaggggggtggaatccatgcctatcctgcatttattaagtgtgtactgtatgccaggcactgggcataatcccgttgagccctgagtggatactaagcagcatcctgcatctattaagtgtctactgtataccaggctctgggcataatcccaccgagccctgagtggatcctaagcagcatcctgcatctattaagtgtctac

SEQ ID NO: 33929 - DNA, 1373 bp, Artificial sequence
  DNA replication origin
gtgacccccgggcccctcgagtcaggatccccgcctcccaaggaccttgggcctttcaggggggcccggttcaactgggggtagggcggcaggctcggaggccccaggcactgggtgcagaggcccggctgtgtgacgcctggcggtggccaccctctctggggccagggccgccccggctcccacaacccctcgctaacgggctctcggtctctctcctccctgcagcctactctccgcccgacacgtcccctgcaaaccgttcctttgtgggattaggaccaagggatcctgcgggcatttatcaggcacaggtaggggccgagaggccggctggtggggtgggaggggcagggcagaggggccggcccggggggctcagggcgaagagggcctgctgggtcccacgccacacccctggcacaggggcgccagcctcccacaccccacctgggcctcgagcccccacctggcctctccctgaggccaaatttccctccaccttggtcctggggggatggggtgtggccccagactcagcctgtggggtccccaggagcgtctctggagaccatcgtggtacagctatgggaccagtgtcattaccacctgcttcccatggtatagatgggaaaactgaggcccagagagacaagggggtctgcccagggtcacacagtgcatcaccctccctcctccagcctccatcccccatccacgccgaggcctagagggaccgcggggtggccgggggaaactgaggcagcccatggcggggcgtggggcctcccaggacagcatccaagcccccaccccaggcttcagcccacatctaagccagtgtgaggagtcagggcggagaggcttcgtcagcaggacagacaggatggggcaggggccagcgttcatgttcacgttgatgttcatagtcacgtacatgttcagacggctgcagctgagtgagcatggccggggtcccaccacccctagaaggcaggcaggcaggcaggaggttgacagaggaggctcagagaggggaagtcaattgcctgaggctgcacagtagtctagggagtgggggcgtgggagggcagccttagccccaggcccaggtgtccctcaccccccacccccataaggggctctgtgtaggccaggagtgtgtgagcgcgtcttcgggttatgggtaagcagctggacctttgagcctctgctctctccccggtttgtgttggggagagggttggaggatgtaggagtggctgccacaggcccgggaggtccagactcagagagaaacgagctctgggctacccagcggccacggaactgcagagcgtggagatgtatggggtccccaggggccgtgttca

SEQ ID NO: 33930 - DNA, 2173 bp, Artificial sequence
  DNA replication origin
gggcagccttagccccaggcccaggtgtccctcaccccccacccccataaggggctctgtgtaggccaggagtgtgtgagcgcgtcttcgggttatgggtaagcagctggacctttgagcctctgctctctccccggtttgtgttggggagagggttggaggatgtaggagtggctgccacaggcccgggaggtccagactcagagagaaacgagctctgggctacccagcggccacggaactgcagagcgtggagatgtatggggtccccaggggccgtgttcaaatcttccagccactgagggaggtttcctgctgcagagcccacgggcaagggtcacggggcctccccgggaccctgcggggctgtcctggctgagcggatgggggcggggaggggacatggcattccccctccctccctgtgctgggtgcccaggatgcctgtaagcggcccctccctctcttcccaggctccgcaaaaccagccggaggaggaagcagggatggaggctgcttctcctgagttcagaggagatccatgtgctatgggtggagggaatcctgggtcaggggccagggctccagcccagtgctggctcacccactctgaacctctgtctcttcctctggccttgggcacccgcaccaagagcctttgaagggcactgggggacagaaagggcactgaaaggttcaggcttccccacaccccgtaaatattaagtaccctgccttgcacccatagagccccggagagggagtaacttggtcagggtcccccagcgagcagacgtccaggactcctcgctttgggatttgggccccctatggccaacctctcccccgcctggtgctgatggagcccggcattacctctgccacccccaccccacatcgctccctgcccctgcgggaggctgggaacgtcttaagtggttcagaaaccaaagctaataaaagctgcggtgggaggaggcccagcccgcttaacccttccccagcctctgccttggaccaaactctctgaccaggccctcccgccagggcccgggacccttctctcagactgtgctggctccagccccaccccacccaagcctgggagggaagggaaactgaggcaggcaagggtggcacctttctcagcatccctatcttgactggctggactcctctggggacccagaaagggtgggaccagggctggcagaatggggtgtgggggggcactggcaaggggctcagcataggcaatggtgtgggtcgggggagggggagctggctggaatgtgagagatctccggtggcaggggccagacagatgatgcgggctttgctctggggtagtggggagccatagaagggtttagagggagggagtggacacccaccaggcctgggagtcagaactttctggagcacagaaaggaggtgacacattgtcaagaggctctcaggggagcatgggttagggggaaggcgaggtccccaaactgggcatccagggagcacaggtctggggaggaccccattgctgctgccctgactggactaagagcacctgggttgaggccgggcgccgccacctccctgcagaccccggagagagggagggaagaagcagtgagatcccgctctcccctctcccagctcccgctcaaagggccctgagcttggaggcctctcatttccgattctggccagtcagcacttctgcctccgcctcctctattcctggcggattcgcttccctctgccccctcctcccccaaagcctgggtgggcgcgcctttccctctgcctctccggctcccgacaccccccagtccatggactctccccccatcaatatccctccccgtgatctatgctaattgatctcgccctggtcagttacccacccatcgccccatgtccgtccctatcaatccccccactgtgaggctgggtggctctgacgccctggcccctcccctctgtgatgtccttcacgcccctacatttctcctgcacgggaacccacgtaagcagctgggtaaaccgagggtggggggcaaggcgggcattgagccacatgccgggagccacacaggcggctgcagccaggccagcaggataccagagcccaaacctcccccttcacacctactgcctcagtctcccctcagct

SEQ ID NO: 33931 - DNA, 1013 bp, Artificial sequence
  DNA replication origin
gagacttctcctcccaaacgggcgggcgcgagggctgaaagagtccccagcgagacagcgagtcggccggcgctttgggaggggcttgtggggaggccccgcggcaggcagggccccctcgaggggcagcaggtgcctgggcctcacttcctcccctggccagggctcgcaagcgccacgcacccccgcgacaccactcgcctgccccaccctgcccgcctctgcggtctccgctgcccggccggggtccgctgtgtctccctttccccccagtggctgcgtcctcggtgggggctgaggggccggtccgtgtccggcagaggcgcgggggcccggggagaggtggccttgctgggtgtcgcgcctgtcggccctgggcacaggctccaggctgtgctcacctggtctccggacagagccagggcctccggggcgcgggcgggcggccggcgtctgtccttcccgagcagcaggcggagaggagatgaataacttaggaagacgccctgtcccgggtctcccgtgggggtggcggggcctggccctccagtcctgcggccttggcgtcccgagagttggaaacgttgcgtctttaccttttgtcttcttgcttgggtgggtttttatttcttcttcttcttcttctgcctttgttttttcttttcctcctgagtgtgtgcgtctatgtgttttgtctttttggccgggctgggagtcggcaggggtgttcttgttcactctaattttccaccgaaaacgtgggccgggggccggctgtgctgccccctgggattcctgggacgatggagaaggggcgagggaagaagacctttgctatcccagataccaggactgagtggcccagtggcgacagaaagagggagagagaaaaagggagagaagtcgaggggtcagactctgctgcagacatggtttacctcttcccacgctcaccccccacctcctgcaaccctgtgacctcagtttccccatcccaggctctaacaacctgc

SEQ ID NO: 33932 - DNA, 1027 bp, Artificial sequence
  DNA replication origin
cgagcagaacatgcagctatgtgtgtgcgctgatattgtttaaaggtaatacttattctcggaaggcaaggcacatcttgtggtagaaaatttcgtgcaaattaggaaacatggaatttttttaaaggtttttcttgtatctttttttttttttttttttttttaaagaggaagtggggggtggagggggcgaggaacagggagatagagccagggatagtctgccatgcatgtgtgtcagcgccgccagctgacctcgggagccaggtcgcaggagtccttgactaagcaccatgcaaagttaggtaaagagttggttctcgtcgcgccctgacccctctggagcccggctggcctccctcccccactccacgacccccaccctggctgagaagcttccggacaccccaatggcacaacccgaccaccccctcccccgcccgccctcccggagagcggcccacgctttgatccccaagggccaccgggggagcgggccccgaggacagacggacggagggaccaagggctcgaggccagaggatggcgaacctctcttgggggtgatgggggagggtcctgggtctttctctttaggagcgagcgggttcgccaagctcctgaggctagtttgggaggagagtctggttttcgggggcaggggggtgaggctaggagcaggtgagacccggagacctgccctggctttggcctgggtcgggggagggggcagtggtggggggagtttttccctaggcatggaggtcagttggggctgggctgggtgggccggggaggggtccttgtgtttgagctcggtggccctaaaacacctaacaccccctcccaggcctcccctaaagatggcgatcctggggtgggggtggaggtgtggatagggccagggagccggggtgggggggcacctggcgtccccagcttagtgtttttggagcggctcaacggaaaaacgcttagcagatgggaggccccctacacggctgcggggggccccaaggtgcgacgc

SEQ ID NO: 33933 - DNA, 1048 bp, Artificial sequence
  DNA replication origin
ggaagaaaacacgggatgagtgtatgatggtggctgtggagaccacccaaaatcccggggttgggggcaatagtgaatgaatgggaccatctgcgtgggtccctacacgagatgcttggaggggctggaggtggtgagggctgcaggaatggcctaaggttggagaatcccagccctgggtcctccctgcctggctgccccactaaccatctggctattgtcttagctttggtcaagtaaaaagcaaaggaagctggagttaaaaacaaaaagaaaagaaaaaaaaaaagaacaaaagaaaataaaatcaaggacaagacaacagcatgctcagccaccggaccacagcctgtgactcggtgccacctggctgtccctgtgccctgccggaccctcggctgggcctccaatggctgagccaggcccatgggtacagacagacagacagatattgcatatatcaggttttgtttttgtttcatacaggatacccttcatattcacagctggaagacagagacaggggatgggggacaaaggagaaggtgggagagaatgccacctggggtggtctctggataggggaaaagaggtcctttggcaagaagggtggggatgcacggggcaggggagagggggtgcctctgaggtgggtgtggaacagcatttgaccctgagccaggggtatgccagcctgcatgaaaagtggggagcggggagtctggctgcgggtggagtggccaccccatggttggaggacagcctgcagtgggtcggtgaatggtgtctgggggccggcccgtggcctagggaccaatcagagaggagagccctttcccagggccaagatgggccccggaggtctgtcctctgggcaagggattcagaaatgacccctctgggtacccaagagcagggttgggggtggtagaggctgagcaccagggggcacccctgaatacagcaggaggggagacaggaccaaggacagccaggggctgggtagacctgggggcaattgttttcagtggcttgatttttagcgtgg

SEQ ID NO: 33934 - DNA, 1048 bp, Artificial sequence
  DNA replication origin
caggtgtccccttgtccccctcctgtcctcgctgtcaagaggagaagtaggaggaggaggggagggtgggggacctgctggaaccttctccggattgggttcatgagcatttttgtgggtgtgtatgtgtgtgttatccagtgtgcggtaagcagaaagctagaaggagagtaaactatcctggtgatatcagtaaaatacaaaaaggaaacaacaacaaaaaaatctcaaagggaaaaggaaaggaaaagcaacaccacccaaagagtaaaggggagaaaaaagaaagaaaaaaaaaacccaaaggaaaatgttttgttttgtccctccctcctcccagctgcccccccaccccccactgtatgccctgccccatcctgtccccctggagcccttgcttgttctttctctgtgtgagaatgctcagggctgggtgggcaggaagctgggggcacaggctgggaccccaggacttgagggggctttggttttgggggggcctggctgggacccaagatgagaggatggggtgtggatgcagttgaggggccggggcagcctgtgtcccctttttggagggctctcttccagccaggagatgtgcgtggaaggctggggggtggtggcttgggggtgcatgacttcccctccggggcccatattcctattggatccccttcctccttcctgtctcaggtgtgagcaaagccttggggagggggctgccatggacgggggggtggggcaggagaatcccaaagccacaccagcagacatgtgaggcactgcttgggaaaagtctgttttggtatcactggcaacaagtcctgctggtactgctttgggtccgcctcctcaccttgccctgccgggaggtcaagggtggtggactgaccccacactctgtaccattgagcaatggatgggcagcggtgtcattttgaaggtgagactctcaggaagtgtctgacgtggcagaaatggggcaagatgggaggatgcggaggaagctggattgagagatgtatgtcccagcgccctccaaaga

SEQ ID NO: 33935 - DNA, 1675 bp, Artificial sequence
  DNA replication origin
gggatggatgggtggatggatggatggacataagccaaaggctccctgttgcctcttgggactcagtttactcctggcaaaggaggctgcttttgaggctgggtgcagtggctggacagatgatatggaggttcacactgcatatcatcattgcaactaagactcaactgctccatggatggatggataggtgggtaggtgtgtaaagaagttagggaatagatgggtagatgagtggacaggtgggtggatagtgggtgggtggatggatgatggatgggggtatggatgactggatgaacgggtggatggctaggtgggtgagtggttggaaggatggatggatgggtgggtgggtggatagatggatgatgaatggatgagtagacagatgaatgggtgggtgggtggatgggtgagtggatagttgagtgggtggacggatggtaggtggataggtgatggatggatggtgggtgaattgatgggtgggtgggtggataagtgaatgggtggatgaatggatggatgagtgggtggatgaattaatgaatgggtgggtgaacagatgggtgactgagttggcgaatgaatggatgagtgagtgtgtgggtgggcggatgatggctgggtgattgatggatggtggatggaaggatgatagatggatgggtggatggatgaatgaatgggttggtggatgaatggatggatgggtgggtggatggatgagtagataagtagttacatgaatggactgctgcatggaggttgaataaatgaattggaagataaatgaatacattgcaggaaggagagactgatggatcagtggatgggggtatgcagaatggagaatgggtggatgggagtatagatggatgtatagatcaatgaatgaatgtataggtggatggatggatgagtagataagcagttgggtgaattgatggttgcatggagggagggacagattaataagtagatgaatggatgaattggaggaagaagagaatgacataccaatggataggtagatggaggatgaatgagactgtaggtgggtggatggatcaatgagctaatggatagatagactgatggatggacagttggagagtgaagactgcatagttcgatggacgcataggtgggtgggtgcgtgtatcagtgagtggacagatcaatgggctaatgggtaggtggactgatggatgggtggttggagggtgaggactgcacgggcagactgatagatggatgtacaagtggatggttgggtggatggatggaggattgaacaaggcagaaaggaagctacaggtacaggtgcacaggtgggatccagatcccccagtacatcctgggagtaggaatcatattttactggggctgagccaggtcttagacaaagccaccactcaggtcctctccctcaggcacatcttggactcagctgagactctcccagccaggctggtcacctcccagctcccactctcctactcctgtccccaagcctttgcccaagacagagcccccagccctggatggatggatggatggatggatggaaggatggatggatggataaatgggtaggtggatggatggctgtgtgggtggatgaatgagtgaatagatgggtgatggatggataggtgatggatggatg

SEQ ID NO: 33936 - DNA, 1076 bp, Artificial sequence
  DNA replication origin
agatgggtgggtggatggatggtgaatggatggctgatggatagatgggtgggtagatggatgggtgtgtgaacagatgagtgggtgggtggatgggtgagtgggtggatggattggtgaatggataggtcggggggtgggtgagtgaatagatgggtgatggatggatggatggatggatggatggatggatcatggatggtcggtggatggatggtgggtgggtggatgggtaggtgatgaatggatgggggtgggtgatggatggatgagtgatgaatggatgggtgagtgggtggacgggttggtgaatggatgggttgggggatgggtgagtggatggatggatggatggatggatggatggatggatgatagacagatggtgggtggatggatggtgggtgggtggatgggtaggtgatgggtggatgggtgatgaatggatggggggtgatgaatggatgggtgagtgggtggataagtggtaggtgaatagatgggtgggtgggcagctgggtgagtgaacagatgggtgatgaatggatgatggatggatggatgatggatggatggatggtgggtgatggatggatgggtgagtgggtagatgggtgagtgggtggatgggtgagtgggtgaatgggtgatggatgggtgagtgggtggatgggtgagtgggtggataggtgagtgggtgaatgggtgagtgggtggatgggtgagtgggtggatgggtgggtgatggatggatggatggtgggtgatggatggatggtgggtgatggatggatgggtgagtgggtgaatgggtgagtgggtggatgggtgagtgggtgaatgggtgagtgggtggatgagtggatgatggatggatggatggtgggtgagtgggtgaatgggtgagtggatgaatgggtgagtgggtggatgagtgggtgatgggtggatggaagatggaggtctgcatccctgagtcctctgtgggaatcctcaggttgggaggcagtcagagccataggaggcactgagtccaggtgggtcgcccatacctaggccttgtacagacacctaca

SEQ ID NO: 33937 - DNA, 2860 bp, Artificial sequence
  DNA replication origin
tggatgggtgagtgggtggatgggtgggtgatggatggatggatggtgggtgatggatggatggtgggtgatggatggatgggtgagtgggtgaatgggtgagtgggtggatgggtgagtgggtgaatgggtgagtgggtggatgagtggatgatggatggatggatggtgggtgagtgggtgaatgggtgagtggatgaatgggtgagtgggtggatgagtgggtgatgggtggatggaagatggaggtctgcatccctgagtcctctgtgggaatcctcaggttgggaggcagtcagagccataggaggcactgagtccaggtgggtcgcccatacctaggccttgtacagacacctacacaatcctacaccacagtcttcttcaacaggtatttattaagcacctcctgtgttccaggcccaatgctgggtatgaggacacagccaggacaaaagctaagttgcctacacaactggaaggcaccacgtaatgtctcaaaattagtgaacaactaagacagctccactggtgataagcatgaatcagacttggggctggggacagtgtcaggaaggctggtggccaggctggaaacccctgactagggactggaggaggagaaggagctgccagaagatacaggaaaggtgaagatcccagggcaggaatgtgtttgaaggattcaggacagcaaggtcatctgcgcacacccattcccccaccccgaggaggggttcacacagacccccagcatccgcacgcatagtacctctggtcctggtataggttggactccattctgaacgtggtctcctcctcgtcctcagccctgcagagataaagggaaaggtggaagggggcgggagaggagaaagggggcggtaaagggaaggaagcggtgtgacagcctcagcctctgtcccaacctcccagccggggctcatgaaccccaggacgcaaggaagggctgggctgcctggctcgttgtcttggggagacgggcgggtgcaagcccgggatctgggctctgagagtagaggttggaggagcagcagggaaatgggagaccttcggactttgaggctggtgatgggggtaccagagagggttgggaagctgggggtgggggcagggctgtgggggcagcggggtgggggcgggcacccacctggccttggaacaccagaggcggttggccagcaagaccaaatagacgatgaacaggaagccgactaccgcagccaggcccaccagccacggcttcaggcgatgctccgtggctgcaggaagttggggaggttcgactcagaggaagaaaaggtcagaagacccccttcccccaccaccctagcaaggagagagagaaggtcactgggggtgctccgacagagggggtattggaaagggacggagcttcagagacctggatggcgtaggggggtcgggagggtttagagagggggagggtaccttaccagagtgggagggagcctgggggcccagagaggggaggggcttataaaagaaggggggcttagaggggacggagtttacaaatcaggagggctcagaaggggcggggcttataatgcaggcagaggctcagggggaggggcttataaaggcggacctcagaagggcggggcttatgacaaaggagtggctcaggggtggggtttataaaggagaacaagctcaggggaggggcttatgaaggaggaggtggctcagatggggagggcttataaagaagagtctggggggttggggcttacaacagaggagctgttggggggagcttataaaaggaggcagaggcttagagggaggggcttataaaggaggagctcagaggggaggtgcttataaggggagagggtctcagagtgggaggggcttataaaggcggcagaggctcaggaggaggggcttataaagaaggaggagctcagaggggaggggcttacaacagacgaggggctcagggaggggtctataaaggatgagtgagaaggaggggcttacagaggaggaagaggctcagatggggaggggcttgtgaactagggggctcagagtgggaggggcttgtagaggaggcagaggctcagggggaggggcttataaagaaggaggagctcagaggggaggggcttacagaggaggagggactcggggaggggtttataaaggagggagagtgagaaggaggtgcttacaaaggaggaaggggctcggatggggagaggcttgtgaactagggggctcagagggagaggggcttatagaggaggcagaggctcagggggaggggcttataaagaaggaggagcccagaggggaggggcttacagaggaggaggggctcggggaggggtttataaaggaggaggagtgagaaggagcggttcacaaaagaggcggggactcagatggggaggggcttgtaaaggaggcccgagctcagagtggggccgagctcaaggcggggggttcagccaggtgtgctcagaagggctggagaggggaaaggctcgggtgggcggtggggggtcccttacagaggagggcagagcccagcgagagggaggccgggcggtactgcgggggttgagaagggcctccaagccactcttccttttcttcctgccccctctcctttttctcgccatggaaaattgggagatggtgatcacctgaccaactcccctatcccgcgacgccccctcccgcccccctgcacctaccctgctgggcctccaccggggagaggagcagaaactccagcaccagaagggcccccagggtctccatgacggtcgagtgagccagcagccagccagcggcggtcccgggt

SEQ ID NO: 33938 - DNA, 1209 bp, Artificial sequence
  DNA replication origin
aaatggtgccggtctcattgtgcccaggaaagtcaaggtcacgcagcaggtctgacctgggatttgaagccgggtctgcctcgcccccagcttatcctgcctcgcccaggctcttggcccctgaggacccacaagcagccatgggagcacacagggacagggaaggtgtgcagaggccacatgcccgtggtccacctgcaaaccgggacgctctcacgtggggatgcccgggagcgttgatgactcaggctccaggctctcctgtcctcaaccttggtccctcggctgattagatagtgggccctgcccgggcgaagggggaccccgccccagctgacacgggagcagccatggcccagacgagtggtaggaaggcccggcgtcatcgcacaggtgtttatggagcgcctgctgagtcgctgtcacttcctctcttccggaggtctgcggatgaccgctgagcagaccggccactcagcaggatggggctcacacatcccagccccaggatggccacaggtctgcttgaaccagccaggcaggcatctattaaactctgactgtgtatcccgtcttgtgcagggcttggaagagaaggaggccttggtgctgtctgggagctctcgatctgattaggaagtcaggaccaccccccagagacaagcaaacccagcagccgaggcgggggctggagaagatttggaggtaggggagcccagcagagggggtgggggcaggacccgccttggagatcctgccctccaaagtcagtcagttgtctgggctttttctgagaaaagcactctgtgctctgagaccttggcgaagccacttcatcactgcgtgcctcggtttccccatctgttaagtgggggcgatcagtcctacctcggaggattaaatgagatactgcatagaaaaagcctgctctgcacagcagcaggtacacgctaagcactcggtaaggttggccgataatattacaacgttttaaatcgccctagtgtttctaattcacagtttgctgacggcttggctgaggctgagccgggcaggctctgcgtatgtgaaagtcgccagcgtccaacccccggaacctgccggctgggaaggagaaagccgtccgctgcgaccgggcagctcagggtttgcagaaagggctccggcgcgcgtaagttctgtctacacgaccgccaaagcgtccggaac

SEQ ID NO: 33939 - DNA, 753 bp, Artificial sequence
  DNA replication origin
cccccgccggcgtcctcctcgccctgccaggccagggccagctgcaggtccagcccctccaagtcctcgccggtcaggctggggcgcagctcccggggtgcggcctcctggtctggcttcgggccaaacgcccagtctgcggcaagggagctggtgaggcaactccccggccccggccaccctcctctgtcccctcctcagctaggagaagcactaggatcccctgaccacccacccagggtgacccagcatcggccccagctgggtttcggtgggggcagctcaccggccaggtcgtgggcgaggtctttgatgaggtgcccgacgatggcgtaggcgacggccaccaccaccagcgcggccagcagcaggtacagcacgtacctgggcaggcggatgctgtccaggggcggcggccggtactcctcgtacagcggcggggacgggctccagccctcggcctccccctcggccgccagccccggcatggtgtccgcccggcacaggggaggcccggaggtgacccacacagcggaagtattaaggggctttgagctaagaggattgggcggctgccccacggccaccatctgcctgggttaatcacattgtaaatcacttccgcccacccgcaacctacctgctcagctccagccacgactctgcccagccgtccccacctcggggcctccgcacctgcgcttccttctcccaggaacgccctgcccagatttcctcatggccggctcactc

SEQ ID NO: 33940 - DNA, 1116 bp, Artificial sequence
  DNA replication origin
atagcgaaactccgtaacaaaaaaaaaaaaaaaaaagaaagaccaaaacctgacattccagggagggagatggatgctaagaaagaaacataaccttagagtaaatgatatattaggttagaaagggaggtgtggctgggcgccgtggctcacgcctatagtcccagcactttgggaggctgaggcaagaggatcacttgatccagaagttcaagatctctctgggcaacatagcaagactgcatctctacaaaaactttaaaaactagccaggcgtggtgagtgcctgtagtcccagctactcaggaggctgaggtgggaggattgcttgagcccaggagttcaaggctgcagtgagctatgattgcacccctgtactacaacctgggtgacagagtgagactatctcaagaaaaaaaaaaaattgggctgccaaggcatcactgaggaggtgacatttgagcaaagacctggaggaaaaagggaaccagccatgggagatccaggggaaagagagttccaagcagagggcacagcccctgcaaaggccctggggcaggactgtgcctggcgtgttggaggaacagtgaggaggccagtgtggctggagcagagtgagccgggggagtgggggggaggggaggatggggagctgtcagggcaggtcctgcagggccgtgtagactgtgaggaagacttcggcctagaccctgaggaatgtgggagccatggagggctgtgggcagaggagggatgggtccggacccaggtgctcacaggtgccccctggtggctgctttggggagaacggactatgggggccagaggaggagccaggaggggactgagctggtcctagtggaaggaaagtaggcagatttgagatggacattttttttttttttttttttttttgagacagggccttgctctgtcacccaagctggagtgcagtggtgcagtggtgggatcttggctcactgcagccttgactgcccaggctcaagcgatcctcctgcctcagcctcctgagtagctgggactacaggtctgtgcccccacacctacctaattttctgtatttttttttataggaacagggtctcactatgttgc

SEQ ID NO: 33941 - DNA, 1286 bp, Artificial sequence
  DNA replication origin
gaggaagacttcggcctagaccctgaggaatgtgggagccatggagggctgtgggcagaggagggatgggtccggacccaggtgctcacaggtgccccctggtggctgctttggggagaacggactatgggggccagaggaggagccaggaggggactgagctggtcctagtggaaggaaagtaggcagatttgagatggacattttttttttttttttttttttttgagacagggccttgctctgtcacccaagctggagtgcagtggtgcagtggtgggatcttggctcactgcagccttgactgcccaggctcaagcgatcctcctgcctcagcctcctgagtagctgggactacaggtctgtgcccccacacctacctaattttctgtatttttttttataggaacagggtctcactatgttgcccaggctgctctttaactcctgggctcaagcgatcctcctgcctcagcctcacaaagtgctgggattacaggcatgtgccaccgcacccagccttgggatcgatttttcattaaaaaaatctgtttttagactaaatgcctgcaatgatggtgttgccatttcctgagttaggaacattgcagaggagaaacctggggagaaacacaaggaattccaagtagccaggggccagggaagccaggacaaggcagtaggaggtggtggtgaggaagacctgggttcaaatcccagctctgcccgtcacagcatgaccttggctctccagggttccctggcttctctctacaatggggtgggtaaagtttcctggggtgttgggaggaggaaattcaacaatgtgtagaagtgtgagccttcccgggcgggcgtggtggctcacgcctgtaatcccagcactttgggaggctgaggaacgctgatcatgaggtcaggagttcaagaccagcctgaccaacatggtgaaaccccatctctactaaaaatacaaaaattagccaggcgtggtgacatgtgcctataatcccagctactcgggaggctaaggcaggagaatcgcttgaacccgggaggcggaggttgcagtgagccgagatcccgccactacactccagcctgggcaacagagcgaaactccatctcaaaaacaaacaaacaaaaaaaagtgtgacccttgccaggtggtggctcatgtctgtagtcccagggacttgagaggctgaggcaggaagattgcttaagcccaggagctggaggctggagtgagctaagattgtgccactgtactccagcctaggtga

SEQ ID NO: 33942 - DNA, 1613 bp, Artificial sequence
  DNA replication origin
aggtagaacaccccaggttgggcgtggtggctcacgcctgtcgtcccagcactttgggaggccgggatgggaagatcgccaggactttgtgacctgcctgggcaagatagcaagaccccatgtcttcgaaaagacagagctccccttcccacccctcctggccccagcgagtgtccctctcccctgcaggtctgcactgtgggagcgccctcttccgccacgaggtcggctacgtcctgggacagctgcagcacgaggcggcggtgccccagctggcggccgccctggcccgatgcaccgagaaccccatggtgcggcacgagtgcgcggaggccctgggcgccattgcccggcccgcctgcctggccgcgctgcaggctcacgcggacgacccagagcgcgtggtgcgtgagagctgcgaggtggctctggacatgtatgagcacgagaccgggcgggccttccagtacgcggacggcctggagcagctgcgcggggccccctcctagggccccaccctcacccggagctcccggaggactcttgagggccgctcctcccccgcagagctttggcgtctaaaccgggtgtgtgtaaatcggtgtcatcgcttgtgtcttgctgggcgcatggttgctgtccccctcctccgtctgggaccgaggagctgccgttgtgctgtgactccctgagtcccctgactgctcctcggggcctggcgcagggctgtagcgtggaagtttccaggcttggggtgggactctgcgggaggctctgggatgcccggctcaggacaggggaggattgcgagggaagccaggggaggatcgcgagggaagccaggggaggatcgcgagggaagccaggggaggatcgcgagggaagccaggggaggatcgcgagggaagccaagggaggatcgcgaggggagccaggggaggatcgcgagggaagccaggggcagagctggggctctgggaagaggctgacgttatggtggcttcagcttcactaggaatgggacacagggtctgggggcctctgactcccccaccccgaggcctgggtagggacagggtggtggtccctgagtgggtcaggtagggcacaggggccagggagggacaagcagacctcagagcgctgcccagatggaatattaaattatttttgccaagcactgactcctctgagtgtgttgggtgaggggagcgtgggagggagggaggggtgggggctttcagggaacgttccccgagagtgtgtggcgtctgggcggggagacggttgtatccgcagccattggctctaggatctgtcctgctgctgacactgagccaccaccagcgacaggcaggcctgcacctgttttatgtgcggttacctggtcagatctgcccagccagctccctccaagtgggctctggggaaacagccctccagcctggcccttcccggacccccgtcttcccccagctcctgttgtgggtgcagtggaaggggttctgtggtccagctgagagcccagacatggcttcctccgccggctcccgcagcccttccatgtgtggctggggacagcccacttacctctctgtaaaataggcatagcg

SEQ ID NO: 33943 - DNA, 970 bp, Artificial sequence
  DNA replication origin
cagggagtcacagcacaacggcagctcctcggtcccagacggaggagggggacagcaaccatgcgcccagcaagacacaagcgatgacaccgatttacacacacccggtttagacgccaaagctctgcgggggaggagcggccctcaagagtcctccgggagctccgggtgagggtggggccctaggagggggccccgcgcagctgctccaggccgtccgcgtactggaaggcccgcccggtctcgtgctcatacatgtccagagccacctcgcagctctcacgcaccacgcgctctgggtcgtccgcgtgagcctgcagcgcggccaggcaggcgggccgggcaatggcgcccagggcctccgcgcactcgtgccgcaccatggggttctcggtgcatcgggccagggcggccgccagctggggcaccgccgcctcgtgctgcagctgtcccaggacgtagccgacctcgtggcggaagagggcgctcccacagtgcagacctgcaggggagagggacactcgctggggccaggaggggtgggaaggggagctctgtcttttcgaagacatggggtcttgctatcttgcccaggcaggtcacaaagtcctggcgatcttcccatcccggcctcccaaagtgctgggacgacaggcgtgagccaccacgcccaacctggggtgttctaccttgaagacacccctgcccccagccccagtgattagggatgcccgggggaactgaccgcagctatgggggcgggaaaagctgggagctatggggaccaagagggacgcttgcacgggttcttaagaggccccatgggaaatgcttggggccaggcccgggatgccgttcccgggggcaggccgcggccccactgcacagatgccatcactgaacctcacagcgaggcactgcccaggaccccaccccagaagcccctcctcaccctcggccagcgccaggg

SEQ ID NO: 33944 - DNA, 1248 bp, Artificial sequence
  DNA replication origin
ccccagccccagtgattagggatgcccgggggaactgaccgcagctatgggggcgggaaaagctgggagctatggggaccaagagggacgcttgcacgggttcttaagaggccccatgggaaatgcttggggccaggcccgggatgccgttcccgggggcaggccgcggccccactgcacagatgccatcactgaacctcacagcgaggcactgcccaggaccccaccccagaagcccctcctcaccctcggccagcgccagggcggcctcctcgcctcccgcgttgcgcagggcgaacatggcgcggtatcgctcgaagagcggccgggactcatccagcagcgcctcccgcaggcgccccacgtcacgctcctcagccggcggggcagggtccacggagaggtagggtcccgccgccggctccccgccgtgctgctgcagccactccagcctgcgcacggccagctggcaggtctcggccacctgcggggagggggtatcaggcagcgggttggccctggggggtcgcaggggcccttccccaccccccgggatggcagcttagcaggggagagagacactggcagggtgactaacccatcattccaggcaggaagtaagccagcaggggtggctgacttgtgagtgaccgggggactggagggctggggagggcctcagggaggaggtgatgtggaggcagagacctaagccagcttagggagggaatcaggtggagacccggggatggggaagcagcggtggaaaggccctgaggcaggaccctgcgggaggggtgagggccaaaggaacatgtgcggccccacctgaccaggtaaggcctgcgggccactgtaagggcttgggattttgtcctaaaggtgatgagatatcgtgagagctttaagcatggaacagaacagcagaattgagtgtcacacgtacccccggctgccccggaggaggagagactgagggtcggggtgggatgtggacaagaagtggcaggggagaaaggaacatgcatgtccgtggcggcataactcataacagctaaaaagcagagacaattcaagcatccagccacagtgagtggacacagcatgggccgtccacaccacggaacgtgactcagccacaaaaaggaatgacgggccggccgaagcggctcatgcccctaatcccagcagttagggagaccaaggcaggaggatcgcttgagcccaggagttcaacaccagcctggg

SEQ ID NO: 33945 - DNA, 1540 bp, Artificial sequence
  DNA replication origin
caggggagaaaggaacatgcatgtccgtggcggcataactcataacagctaaaaagcagagacaattcaagcatccagccacagtgagtggacacagcatgggccgtccacaccacggaacgtgactcagccacaaaaaggaatgacgggccggccgaagcggctcatgcccctaatcccagcagttagggagaccaaggcaggaggatcgcttgagcccaggagttcaacaccagcctgggcgacagagcgggacttcatctctataaagaaaaaactaataaaataaaaatttgtttcatttttgggccaggcgcggtggctcacgcctgtaatcccagcactttggaggccaaggcgggtggatcacgaggtcaggagatcgagaccatcctggctaacatggtgaaaccccgtctctactaaaaatacgaaaagatttgctgagcgtggtggcaggcgcctgtagtcccagctactctggaggctgaggcaggagaatagcatgaacctgggaagcagagcttgcagtgagccgagatcgcgcccactgcactccagcctgggcgacagagcgagacaccgtctcaaaaaaaaaaaagaagaaatgttggaaggtagcaggagatctctgaagaggtctggtgggccaggacaaggtatcagaggtagagggcactgggtgggttcagaggggtcttggcagagggactggacgtgggggttcagagaaagggggtcaggccggctcaggggctcaaggcccgggatggaagcgggtgagcaaagctggttgtcgccgttttgccaaatggggcgcagcaagtgtctgtccagattgtcgccctcgccttcctcatccctggggcatccttggccaagtggtcgccctggcaaccagagatggggagggtctgaggctgctccaggtcagggctggggcagggctgggcagggcttcccagggacccgagactggcagggagacaagcaggggcctggttacctcgatgacggggtccgaggaatactgcttcaggatctccagaacttccgggtccccgatggcccccagggcctcccctgggaagaagcagccggagagctcatgttggtggggtggatgtgtggaaaatgcccggctacctctgggaccggaggacacccctcccagggctctgccactgtggggaagccccgcctctgtccacggctgattggagcagcagtcggtacaggctccccgctggaccaatcagcatcccctccccagagcaaggcactgcctggaaccgcacctggctgccgctcagagcaaaatggaccccatcccggcccgtaccatgagacagggagacaagtatatccctacaactcgggatcacagctgacaagcagctccaagaacccaggaggtcgggggtgcagtgagctatgatcacaccactgtactccagcatgggcgacagagtgagaccctgtctcaaaaaaacaaacaaaaaaaattcccaaaacaggccgggcctgccggctggagact

SEQ ID NO: 33946 - DNA, 982 bp, Artificial sequence
  DNA replication origin
ttttaaaaaccattctttgctcgtataaaaacaagcgacaagccatagatccccaatccctaatgtatattagatttactccactcattggacacacatttagtgagcacctactgtatgccaggctctgtcatgtagtaagagacaaaacagtgacaatacagatacaagccgggcatcgtggctcacgcgtgtggtcccaactactcaggaggctgaggcaggaggattacttgagccagggaggttgaggctgcagttagccatgatcatgccactgcactccagcttgggcaacagagtgagaccctgtctcaaaaaaatggactgttcaggtcgggtgcattggctcacgcctgtaatcccagcactttgggaggctgaggcgggtggatcacctgaggtcaggagttcaagactagcctggccaacatggtgaaaccccgtctcaactaaaaatacaaaaaaaagtagctgggcgtggtggccggcgcctgtaatcccagctactttgggaggctgaggcaggagaatcacttgaacccaggaggcggagttttcagtgagtggagatcgcgccattgtactctagcctgggtcacaagagcgaagctctaaaaaaaaaaaaaaaatggactgttgtagcgagggacctagacagcgaaggagaccagtgaggcaggtagttggtgcgtctgtgccactgggactgtgtttctgtaaccagtgagctcatttgcaattagcgcgtgggaggtgcctgacacagagcctgtgttggcgcatacgggacttttcccggcagagggagcctgccaggcaggtgcacaaacgcaaaccgcaaccttcaggaaaggcaaaagccaccagctcagctgcctcacaggcagggcccttgagctcgattctgagaaaattcaaggaacatctgcacccagggctctacggggagccgccgccagccttgctccgacctgggctt

SEQ ID NO: 33947 - DNA, 1811 bp, Artificial sequence
  DNA replication origin
cgccgcctagggcccggggggcgggtccccgaccccggccgcctcacctggctcgctcccgtggctcgctggctcccgccgaccccgcctctcctggcaccgcacagcgcccgcctccggcctccgcagctcccgcaggcccggccgcggccgccgctgacgggatcccgggctccgcggtccctaatatggcggcggtcgctcctccgctgcctcccggctccctccctccgccgcgcgcgcccggccggccgcgcgcacccccgcaacccgaccacgcccccacgccgcgcgcggctaatcgcggccacgccccccgcctaccccacacaccgccaggccctgcccaacacccagccaggccctgcccactccgagtggctgcgcctgcgcgcgttgggcatctcgggaggacgtgacgtctcccgcgattcaaatcaatacaggaagcgcggctccacgcgttgcccagggcaaccgcggccggaagaggacccgcggggtgctagacgttgcagaaatggctctggtagatggagggcgtggttcccactggggacagtcgcggaatggggcgccccagggcagacccttcctagggtagatcgaagccaggcacacctcagtgcggcattgacgtcgcgcctaatgagcgcagatgggacccaacaccaggtgcgtgtcccgaacgtacaaacgtcactgctgagagtcattaatttattcaacaaacctgcattgcgctcctaagtgctgctcctccaggccccagtgagacagcagggaacaaaacaggtttttaggccaggtgcggtggctcaagcctgtaatcccggcactttgggaggccgaggcgggcggatcacctgaggtacggagttaatcccagctactcgggaggttgaggcagaagaatcccttgaacccaggaggcagaggttgcaatgagccgagattgcgccactgcacttcagccagggtgacagagcaacactacgtcttgaaaaaaaaaacaaaaaacaggtttttaaaaaaattatgggccgggcgcggtggctcacgcctgtaatcacagcactttgggaggtggaggtgggtggatcacctgaggtcaggagttcgagaccagcctggccaacatagtgaaaccccgtctctactaaaaatacgaaaaattagccaagcatcgtggcaggcgcctgtaatcccagctactggggagactgaggcaggagaattgcttgaacccgggaggcaaaggttgcagtgagccaagatcgcaccattgtactccagcctaggcaacagggcaagactcagtctcaaaaaaaaaaaaaaaaaaaaaaaggttaaacatagaattgccacatgacacagcagtaacactcctaggtatctacccaagagaaacaaacatgtaacatccacgcaaaaactcacacacctatgtgcatagcagctttattcataacatccacaaagtgcacacaacccaaatgtacatccacagatgaagggaaaatgctccattcatacaatgacacggtgttttgcaatatgaggcaatgaggctcggacacaggctacagattggatgaacctcgaaagcatcatgcccagtgaaagaagccagatacaaaagaccacatagtgagtgattccattgatacgaaatgtccagataagcaaatccatagagacaggaagtggattagtggttgccaagggctgggagagggggatcaggagtgactggaatggactttattttggggggttgatggatatgttctaaaattgatgtgatggcc

SEQ ID NO: 33948 - DNA, 1512 bp, Artificial sequence
  DNA replication origin
gcaaactggcgggtaccaccttgccaagatacccctccccagtaaagcaccgggcttgcctttgagtaagtgtctgctcccttagcaaaaccctctgcaacccaactccgctcgctgctcaaggcgccgggcagcggccagtggccagcacacctgcctccacttgggattccgaaggaaatgacaatcgggtgtcgccaaaacacacgggcccctgacacaggaggaggcccacgcggaattccgcatgacagacggcccccgacacatccactccggggaccaaacctaggtgatgccgtcagcttctatccccacccccaccccgagagagaccactccgccttcacttcaaagtccccgcaggctgccctcatgctggtggtgtgtgtccttggtggatggttttcccttaggtaaatcaccctccttcaaagcacataggttggggtgggggcctcaccacggagaggcatgaggtcatcgcccggtagactggggcggggcgggggaatcggaaccagagagacgccctgaaccagaggatgagtttggggtggagaaaacaggggaaaagacaaaacagatttaggctgaacatctgcatatcgggggtctcaggacgtggggtggagacaggtctggacggtggaagagggggagggggtgtcacaggtttgagtaggggtaaaacggctctgaatggggggcacactccatattctggggatccgagatggccaggcttgcgtttggagaagacacggggcaggacgcaggacggaggttcagttcggaggagggaggggcttgtgcacggatagctcgtctgaggctttggtgggagagctggatttcgggggaatgggggctggtagggggcacgctgggagggtgggggagcagaaatcagcgagatgaggtgagacggggacatccatgcactcaacccgtgcctgcggggactggtggacacaacagtgaccacagacacaggtttccgggtgtcccgggctgggactgcattttactggggcgaggggctggttgcggcctgggcgagccatcgcacaccacaggctcagcgatggggggcggcttcgtgtgggcaggacccaagctgggagggtctgaactgggaagtcccggggatgacaggccagggagaaatcacccgggttaggaggcggggtctgctgttctaggggtgcgcagtggggtcccctggttgggggtgcagggctcagcctattttaaaaagaatggtggacgctgacggcggctgcggggaggtcacgacttacaggtggctcggggtgggggtcacggcaggccccgacgtgggggggacgctgggatttgggtgttaactcgggagacgcggatgctgaggtcacccgggcctagttcggcctgggaggcggcattcgaggggactgggggctcctggaggggcctgagctggggtgggggtcgcagcccgccccgccgtcccggttttggggggtcgca

SEQ ID NO: 33949 - DNA, 1503 bp, Artificial sequence
  DNA replication origin
gggggcggagtcacccaggtggggaatgcatggatgagggggatcctgagggggatccttaagtggaagagttgctctccagggcaaacagaccagcactggcctcccacactcctcagccctccggtgaaagcagacagatgcccactgcccaccctctctctgctcccatcatccttccaccaccgacccagtggcctgcaggctggtggggatgagaatatagaggttcccaggccaaatctgatctgggagagaggaagattcacaacagaagggaatgtgtgcaaaacagcacaggaatctgaacggcctgccgctctccagaacccagcagtgtggccgggcatgctggctccgccagtaatcccagagctttgggaggccagggcaggaggatcacttgagcccaggacttcaaggccagcctgagcaacatggtaaaaccccgtctctacagaaaatacaaacattagccaggtatggtggcgcgcctggagtcccagctactcgggagactgaggtgggcagattacctgaggctggaaggtcgaggctgcagtgagttgtgattgcgccactgcactccagcctaggtaacaaagtgagactccatctcaaaaaggaaaaagaaaaaagaaaaaaatcagaaccgtgcagcaatttgggaaggctggggtggaagggacatgctgggggcaggaggacaaggtggaaaggttggaaggcaggtctctagagctgggctcacggtggttgcatggggttgacaccatcagacacgatcagccggcgagtggaggcaccagcgcctcagtcacagagcaacaaggacggtcgccacacaaccaccagcgcctgcctcttcgcagcagctcaactcacaacaggcagacactggaaacagcaccaacgtccactgaataaggagacgcacaaaacccggtgcctccacatcacggaacatgactcagccacgacaaagagcagggctctgactcaggccacagcctagacgcaccttgaggacatcacactcagtgagagatgccagacacaaaaggccacacaatgtgggattccatttctatgaaatgtccgggacaggcccagccacagaggcaggggagacaggtggtggcggctgatggggtcaaggctggtttcttcctgagggaatgagaatgctccagaattgggcagaggtgatggcggcccgagcctgtgaacatataaaaaccagggaactgcacgctctaaagcagtgaatcgtgcggcaggagaagtgtatccaaataaagctactacgagcaaaaattaaataaagaaagaagggccagtgaagaagcctgaaggaagaaccagacggagtaggaagccaagagagagtgggggtgttcaccgttgtgggggcggtgtgtcattcgtggtcagtggcggctgagtgactgaatgaggcgcggccaggcaggctgcttgtgtgcccctcatcccatccatgaa

SEQ ID NO: 33950 - DNA, 1196 bp, Artificial sequence
  DNA replication origin
gctggaaggagggagagctgctggccattgctctgtggccgcgtgggccaccctttgggcccatgtgctttgggctgagccatgtagagaaccctgggccttctatgtggtcgtgggcattgctgccctgcactctgccttcgtgtcctcatctgcacaggcggtgggcgctggcacccgtccatgaggccttgcagaggggacacgagataagccacgaaaacccactaccacaggactgtgggctgcatgctcttgtccctcagagcctgactggccccatgtggccgagccagggaccacatgcgtcccttgactgcgggcccagtcagcgctgcctgcgggctcttgcagaagaaacagccctgcggttgatcctatctccaaccccaggccgggagctcgtcagaggccacctggagctgtggaggtggcaatcaggccaaccgcctcagtatctcaggacagagtggtgctcgggatgacaggagcagcaccaaacccgcatgggtctgtccctacctggtgacgcaagccagtgcatgcctcaggtgtctgtttcctaaaaaggcaggtgtcgcctcggcccttctggtctccgtgagtcagcctcctccagggccctcccaggtcttttgtgtctggtgtctctcacagggtgcaacgtcctcagggcgtgtccgcgctgtggcctgggtagagccttgctcctttcatggctgggtcgtgttctggcgtgtggagggccgcgctggttcgtccctcacctgttgatgcgtatgtaggattttgccgtcttttggctgttgtgaattgtgcgtctgtgagcatttgtgtaccagttcctgtgcctttcccattctcctgggtgtgtatctaggaagtgctgggtcatgtggtgactgtgggtttctcttgcgtagacataactttatcatcacttaacattagtagcagaacgggactaagctttcatcactgacagactctgtgtttaacgattgaggaacttacctgccaaagaagtcaccagggactggggagagggatggggagtgagtgttccatggcgacagagtttcagtttgggaagatgagaaagttctagagatgaccgtggtggtggctacacaaccacgggaatgtgattaacaccactgaactgtacgctttttttttttttgagacagagtccc

SEQ ID NO: 33951 - DNA, 1011 bp, Artificial sequence
  DNA replication origin
tggcgaagcaggcgccgctcatagtcctggtccatggcgaggcagggctcggcccgcggcaaggttagcctgcagcgggaagggcaggagaggtgagtggggcagggccggctgcccggagaccacggggctcgcctgcacctccaggccctgggagctagagtgactgtggggtcctcctggctcctctgtggggatcttctgccagccctagcctcatcctaggtgaggctcccccaacctgggcctcggctgctgcccacagaccctcccagcctgtatatccacaccctgtcctcctgcccgggaaaggggctttctgccctggaggccccaggagggaggcgggggctgggaagagtcctggaggtcccgacaaggactcttccctgagcgtgggcagcctccatgtcccgaggagccatggggacccacgtgcgtgtgcgtctgcaacggggttcaacaagccacaccagctctaaggcagtgtgcaagagctggccacgcacaggccccgggccggccacgtgggtccaggcccaggtagaccaagtcacagctccagggacatcagcctcctgtggacaagccacatccgcactcagctacaaccaaggtaacatccaggggcccatgcagagcccacatgggaccaggctcagccaaaccaggaaggcccctccaagggggtggcatttatgttgaggtgtgaagaaaagtggcggtgaggagaccgcaaagaacgttccagagagagatgcacagcccgaggcaggaagggggtttgtacaagaataaagtgaaggtccgtgcaggccatggagacagaaggtagcctaggaaaaacgctcttcccaccagggccagcaaaccacagcccaaggccatgtacaggctgccggtctgtaaatacagcggttctttttgtagacaggtctccctgtgtcacccaggctgtagtgccatggcacaatcacggatcactgcagcctcaacctcctgggctcaagt

SEQ ID NO: 33952 - DNA, 1481 bp, Artificial sequence
  DNA replication origin
ctctctcagcctctggccactgagcaaagggggctttgatcttgaaaacccaaggggtgggccaggcgcggtggctcacgcccgtaatcccagcactttgggaggccgaggcgggcggatcacgaggtcaggagatcaagaccatcctggctaacactgtgaaacctcgtctctactaaaaatacaaaaaatcagccgggcgtggtggcaggcgcctgtagtcccagctactcgggaggctgaggcaggagaatggcatgaacctgggaggcggagcttgcagtgagccaagattgtgccactgcactccagcctgggcgacagagcgagactccgtctcaaaaaaaaaaaaaaaaaaaaaaaaaaaagaaaacccaaggaggggagccacacagtcactcgtggtcactcatggtcagggatttctgtgccagaagcctccgggagatgccaggcccacgggcaggctcagcctcccaacgctgccaggcaggagggtggtgagggcagggccacgggacggggtggagtggcaggaatgggggccatggcggaggggacagagccagggagcacaagaccccaactgccctcccaacgctgcgcaggtgccatgcattcaccgtctctagatgatcacagacgcaggccttgacggcacaagacacgcaacagctgtacccagagccacctgggagtgtggccctcatccccatctcctgctgcccacaacacccgtctaaccctccaaccccatctgactgtccccgcgccgtcttttttctatgaggggtctgttatcagctgaccggtgtccctaaaaggatactgtgaagtcctgagccccgcaacctgggaatgggactctgattggacacgagtttcttgcagatgtgattatactcaagaggaagccattagggtgagccctgatttgatgacaagcatcctcataagaagaggaaaacacggacacagagacacaagcagatggttccaggacagatgcagaggccagagggacgtggtcacagccacggatagcaggagcccccagaagctgggagaggcaggaagggtcctcccctggagcctcgagaggaagcgtggccctgcccacaccgtgacctccgactccggacccccaggactgggagaggttctgcgagtgctgcgtgggccccgtctgcggcctctctggtggagccccaggaaacacaggcttgcgtagggtcatattccgtctgctgtcacatctccctgcccccagcctgtgacgcagtcatggccttgacactttggagggttccagggctgtctctccacagcctggcgctccgtctgggtctgaaggtggttctgtgtcataaagtccaggctgtgctgggtgactgcggggcaggacgggtatgtggggagctctcccaaaactgccaatgcccgctcctcccccatctcccgttcacaccccggcctggctg

SEQ ID NO: 33953 - DNA, 943 bp, Artificial sequence
  DNA replication origin
tgcctttgagctcccggatcatgtggacagagtggggccctgtgggaggacccagtactgccccctacgggcaggacccccaccggcttgggtgttcgggaccccaggtagcattggtgtggggagaaaaagcccaacaggctgagcctggattcctcccgcacccccacatcccagtttacctgctagacctccagcctcagatcccagggcccctgacctggctaaggaacagggtcagggcgggggtgctgagccgtggctgggcccgagaaccgggctcggggaggcagagctggtgcctgggaggtggggggccggggaggctgcactgggagccagctcccgggtggggggtgccgcaggcttaccgtgaacagacccttcttctcaggcgtggagggctgcagcctgcggtcctcagtctgcgggtcctgcaccttctcgatgccggcacccagcagctcattcttgagcagggcagagtaggccaggccgtctgcgggcaccaagcacagtgaggcggggcaaggcagggtgggggcctgcagggcggatgggctgggaccctaacctttgccgttgtctgaggtggcgtccttggctttccggttctgactgggagacttctcattctcctgcaggcaggagagcagagagggaggggtcgaggagcccgcttgttcccggccctagagcaaggaggctgggaggggccctgggcttcccggggggtcccatctcctgcccagccagcccctcacgttaatcctgtggaagttcacgctccagttggctccggctctggaggggatgaagcggtctccgtgcttgctgggcgaggacactggggagctggcaggcgtcagggtccgccgcatctctgtgacctgaagggcatcagcagagggcttgctctcagcaccgagagccccccgagagt

SEQ ID NO: 33954 - DNA, 1087 bp, Artificial sequence
  DNA replication origin
tacacggctcctgctgccgggagaggacgctcaaatggtgagggcagggcctagaagggtgtgggacactgccagcgggagcagctcataggctgcagggagggcgccaaccctcgctctcccgaaactactcgcatggcgttatccctgaaacccccaccccagcgggcagtgtctgctgctgccctgcaccagcaacccagtctccctgtagggactagcaggctccatgcgcccagaggccactccaggacagcggccactcggtggtcatagtggcccctgggctcagccaggctgggacacctgtctcttcttctctatagagctgaacagagattgtggctccagtggggaccccatgctgccgcagatgccactgctggctgggagggcagtggctgggagggccatggctgggagggttgggagggccgtggctgggaggccctgactgggagggccatggctgggagggctgggagggtagtggctgggagggctgtggctgggaggctgggaggccccagctaggagggccatggcaggcgcctggctcgtactgatgctccctggatcccggtgggtacattgaggtctgctgggagctggggaggcccccatgcacatgcacaccccacgcagcacccacctggctggtacaggcactccacaggtacacgcaggtgcctagccccacgctgagcacattgagggacgaccagtccaccagattgaggtagaagtcgtcctgcagctcgggcgcgtccagcaccttgaaggggatcttggagatcttgcgggtgggtttccggggggaccggagcagcttctggctgcagaggcggccacgtggcatccgtgagccacggcacttgggtcacctcttgcaaacgcttgggaagtgtctccttccctgccagccccaggagcccagtccggcccctccaatcaccaccgccaccatgtgatcctaaacccagggacagccccacaggccttcaccctcgggtgtctggctgccctggcctcccttccacagctgtgctggctctgctccccacacctcctccaggcagcccttcct

SEQ ID NO: 33955 - DNA, 4119 bp, Artificial sequence
  DNA replication origin
ttctacctcaatctggtggactggtcgtccctcaatgtgctcagcgtggggctaggcacctgcgtgtacctgtggagtgcctgtaccagccaggtgggtgctgcgtggggtgtgcatgtgcatgggggcctccccagctcccagcagacctcaatgtacccaccgggatccagggagcatcagtacgagccaggcgcctgccatggccctcctagctggggcctcccagcctcccagccacagccctcccagccactaccctcccagccctcccagccatggccctcccagtcagggcctcccagccacggccctcccaaccctcccagccatggccctcccagccactgccctcccagccagcagtggcatctgcggcagcatggggtccccactggagccacaatctctgttcagctctatagagaagaagagacaggtgtcccagcctggctgagcccaggggccactatgaccaccgagtggccgctgtcctggagtggcctctgggcgcatggagcctgctagtccctacagggagactgggttgctggtgcagggcagcagcagacactgcccgctggggtgggggtttcagggataacgccatgcgagtagtttcgggagagcgagggttggcgccctccctgcagcctatgagctgctcccgctggcagtgtcccacacccttctaggccctgccctcaccatttgagcgtcctctcccggcagcaggagccgtgtagctctgggcagcttcctcccatcctctgctcgtcccatgcaggctctcccctgtgtgtgtgtgtctcccctgtatgtgtgtggcaggcttgagcttgccaggtcccagcagtgaccaacccagcgaccccatgggcctggagtgatgagagagtgaatgagtggatgggagagtggatgggagagtggatgggagaatggatgagagagtggatgggtgagcggatgagagagtggatgggtgagcagattagggagtggatgggtgagtggatgggagagtgggtgggtgtgtggatgggtgcgtggatgggtgcgtggatgggagagtggatgggtacgtggatgggtgagtggatgggagaatggatgagagagtggatgggtgagtggatgagagagtggatgggaaagtggatgagagtggttgaggggagtggatgtttgagtggatgggagagtgtatgggagtggatgggagagcggatgggtgagtggatgggagagcagatggttgagcggatggatgagcagatgggagagtggatgagagtagttgaggaagtggatgggtgagaggatgggagtgcggatgcttgagcggatgggagagcggatgggagagcagacggttgagcggatgggagagcggatgggagagcggatgggagagcggatgggagagcggatgggagagcggttgggagagcggttgggagagcggatgggagagcggatgagagagtggatggttgagcggatgggagagcggatgagagtggttgagggagtggatgggagagtggatgagagtggttgaggaagtggatggttgagtggatgggagagcggatgggagagtggatgagagtggttgagggagtggatgggagagcggatgggagagcagatgggagagcagatgggtgagcggatgggagagcagatgggagagtggatgagagtggttgagggagtggctggttgagtggatgggagagcagatgggagagcagatgggagagcagatgggtgagcggatgggagagcagatgggagagtggatgagagtggttgagggagtggctggttgagtggatgggagagcggatgggtgagtggatgagagtggttgagggagtggatggttgagcagatgggagagcggatgggtgagcagatgggagagcggatgggtgagtggatgagagtggttgagggagtggatggttgagcggatgggagagcggatgggagagtggatgggagagtggatgggtgagcgcatgggagcgcatgggtgagcggatgcgagagtggatgagagtggttgagggagtggatggttgagtggatgggtgagcggatgggtgagcgggtgggtgagcgggtgggtgagcgggtgggtgagcgggtgggagagcggatgggagagtggttgagggagcggatgggtgagcggatgggagagcgcatgggtgagcagatgcaagagtggatgagagtggttgagggagtggatggttgagtggatgggagagcagatgggtgagtggatgggagagtggatgggtgagcggatgggagagcagatgggtgagcggatgggagagcggatgggagagtggatgagagtggttgagggagcggatgggtgagcggatgggagagcgcatgggtgagcagatgcaagagtggatgagagtggttgagggagtggatggttgagcggatgggagagcagatgggagagtggatgggtgagcggatgggagagcagatgggtgagcggatgggagagcggatgggagagcggatgggagagcgcaggggagagcggaggagagagcggaggagagtggttgagggagtggatggttgagcagaagggagagcggatgggagagcggatgggtgagcagatgggtgagcggatgggagagcgcatgggagagcgcatgggagagcggatgggagagcgcatgggagagcgcatggatgagcgcatgggagagcgcatgggtgagcggatgcaagagtggatgagagtggttgagggagtggatggttgagtagatgggagagcagatgggagagtggatgagagtggatgggaaagcggatgagagtggttgagggagtggatgggagagcagatgggtgagtggatggaaaagtggatgggactgtggatgggagagtggatgagattggatgggagagtggatgagagtggatgggtgagacagtggagggatgaatgtacccatggatagactggggcttcgagaccagcggcaaagctcacactgacctctgcctccaggtgacgcggctctgtgacctctcagtggaaggggactcagtgacctccgtgggctggtctgagcgggtgagtgcagagggcttggcccccacctgggagatctgatggggctcttgacagtgttgggggccttgaagacccagagggtctagtgcgtggcctgaggtcgcctgtgtccaagcataggtctgtgtcccccactgtccccggccttagtgtggtcctggtagagggagtaacagggatgagcaggcacccaccaggcccctagaaaggatggcaggtccagtggggaaataacgccccagttccttccatgggacctgcccacctgggactcgctcccctggagttccattttccactcagggtcgagtgggctttagttccattttagattatgatgaaaacatctcagcagcagctttgaagcatatcatggggagggtctgtgcccctcacccagagctgcccagggctgcccctagcactcgtaaccgctcactgtgtccaggcgtgtgcgctcaccctccctccatccatcttaggttttcatgtgcctcaaagtcagttgcagacagcaacgcatgttgcccagctcctgggcctgtgtggaacctggagctcagtgtctgcagtttctccttccctctgtgtgaaatgtccatgtgggaaggtccacgtaccgagtcttggctggactctgagaaacccaggcgcagtgtgtgcggggtgtgcccgccaccccagcatgcactgaggggggtttatgcttcttccgaagggacgtgcattcgagagtcgttagggaaaccgtcccagagccctggtgaggagagagcctggcgcgaccaacgccaggacgggcacagtccccgggccagacctgacaccggtgctctgcccatgccttccatcctaggggaacctggtggcggtgggcacacacaagggcttcgtgcagatctgggacgcagccgcagggaagaagctgtccatgttggagggccacacggcacgcgtcggtgaggagcccgggtcccatggct

SEQ ID NO: 33956 - DNA, 1252 bp, Artificial sequence
  DNA replication origin
agtacacggagcacctggcggccgtgaaggccatcgcctggtccccacatcagcacgggctgctggcctcggggggcggcacagctgaccgctgtatccgcttctggaacacgctgacaggacaaccactgcagtgtatcgacacgggctcccaagtgtgcaatctggcctggtccaagcacgccaacgagctggtgagcacgggcggcccggcctcccaccaggcctcaggatgtgcgtcctgctggccccttacctgccacctgagagcagcctgtggggagatgggtcagagtcgctctgaagggagatgggcgagggaggccgagcggggaggcagggagttgtggggggcaaggcccctgggcctcatcagggcctcacctggggcaagacttggggcctctgggcccccatcgcagccacacctggcggctctgtgaggagccggggagctcctatggctgcctctgcttagaggggaggcccaggatgaagcgggctccactgagcaccctggcctgctccagccactccgggcgtgtcaccaggacagtctcgggggtgacttgcaggtggggcagaggggctgtgggccccgtttgggtccttgttgggctccagcctttggcggtgggtggaggggtccacctgtggcctccacacctcctagacagactcaggtggcagagccacatcccagcatcccctgctcctcctgggctggctggcggctctgagctctcacatgggctcaggcgggtgcatgtgaggcagcaggcatagcacccggcctcgttgcccctcaccgaccgcagcgccccctccgccctccaggtgagcacgcacggctactcacagaaccagatccttgtctggaagtacccctccctgacccaggtggccaagctgaccgggcactcctaccgcgtgctgtacctggtgagttcacgccaggcacttcaaggtgccccgggattctggacaaactgccatggccaccccagagcaccctgtcctgtgttcttagggaggatggtgtgcagatctaaaaccccgtgggacccagcagcaggggccggcagggcatctggtgctggttgtgttgccagcgttggaatgggctctaccgaactccccagccctgcaggtgcaggccctgtcctcctggaggaccttagcttcttcatttgtttattttccccataaagaggggtgaagaggaaagccaaaaccaactcacagctgacca

SEQ ID NO: 33957 - DNA, 1546 bp, Artificial sequence
  DNA replication origin
tcctgggactgggaaccgccgcagggccaggcggacggcgtgaggtttgtgttggggctggttctgcccatgctagggggtgggggagctcccaggacagaccagccttgtttctcatgtaatgcagtgacgctgtcattaaacacgtggattcatgtgtggccgggactggctggctctaggtccccggctcgggtggggtcacacggtcctgccctagagtccccatctggccctggagctgcagaagcagcttctgaggggcttcccaggcctgcatttcacagatggggagctcagccctcgaaggccgcagagacgcctcccaggcccgtctgccagggcgccggccacaatcctgcagggccaaggactggactccaggcaagtccctgcgctccagctggacggccctgttccagggaggaggtgctcggttgacaccatcagggagggagggtgggcactgctgggctgagttcacccccagggctggccagatggggccaggagggacagagcaaggggggtgaaggccgtggtgggagggtcccatgatgatgggccagggctcgtgtagaaatgggggaattggttccccatggcccaggacagctgagaggaggtggaggggccccaggggagtgtacgtcaggctttgcggggcacgggggccactcagcagcgctggggcaggtgcctctgctgtcagctccacccgacaggcagacgaaggccagtggggccatcgcttcctggggcgaccctggcagtggttgggagacgcccagatggagggggaggctgaccaagggccccgcagggcgggctgcaacttttctgttgatcctggaatgtagctggtgcagtgagagggaaagagaattgaaaaactcaggctgccataggttctgcgatgagaggtgcaggaggcaggagcctggcccagggggtgctggtgcctccccggggtctgggcggagagaacaggaggaatggctgggaagtggctgagggagccaggaggccggggggccgggggctgcaggggaggctgtgggggtcctggcagccaggaggccccaggtggttttgaggctcgctcttgcgcggtgcctgagaagagggtgaaggagctggggcaggccccatcctgggcattggagatgatgaaaccgagcagacctggcccatgtggagctggcatgggggacacagcccagagacagagaagcttatgaggaagtgaggaggtggcgtcacaagggtggggagggggccttggggaagggcggccttggatcagaggctcaccacaagcctggcatttcagccagggctggagaaggcagggacgcctgggtgagaggcaaagggcacagccatgcaaaggccctggggcaggacggcacctggtatgcgggaggaacagagtgaggagaggagggcagggcgtgcagggccttgtgggcctcagggaggacttgggcacctacgccgagggagtggagctcctgggtgcgtgtccagatgggaaaggcagggt

SEQ ID NO: 33958 - DNA, 1374 bp, Artificial sequence
  DNA replication origin
gagcactgtaggtgggactcgggtcaccatgtgcccccacctcctcgccgttggccagcaaggggctcctggatcgccccgggcagtttcaccctggcctaggtggccttgtccccctggcctcccaaggacccaccctgcacctagcctcaccgtattccttgccccggattggcctgtctttccacagcgcgctcccccaccgggtgctgggggcctggtactgggcagggacgatggggtcatgccaggcggtctcccgcaggtgctgggtgtaggctgcggtggggcgggggctggcggtcattcctgtccccctctggcaggcccgctgcccagggcgggggggggggcactcacccgatggcatgctgcactcacggtgttggtagcagctgtgccagcggttgtaggcctcgcggaaggggctggccggggcccgtggcaggttgtaccaggcttcccaggcgtccgagttggtcaggcctgtgtaccacagctggccggctgcgtcccgtcccatgggcgtgtacttccagcgtgtggcctgcctgatggctggtggccagcgggaaccctccagggacaggtagtcatcgctgagggtgggcagggggcagagactgagcccatgtctacagcgagtgctttgacccctttgcgatgtctgccagggtggatgatgtagaggcctggcccacggcgtggggtctccctccctcgccacttggagtctgtccttcagccctgtacccctcaccccagagtgggtgcttgaggagagaggctgactccccctctccccacacatcgcaccccaagcacccaagtcagcactaaacctttctgttctcagcttttcttgcctggagaagagggaggggagaggacaagggccctggctactcctggattcctacagtccttgtccagcctccaagacccacaagtcccttcctctgggaagcccccctggcctggaggtgcaccaggaagaagtggtctggggctggcactaagccatggcccagggaagactgggggacccactaggccaggtgtgtggctcacgcttgtaaacccagcactttgggaggctgaggcaggtggatcacttgaggtcaggagttcgagaccagcctggccagcatggtaaaaccccatctctactaaaaatacgaaaattaagccaggcatggtgtgggggcggggggcacctgtaatcccagctactcaggaggctgaggcaggagaatcgcttgaacccaggaagtggagtttgcagtaagctgagatcgtgcccttgcactccagcctgggcaacagagtgagactctgtctcaaaaacaaaaagacaagagactcaaagatgtt

SEQ ID NO: 33959 - DNA, 1907 bp, Artificial sequence
  DNA replication origin
gtgtctcgagtttatacactcgcagccatggagctctggcgctttctgtccaccctgtgcagctactgagggcttgaaatgtggccgtggggactgagccgagtccgtcgtttgctttcgttgtaactgacctgcgctcaggcagaatagccacacgtctccagccgctacggcgtggacagagagcacagctctggcatggaggatctgcagagcctcggtgttgtgtccagggccagagccagggctccttagggaccatccagctcatgccttgtttgctggggttgggggtaggggtggcggattgaagcgccaggcttgggggcacccagtggtgtgggcctgaccccggggctgtccctgcagatgacctacttctcaggcctcctggtgatcctggcctttgccgcctgggtggcgctggcggagggactgggtgtggccgtgtacgcagcggctgtgctgctgggtgctggctgtgccaccatcctcgtcacctcgctggccatgacggccgacctcatcggtccccacacggtagggctggtagccaggctggggtgggggaggccgggtcctagatctcggggtgcacgctgaccacctcgcctgtgtctccacagaacagcggagcgttcgtgtacggctccatgagcttcttggataaggtggccaatgggctggcagtcatggccatccagagcctgcacccttgcccgtgagtgccgctgttcgttcattcattcttttgttcagtaagaggggattaagcgcctgctgtgtgtccagcagtgttctgggtctgggcatccagctgtggaccaaagacacctgccccaatgggagtcataggcaggggagacctttcctttcttccactgagcacttcgtttattcactcaacaaacgttgggtccatgtgtgcagtgctgaagacaccgtacagaaatatatcgggggtgggcccagctggaagggagccccgagtccgtgtaacccagacccacagaactcagggttcagacatggatggttctagaccacagcatcacagcattcacgcctgtagaggcccagggcctggaaaccacagccggtctgggcctggggcagagccagccgtgttaatagtcacagaggtgaacatgtggttggtaccggcgtgggtggtgtgtaaaggtgaacgctcagagaaacctggacagccagggcaggaagccagggagggcttcttggaggaggtgacgtggccctgacacctgcaggatgtcagagcattccaggccaatggggagggacaagtagtgccaaagccctggggcaggaccacacctggcatgttgtgttggaagaacagggaggaggcctgtgtggctggagtagagggaggaggggagggcaggtcgtgcagggcctggtgggccatggggaggacttaggggatttgaccctgaggacagtgggactcacagagagctgtgggcagaagagggacaggccctgacccaggcgctcacagacgccctctggtggttgctgccgggaggacagctgctgggggagaagttgcagcctgggaccggggcgggtgcaggcgggccatgctggggctggaccatgaggagacagggaaggggagacatggtggatttggcatggatgctggaagcagggcccacaggactggccgagctgttgggtgtgggacaggagggagggagtggcagggcccccagctcctggattggacaggacggagccgctgtcgggggtgaggggaggcacaggttcagcttgggtggcgggggggtggtacccgcggtgcctactcatcccccgcctcctcccacagctcagagctctgctgcagggcctgcgtgagcttttaccactgggcgatggtg

SEQ ID NO: 33960 - DNA, 1292 bp, Artificial sequence
  DNA replication origin
cggtgatgttggccaccacggtgaacgcatacctggcgggcaggcgggcagggactcaacaagacgccaggaacctgggtcacttcctccccacgtggctacgccgtcagagaggcctggggaacccctgactgacaggtgattccaaccactgccacactgggtggcctccaggaagcccgtgctggcctcagtttccccagcccgcacattacctaacgcgggaaagctgtgacctgcagctccacccttcgtgcccaggaccagggtacagtgactcggccaagcggagtccaggctacaacccaaaagtctgagaacccagagactcagaagccagaattcgagaattcttcttccccagatgctgggcggctaaagggcgagggctccctggtctagaaccatccaggccagcccctgcccacagcccggccaggcacagagtcccccggggggcctcagaatcctaccatgaatcagtctctctttctgaaagcgggaaccatgccacctccagaggccacgtgagcacagcaggaggtcagctggcaaagcaatggcacgtaggaagtgcctggggtctggccccggtcagatggggccctcaggggccctgggcattgggcaacctgtgtcgttagcgcctgcacctctgtcacatggccataatggggaactcaaatctgggggtggggaggagctggtgatacacaggcagatgtggagacagcggactcccccgacacgaaggcgctgtgaggaccctggctttgggcaccagctggggccgagtcctcctctgaaatacgcgggagagaagagttcccacctcccagctcacggggaggattaaagaagctgagattcatgttaagggcctataactatgccaggcacacggcaggtgctcaatgcatcatcctcgtaaccagaagaacctcttccagcgcctctagcaagttagtggataagccgggcacccgctgtacccaggtgtaatagaaagaattctaaggcagccccagagaggcctgcccatcccatcccctccccgtggcagcagcagctgtaagtccaccatggatgttactcccaggatgtagccagggctaagtggcattctatagcagagggaaagggacttcgcagtgtgttataaccaaggaccttggtcagctcgggtgtgtccacagggagattactggccaggcgcggtggctcacgcctgtaatctcagcactttgggaggctgaggcaggcagatcactgaggtcaggagttcgagacca

SEQ ID NO: 33961 - DNA, 1297 bp, Artificial sequence
  DNA replication origin
ggataagctctttgacagtcgcgtaagataatttctgggcgggccgggcacggtggctcacccctgtcatcccagcactttgggaggcctcctcacctgaggtcaggagtttgagaccaacctggccaacatggcaaaaccccgtctctactaaagtacaaaaattagccgagcgtggtggcgcacgcctgtaatcccagctacttgggaggctgaggtgggagaatcgtttgaacccgggaggcagaggctgtagtcagccaagatcgcgccactgcactccagacacagcgagagtctgtctaaaaaaacaaaaaacaacaacaacaaaccaaaacaagaaaacaaacagaaacagcaaccgaaggctttatgtttttccaaagcagacctcagggaaccaggtggtccaaccggacaccaaggcgtccaccgtcacccctcttccccgcctcggggagggcacctgccctgggagctgagaggtgggggccacctgggtgggcctggagggtcaggagggtctgttgggagcagaagcccaggcagccgctcttgatgcctgagcaggtgacttgagtgaaggttaccctggcaatggcacccacttctgtatttcacccccaagtctggggctggtggctaaggactcactttgccctttaacaagtcctggggagctcccccacaatcccgagacgaccctcagaatcagacacaaacactcctgtgagtgggcagatggcacaaatgggcttcagaaggaaggacattaactttgaggttttgacggatgggtagcagtgtgtggaggggcgcattccaagtagcagaaacagctgtggaaaaggtaggaacagtcctcactttgaagctgcggaagcaggaagtggttcagaatagacggagcttttgctggtgccacacatgaactctatcctcacagcagcctgtgaggcaggaactttctttcttttttttttttttttgttttgttgttgttgagacagagtctcactctgtcgctcaggctggagtgcagtagcgggatctcggctcactgcaaccttcgcctcctgagttcaaaggattctcgtgcgtcagcctcctgagtagctgggattacaggcacgtgccaccaaagccggctaatttttaaatttttagtagaggcaaggtttcaccatattgtccaggctgggcttgaaccgctgacctcaagtgatctgcctgtctcagccccccacagtgctgggattacaggtgtgagcaaccacgcctggccatgggcaggaac

SEQ ID NO: 33962 - DNA, 2190 bp, Artificial sequence
  DNA replication origin
tgggcttctgctcccaacagaccctcctgaccctccaggcccacccaggtggcccccacctctcagctcccagggcaggtgccctccccgaggcggggaagaggggtgacggtggacgccttggtgtccggttggaccacctggttccctgaggtctgctttggaaaaacataaagccttcggttgctgtttctgtttgttttcttgttttggtttgttgttgttgttttttgtttttttagacagactctcgctgtgtctggagtgcagtggcgcgatcttggctgactacagcctctgcctcccgggttcaaacgattctcccacctcagcctcccaagtagctgggattacaggcgtgcgccaccacgctcggctaatttttgtactttagtagagacggggttttgccatgttggccaggttggtctcaaactcctgacctcaggtgaggaggcctcccaaagtgctgggatgacaggggtgagccaccgtgcccggcccgcccagaaattatcttacgcgactgtcaaagagcttatccaactattatgatcaaagaggcatttggggccctgggctccgctcagcaaccaatcccaacgtaaccacaaaggaagggacagccggtcccctccctgtctgccgccgcctcaggtaccccaggaatagcctggacataggaaacatgaaactccagtccccaagctgtgcctgctgcggagcctgccaccctcagaccactggagatccactgcctcttgcaaaaaatgtcatcacccagatcctgggtccaaccacccatcccagtcattgttcccaagggtgaggaggcacccgcctgcccctcctgccacctggaattccaagaactgagcaggattcctggccctgcctgctgaaatgccacatgtgtcccaaatgccaggacgcagccggcacttctgtgagggcaagaagagcagggaaggaggccggctaatcttcaggcccagggtccgggaggggagaggagggccgctgggaggcagccctgcagtcttatcgatgggcactggggcagggtgacccagcccatgacgccagcctcctgccctcccaacagccctctctaatcagggcagctcccccagacctagggggtccctgaccctggccagacagatagaggcaatgcaagaacagggcagagacccctgaccctccagtcccacccaggcggctcccaactctcaactcccggagcagcaccctcaaactgctgacgcaccaggttgccctggcagaacacacagagagagaggaggctctagggggcctgactgtccctcagccatagctgtcccagttggtcaccctaatagacgagctcaggctagacagactgacaaaggaggcgctgagcagtcaccaccaaccctccagagggttcagggtggcccgggggctcagacaaacaaaggcattcccactagaaagtcatgtagtcagatggtgagggccccgcaggtcagacagcagctctgaggcagacaggggaggctggaccaagggacagacagaggggatacggggcagttaaacagacagatgggggaggctcatggctcaggcagatagagaagccctgcacagttggacagatgggggaggcactgcacagtcagacagatgggggaggcacagcacagtcagacgggggaggctcaggccatggggcagaaagacgggggatgctggatggtgggacaggcaggggaggctcaggagtgacaccacagaggggccactgggtagtcagacagacgggggaggctcaggccacggaacagccagaggggtgaaaactcagctcatggggcagacaaacaggggagacttaggtcccaggcaggcagagagagggggctgggtggtgggactgatggaggaagctcaggccatgggcacagacagacagacaggggaggttcgggccaggggacagacagaggggtgaaaactcagctcatagggcagacagatacataggggaggttaaggccgtggacagacagtgcagggaagctcgggccacgggacagacagaccgaggggagactccgatcctgaggcaggcagacggcgggtggtgagtcagagggaggaggcgcccgggtcgcggagtctcggaggggctgcccgacaggt

SEQ ID NO: 33963 - DNA, 1851 bp, Artificial sequence
  DNA replication origin
cgcggagggtaccctggccaggccttcttgggtgccgtgggggcaggcgccggggacccccaccacgcgccgggcaccccgcgtcccgctctcttacggccgcgccctcacccacgtccgccgcgtccgccccacgctcgactctgcagccgccgggccccagagccgggcgactgcgccgggcggggcagggcggggaggttccggtgcctgagccaatcggagccgcgccccggggaaccgcagccaatcgccaaggagagaggagaggggcgtggccgcagggctcgttccgcctctacgacgggcgcccacgcggtcctagcgcccgccgggtatgagggcgaaccccgagcgcgccgcaggagtggccggcacccccatagactggggaaggaaatggaccagagggcaccgccggctcccacccagacccggcctccaggcccgcaccaccccagtccacccggagctggacagcccactgcgggccggggtggagcgagtgggacgggctctggatttggggttggggggaggtctgagcccgagctggcctcggggtccgctgactccccggcctagagagacgcgatcgggcgcggagaggacgcaacaacactaattaattggttactaacggtaatgatgggggtaatcaacataatagtaccagctggcctttaacgagcgttgcctgcaaagagccccacgtggtgacgcaaatttcactctcattttacaggcgaggaacagagttgcccgaggctcgcagtgagtcaggcgtctgtgactcccaggcctgtgcgcgcgaccctccccgtccaaccaacgtcctcccacaaacgggtcaccggactgagggtttcaagttcctccagggggtgtgtgcggttccccctaactcaggccctactccttccagcagcattttctcttctttcctctttttatttatttcagaaacagggtcttgagacgggcgcggtgactcacgcctgtaatcccagcactttgggaggccgaggcgggcggatcacctgaggtcaggagtttgagaccagcctggccaacaaggtgaaacccgtctctattaaaaatacaaaaattagccgagcgtggtgacaggtgcctgtaatcccagctactttggaggctgaggcaggagaatcgcttgacccaggaggcagaggttgcagtgagccaagaccgcgccattgcactccagcctggataacaagagtgaaacgccgcctcaaaaaagaaagaaagaaagaaagaaacggtcttgctctgtggcccaggctgcagtgcattggtgcaatcatggctcactacagcctcaatcttcagggctcaagtaatcctcctgtctcagcctcccaggtagctgggactacaggcacgcatcaccacatgtggctaacttttgtatttttaattttggagagacagggtctcactatgatgcttaggttgacctcaaactcctggtctcaagcaagcctcccaccctggcctccagaagctctgggattacaaacatgagcctctgcatcgggcgggtctccagcagttttctttctttctttctctctctctctctctttttgagatggagtctccgtctgtcacccaggctggagtgctgtgttgcaatctcagctcactgcagcctctgcctcccgagttccagcgattctcctgcctcagcctcccgagtagctgggactacgagcacccaccaccacgcccagctaatttttgtatttttagtagagacggggtttccccatattggccaggctggtctcaaactcctgaactgaagtgacccacccgccttggcct

SEQ ID NO: 33964 - DNA, 856 bp, Artificial sequence
  DNA replication origin
gcggttacaaggtaggtgaggagttgggacattaccctgaggtcactagggagccatggtaggggttagagggagggtgggactgagtcagattaaaaagtccagtgggagatgaggaagggcttcttccaaatgaaggcctcagctgcgtgcgtggggaagccacaggagaggacatgtgccccaacaagagtgggggttggacgtgagggtaaagatcagagaaggccctgtctagagatgtcaggaaggcatgatgaaagctcaggccctcggggtaggacagaggagtcaggagagatcctcacagtctgatgtccccagcccatcaccagcagccccctgacgccaagcctgcgttccccctcccctggccggacatcggatgtcctgatggccgcagtccagcctcggggtggggtggggaatgtcaagtactagaggcttccttgatcttctgtgacccaggcctggggtgacagaggtgggggggtgggcagtgagggttcctgaggctgcactgaaacttccttatatctgagggtggccacggtggaggcgggggagcaggggagcaaagccaggatcaaatctgggcagtccctgacaagccaccaagcttcagttgccctctctgtaaaatgggggtgaggtgagagtaaccgaaccaaacagaataccaggaggcttcaaccacacaacttggccgggcgcggtggctcacacctgtaatcccagcacttagggaggccgaggcaggtgggtcacctgagatgaggagtctgagaccatcctcgccaatatggtgaaacctcatctctactaaaaatacaaaaaattatctaggcctggtggt

SEQ ID NO: 33965 - DNA, 1303 bp, Artificial sequence
  DNA replication origin
cccctgcacccccgccccctctcagggcccggagttccgcggctgttttcacctccaaagaaactttcccggacctcccgactgcgcgacgctccaaccaaccgcccgcagcccgcccccgtcggccgccccgcccctccccgcccccggcatgctaatgaaggcctcggcgaacggtcccattgggtgagaccttccccccgggcgagcccatgcagataccgatcggcgcgccggccggcgattggttggggaggttgctgagtcgcgtgggaggttggtaaggaaggctgcgggcggtgcgtcaagttcggctgcgctcggccgcgctcgggaccaatcgggagcgagtggcggacttgccgggcggagcctcttaaagggccagtaggagaggcgcggactcctcctccctctctgaaggcaagactcccagccgctgccggatggggcgaccggcggatccgggtcgggccccgccccggttgccatggggacggaggtgggttgctagggttaaggtcctgcgaggcagtccccagccctaggcaaggtgggacctgttcttaacatcctgcaaaacctagcggagaagtttcctatgtatttactcagtttagagcccccgacgtccggatccgagggcttctggccataggggctgctctccctctggggtctcggctttcccccctgtgcaacggggacatcacacgatatccaggacagagagactgggatgctgggaagctgagaactgggtgtgggtcaggcagggggtggggttgggagctgggctggaagtgtttggggaaagatggtggtgaagggagatggcaaggacttcgtgaggatgggtcaggaggctccgctctggtggatcagggacctcccagcagcagtctaggcttctggcccaagttggggctgctcacctcctcttttgtttttgagacggagtctcaccctgtcgtccagggtggagtgcagtggctggatctcggctcactgcaacctctgcctcccgggttcaagcaattctctgcctcaccctcccgagtagctgggattacacgcgcctgccaccacgcccggctaatttttgtatttttagtagagacagggtttcaccatcttggccaggctggtcttgaactcctgacctcgtgatccacccgcctcggcctcccaaagtggtgggattacagacgtgagcccccacgcccggcccacttcctcttcctcaagtccgcttaaatgtcacttgctcagccaggccttctctgattttttttttgcctcc

SEQ ID NO: 33966 - DNA, 818 bp, Artificial sequence
  DNA replication origin
gggccgaggtttgagtacagggttggcgttgacttcggttgtgggcgtggcctctgcttggtgggcgtggttttctgctggagaacgggcccacaggaccaaggggagggtgccgcccccaaggagtggaagtgggcgggaccttagagtgggcagagctggcattgtgcggtgggcggggcctggacttagagtggcagaggacctgtcaggggcgtggcagctggcacggggcggggtctcagcttccagaggaaaatgggctgtgggcggagccacaagcaattcaaatccagcctggggcggggcttcgaggctggggcgggagcccggggcctcccccagctcagcgcagggactctcacctcctcctcgtgggaccccttctcgcccgcgcgtggaccctcgccgcgctcttgcttgacagtcaccacgaagcccccatgctggcccggagccttgccgcccgccggcctggagccaaggataccgcggtcagccccgtcccaagaatctcccctcccccaaaagcccaccccagggcgttttgacccccgacggcggggctgcagcgagagtgcatgagcccgaggaggcagggtctgatggggtcagtatccggggaaggtgggacaagcggggctcctgggagggactggaggccgaggtggggggtgcagaattgggtggagggagaagccccctgacccaggtgggggagtcaagactccggcgggagggactgggtcaggggttcaggagctagggctgcagccgggaaagtagcgagggcgtggggaggggatcagtgcactcac

SEQ ID NO: 33967 - DNA, 986 bp, Artificial sequence
  DNA replication origin
tgcagtgagctgagatcacgccactgcactccagcctgggcaacagagcaagactccatctcacaaaaaaaaaaaaaaaaaaagttggttatgggtgggcatttctccaggaagaaggaaaaaccctgcacgtggaatcctttgggggtcggggctactggggggtagtccgtggaccccgccagccctgctcggcgccccgccccgcccacctgcttttccgttggctgcagcttgctccactcggcgcccagcatcttggtgatctcgggaaagggcagatccgggtggcgcgtgcggatctgctcgcgccgctcgttcaggaagcgcacgtagcccgtgaccggtgccttgggcccattcggcagaatcttcttccgcttcttgcccttgggccagccgcgtttcttcaccggctgcagaaccgggctgcgtcgttgggaggggggcctggcgtactggggcagggctcagaggggcatgggcggggcctaacgcgtatgggcggggatgggggcggggcctagctgggaggaagaacccggaaaagatggaggtagggcccggtcagcagtcgggacacggtgggttagagggatccctggccaggggtgaggggatctgaggaactatgggccgaggtttgagtacagggttggcgttgacttcggttgtgggcgtggcctctgcttggtgggcgtggttttctgctggagaacgggcccacaggaccaaggggagggtgccgcccccaaggagtggaagtgggcgggaccttagagtgggcagagctggcattgtgcggtgggcggggcctggacttagagtggcagaggacctgtcaggggcgtggcagctggcacggggcggggtctcagcttccagaggaaaatgggctgtgggcggagccacaagcaattcaaatccagcctggggcggggcttcgaggctggggcgggagcccggggcctcccccagctcagcgc

SEQ ID NO: 33968 - DNA, 1068 bp, Artificial sequence
  DNA replication origin
caactttttttttttttttttttgtgagatggagtcttgctctgttgcccaggctggagtgcagtggcgtgatctcagctcactgcaacctccgcctcccggcttcaagcaattctcctgtctcagcctctcaggtagctgggattacaggcgcgtgctaccatgccctgctaatttttgtatttttagtagaaatggggtttcgccatgttggccaggctggtctcgaactcttgacctcaaatgatccgcccacctcagcctcccaaagtattgatattaaaggcgttagccaccgtggccagcccatgaccagcttttgggggcgcggctagcaagaggcaagacagattgaaaactggatgaccaacaaagatatgtctaagaagtcaggatggggcctggattttttgcgaaacccgattttcatatcctgttagtttaaaaattgcaaaaacatcacggaaatgtaacaaaagccatcactgctttgcatccctgtaagtgagatttcaaagagagaaacgggtgcgggagggagtccaggcatccgcatacgctggaggttgggttcctgcccatgactctggcgtccgggagtggtttgtcagggctggaggtggggaagagtccggggcatgggaagtgaggtgggagctcggaggtccctgagcaacaggctgaggagccggttctgtctgcctggagggaatagggagctatagaaggttcaggagaggggagggtgctgtgaaagcagagtgataaagactggatcctggcgttggaggcttcccctgcttcaagccttctggtgctgccccccagcggtacctggatgaggccgagagagagaagcagcagtacatgaaggagctgcgggcgtaccagcagtctgaagcctataagatgtgcacggagaagatccaggagaagaagatcaagaaaggtgggaggggtcgggcgcggtggctcacgcctgtcatcccagcactttgggaggccgaggcgggtgtatcacctgaggtcagaccagcctggccaacatagtgaaaccctccccctcta

SEQ ID NO: 33969 - DNA, 1486 bp, Artificial sequence
  DNA replication origin
ctcaggctggtcgggggctggcgagggagaggggccagcgacggtggggccggtagggagcggtgggggcgcgaagggtgggggcacaaaggggctgcgggaggaagcgagtaagcggggacgcgtcgggagaggtcgtggccgggaggcgcggtcggtgggggcgaggtcagggagccggccgagtaacggggcgcggagcggagctcgggtgtggtctgggaagaaccagacggagctatggggtaggggtgcgggggtcggggaggaggcggagctgggggtgatgagggcggggcgataggcggggccgggtgactggggaagaggggacggggcgatgggcggcgccgggcgacaggggaaggggggaagggaggagggggggggaggcgggcggggccgggtgaccggggcgggactgggagatgggcgtggcccgcacccggcaccggcagtgaggcgaagctggcggtgagcgcctggcgcacggcctggagctgctgctgcagcgccagcgtcctccgctcctccagcgccagctcctgctccagacgctcgcgcgcgctgctcatgctctgcgtgtgcctctgcagtaccgcgttctgctcctcgaaggccacattcatcttccgcaagcgccgaagctccgcctcacgcgctgcgccggggggagcggggtcaaagcctgcgcctcccctttcccctacctccgggcttttgcccgggacgtgcccctgcccaggtttccctcactgcgccctctgcctcctgctccacatcagcctctggagcgacagcgtgcgcctggacgctcatagggaacctcccgatccgcctcctgcagtcttggggccctcctggcccacgcccccctctaccacccagtttcacggagttcgcatcaggagcgcagttaccgctcacctttgttttggtccaagaactcttcagtgaagatgggaacatcgaaggtggagaagccatcgcagtccccaccctaagacgaagggacaaggtggcaatttactggtggtaggaggcagccacgctctctgggtgtgccccaagcctaggagggtctcctgggacaccccggtgggagtacaatcaacagcgatcccacggtgcagtggcaccgcccctgcttgcacacatctgggcgagcactggctctgactcagggttctagaagcctccagacctttctcccccaggtgctttgagaggaagaaggtcgcttaccttgtgtccattcaggagagtgttcatgagcccagagctcgagtcttctggcgggggaggggaagggcagggtcagcctcccaggcctccagggaccacgccctgcaccctaggtcagcgctgctcagccggctccagctccccacttgagtgccccgcgtctgggcatcccccatcgctgtaccgagtgagcccccttcactcctgtctggctatgtatctttcccccgcccaacccacg

SEQ ID NO: 33970 - DNA, 1395 bp, Artificial sequence
  DNA replication origin
ggacccccagcctctcgtccacggggtggggtgtggcagggccgcgcccacagcttctcctctgcatcgtgggcccgcccactcctcacaggtgctcgctgaaacgagagaggagggcccgggatgaggccctcatcatctctggcccccaccccggccctggggaaccccagagaccatggcccatcagctgctccaacagatgccagggttgggggacaggcgttgaacctatctaacccgggcgctgggatccaccctgagaagctttagggaagttctggtgcccccgagtgggtcccgccggcccggggttctccatggccatcctagcactggtgcatcaggggcgaccgcaggtaggcccctccgggaggtgatctctagtaagctgcggagtcccacccagcagccctcgcggacctggggaaccccagggcgggcacatccgggccttgaaccccggccccgccccgcctcgcccggcacacacctggcgacctgggccaggatttccttgatgcggacgatgagcttctcgtgctgggcggggtcgcgctcgatggctccgtgaagccgggccatgtagaagtccagagtgcccagcgtgggcgtttcgcccgtgcctgggggacaggcgggaaggtcaggcgagggtgccggggagtcgcggggcgggggctccaggggcagcggtagggggtgactcagggcgggtcgcgcgggcgctcagaggtccggacaccgccagcgcaggagcggcgcagggtgggctaaggtaagccggggcaggaggatggcgaggacggggacagggtggggacgcggggctagagcggcgggcgtccagggtccgctgaggacagtcacggacggagggaacgaggtcggggaggtggggatgacaccggggggctggggtcgcgtgggacgtgactggggtggtggagggggctcaggcgtcagcggggcgtggggagggatgggtgacgggggcgtggggaggtggggtgaatgggaacgtggcgtggcgagcggggaggctgggtcagtgctcaggctggtcgggggctggcgagggagaggggccagcgacggtggggccggtagggagcggtgggggcgcgaagggtgggggcacaaaggggctgcgggaggaagcgagtaagcggggacgcgtcgggagaggtcgtggccgggaggcgcggtcggtgggggcgaggtcagggagccggccgagtaacggggcgcggagcggagctcgggtgtggtctgggaagaaccagacggagctatggggtaggggtgcgggggtcggggaggaggcggagctgggggtgatgagggcggggcgataggcggggccgggtgactggggaagaggggacggggcga

SEQ ID NO: 33971 - DNA, 1328 bp, Artificial sequence
  DNA replication origin
aacaaaatggctatgatggtaaggttcatgttgcgtattttacacaataaacaaaaccgtggcccacccaaagtcactgtgctacaaagtggacttgaacccccgtgcggacacaagttgaaggatgaactgagcagccgtgactgtcccctgtgcttcaagtcccccacgtgtgctgagcccacaatgcccaactttaggtaggggagggatggagacacctgcccagccattgacttgctctgtgaaccccggcaagtttgggctcccgtctccctatctgagaaactctgaggctctgctagaggtaaagagagcaggcctggcgcccccagcagggaatgtcatggggggcccaggctgcaccttctgaaccctccacaccaccccaaacaagcttacacactcacaagcttaaaacacaaattttacttgtttttatttaaaaagtccggatccagcagtgagaaggagccacccccaccagggtccctcggctggaggagagcaggatgggcaaagccggcccccacccatctggggtacaggcatgcgggggacaccccaggtaagtccccacaaggcagcttcctgtgtggcctatggcacagccccccgtagtgagtaatttggggggtcctgccgtgtgctgggggtgggtttcgtctgccctgtgtcctgggggtggcccggagagccagtgtagcgcgtggctgtcctccgaggaggggcaccctcggctgtgaggttcttctgggtgtatcgcgcagcgagtgctttttccgggttcagggggctggggagattgaaagctaaagggatgctgcagaaatttaattttaggggggctggagcccccaaggtgcaggatgggaccaggccccaaagggtggacccccagcctctcgtccacggggtggggtgtggcagggccgcgcccacagcttctcctctgcatcgtgggcccgcccactcctcacaggtgctcgctgaaacgagagaggagggcccgggatgaggccctcatcatctctggcccccaccccggccctggggaaccccagagaccatggcccatcagctgctccaacagatgccagggttgggggacaggcgttgaacctatctaacccgggcgctgggatccaccctgagaagctttagggaagttctggtgcccccgagtgggtcccgccggcccggggttctccatggccatcctagcactggtgcatcaggggcgaccgcaggtaggcccctccgggaggtgatctctagtaagctgcggagtcccacccagcagccctcgcggacctggggaaccccag

SEQ ID NO: 33972 - DNA, 1403 bp, Artificial sequence
  DNA replication origin
gtccaagctccctacccctcaccccatcaggcgggtggtcttgggcgccggtgtccgggctccttacctcggtgggcgcgatcccgaaggcttcggcgatcttggcgtacagctcgcggacgttggtgaagccctcgatcttgcccgtggggctcccgtgcgccagctgcgtgcggaagacgaggcgcgggcgggcgcggggcgcggccgggggctccgagggcgcgggcgggggcgcagacgcgcgcggggtctcggtcccccgggcctcccgggccgctgctccctccatggcgggagaagttcggccacccacccgggccctcgccgccgccgccggatccgccgcttcctgcagcctcccctcccccggcccagggcgcgacagccgagacgcccgggtaaggggatctgggaacccgagcctcccgggaaggcgacaccgcggggtgcgcaggggtgggtcgggccccaggtgtccgggccctgccagggccagctgtgccctccccggggatacccgcagtccgggggggcctgagctcaggaccctggaagaacagggaccacaaataaggacagggacaggcctggagcggtggctcacgtctgtaattccagcactttgggaggccgaagcgggcagatgacctgaggtcaggagttcaagactagcctggccaacatggtgaaaccccgtctctaccaaaaatacaaaaatcagccggacgtggtggcgggcgcctgtaatcccagctactcgggaggctgagatctcttgaacccgggaggcggaggtggcagtgagctgagatggcgccattacactccagcctgggcaacaaagcgagactccgtcgcaaaaaaaaaaaaaaaaaaaaaaaaaaggacagggacagctgagggtgctggagcactcaccctctgctaggcgaggtcattgttttattttattttattatttttatttatttatttattttgagctggagtctcgctctgtcacccagtttggagttcagtggcacgatctcagctcactgcaacctctgcccaccaggttcaagcaattctcatgcctcggcctccccagtagctgggattacaggcatataccaccatgcccggctaatttttttgtatttttaatagagatgaggtttcaccatgttggccaggatggtcttgaactcctgacctcaggaatccacccaccttagcctccaaaaaagctgggattacaggcatgagccaccacgcccagcctttggtttgtttgtttgattttggagacggagtctagctctgtcgcccaggctggagtgcaatggcgtgatctcggctcactgcaacctccacctcctgggttcaagcgattctcctgcctcagcccccctagtagc

SEQ ID NO: 33973 - DNA, 2276 bp, Artificial sequence
  DNA replication origin
aagtgctggaattacagacgtgagccaccgctccaggcctgtccctgtccttatttgtggtccctgttcttccagggtcctgagctcaggcccccccggactgcgggtatccccggggagggcacagctggccctggcagggcccggacacctggggcccgacccacccctgcgcaccccgcggtgtcgccttcccgggaggctcgggttcccagatccccttacccgggcgtctcggctgtcgcgccctgggccgggggaggggaggctgcaggaagcggcggatccggcggcggcggcgagggcccgggtgggtggccgaacttctcccgccatggagggagcagcggcccgggaggcccgggggaccgagaccccgcgcgcgtctgcgcccccgcccgcgccctcggagcccccggccgcgccccgcgcccgcccgcgcctcgtcttccgcacgcagctggcgcacgggagccccacgggcaagatcgagggcttcaccaacgtccgcgagctgtacgccaagatcgccgaagccttcgggatcgcgcccaccgaggtaaggagcccggacaccggcgcccaagaccacccgcctgatggggtgaggggtagggagcttggaccctggacgggagaccccagatccccggatcccagacgtcggggtggccgcctaatcgccggatctcagagacccagccctcagatcccggggtgccacactcccaggggccccctttgcacgctctgcgcaaaagatgggcaggtcttaggactagcggacccctagatattccagaaaatcctctgcgcagacctagcttggagcggaccccagccctcggggaagcgcctctgtgcttcctgggcgtagctggggtctggggttccagatggcccccttagggatgggaagtttgaggccgccgtggggttggggggttcctgggcgtttttccaatccgggttcgtttggtttgcagcccccagggggcgccagcagattaaacctggaggtctgggggctggaggtcccggggtatggagaggggtctccacctgctggaagtctccttctccctcctctctctgttctgggggtcccacgccctgccctttcccatgggctgggatcctggtcgctgggggcaggggcctgcgcagacagggtggctgcgtggggggatgcatgccctggctaactctaggctccttctcccccgggaagattttattctgcaccctcaacagccacaaagtggacatgcagaagctcctggggggtcagataggcctggaggacttcatctttgcccacgtgcgaggcgagaccaaggaggtggaggtcactaagacagaggatgctctggggctgaccatcacggacaacggggctggctacgccttcatcaaggtgcccgggagggggtgggcgggtggcttcctggggtccagcaactgccccccccactctgggtcgacgtgggttctgcggattggaggcgggtggctggggttgccctgccagcgacgctggatccctgcagagaatcaaggaaggcagtatcatcaaccggatcgaggcagtgtgcgtgggtgacagcatcgaagccatcaacgaccactccattgtgggctgccgccactacgaggtggccaagatgctccgggagctgcccaagtcccagcccttcaccctgcgcctggtgcagcccaagagggccttcggtgaggcgggtgggctggcgggagctcttcccgaagtgcgttctacggatgcctggggtggaggagggtcggggatgggacgggctggaaggttctaggtgcacccgctgcgtgccaaggagctcctggcagggtatcagaaactcgtaggtagtttctattaatagattgttatggagtcagcctgtgggggaggggtgggggagagactgggtaaagtggagttggaggaggacgcgtccagaaccactttggagccaggctgggagacttgtttttgtttgtttgtttgtttgtttgtttttgagacggagtctcactctgttgcctgggctggagtgcaatggcgcgatctcagctcactgcaatctccacctcccgggttcaagcgattctcctgcctcagcctcccgagtagctgggactacaggcacccaccattgcgcctggctaatttttgtatttttagtagagacggggtttcaccatcttgaccagtctggtctcgaacttctgacctcaagtgctccacccgcctcagtctc

SEQ ID NO: 33974 - DNA, 1008 bp, Artificial sequence
  DNA replication origin
cgatggcggcccacacttccaccacaaactcgtcggggaaggcgaactcgcccaagacggagtctaaacagcgtgcaaactcctgggcgctcgctgtcttcttggacgtctccaccatggtggacgctgcgggccgtgccagaggggatgtcagtgagggcactccccgcgcccaacttcccgctgggacccctgcctcctcccgtaggcttccctccccccagggccccctggcttaccctggccccttacccagctcggggtcccgaatgcccatgtagctttccagcaggtcatcaaccttccgagatgcctcctcctcaaactcactgggctgggggcacacgggagggaagtcaggggtgaaaagctttggagccctccagcccagccccctcccgacccccacccctaagggaagagtagactggaccctcacacgagtcagtagtgctggtaccaacatcattgccccacttttcaatgaggacccattttgcaggcagagaaactgaggctccgaggagaagttcttacccaagaccgcactgactcagtggaggagctgaaggtgcagaagcctggggagagcccctccccttcactcaccgcttcctccactgtggcagcccccccagaacgaagccgcagggtctccctcccgctggtcactttcgcctctactggacatttgctggaccgacttctctggccaatcatatctggagggaacagagtgagggatggccatgggttctgggtggagccacatctttgtaaaccctgggaggccaacagccgagcctttctagaatcttcctccccttcaaagtcctccttacatctgtacggcaagtctccagagacctattcgagattccacacttcgcatccccagcaaactaaatcacaagtccagaatgaggtgttgtaatggagcaggtttagaactaacatcccagttccatgccctcactctccctcttctagcgactttctctagaaggg

SEQ ID NO: 33975 - DNA, 897 bp, Artificial sequence
  DNA replication origin
cagtgttgccacagtttcagccagccccccagccccacatctctgcattcccccaaacttcccccaaaatgacacaccaggctgcagagatggaaggtgcctttattcaccatgagccctcagggtacatgcggtgcaacccgtctcctgccctccttttccctccaaggacctggatctgagccaggaccggtgaagcccctgttttcaccaccgcacactccctaccaccgcctgctggagaaataaggtcacttgctgcttctgggggccccaggctggaagggacaggagaggacgagaaccacatgaaccagggctaagtcacagccaagctacggccccccgcggtaagggcgggctcctggctcccccagagtggggcaaagggctggcgccaaagctggggactcagacagctgggaactcaggagggctgccctaggggcaggactaggagtgacagatatggtgggtggggtggacttctggggtcccacccggggcttgggagagacggctggcttctggggggttgaggagacctgtgactgtggggccaggtaggaggcttggggtaagcctgggatggggccaaggctggcctggatgccacatacctgatcatggggctgaggcagaggctgggggtctttgctaggggctggggtggggtctctgggggatgggcctgggggctgaggttgggctggggcaggggcctcaagctggattctagggtcaaggccaggggtctgtgggcagattccatttccagggctcagccagattcttgaactggtgtgagttctggaactggattgggttccagaaacaggctgggttccagaactaaggtgggctccagggctgggctgaattcttgagccggtctgg

SEQ ID NO: 33976 - DNA, 2119 bp, Artificial sequence
  DNA replication origin
ttaccggcgtgagccaccgcgcccggtcccaccatcaggatctaaatccaccctgggtgaccagaggtccagtcaggagggtagcaggaccccgcagagcccctactcaccagaaggggcagccaacacacgctggccaccaccatgatccccaggagctgagccatcatctccacctcggagtcccggggacgctgctgggccgcctcctgcccgtggtagacgtggcacagggtggccacgctgaccgtgttcagcaggaaggacagcccgaccgagaggccgcccagcatggagaagagcagcccgaaggccacgtccccggactcggcgcccagcgtcaggaagcaccaggaccccgggtattgcacggtgtagcgacccacgcccagcaggggcagcaggcccagcgccagcgcggccgcccacaccagccccacggtggcccaggcgcggcgctgcgaggcgaccgccgggcgcgagaagggccgggtgatacccaggtagcgctctgaggccatggcggcccccagcagcagcggggacaggccgaagaagatcatgacgacgcccatgaagcgacagagacggcagccagggtccacggcgtgccactcgaagagcgcggcgtgctgggacaccacgatggtaccggtcaccagcagccccaggaagtcggtgaggacgaggccgcagaggaaggtgaggaaggaggagcgcgtgtgcgaacccccctgccgcgcgcccgccagcacgctcagggccagcaggttggaggccaggcccaccacgcagaaggaggcggcgaaccagggcgaggcgatcagccgtctctcctccagggtaatgtttgtgggccggaaacagggccccagggaactgccgttgggccacatggctccggagccctgagggatcagtcaccaccccatcaggccgatgctgcagacagggcaggctggcactggttcaggcacacctgggaggcgagagaagatttgcttgtgattaattctgcatttcagtgtaagtagctctggtgaactcctacacaaccttcaatgccccagctcaaatatcctctccggttttttttttttttttttttgagacagagtcttgctctgtcacccaggctggagtgcagtgatgcaatcaaggctcactgcagcctcgaccttctggacccaagtgatccccccatctcagcctcccaaatagctgggactacaggcacataccctgtagtaagtagtcctcccgcctcggcctcccaaagtgctgggattacaggcgtgagccaccgtgcccggccttttcctccattttcatggtgtcggttttataataagaaataaaccctgaaatccagttctattttgggaacaaaaaacacttcttcggaatggcaggttccccagggatggttggtagagagcagcaggcggggacctgttactctgtgtggggctaacgctcagccacaatgcacaacaaaatcggagccaagccaggcgcagtggctcacgcctcttatcccagcactttgggaggccaaagtgggcggatcacttgaggtcaggagttcaagaccatcctggccaacatagcgagaccctatctcttaaaatatatatatatctgggtgtagtggtatgcacctgtaatccctgctacttgggaggctgaggttggaggattgcttgagccccagatgttgaggctgcagtgagctacaattgtgccactgcactccggcctgggcaacagtgagaccctgtctcaaaaaaaaaaaaaccaaccaaccaacaaacaaaaacgctaaaaaccccaaaaaacaaaaaaatggggccaggtgtgatgagtgaagtaaaaataaaatgagatggttcaaaaaccagcttctggctgggtgcagtggctaatgcctgtaatcccagcactttgggaggttgaggtgggtggatcatctgaggtcaggagttcgaaaccagcctagccaacatggtgaaaccccatcttcactaaaaatacaaaaagtagccaggcatggtggcgggcgcctgtaatcccagctactcaagagactgaggcagaagaaatgcttgaacccgggagg

SEQ ID NO: 33977 - DNA, 1198 bp, Artificial sequence
  DNA replication origin
ccgccttccagaaagaagccaggaattaagacagagatttctggaacccgggacccaggcagattcccatcaaagttgcaggacctcagcctcttgggagttgcaggacctcagcctcttgggattctagaattgtgaggccttctgcgtcccaggactggaagcgtgttagaattccacaaccctgaacccgctgagggcaaacgtctgctctcagactgcaaaattctggagttattcaacatcgaaaagcgatcttgggtccacacctctccccagacacagggagggacagtaattttcccaagagccgcagtgctgctctactgccccaccgcgtgggggcccctgctacccctcctggccaatgcaggagggaagggaggccctgcccggtccccccattggcatccttgcctggagaacttgagatggctgccatcgcctgaagccagggtggggagtggaggtggggggattggaaacagccagctgtggccagaaggactcagtgccagtttccaggctcccctgggccaagggctctgggccatgcatttgctcccagccaccggaggtgtgagggagttccgggtgtgtgacccccggtgagtggagtggagtgtggtcgaggagaccctgagacccaggagggactggaagttgctccaggcagaggtcgggtcagtggccgcagggacagccgagtcccaaggaatgtccagaaacagcacataccagctctcgagggaggaacgccttgtcccaggggaaatcccagtgcaggaatccaaaccccaggcgccaaagcagcccggagtggagggcaacgatcgccagaggccgcgaggaaccccccaccgcatctgctctccaggcctcagtttctcctctggaagccctgcctcccaccacggtggcagtggccttagctgtcttcccaggaagggagttcagtgccgctgtcaggagctggataatttatgaggctggatacagcgtagccaaggccagaagccaggccaaagcgtcacaagtgagatggggagtgagggccacagtcacccatttgaccgccctggaatgcgttagctgctgcgaccccacagcccaggccctgcctcagggccagcatgcattgagtgcccgctgtgctgtgctgagtgctgcgcgtggatcccttcactcccgtcatcag

SEQ ID NO: 33978 - DNA, 1044 bp, Artificial sequence
  DNA replication origin
ggctggggaccctgttggtgtcacaaacaggaaatgttctcggaaatggagctttgcgatgaggggaggtgggcccatcagggtgtggagtgtgtctgcctccgctaccatgtgggggtccacgcccatgagcgttcagatctacagcaggcatgggagggtctggccggtccctgaagtttcagtcccaaaagggccctgtgggtccaaggtccaaggccgacaggggtgacacggagcctcagggctccctgctggctgcccgggcaccttgtagggagttgagctgtgagtacagccaggagccctgcagaggtgagagccagggaggcctgagcttagcacccgcaggcatggagatcagaagctcacccccattgcacagagcggggaaactgaggctcggcaaggtggagccccagcctggccacggcagatcagggactagagcctccaagcctgtctgggggaggtggggtgggctcaggccgtgacaggcaggcggggcgggcagggtggggtgctgaggagaggggacttgttgagaaatggatggatgatgaggtgacgtgctccagggagtgggggagggggcacgaggatggaacatggggcggaggagaggcctgctgtttgggaaccaaggatcacattccactggcaaccaggcttggggcagccaggcctggtgcccacgcccagcccagcgcccgggcctctggaaacagcgccggacagagccctccgagtcacacgacctgcaagccggataccctgtcaggggtggcatcggatgagggagaactcactgtccgccttccagaaagaagccaggaattaagacagagatttctggaacccgggacccaggcagattcccatcaaagttgcaggacctcagcctcttgggagttgcaggacctcagcctcttgggattctagaattgtgaggccttctgcgtcccaggactggaagcgtgttagaattccacaaccctgaacccgctgagggcaaacgtctgctctcagactgcaaaattctgg

SEQ ID NO: 33979 - DNA, 1522 bp, Artificial sequence
  DNA replication origin
ctgtgtgggtcctctgctgggcccgcccctggtcacagccagactgactcagtttccctgggaggtcccgctcgagcccgtccttcccctccctctgcccgcccccagccctcgccccaccctcggcgcccgcacatctgcctgctcagctccagacggcgcccggacccccgggcgcgggatccagccaggtgggagccccgcagatgaggtctctgaaggtgaggtcgccccgctggcttagggcgggatgcactgctctggtgtgagcccgggctgctgggcgcatccggcgctggccctgccctgctgtgggtgtgtcgcaaagcccgcggtgacagcggccaggtgccaggtgtcccctgtgtggcccggcgggtggcatggtgccctgaggcctgccctgggcgcccaggcggctgggtctgggtgcggcccaggctgattctgtccggggggctctctggtctctgtggggccacatggctgtgaatgggggtcccagactcagggggctgcagccggggagggggcccaggccctgggtgtggcagggatcgagtgtggttgtgcggctgtgtgtgtgatcttgtctctgggagtgaaccatgcatggccctggttgtgtgtctgtgtctgtgcgtgtgtggtggttttgtgtgtgtgaccgtgtgtttgtttctgccgagagtctgtgactgttaaatactgtgtgttcttctgtgtgtctttctgtgtctgtctgtatctatgtacctgttgtgtttctgcctgtgtgtctgtgtttttctgtctgtgtctgtcacatttctgcctgtgtgcctatgtgtgtatctgtgtgtgtctatgtctgtcgtgtttctgcctgtatgtgtctgtgtgtggctgtgtgtctgttgtgtttctgcttgtgtgtgtctatctgcgtgtgtctgtgtgtctgttgtgtttctgcttgtgtgtgtctgtgtctgtcatgtttccatctgtgtgtgtctatctgtatgtgtctatgtatttgccatgtttctgtatgtgtgtctgtgcatgcctgtgcgtctgtctactgtgtttctgtctgtcacatttctgcctgtgtgtctgtcatgtttctgtctgggtgtgtctgtggtgtttctgtgtgtgtctatctgtgtgtgtctgtgtatctgccatgtttctgtatgtgtgtctgtgcatgtctgtgcatctgtctgctgtgtttctgtcacatttctgcctgtgtgtctgtcatgtttctatctgtgtgtgtgtctgtgtgtctgccatgtttctgtgtgtgtgtctgtgcacgtctgtgcgtctgcctgctgtgtttctgtctgtcacatttctgcctgtgtgtctgctgtgtttctgcctgtgtgtgtctggctgtgtctgtgtgtctcgagtgtgcacacacggtggtggcctgaggtgcatgttggtggaatcactgtaacttgtggtccaccattaaccaccagctgcacctcccgggtcccgccccctggtccct

SEQ ID NO: 33980 - DNA, 1390 bp, Artificial sequence
  DNA replication origin
ggcgggcccagcagaggacccacacagatggagggcgtggcggcacaggacgccctggggtcgcggcctggaggggtccgcgggggctaagccgagctgggacgggtgggggccgctggcagcccgcggctcgctctctccgtccagtctctgtctcccgctgtctctcatcagccccgcccaccctgcgctggccacgcccctcgggcccgggcctggctgacttggagtcagtgggtgccccccgcacgccgggacaccctacagccttctggggaaggcggcgcccttgggacccccaggccaccggtggcagggatgcaatggcccgcgtaggggtggcaggggcgcttcctcgggagcctcagcccctccagccgcccagcgccctgccaggcctcttcccggcgctcccgccgccaggcccgcattattcaccatctgggcagcacccaaggcctggagggggcggggcaggtccaggcggatcggctcccgggggtcgcccagactccagggctccaaattcactgggtgcgctggaacgcggcacacagtagtagtatgccctgcttaatacatacaggacatatttgaggccccttccaggggtggggtgggaggacagagggatggggggtgcaccagacgacacagccagactgagaaaggtggtcccagagcaggtgagccgggagggctggggtgatggcatcgcatgggagggtctcttgaggaggctcggaggtggctttggagccagaggaggaacagtctggagccgggaggctgcagtgggggatgggcactctttcctggccaccccccagctcgggctggggaaggagggatggagcccaacaggaatggctgagaaggtgccggacgcagggactgggaccgtctctttgcagaggggggaccttgggcttccttggccttgtttgtacacccgagccggacagaaccttgagttagggacctggagtgggaccggacaagctgaccttgccctgactgcaccccaccccgtcccctgggcccgggagggctgctagtccaggctgtgagtgaggggtattcccagcctggcccggccctctcgtcagcccagtccggaagccccttccccggctaccccgcccactatccttcctcctcctggccttcggccacacccaacctccctcccaaagctctatcccattaagtcaccagccatttaacacaacttctctctttcctggcaaggaggctatccaactcctatggatgtggcaaaaccctggctccaaggctgctttcccgtgaagccgacctaatctccaagtcttactctccccaacccctctctgtgttcagcttatacagtgggacaattatgagctcc

SEQ ID NO: 33981 - DNA, 1083 bp, Artificial sequence
  DNA replication origin
acggctgccttgcagaggacagggcagcaggtgtgcccagggcagggggcacacagggctcaggccaagctaaggagccagatcctaggggagctgggcaccagggagctacggagggcgcgtgagctggggagggcctccgagctgggtgtcgagaccctgcaggcagactggaggtgggggccaggggtaggctctgcacaccacccccccatctaccccatgactctccaccatggcccgaggtccacctggtgtcctggaagctgcccccgcccccacccagcttcctgactttggctgtgtccagagctaagaatagacgctccctgcccggcccccgccggaaaccgcagccacgggggtacatcctgagcctggcctctgttcccaccatctgccccccagcccctcacaactcctcccaccagagcctcctgtgctcccattgaacccgaagtgctggcggggggtggggggcggggggcgggccaagaccgggagaccagcaaccagccccagatgacagggaagcccagtgctcatgttccaatcccacacatgggcgtggcattgttccccctttgtgcctcagtttccccatctctaaaatttaagagtatctttaccccctgccttgcagagatgtggtgaggcttaagctaaatgcaagtgtccttctctgaactctgcccaggctgtttcccagaagagtcattgtccttgttatctcagggccgaggacagaggaagtggggacaggacagccttcctccgtctctcactgccccctcatctggagccccagccccacatcctcctcccccaacatctgccctccttgcagttagtgtagcaagggcctcatgctctctcttgcctccaaagctttatacatgcaattcctgtcactgccacgtagcccagacctggggagctcctattcatcctacaaaaccccacttcccatgccctctcctcacaagatgtcttcctagctcacctctgggcttccctaggccctgtctcttcctttggcccagccctgaccccagggggctggaacagcctgtgtccagttca

SEQ ID NO: 33982 - DNA, 2669 bp, Artificial sequence
  DNA replication origin
tttgccaacggcatcttccagctgtggtttcacttcaagcgctaccgctatcggcggtgacggccctggggaacggcaggcaggtgtcctcgggggcacagtaaaggggcttcggtgaagctggtggtcactccggggccgctgtctgggctgcagggccgcgggttcacgtcccacctcaggccgcatctttctttcgccaggcctcagtttcctcctatataaaaggggggtcaccattgagcctgccatggtgagctgaggagacactgggacaggctggcctagggtcctgatgcaacggagggggcgctaggggcatctttcgagcacgagggtggccagcagccgccagctgacctcaccgtccaggcggacactctccaccgcccctcagccaggctgggtggggcccacagggcctgccccaagtggcggccacacagggtgttgtggagatgggccagaggggcctgggcttggcggtgccaggctcgtgagaagcaggaaactcaaggccagccctgccacatcacggggcacccactgggcgtgaggcagagcccgcggctgtggggcagctccagccctgcccacaggccaccctcgcccgcacaggcagcactgaggccgggaccctgctggcgcccgatccgccactgcagaagagaccctctgtggacacccacactctgcagggactggcccccaactcaccccgtgctggctggtggggtccatttccccgcagcgggtatggaggatgcgtcgaggtccctgtctctgtcaaggtcgtgggaaccaaaagtcactgagccgtcctccccccacctctgagcacagggcctggagggcaggggctccccgaaggctgggggttggagaagggtgaggggcttcccccagggatccccccacctggcctgctcacggggccttggagcatgagaccagtgaccccgagttttgcccatatcaggacagtggctccttctcactcccctttctcaggccaggagggccgagggccacacgggtgccacagcccaggtcggagtggcccagccggcaggcttgttcttcagcatccgacgggaacatctccaacagaagcaaaacggaaagtgcctcccggacccccagagggccacccaacctcaccagtcaccagccccagaccacccacagcccctcccagacaccccgcctcatctggaaatagttccgtttgtttctctaaaaagacttgtaggtgggaaaaaaaatcttttgttctcatggaattggcctattggcaagatcgcatgtttttttaataaacgttgtattttagaataatcttaggtttgcagaaatgcagagagtgtaacgtgtccgacgccccacacccgctgccctagttgctgctggcatttgtgacacagcgcatttgtcccaagggaagagcctgggaaacaacacggcacccaactggggcccggtggtcccttgggagctgtgttagtgcccggatctgtctttgccccccacccctctgccttgcctcccacagtgggggtgacagtccatttcccagacgacaggagggagggtacaagggtggacacagctgctggcctgggcccaggctctcatgggggcagcgcttggccatgcctgggggcattcgtggtggtcccaccttggggctgctcctggcgtggagtgagtggaggccagggatgctgcccaatgtgcttcagtgcccaggatgagcctccccaaatgtcctcactgcagtaggcagaggtgcaaggcagatcctgcactcccctggggcactggtcacctcccagcccccacctctaacaggatcccggaagtctgtggcacagggcttgggaactggccagggaagtgcatctgatcagcgtccgctctccacaccgcagaccctggcccaccctgaccagcctactccagaatcccaaatcgcattgcagcacacacaacactgccatccccagcccagccttcagcagacatcacaagttgatggcagatggccagagccatcttagaatcctctgggcagcctcttgcctgggttcctggccagctccaccgccgatcaggacaggctgctggggcagggctgagtccgggctggactcggggggcactttttatttttttgagacaggctggagtgcagtgggcgtgatcacagctttctacatcctcaacaccagaaggcacttttgagcccagagtggtgtttgggacaggccgggttctgtagtcacagcccaggttgtgtgtgcgtggctggcgcagcccagcctgtactgggcctaacccagacctcccaccagctctatgtgacagtatttacttccatttggctgctcgggaaactgaggctcacaaaagcccacgttgttgagcccagaaagtggcagggccagtattagaagctgggtttctctaccctggagaatcccaatcccagaccaccaccccgtccctgcctcagtttccccacctgcccctgcagagattcccccagccccagcatcctgcttcctcctcctcacgttccttttgcaccccaagggagatggctgtcctccaactggcaagacacatggtttgccaggggccccagtctggagggagcagagctgggg

SEQ ID NO: 33983 - DNA, 1248 bp, Artificial sequence
  DNA replication origin
ctgcacgcgcactggggcgttccttcattcatcctgggcttgctggcccactggccttggggccacaggtggtggaagcttttaccggccgctgtccgagcactccctgggcagcctccgtcctaagacagaggagaaaatactggcttcagaaaacccctgggccaggaccccctcgggggtcatgcgtggggctggatcccgcagccaggccctaaccaccaggttctcctgtcgctcggcggggaagcgcgctgcgcttggtccccacccaggaggacgatagacatgaagaccaaggtccggggctcggggcggatggtgtgggtctccgggtcgcccaggccctgtcccctccccatgtgccttagctcgccccagcctgttttccttttgcgggaggcaccagcggccgcccctgccagagaggctaggagggaggccaggacccagggggaggccgaggcccgggtgaacgccgtcccgcccgcaggagacgccagcgagagcgccgaggacatcttcttccggcgggccaaggagggcatgggccaggacgaggcgcagttcagcgtggagatgccactcaccggcaaggcctacctgtgggccgacaagtaccggccacgcaagccgcgcttcttcaaccgcgtgcacacgggcttcgagtggaacaagtacaaccagacgcactacgactttgacaacccaccgcccaagatcgtgcagggatacaagttcaacatcttctaccccgacctcatcgacaagcgctccacgcccgagtacttcctggaggcctgcgccgacaacaaggatttcgccatcctgcgcttccacgcggggccgccctacgaggacatcgctttcaagatcgtcaaccgcgagtgggaatactcgcaccgccacggcttccgctgccagtttgccaacggcatcttccagctgtggtttcacttcaagcgctaccgctatcggcggtgacggccctggggaacggcaggcaggtgtcctcgggggcacagtaaaggggcttcggtgaagctggtggtcactccggggccgctgtctgggctgcagggccgcgggttcacgtcccacctcaggccgcatctttctttcgccaggcctcagtttcctcctatataaaaggggggtcaccattgagcctgccatggtgagctgaggagacactgggacaggctggcctagggtcctgatgcaacggagggggcgctaggggcatct

SEQ ID NO: 33984 - DNA, 1019 bp, Artificial sequence
  DNA replication origin
gggcgtggagagcgagccgctgttccccatcctcaagcaggagccccagtcccccagccgcaggtaggcccggccggcaccccggggacgccgatgcagacgcggagcaggatggaggggccgtgggcagcctccgcgcctccaacgctctctcctcccagcctggagcctgaggacgcggcgcccaccccgcccgggccctcctcggagggcggccccgcggaggccgaggtggacggcgcgaccccgacagagggcgacggcgacggggacggtgagggcgagggcgagggcgaggcggtgctcatggaggaggacctgatccagcagagcctggacgactacgacgccggcaggtacagcccgcggctgctcacggcgcacgagctgccactggacgcgcacgtgctggaaccggatgaggacctgcagcgcctgcagctctcgcgccagcagctccaggtcacgggtaagggcggggctggaggccagggggtggggccagtggggcgagctgggggcggggcttctccagcctcatttcccggccgaagccgctggcgtcagtggggagctgcttgctgcttctcccccgggtctctgagcgtgcattccgtcacctgcacgcgcactggggcgttccttcattcatcctgggcttgctggcccactggccttggggccacaggtggtggaagcttttaccggccgctgtccgagcactccctgggcagcctccgtcctaagacagaggagaaaatactggcttcagaaaacccctgggccaggaccccctcgggggtcatgcgtggggctggatcccgcagccaggccctaaccaccaggttctcctgtcgctcggcggggaagcgcgctgcgcttggtccccacccaggaggacgatagacatgaagaccaaggtccggggctcggggcggatggtgtgggtctccgggtcgcccaggccctgtcccctccccatgtgccttagctcgccccagcctgttttccttttgcgg

SEQ ID NO: 33985 - DNA, 3720 bp, Artificial sequence
  DNA replication origin
caggcgctcaccatcacacccagctattttattttttgagaaggagtctcactctgtcaccaggctggagtgcagtggtgcgatctctgctcactgtgacctctgcctcccagattcaagcgattctcctgcctcagctgcccaagtagctgggattacagacgcgcgccatcacgcccagctaatttttgtatttttaaggagacagggtttcaccatgttggccaggatggtctcaatctcttgacctcatgatcctcccacctcagcctcccaaagtgctgggattacagaagtgagccactgtgcccagccacttctgaaaattttttgtagagatggggtctcactgtgttgcccaggctagtcttgaactcctggcctcaagcaatcctcctgcctcacctccagaagggctaggattaaaggcatgagtgactgcatgctttttctttttaatttttacaaaattaaagtttttttattatttctgtaggttattggggaacaggtggtgtttggttacatgaataagtttttttgttttttgagacggtgtcttgctctcttgccaggctggagtgcagtggtgtgttctcaggtcactgcaacctctgcctcctgggttcaagcaattcccctgcctcagcctcccaagtagctgggattacaggcacctaccaccacacctggctaattttttgtattttagtagagacagggtttcacgatgttggccaagatggtcttgatctcctgacctcgtgatccacccacctcagcctccaaaagtgctgggattacaggcgtgagccatcgtgcccggccgtttacatgaataagttctttagtggtgacttgtgagattttggtgcacctagctttttctaggaagttctaaccctacaggaggttgtgcagtagaaaacgggtgtcatcccagctcagcttcattagcctcccaccctgtgtagggcctggcctttcccccacgcagccccagggcccttggcctgcacccccagcctctagcagctgctgggaccccctaaacccccgggcccccttgtgggcattcgggaggcatccagacatgcagcagcatgtccagacccggctttctatagacgctgacctggcggcacctggcctggcttcctgggagcctcgcggctgggctcttctgcttgggtttcagtgttcgtggtagccccgcctgtctgggcacggccgcgctgtgcttggctggggctgccacggattccagtgccacttagcgcccagcaaaggggctgcagctctgggtgccgattccagggtcccaggtgattggctggaggggactcgggtccgtctagactctatccagtcccctgtggtgtaggtgtgggcctcttgaccctctgtccgccagcggggactggagaaggcaggtctcgagcagggtgcctgcactggtcacccccgcccagtgtgtcaccagcagctatgcaccaagctccctgtgggcccagcatggcacagggaacagcagcagccagccccattgcccgcctcgggaagctgccatcgctggatggtcagggagggcttcctggcggaagggatgttctcactgagcatggaggatgcgaggaattcaggaagcgaatgggacagagaaggatgggtagctggcaggaagcacagtgcgtgcaaaggcccagaggtggcaggggttcggcatgggcagcaaggggcagggttgcgaggtgaggccagacccagcggggtgggtggaagtggcctgagagcagcactgaggccgccgggatgccacgtggtgtggggcagagcacgcggagtcaggctaggctccagcctcccagcaccccactcccgccctcagcagcctccccgtctatcgaggagggacttgagcctcgggcccctgggccagtggtagatgccagacagactccatgtaggatggggggcggcggtggggagctgtttgtcctggggcgggcccaggacttccccaggggccagcagggtggccttctttgctaggcttcacagagggaaactaaggcccagaaagggcaggccacttgcccacagtcacacagcccaggctggcagagaagatctgaattccagagagcctggctaccgagcacaccccccaaccccctcatggactgcccaaggccagggcagagttgggccaggttggtgggccgggcccacaactagggttcccagacccacatatcagactcacctggggaggggcattctcagggccagtcctggcctcccccacgctgggggcctgggcctccaggtcaaggcctcagcaactgcatcttaacgtggctcccaacctccgcccaccccctcccctccgctgtggccagggtggggacaacctgagaccagggaggtggcgggactggatgggacccctgtgggggaagaggaggggagggggacccccccatggcaggggaggaggccctgatggggtggaggagcacgtaggaaatgtggaaccgcccccccatgcccccaccccgctgcaggtgagcgccgcgagggggtcaacgcctccgtcagctctgatgtgcagtcggtgttcaaggggaagacatacaaccagctgcaggtcatcttccagggcatcgagggcaaaatccgcgctggtggccccaacctggacatgggctactgggagagcctcctgcagcagcttcgtgcccacatggcacgggcccggtgagcactaggtgcgggtaccagggttggtgccgtccgggtgggatgggtttcgccccctcctgagtcctgggtggggtgggtctcgcctcctcctgggaccatgtggggtggagaggggcaggaaagtgccgactggccggggccagcctgtgagtgacgaaggggggccggggggcgcgtagtcccgtgccctagcgggaaggccccaggatgctccagtgccctcacctggagtcagccctgttggtctcacagggctccccaggagcttccgccctttaacgagtacctggcgcgctccagcagccatggcatcacaggaagcccccaggcggcctgcctgtccccactgccttgcgcccaggcctgcgccctcccagcgctgctgcctcccggcctctggctgtgtacagatttctggagtgtttttggcaccgctgtgtaaatacatgtctcctctgctaatttgtaaatgtctctaaatttatcatgcttgttggctggtgtcctgctgggccccttctcctggccagccccagccacaagacactgagactgcagcgtgagacagagacccacctctccctgccatgggatggttcaccagggtacctgcgtcctctcgtcctctctcccataagccttgaccctgaactgaccaagcctgggcaaaggtcccagccagagccgtggctgctcgccaccttctcagggtccttgcagcaataaggggcgtgagaatctcggtgggggtggggcgcggagccccttcgcctccatgcgggtgaccccggctctgcgtcccaggctgcgtgagcgccaccaggacgtgctgcggcagaagctgtacaaactgaagcaggagcagggcgtggagagcgagccgctgttccccatcctcaagcaggagccccagtcccccagccgcaggtaggcccggccggcaccccggggacg

SEQ ID NO: 33986 - DNA, 1400 bp, Artificial sequence
  DNA replication origin
caccctagggaacggcccagcccgcatgtccgcagtgctcagggtagacgctttagagcatccccggtgaccatgtgtgtgcaaccacacggaggggggggaaacgtgattttaaaagcccatcaggttggaggggcacgaactgacgcacgggacaggtagcgccctgaagctgggctgcacggccttcaggccaggtggagcgagacttgctgtcaaacaggcagagccactgagagcactgaaacctgagcggaaagccccgtggctcccataaggccggcaccgccgagtcagcgttaacgggacgctgggtctggacgctgctggccctgcaccccagacagaggcccgccccactcatccctcccagggcctactgcccgctgctgccccctggtggctcggcccagaaggggaggccccagttggggaaaccgaggcctgcagagagcaccaggccccacagcaagtctgaggcttctgggtgaacactgtagcccccgcagctcccctggagcccaggcccatgcccgccgttacctggccccttgcccgaggcctccagcttgcggagcttggagatctcgtcctcggtgatggtggtcatgtcccgccagaagtcggcgttcttgccctgctccagctccatgtagacctgggggcagggggcaggggtcaggacacgggtgtggctggggtgggggtgagggtgcaggtcagaggagcatcgggtggggctgggtacctggatatcctccagcaggtcctccatgtcggccacggtgaggccgttgaggaacgtgtagggctcatgcatctccacggccagatcgtcatcctcagcgctgatgtacttggccagcaggtcgatgggcttggcccgcccgtcccggatgcggatcttggaactgtggggagcaggggaaggtggcatcagagcctgggctgtgccctccatgctaaagaccctgcccttggggtgaccacaccagtgggagccgaggaggggcctgacccgttgggggtggtcagggaaggcttcctggaggaggaggaggaggaggcataaggtagagtgagccgggtcagccaaagggcgcaggccagcagtgcagacaaagtgcaagcagcgtggacccggaggtgggccaggtgggaggggcttcctggagggcctctgggatgtgcccaggatggcggcttctatgtgggctgtgatggggaagagtggaggagctgaagcagaggcaggctgggggaccagagtagtcactgccttgcaaccacctcctcccccaggcagaccactcggggcagagagccgggtttctgttctgggcctgcaggggggtacgcgttgcaggcgggccctggtccaacccaagggaacccgtcac

SEQ ID NO: 33987 - DNA, 1230 bp, Artificial sequence
  DNA replication origin
gaagatgtggtcatcgttgacgcctgtggaagcggccccaggctgggttggatagaccacagagtggcccgggtgtctgggggtggtccccagccaggcagcctgtgtccctggaggcaagttctgggcggcaggggttcctggaaccccctcatggcgacggggcaccgggagcctgaggaaggtggtcgggaagtgggggctccgcgccaggctctcagacagctgctggaagaagccagctttgagggtctccaggctgggacaagcccatcagtggccacccctgtgccccgctgtgtgggcggggccccatgaccccacaggtttgctttcagagctgctgctgcccccactcactgttcctgccctgtcccacgtgcagtgggggaccctgacttgctgagggcgtggccttcacgtccgaagcactcagactcccgggtaaagcgagtcagcaggccccgagcaaggctcttctgttgggggctggggtggccccgagcaaggccctcctgttgggagttggggcggccccgagtgaggccctcctgttgagagttggggtagccccttcttaccctttgcatacatctcactcccagtgggggctccatgtctgcactgaattggatgcactgggtttcaggagtgttaaggagggggtggaagacgtgcagtgctggcaggtcacctctctctgcaaaacaagggccctggtcaatctcttggacgaaggagctgaggaggggggcgagggggcgggtctgtgctcagggcaggtgtgcctggtgcttccaggccctggagaagaaggggatcagccacctggaggagaaggagctgaaggagcggaacaagaggatccaggaggacaaccggctggagctgcagaaggtaggcaccctgccagcccactgggcagggccctccctttccagggcctggaggcccgccccctttggcaggacttgaggggcttaagtgggaagtcctgggggctggcttcaggtaaggctggatccaggggctcagaccatggccccaggaaactgtttccctccacctctcggctctgctggcctcgggccttcactcccacatgctcccttcagggtggccgagagggccccagctgatctgagctgctgagtctcgggcaggagggccctctcccttcccaaggtctgtccaccagcccaggcatctccggaccaatccctgtgccca

SEQ ID NO: 33988 - DNA, 1275 bp, Artificial sequence
  DNA replication origin
tcctcctggatcctcttgttccgctccttcagctccttctcctccaggtggctgatccccttcttctccagggcctggaagcaccaggcacacctgccctgagcacagacccgccccctcgcccccctcctcagctccttcgtccaagagattgaccagggcccttgttttgcagagagaggtgacctgccagcactgcacgtcttccaccccctccttaacactcctgaaacccagtgcatccaattcagtgcagacatggagcccccactgggagtgagatgtatgcaaagggtaagaaggggctaccccaactctcaacaggagggcctcactcggggccgccccaactcccaacaggagggccttgctcggggccaccccagcccccaacagaagagccttgctcggggcctgctgactcgctttacccgggagtctgagtgcttcggacgtgaaggccacgccctcagcaagtcagggtcccccactgcacgtgggacagggcaggaacagtgagtgggggcagcagcagctctgaaagcaaacctgtggggtcatggggccccgcccacacagcggggcacaggggtggccactgatgggcttgtcccagcctggagaccctcaaagctggcttcttccagcagctgtctgagagcctggcgcggagcccccacttcccgaccaccttcctcaggctcccggtgccccgtcgccatgagggggttccaggaacccctgccgcccagaacttgcctccagggacacaggctgcctggctggggaccacccccagacacccgggccactctgtggtctatccaacccagcctggggccgcttccacaggcgtcaacgatgaccacatcttcctcctccatggctgcccgcccagagctcacggtggtgcccagcacaccgcaggtgcacagcacatggtggcgatgaagtgccaggcagcagtgtgtgcctcaataaagaactctggggggtctggggagcaaggggccaggaaggggtctctcaagaggggatgtgtcagttgaggcctgacggaagagaacagccggggaaggggcagagcatgtccaggcaggggcgcggcagtgtgagggccccgaggcggaaggagctcgttgtgttctcagacgacatcgggcagaagccacctggagaccccacagctcccaactgcgcaaccggcgagcaggtgcagtcggcccagcccacacgttgcctgctccaccccctccacaagtggatgctgcttca

SEQ ID NO: 33989 - DNA, 1480 bp, Artificial sequence
  DNA replication origin
ggaaggggcagagcatgtccaggcaggggcgcggcagtgtgagggccccgaggcggaaggagctcgttgtgttctcagacgacatcgggcagaagccacctggagaccccacagctcccaactgcgcaaccggcgagcaggtgcagtcggcccagcccacacgttgcctgctccaccccctccacaagtggatgctgcttcagatgagctgtgtcccccacaggcacatccccgtctgaacccctgcagctgtaatcatgaccccatgtgaaatgaggtcttggccaggtatggtggctgacacctgtaatcccagcatattgggaggccaaggcgggcagatcacttgaggtcaggagttcgagaccagcctgaccaacatggttaaactctgtctactaaaaatacaaaaattagctgagtgtggtggcacccgcctgtaattccagctacttgggaggctggggcaggggaatcacttgaacccaggaagcggaggttgcagtgagccgagattgcgcctttgcattctagtctgggcaacagagtgagactccatctcaaaaaaaaaaaaaaaaaaaaagtgatgaggtcttgcagacgtaggtaagatgaggtcatcctggaggtggcgggccctcatccaatgcctggtgtcctcatgggaagaggaacatttacacacagacacacagagcagaaggccgtatggagacagagacgggaaggcagaccgccacacaacacaggaacaggccgggttctgcggctgcaagccagggagggcccaggaatcaccggccatgactggagctgggagaggcaggaggggcctcccctcggcccccagagggagtggggtcctgcccacacctgcccacgccttgattttggacttctggactccagaacgaagagatgataagttctgttgtcttatgccactggtgtgactggtggctaaatggcaggcgcagaacgaaagaaccagctcagacgacagagcgcctggaactgtggaaccctgtcctgggtacatgatgccaagagctggctctctagataggtttcaggttgggctggtgttcggggcaaagaatggctgaagcttacaccgcaagagacacagttaatggcaagaaaatgacggtgggctgggcgcagtggctcatgcctgtaatcccagaactctgggaggccgaggtgggaaaatcacttgagcttaggagttcgagaccagcctggccaacatagtgagactccatctttacaaaaaaataaaaaattagccgggcatggtggtggtgcctgtagtcccagcaagtcaaaacgctgaggtaggaggatcgcttgaggccaggaggtcaaggctgcagttagccacgatcacgccactgcactccagcctgggtgacagagcgagaccctgagtcaaaaaagaaagctggccgggcgtggtggctcacgcctgtaatcccag

SEQ ID NO: 33990 - DNA, 884 bp, Artificial sequence
  DNA replication origin
gcctagtgttgcgtggtgtgtttatttgttgatgtcttccttgttggggcccaccagagggtgagcccaggaaggcagaagccatcggtatttgggtcactgctgtgtccccagaacctagaacagtgcctgctcccccacgggcacccagtaagcatctgtggagcagatgacagctgcaggcactgagcaggcatccatggtcctctccgcaggtcagattcagaggaagagcggtggcagcgctcagggatgcgaagccggagccccccgcggcccaagtggcactcaagagatgggtcctctcagtcggactcaggagaggagcagtcacggggccagtgggctcgccggcgacggcgcgcacgctcgtggtctcctagctcctcagcatccagctccgcgtctccagggcgatcccagagcccccgggcggccgcggctgccctgagccagcagcagagcctgcaggagcggctgcggctgcgggaggagcggaagcagcaggaggagctgatgaaggccttcgagacgcccgaggagaagcgcgcacggcggctggccaagaaggaggccaaggagcgcaagaagcgggagaagatgggctggggtgaggagtacatgggctacaccaacaccgacaaccccttcggagacaacaacctgctgggcaccttcatctggaataaggtgggccccgccgggtggtggcctctgtccctgtagcatttccactgtttctggagaccccaacacttgagacactcccagcctgcccttgatcgtgcaagagttggttttacacacacacgcataagcaagcttctgccgctatcagctttcttttttgacacagggtctcgctctgtcgcccaggctggagt

SEQ ID NO: 33991 - DNA, 1096 bp, Artificial sequence
  DNA replication origin
ggtgttggtgtagcccatgtactcctcaccccagcccatcttctcccgcttcttgcgctccttggcctccttcttggccagccgccgtgcgcgcttctcctcgggcgtctcgaaggccttcatcagctcctcctgctgcttccgctcctcccgcagccgcagccgctcctgcaggctctgctgctggctcagggcagccgcggccgcccgggggctctgggatcgccctggagacgcggagctggatgctgaggagctaggagaccacgagcgtgcgcgccgtcgccggcgagcccactggccccgtgactgctcctctcctgagtccgactgagaggacccatctcttgagtgccacttgggccgcggggggctccggcttcgcatccctgagcgctgccaccgctcttcctctgaatctgacctgcggagaggaccatggatgcctgctcagtgcctgcagctgtcatctgctccacagatgcttactgggtgcccgtgggggagcaggcactgttctaggttctggggacacagcagtgacccaaataccgatggcttctgccttcctgggctcaccctctggtgggccccaacaaggaagacatcaacaaataaacacaccacgcaacactaggcagaggcagaagccacaaagagtagcaatgccgagcacaggggctggggctgcagggccgaggtcagagaggggctctctcaggagctgacactgagccaaggtctggagggagtggggaggcagcgatgggtggattcggagggagagtgctcgaggcagagcaagagcgagggcctagaggcaggcactgacctgccacattctaagaacaacaaggaggctgtatggctgagacagagtgtgggggagagggaggaggcgcgggcagggaggtggctggggctggtggcgcaggaattataagggtacgaaccaggggacccgaacacatttaggctgtcaagggagggcttcctagatggaagtggtatttgaactagtcccacaggatggacaggagttaacagagtagagcgcagggaatggaagatgcacaacctcaggggtggttcaggg

SEQ ID NO: 33992 - DNA, 969 bp, Artificial sequence
  DNA replication origin
gctggggcgacgggatgggttgctctttcccggctcaggcgcaaacggggcagcctggagagcgccgtgggcgaggaaggcccccagcgcaggcttcggctattggtgttggtgccgcggccactggcccagccgatgggtcgggacacacgctcgcgctcgcggtccgcgggtcgccggggccgaaggcggcagagtcagagcgggagccgaagtcggagcaggagccatgggcggcgaaaccgacggcgccgggaggacgagggacggcgcagacggaggcggcggagccgggagcgcaggtggggtcgctgcgggagcagcgctggggatccggctcctacctcaggagcgcccgaccgagggttggagatcccggggaaccgggaaacccccgacttactcggggagggcttcctagagaaggggacaattgaccaccggttggaattaacctggcagcggaaggaaggcgagaggcgttccaggcaggggaccgggcggttggagggacagcccggagccgggtgagcgaggcggcggggaggtaacgagagatcagatcatatcatatcgagccctgtgtgctcagcacattagatcttggctattagtcggagggaaatggagagtcttgagaggagtttgggtaggggagtgacgtggactgacttaactctgcatactttctggctttgaggtggagaagggatggagcggggtaggcaggagcggcatcagagtaggacggcacaattgtccagacagtagatgatggcagtctcgatgggagggaggctgtagtcaaccacagcgggcaaagtgcgtagatttcagagggattctggaagtagaggagacaacatttgctaatggaggtgggctgtgggagggaaaaagactcggtgtcagctggcaggactcacagctgattcctagtgcctgaatctcagcttccccatggtcctt

SEQ ID NO: 33993 - DNA, 1347 bp, Artificial sequence
  DNA replication origin
tctaggaagccctccccgagtaagtcgggggtttcccggttccccgggatctccaaccctcggtcgggcgctcctgaggtaggagccggatccccagcgctgctcccgcagcgaccccacctgcgctcccggctccgccgcctccgtctgcgccgtccctcgtcctcccggcgccgtcggtttcgccgcccatggctcctgctccgacttcggctcccgctctgactctgccgccttcggccccggcgacccgcggaccgcgagcgcgagcgtgtgtcccgacccatcggctgggccagtggccgcggcaccaacaccaatagccgaagcctgcgctgggggccttcctcgcccacggcgctctccaggctgccccgtttgcgcctgagccgggaaagagcaacccatcccgtcgccccagcccgcaaggactccgacaccccagactttccactacgtctgcaaatgtggaccgcgtgattgactccagtgggattgttgcctccagggtggcggagtctcctttcaggcagtgctggaggcagccctaggcgggtccccacgcctcagggggcctgagaaactgtgggcggggcaagggcaaactaggaaccttgtgcagggaggggcctgccgaggcgagaccaataagaagcgggtctaggtcggaagtagcgcttcattggcgtggccaggggcgtggccgaggagaggcgtgtccggggagcgaggtccccgaaaggcgaggaaccgggaaggtgttaggtgccaggcagctccagagggcagagggcgggcgcggggacagaaactgaaaagccttcttatgagagtcatcgttatgctccaccacctgccaatgaacacctatgtattttgggagttaagctttaaaaaaaaacaaaaactttgataactccctgtattcccccatcaacccattttagagacggggaaactgaggctcagagagggaaagtcactcttaacacttgccttctcaacccaggctgcccagctttgtggtgtgggtgctggggacccgtgggagggttgtgagcagggtttgggggacttgctgttgaaacaagtttggcgtgggaggacggacttcaggggcaaggctggaggccagagacctagaagacgctgatgtcccatcctgagctcccctagcccatggtggctgctaccaccaccccgtgcagttctaaccactcggggctgggaaggcctgtttatggaggatgatagtaatttaagctaacttttaaaatatttatcttggccgggcacggtggctcacgcctgtaaccccagcactttgagaggccgaggcgggcggat

SEQ ID NO: 33994 - DNA, 1385 bp, Artificial sequence
  DNA replication origin
tcactccactgcgctccagcctgggcaacagaacgagactccatctcaaaaaaaaaaaaaacaaaacacaggctgggtgcggtggctcacacctgtaatcccagcactttgggaggccgaggtgggcggatcacgaggtcaggagatcgagaccatcctggctaacatggtgaaaccctgcctctactaaaaataaaaaattagctgggcgtggtggcgggcgcctgtagtcccagctactcaggaggctgaggcaggagaatggtgtgaacccaggagacggagcttgcagtgagctgagattgcgccactgcactccagcctgggtggagagcgagactccatctcttaaaaagaaaacaaacaaacaaacaaaaacagaaaacaaaaaacacagaacaaagtcactcctcagactcccaaccagacctccggaacccacagaaaggcaaacaggcggatgcttattacccgatttattagagagatctctaaaaagacggggtgtggcgggggtaggtgggcgaggaacctgggatgcaaaccagtgtttggggccaggagtggctgtatggtttcagaggcgcccaccactctgggtttgagggacacagcaccctcgtctcggcgctttggattgtcacgcaccagaccacggggcggaggaatggagtggcatccctggggggagttaagacacacgaggtttgcagtttcattttgtttcagaatcagtttggccataaaaatgggactgggttggggacaggcggagcgattgaaccaccggagatgaggaggaggtggcaggcgcctctcctggggtggggactgagggctgtggagacagtaccatggtgaaggaccccatggcaatgggagtattgcactgagccaggtttcgggggaacggggacgtgtcgggatggcgtagggggacagagcctggcaggagacacatggaagtttccgccttgtcagtctcagagcaaacgccttttagtctttacagtacaggaatttggacactgcccacgttctcagtggacagcagccatcagaggtgacccaggaggggaagtgggcattggtcaccaaggtatttacagacttctatcatgggggacagcggggtgggtccagcagcctccctcgcgggggatctgagggagaccgagttcgctaaatattataaataggtcttgccgtcctcctgcccccgcccctcggcacagtcagtggagcacgtcagcctcggtttacagttctctgaaaaggaaccaaaaaacacaaccaacaccaagtatatctccaaaagggccttggagacaacacaagaatggaaatgaaatggtatccacagaggtttgcacatttctcctgca

SEQ ID NO: 33995 - DNA, 1363 bp, Artificial sequence
  DNA replication origin
tacagtacaggaatttggacactgcccacgttctcagtggacagcagccatcagaggtgacccaggaggggaagtgggcattggtcaccaaggtatttacagacttctatcatgggggacagcggggtgggtccagcagcctccctcgcgggggatctgagggagaccgagttcgctaaatattataaataggtcttgccgtcctcctgcccccgcccctcggcacagtcagtggagcacgtcagcctcggtttacagttctctgaaaaggaaccaaaaaacacaaccaacaccaagtatatctccaaaagggccttggagacaacacaagaatggaaatgaaatggtatccacagaggtttgcacatttctcctgcaaaggcgcgtcggccgggcactggtgtcccgtgtcactcagcggagggaggctgccctggacgcggtgccgcccgcccggggccacacctgctgctccgagtcaccccacaggctcttggcgtctctggtgccagggctctgggcagggcgactcgaggactccctgggaggactggtgtggcctctgggggttgggcctttgagatgacaatgcccctgtccctgctggccatccaggtcccagacaccccttctgacctctgcccctgcctccccggggggtgcctgctgggtgtccttcggagggacagggcgggggctgatgggtggatgcccggtgccagcagatgagcaccaggctgtgaactgaggccaaggtcgcttcccagggctggacagaccctctgagcacgcagggaggaccccacgtgggcttgtcctgatggatgctgggagccacgcggctggccggttcccgaggagggtcggcccctctcctgggcagagtggaggggctgctctcgtggagtgtgtgtcctcgctggggacctcggggatgggtccggcttctccacagcaggggccttccgggcgcagcgtgtgggctgtgcaggaggccgacgggacgtgaacagcgggtggcgtggcgtcatacggaggttgtaacagacaaaacacagagccctgcctgggaggttctccggccgtctcagaccccacaccaggctctgccaggtctggagaggaattcttcccaaaggtgcagcttccactccagctcctcacatcctgggcacatcttggaagtgggggattcccacagccatcaccaataagcccctctcaggggtcctggggaagggcagggtgggtgactctgccgagctctggcctccaaccagcaccctctgagcgcagcgggcccaggaagctgccccagggcagtctgggctgagtcccaccactgggagcgctgccctcttgg

SEQ ID NO: 33996 - DNA, 1158 bp, Artificial sequence
  DNA replication origin
ttctccggccgtctcagaccccacaccaggctctgccaggtctggagaggaattcttcccaaaggtgcagcttccactccagctcctcacatcctgggcacatcttggaagtgggggattcccacagccatcaccaataagcccctctcaggggtcctggggaagggcagggtgggtgactctgccgagctctggcctccaaccagcaccctctgagcgcagcgggcccaggaagctgccccagggcagtctgggctgagtcccaccactgggagcgctgccctcttggagggtgatgagtcggaaacaaagtcttctctcccctcctcggagacatcacatcacttaaacaagaaagaggcggcggacatccacaccagtcctgaaggagactcctgtggagccgggcctggccccctaggccatgtctccacgtggagggggcggggagcctgaccttccgccctgagctggtctcctgtggcccaaggcccggcctcccgctctgtcctgccatggagaaaacgtctccgttgcctgggccctccatgccagttgctgagtggcctacgttggaagagaaggacaagtccccagccctgagctccgccagcgtgggtggcagcctggggaagaggaggcctggccctccagctgtggtgggtctggattggaggcgccagaggtttttgctcgaggggcacctgggaggtgggcgtcagggccccactgcggcgggaacatagctgctgagtggccgcagtgcttggcagggcgagggctgtccccacagtcgatgttcaggccagatgtcctgcactgaggcccccaaacccaagctgagggcaggagggtccgcttcccacgtggatggaggcagagttgctcgggaccccagccgtcccctctgcaggccgatggggcccccggggctcaggtccccagaggccaccgcgaacagcctggcttcttcctcaggacacaggcaggcacagcagagaaccaaagagtgcagtgggcaggggctcttctccctctggttggtttgtttgtgtcttttttgttcttttcctaaaacggcacacacgtgcttccgtctctgtgccaaataaggactcaaatgcgattggccgctcgggagggtgggtctcacagggg

SEQ ID NO: 33997 - DNA, 1579 bp, Artificial sequence
  DNA replication origin
actgcggcgggaacatagctgctgagtggccgcagtgcttggcagggcgagggctgtccccacagtcgatgttcaggccagatgtcctgcactgaggcccccaaacccaagctgagggcaggagggtccgcttcccacgtggatggaggcagagttgctcgggaccccagccgtcccctctgcaggccgatggggcccccggggctcaggtccccagaggccaccgcgaacagcctggcttcttcctcaggacacaggcaggcacagcagagaaccaaagagtgcagtgggcaggggctcttctccctctggttggtttgtttgtgtcttttttgttcttttcctaaaacggcacacacgtgcttccgtctctgtgccaaataaggactcaaatgcgattggccgctcgggagggtgggtctcacaggggcaggctgccgaccggggtgccggggccctgggaggcttgtcggggaggggcccggccgtcggcatccgtgcagggggaggacgaggtccggtggggcggcgaggcgggcatctcccgagctctgggcctcagcggggtgggcagcgccttcgggggcagccggagcagaagtggagctcggctctgggtcgggggctgcatagaaattactgcaagagcaagaggacaggtgaaggtgggcggggcgagggcccaccccaggccccctgccagggactggcttccttgggccaacacaggccctgagacacttagcccacggccacctcagagccagagagcccagggtggagctctgggccacctgtgccctcccgccccgggcctcagtccctgcctatcccagtagctggggaccacgctcagtagaaccttggagcccacgggaccggcgggtgcacctgggctgcacttactgtgtcgctctcgccgtcggaggccgggggggcctgggcgctatagtggagcggggagtacacccagctcctctcatcggtgggctggcaggtgggcgcgcgtgcaggagggcgcggaagagcagggtgcgaggaggtgcaagagaggcagagggaggaaggaagagacaggagaacataaaagaggcgaatcccccatggaagacgaggggtggctcagcccagctgccctctctgacccggtggacttgctcccaacctggacgggcctggggcctcagctcagcttggcggggcggggcacggcgggcggcagaaagcagttagttcagtcgaggcagggcctgagatagcaggtgacagagccggcggaagcgggtgggggtcgcgacctggagcaccgagtgttcctcctcctcctcctcctccacagcccggccccaccacagcccccaatcctgcctgtgccacgggcaccagcgcacaggctcctggaagctctctatgggggtcctgggaggtcggggtgccggacctacttcccaacccagaagccttttgggacctgaatatatggctgcctgcgggcagggccagtcccctctgccagcacagacgtgctaggagagactgaggctcggaccacccaccctgcaagagccaggagacgcct

SEQ ID NO: 33998 - DNA, 1018 bp, Artificial sequence
  DNA replication origin
ccaaagtgctgggatgacaggcgtgagctcctgcacctggcctgtatccccgtttctaatgctgtagcagaaggatactgtcatccctgcccacgtgctgtgtgtgcccgggatgcccctcccagagagcggctctgaggtggctgctgccaccctcctccctgcgggccagttctttcagggctcaggtggggaccctgttttggccccacattttcaagtccccatgggatccatcagtgcagccaccaaatcagtactgagcacccacataggctccccatgccgggctctcaagggacgttgggtggacctgacctgccattcccacgtcagggattccaggctgcatttgctaccctggaggaacaggcaaggcctgcgctggggtcctggcccctcagtgcaggagtcagtcctccgcgatgcggcctcgcagggcaggagtgcgctgccctcggtgcccagggcccgggaacaggggtcttgtggaagctgtaggatcgggcagggtggagtgagcacagaggtgggccctttagagggagcatggaggcagagcccgaggcagggagaggcagtgctcctgcaggtgaggtctgggctcacctggagcacaagggaggcccctgctggcccaggctgggcaactgggagctggcagaggcatgggttggcctgggcagcaggtgggcagcgtcatcctgactggaaggacgagcagtgggtcttggggtgatggactgggttgtgactgtggcgagtttaggggccgagggccgccaggtggacgtggccaggcaggtgtgtattcaggcctggcacttcaggccgaggccaggcctggtggaaattcgcaggtcatctgtgccgggaggggcgttgaaggctgggttggtgacagaggcccgagagagaggaggacacaacaaggaagacagggcggccaggctggagccctgagaaagcagagcagcctaggggcaggagaagcagggggagcttgagggggtggggg

SEQ ID NO: 33999 - DNA, 1597 bp, Artificial sequence
  DNA replication origin
acctcacagatggaggcgctgaggcctcggctcccctgggagcctgggagaccacacggtttagtcaaaatccagatccccaagctctcaaggaggtccccctgggacgccacatgggccccacgtagctgtgagatcctcagggcctgctgttgtcattatgaccaataagcaaggggcccagagagcctaagagacctgcccagcaccgcacagccagaacggggcgcagacccaaagcaggagtgtcccctcgagacaaagcctccgccgaggccgccgtgactccccgcccatcagcaaacctctccgagcacctctgtgtgccaggcactgtggagtgaccccaagaggtggagaccacttccccggctgctctaggcagctccgtcccacggagccagcgggaagccagccaccgcgaagccgtgccccggagatcgtccaggagctgcccagaggggcctgctgggaggaggagcactggagagacccagcggccctgctggccaccccaccataggcagggagcagttcgcagaggccgcctacggaggggggtgcttggactttgaaaaacacctgacttgaaggggcagacgtggggagggtggtctcggcagcaggcacagcagaagcggaagtgtgggggccagaagggaggcagggcagccattgaaagcaccccaaggcctgagtgctgaagaggctgtgcccttggttctggtcttcctggggtcacccggttctgggtcccagctgctactgccccccacttcccctgtctgcccagctgctggctgagggtgtccctctctgtccccccaactcctgcaggacaaggaagccacctgtcctgccctttcttttttttcattttttgagacggagtcttgctctgtcgcccaggctggagtgcaatggcatgatctcagctcactgcaacctccaccccccaggtacaagcaattatcctgcctcagcctcctgagtagctgagattacaggcgcctgccaccatgcctggctaattttgagttttttgtttgtttgttttttgagacagagtctcgttctgtcgcccaggctggagtgcagtggcacaatctcggctcgctgcaagttccgcctcccgggttcacgccattctcctgcctcagcctcccgagtagctgggactacaggcgcccgccatcatgcctggctaatttttttgtatttttagtagagacgaggtttcaccgtgttcaccaggatggtctcaatctcctgacctcgtgatctgcccgcctcagcctcccaaagtgctgggattacaggcgtaagccaccgcgcccagccttgtttgttttttttgagatggagtctcactctgtcacccaggctggaatgcagtggctcaatttcagctcactgcaacctctggcctgggttcaagcgattcttctgcctcagcctcccgagttgctgggattacaggctcctgccaccatgccccaataattttttgtatttttagtaagagatggggttttaccatgttggccaggctggtctcgaactcctgacctcaggtatctgcccacctcggcctccc

SEQ ID NO: 34000 - DNA, 1243 bp, Artificial sequence
  DNA replication origin
agccagcagctgggcagacaggggaagtggggggcagtagcagctgggacccagaaccgggtgaccccaggaagaccagaaccaagggcacagcctcttcagcactcaggccttggggtgctttcaatggctgccctgcctcccttctggcccccacacttccgcttctgctgtgcctgctgccgagaccaccctccccacgtctgccccttcaagtcaggtgtttttcaaagtccaagcacccccctccgtaggcggcctctgcgaactgctccctgcctatggtggggtggccagcagggccgctgggtctctccagtgctcctcctcccagcaggcccctctgggcagctcctggacgatctccggggcacggcttcgcggtggctggcttcccgctggctccgtgggacggagctgcctagagcagccggggaagtggtctccacctcttggggtcactccacagtgcctggcacacagaggtgctcggagaggtttgctgatgggcggggagtcacggcggcctcggcggaggctttgtctcgaggggacactcctgctttgggtctgcgccccgttctggctgtgcggtgctgggcaggtctcttaggctctctgggccccttgcttattggtcataatgacaacagcaggccctgaggatctcacagctacgtggggcccatgtggcgtcccagggggacctccttgagagcttggggatctggattttgactaaaccgtgtggtctcccaggctcccaggggagccgaggcctcagcgcctccatctgtgaggtgggtgtggagagaccatctcctccccgtctccatggccctgcggttcagagcccggccctgcagccactctgctgacctgtgcaacctcccctgtgcagccagcggggccacgggcagccaggtctgcacgagtgagaagcgtccacccaagacaccctgacacgagagggctgggtccaggggcagagaggggctcgctggggtctggccggggtccgaagcagaccctgggcctcagctgtgcacctggtgatggtgctgccctatggagcgcccggttcgacgtgggaccgaatgacattcccagtgacgcatgcagcccagcgcctggtccggggccagcgtggctgacctcaattgcagccgtgatttacccaaagcccttctggaaaacaactgacgtcagacactgagcttccggccggggacctgcggctccc

SEQ ID NO: 34001 - DNA, 1075 bp, Artificial sequence
  DNA replication origin
cgagtgagaagcgtccacccaagacaccctgacacgagagggctgggtccaggggcagagaggggctcgctggggtctggccggggtccgaagcagaccctgggcctcagctgtgcacctggtgatggtgctgccctatggagcgcccggttcgacgtgggaccgaatgacattcccagtgacgcatgcagcccagcgcctggtccggggccagcgtggctgacctcaattgcagccgtgatttacccaaagcccttctggaaaacaactgacgtcagacactgagcttccggccggggacctgcggctccctgctgcccgaggggcactgccccttctccccagggtggccggctgcggtcacttacagtccccgaggcgctcagcgtcacggcccgcagtcggcgatggcggggagagtaaatccagtacctcccatccgtgaactggacggggcgggccgggtgggccggaggaggaaggaaaacagaggacagcggatgaggcggccacccccgtggtcgggtgggagaggcggagggaggtggcggggagcaggtggggacagctgactgccaagcagaaggtggggggtgccggggcaggggcaggaccgaggacccttctcccttctctgctgcccacctggcagggcatcaggacacagacacacagcacgacatggcccccaggccccccgtaccatccggagaccaggacgcgcacaaaccagtcccaggaaaaggggtgacgacgtgcggtgggtaggggcacaggcacgcggcccgtccctcccttctccagggccaggtgggtgcatggggaccccagaggcgccactggagacagagcaggggagttagttatgaagcagcgaggaggtgcccccacaacaggccctaaggcctggtgcccgtgcccagccctccttcccagggggtgcagggtgagaacaaaccatctgggaagtgggctgcagcctccggccctccctgtgacctggggctgcctgatctgagtgggaccactggggagtggagacgctgcctggacattccaggcctcgctggccgcc

SEQ ID NO: 34002 - DNA, 1231 bp, Artificial sequence
  DNA replication origin
ggagttagttatgaagcagcgaggaggtgcccccacaacaggccctaaggcctggtgcccgtgcccagccctccttcccagggggtgcagggtgagaacaaaccatctgggaagtgggctgcagcctccggccctccctgtgacctggggctgcctgatctgagtgggaccactggggagtggagacgctgcctggacattccaggcctcgctggccgcccggcagccacctcacccagaccctggcaagggagagcagggatcccaggtccccagggccgggcagaccctgccctgcccagtagcagccacgagtccccagcccacggcgtgggagcgtgaagccctcctgccactgcccggtcccccggccctcctcaaggataagcccacctggccacgcccacggcaacagggagaaggtcctgccgccacagccctgtctggacgtctaggctgtcaaggacacaggacctcagcctgtgccagggcctcccgaggggccaagagtctgaggactccggacgacttccagggagacgggtggcacagaaggtgccgtgggcacaaggccggggaaggggacaggggtggctctggggcctcagaaaggcctggtttggaggagcttcccaccccatggggttagaccaggaagagaaggtgggtgtgaacgtggctggtgggtgcgtgtgggcgtgtcgtgagagtgctggctggtgagagagcatgtgggtgggtcgacagggcacactcacgtgcctgtgtgcaggtgtgtgtatgcggtgtgcacacggtggagcgtgtgtgagagagagtccggttgacgagccggcggcaggaggagcccggggcacttacaaagtagatgtcggtggcgggcgcgtcctcctcgtccgaggcctggctggcaggtgcgccctcctcgtctgaggcctggctggcagtttctacttcaacagcagcagaggcaccggccggggaagcctccaccctggggacaggagtagacagagggtcttgaccctcaggccccacacggagactccccgcgcccccactcaggacccaggcaggggcttcatacggtcatcacggagatgaaaagccaggcagctgaccacaggccgcgcgctcctgcgctgccatttatcgcaaatcagaacaaacctccccaagaagcccctcatgctggccccaggagtgacctggagtgacccgccagcccgct

SEQ ID NO: 34003 - DNA, 872 bp, Artificial sequence
  DNA replication origin
agggagggggggtggggaggggaagagagcagtggaggggaagacagcggggagggagagtggagaggggacggggccaggctgcacagggccctctgggctgtctggattctattttgagagcggtcagaagcctttgtgtgagggggaacgtcgtccttccctgccgtgtggggaggtgggagtgtctgggaggcgggcgggcactgggctgtgggttcccagggtgagccaagcctcagggagaatcgactgtgtgtttgggggctcggaggctccgcaaggtgcccacagtcctctcccctcaggccggcccgacctcctgccctgcacgccaccttctttcgaagaagccactacagcctccattgccacgactctgtcatccacatccctctccattcctgagcggtccccctcggagacgtcggagcagccgcggtacaggtgggcgaggcatccgcagtgcatgtgggcggggcatccgctgtgcgtgggggcggggcattcactgcatgtgggcggggcatccgctgtgcatgtgggtggagcatcgtatgtacggtggatgtacatacactgcatgtgggtgcgcgggggcggagcatccaatgtgtgggagggaggagcatatgtacaggtgggcagggctgccagggggcaggtaggcaggcgggtaggcaaggcaggtagactgagcaggcgggccactctctttctgggtgtcacgtgtttgctgtatctctgcaggcggcgcacacagtcgtctggacaggatggcaggtgagacccaacccccttccttccctgggtctcaccagctcctcctgcacagctcccagctccgtttcccgccccccagcccctctgct

SEQ ID NO: 34004 - DNA, 878 bp, Artificial sequence
  DNA replication origin
ctagcgagcgggaggaggcccagtacgacctgcggggggcccgcagctaccccacgctggaggacgaaggtgaggggcagagggcagagtgcgcttgtgggcgctacagggggtgccagcagcagccccgtgggtggggtgccgcctcatcctgagtgcccatcgctcagccaccccctccggatctgcagggccgcctgcccagggagtgggggctgctgggaccgccccagggaagagcccagggggagctgagtatagaaggctccaccaggtggggtggtgacagctcccgccttctctcacggccactgtcatctgaggtgcaccaggatgccatcgaaggcatgcagcccccaggctagggaatgaaggaagggacatagccatgcaagggccctggggcaggaccacacctgctgagggaacagcaaggagcccgtgtggccaagcagcgcggaggggaagggagggggggtggggaggggaagagagcagtggaggggaagacagcggggagggagagtggagaggggacggggccaggctgcacagggccctctgggctgtctggattctattttgagagcggtcagaagcctttgtgtgagggggaacgtcgtccttccctgccgtgtggggaggtgggagtgtctgggaggcgggcgggcactgggctgtgggttcccagggtgagccaagcctcagggagaatcgactgtgtgtttgggggctcggaggctccgcaaggtgcccacagtcctctcccctcaggccggcccgacctcctgccctgcacgccaccttctttcgaagaagccactacagcctccattgccacgactctgtcatccacatccctctccattcctgagcgg

SEQ ID NO: 34005 - DNA, 1037 bp, Artificial sequence
  DNA replication origin
aagtcaaaaatgctaacaggtctctagtggaaaagcctccacccattccctggcacccagtctccctccccagagggagccactgttccctgttccgtgagcccctcccaggaagccatggcgccatggacccatctcgagccttttcacacagaaggtgccccccacacacatacagcgtctgtctggggctgtccccagctgttgattgatgcaccctctgcccccgggcaccccccccaactctcttccaggacacggtgtccgtccaccgccccagcttctatgccgagcgctttttcaagttcatgagcaacacggtctttcggaagaactcctgtaagccacctgagccccgcaaggcgggagggaccctggggaaggcccagagcgccgtggggcaggagggactctgcgggaggccgagagccccctgggcagggcagtaaactcagagcccctgtgcccccctcagaccgggcctcatccggaggtagggtagtcgggatatttgctctgcacagcggtagagcacgggtctggagccaccgccagagcctgaatcctagcctggcctcgtcctgcccatgtggccttgagcaggcacctgcctctgtgccttggtttccccattggcacagcactgtgagggtacagtgtttatatatgggatgggtgggcctgactcagcagatagctcacagtgtgtggggctgcccacagcatcaccatcgccaaggaaacgcaccccgggcaggggaacgcaggaggctagcccagcagggcatggtcgggaaggtcccagggcaaacagtggtggggaaggtggggactcgggattcacccacagggtgcccgggggaggtccccatctctcagggctcagcttcccctcatgggccactgtagcatctggacgcagactctgggttccaggcccctgtgcagacctcagcccgtggccaacctgctgccagatggattcccccctggggtctgtttctcagccaccctccccaccagaaggctcccgggct

SEQ ID NO: 34006 - DNA, 1199 bp, Artificial sequence
  DNA replication origin
gtccaggcacacgtgtgtgtagggggtatgtgcccaggcctcctagctgggactcctcagcagtgcctgggcctgggtttgaggctgggggtgatggagggatgtcaggacagaggttcccgggtgccaggccccactccgagagcttggccaagttgccacccacaggagcagatggactccctagccctggagtccccagccccgcctgccccgagtcccagctctgcgggatgctgatggtaccctcggcctctctccccaggatgggcgggatccccgctgtgaacggccgcggggagcggctgctgctgcacattggcatcatcgacatcctgcagtcctacaggtgggtgcccgggtctgcagtcctacaggtggacgccccgggtctgcagtcccacaggtgggcgcccgggtctgcagccccacaggtgggcgcccgggtctgcagccccacaggtgggcgcctgggtctgcagtcccacaggtggatgggcgcccccaggacacccatgcacagaggcgcttgcccgtggaaacagccgcaccagcagctctcggggcttcctcaacctggaaagctcttgcttggctgccccttcttgagccctaaagggaaggtgtttggtcgccttgaaaatctagagtgagttgggcgtagtggtccacacctgtaatctagcactgtgggaggccgaggcgggaggattgcttgagcccaggagtttgagaccagcctgggcaacatagcaagaccccatctctacaaaatatcaaaaaattagctgagcgtggtggtgctcctgcagtcccagctacttgggaggccgaggcaggaggattccttgggcccaggagtctggggctgcagcagtgagctatgatggccgtactgcaccccaggctgggtgacagagcaagaccctgtcccaaaaaaaaagaaaaaagaaaatccaaggagtgggtttgaggcctcactttggggctcgaatatttgttttttggtttttcatttgtttgttttaagacaaagtctcgctctgtcactcaggccgaagagcattggtgcgatcttggctcactgcaacctctgccttctgagtcgaccctattctcctgccccagcctccccagtagctgggattactggcacgcgccagcacgcccggctaatttttgtatttttagtagagatg

SEQ ID NO: 34007 - DNA, 1727 bp, Artificial sequence
  DNA replication origin
ccctggtcacagcagcaccctgacagtgggggcaggcccgagccttcactttggtacctgttcagtcttcacagcggccttggaggagggaggtgggcttcccctgtttccagctgaggaaataggctcctaggttggggggcagccttccccagtgcagccacgaaggtgtggagccaagttccacctggcctggccccagggacggtgctggctggcactggctggcactaggccaccagctgggctttggtttgcagcggtggtggtatttcccatggatggcagaggaggagccggggccccaaccagggtgtagctgcgggggggtgcgggagccaaggccaggcacagctccccctcagaccatcctggcgtttgtagggtcttcgctggcctggcgggggagcaggtgagcgtaccagcctgtggcgtgagcagagcgtgcagggcgccagcccagcgggtctgggtcccagtggcttcaggatgactgctgcacgtgtggcctcactaaccgcgctgggcaggggacgtgtgggcacggtgccgggtgacagttaactcccgcgctgggcaggggacgtgtgggcacggtgccgggtgacagttaactcccgcgctgggcaggggacgtgtgggcacggtgccgggtgacagttaactcccgcgctgggcaggggacgtgtgggcacggtgccgggtgacagttaactcccgcgctgggcaggggacgtgtgggcacggtgccgggtgacagttaactcccgcgctgggcaggggacgtgtgggcacggtgccgggtgacagttaactcccgcgctgggcaggggacgtgtgggcacggtgccgggtgacagttaactcccgcgctgggcaggggacgtgtgggcatggtgccgggtgacagttaactcccgcgctgggcaggggacgtgtgggcacggtgccgggtgacagttaactcccgcgctgggcaggggacgtgtgggcacggtgccgggtgacagttaactcccgcgctgggcaggggacgtgtgggcacggtgccgggtgacagttaactcccgcgctgggcaggggacgtgtgggcacggtgccgggtgacagttaactcccgcgctgggcaggggacgtgtgggcatggtgccgggtgacagttaactcccgcgctgggcaggggacgtgtgggcatggtgccgggtgacagttaactcccgcgctgggcaggggacgtgtgggcatggtgccgggtgacagttaactcccgcgctgggcaggggacgtgtgggcatggtgccgggtgacagttaactcccgcgctgggcaggggacgtgtgggcatggtgccgggtgacaattaactccccagtctgtacctgagaccccgtggccctacctgggcatgcagtgtgcgtgtgtgtgcatgtgtgtgtccaggcacacgtgtgtgtagggggtatgtgcccaggcctcctagctgggactcctcagcagtgcctgggcctgggtttgaggctgggggtgatggagggatgtcaggacagaggttcccgggtgccaggccccactccgagagcttggccaagttgccacccacaggagcagatggactccctagccctggagtccccagccccgcctgccccgagtcccagctctgcgggatgctgatggtaccctcggcctctctccccaggatgggcgggatccccgctgtgaacggc

SEQ ID NO: 34008 - DNA, 1338 bp, Artificial sequence
  DNA replication origin
acacagcccacgaagcagagggactgcaaaatccgattccacacagatcaaagcagctgctggctgggcgcagtgtctcatgcctgtactcccagcaccttgggagaccaaggtgggaggattgcctcagccccggagttcagtaccagcctgggcaacatggcaagaccccatctctacaaaaaatataaaatgtagctggacgtggtggcacgtgcacctgtagtcccaactacttgggaggctgaaggcgtggcaggcgtgagcgtggcaggcggaggttgcagtgagccaagatcacaccactgcactccagcttgggcaacagagtgagaccctgtcttaaaaaaaaaaaaaaaaacgctgggcgcggtggctcacacctgtaatcccagcactttgggaggctgaggcaggtggatcatctgaggtcaggagttccagaccagcctggccaacatggtgaaaccccatctctgcttaatacaaaatattagctgggcgtggtggtgcacgcctgtaatcccagctacttgggaggctgaggcaggagaatcgcttgaacccaggaggtggaggttgcagtgagctgagattgagctattgcactccagcctgggcaacaagagctaaactctgtccaaaaagaaaaaaaaagtggctgccacagaagataggaacggtggtggagagaggaggccacatctcagtggcctgcagtcatgtctgctggacaccaggggcagagggaccaggcaggccctgccctcacagggctcagggtttggctggggagatactcacagagctctcctgggacactggatgtgagggctgggtcattctctggggtggggctgtcctgggcactgcagggtgctgagcagcgtcccgggcctccacccactccgggccaggagcaccccccagttgtgacaaccacagatgtccccagacatggccccggatgcgggatagacaggtgtcgtatagcagtgctgagattgtgccctggtcacagcagcaccctgacagtgggggcaggcccgagccttcactttggtacctgttcagtcttcacagcggccttggaggagggaggtgggcttcccctgtttccagctgaggaaataggctcctaggttggggggcagccttccccagtgcagccacgaaggtgtggagccaagttccacctggcctggccccagggacggtgctggctggcactggctggcactaggccaccagctgggctttggtttgcagcggtggtggtatttcccatggatggcagaggaggagccggggccccaaccagggtgtagctgcgggggg

SEQ ID NO: 34009 - DNA, 1251 bp, Artificial sequence
  DNA replication origin
gaagtccctgtctcagtgcccggggcagcctgctgtgaggctggaagcccccattctctggcctgctctgatgccgctgtgtgaccgcagcccctctgttcctcaggataacactagaacccccactcctgcctggccgtgggactccatctctcacacccgagcccacggggccatccgtgctgggaaccccatagggtccgggagccgttgtgggggatagagacggctgacggcgtggcgtgttcctgcccgatcccgccaggtcctggaaagtttcaagatcatggactacagcctgctgctgggcgtgcacaacatcgaccagcacgagcgcgagcggcaggcgcagggcgcccagagcacctcagatgagaagcggcctgtgggccagaaggcgctctactccacggccatggagtccatccagggtggcgccgcgcgcggggaggccatcgaatcggatgacacgtaggtgggcggggggccgccggacccgtcccgcttcccttccccacaggctccagttccccatccccgtcccaagtgtgaaaacaggcagggagggctggcgagggcatgcgtgggtgacagacagagtctgggagccttgtgccagcgcctcagagcgaagccaggccgtagtgcgggccgcaggctgagtgcagggttccgggccttggcttgcaatggtgggggcgtttcccattcacccgtgactgggccgaggccactggccatccacaggaatgagagagagatagcgtttcccggtggcactcagaggggtctacacgccacccgtgcagagaggggccacaaaggtgtggaaggcgcatgggaggccagagggatcgggcgaggcagggctcacagcaggacacagcccacgaagcagagggactgcaaaatccgattccacacagatcaaagcagctgctggctgggcgcagtgtctcatgcctgtactcccagcaccttgggagaccaaggtgggaggattgcctcagccccggagttcagtaccagcctgggcaacatggcaagaccccatctctacaaaaaatataaaatgtagctggacgtggtggcacgtgcacctgtagtcccaactacttgggaggctgaaggcgtggcaggcgtgagcgtggcaggcggaggttgcagtgagccaagatcacaccactgcactccagcttgggcaacagagtgagaccctgtcttaaaaaaaaaaaaaaaaacgctgggcgc

SEQ ID NO: 34010 - DNA, 1612 bp, Artificial sequence
  DNA replication origin
cctctgagtgccaccgggaaacgctatctctctctcattcctgtggatggccagtggcctcggcccagtcacgggtgaatgggaaacgcccccaccattgcaagccaaggcccggaaccctgcactcagcctgcggcccgcactacggcctggcttcgctctgaggcgctggcacaaggctcccagactctgtctgtcacccacgcatgccctcgccagccctccctgcctgttttcacacttgggacggggatggggaactggagcctgtggggaagggaagcgggacgggtccggcggccccccgcccacctacgtgtcatccgattcgatggcctccccgcgcgcggcgccaccctggatggactccatggccgtggagtagagcgccttctggcccacaggccgcttctcatctgaggtgctctgggcgccctgcgcctgccgctcgcgctcgtgctggtcgatgttgtgcacgcccagcagcaggctgtagtccatgatcttgaaactttccaggacctggcgggatcgggcaggaacacgccacgccgtcagccgtctctatcccccacaacggctcccggaccctatggggttcccagcacggatggccccgtgggctcgggtgtgagagatggagtcccacggccaggcaggagtgggggttctagtgttatcctgaggaacagaggggctgcggtcacacagcggcatcagagcaggccagagaatgggggcttccagcctcacagcaggctgccccgggcactgagacagggacttcccttcctggctttactccttcctgagagacagggagccgggcctatgctctgaccagcccaggcccatgggcaaggacgtgcccggcctgacaggtgacacccaggtgggtggatgcccagggtagcctcaaggcccctgagtggtctgggcggttttctgggggtatgggtcaagttctcaaaggggtcggggagctggggatggtcagcagcggggcctgggtggagttggggagctgggaggtcccaggctctgctcctgacaggctggggcctcccctccttggctccatgcctcgaagctgccggggtgggacggggacgacggagctaacccaggcagaggaagagccgtgcatatcattctttcgctaacacggagccaacgcaggctccacggggacaggagccagaccctcactggacgcacatgggccctcactgtggcctgcagagcaagcagtcatcccatttgatgggtgaggaaactgaggcacagcaagctctcatggctggctgggagctctgggcttgtgaccacagcatctgaaggctgggctcttctctggggggtggggggactctaccactgtcatcgtgtaacctccagaggaaccacttctcagcagtgcagacactcccgacccccaagggctgggtctggggacatgttataagtgttttgttttctttgtgagatggggtctcacaatgttgcccctgctggtcttgaaaccctgggctcaagccatctgcctgcctcccaaagagctgggatcccaggcgtgagccactgtgtccggccacattttaggttaaggcca

SEQ ID NO: 34011 - DNA, 1067 bp, Artificial sequence
  DNA replication origin
cacctgggcagcttcccactgggttcgtcattgagaggctctgggcagggggcgctgttgcttcacttgggtgcccctgagtcacccagtgcctgcttggggtctacagggtacagcaggacccagactcgtcactgcgcctggggacccagatttggagtgaaagtctgagttgatcagttcaacacaggcaaagcataaccaacatagaggctgggctcacgcctggagtcctggcactttcggaggctgaggtgggaggatggtttgagccctggaggtggaggctgcagtgagctgtgatcgcaccgttgcactccagcctgggcgacagagcgagaccctgtctcaagaaaatacatgtgtgtgtgcgtgtgtgtgtatgtgtttgtgtgtgcatatacatacatgtatgtattttaggatacagcattgcgtttccggcctccagacctcccaacaggcgagcccagccagggcgatgtctgtgggcaggcagggagtgtggaagcttctgctggaacagaagcgcctgccttggggcctggctctgtagaaacagaccctcctggagctcacagttgtggcccatgagagtcagggtgccgtgggaaggccagctgggtgcctgcataggaacggggtccccgagggcttctggggagagaggggggctggccaggggcatccatgagccccctgaggcagaggcctgctttgcccgcccccgtgagtctgtggcccagccgccctccacgacttgccctcttcccccggcagaacctcaaccagaacccgcggacgctgctgcccaagttctatgggctgtactgcgtgcagtcggggggcaagaacatccgcgtcgtggtcatgaacaacatcctgccccgcgtggtcaagatgcacctcaagttcgacctcaagggctccacctacaagcggcgcgccagcaagaaggagaaggagaagagcttccccacctacaaggacctggacttcatgcaggacatgcccgaggggctcctgctggacgccgacaccttcagcgccctggtcaagacgctgca

SEQ ID NO: 34012 - DNA, 939 bp, Artificial sequence
  DNA replication origin
ccggctcctactcctactcccccctcccggggcctgacgcaccctttctgtgagtcatgcgggatgaggggtgggccggatggagctgcctcacgcctgcctgagcagctggtcttttgtggggtaccatctggtggcccatccccctcctctctggaaccctctgagtcacccttgggccccttgggcctccgtggcagctgacagacgctgcccgcaggctgctggttctggggcccacggctcatagggggtgttggcaaggtggggatggggagccaggcaggggccggtgcccacccagccctgcccggggacggcccccaaggcgtgtggccacaggaggaagagagggcggctcctgaacactggtgctggtgaagcctgacgggggacccccgagggtgagtccccgggacccaagatgcctctcaccacgccccaaggatgcctgcttgcccaagccttgcagacatctgctcccgccagccgggagaagggggttgaccgaggagccatctgccccgcagggcgggccacgcaccatgtagtagccagggagcagcttctgcaggaactcggcctccttgtgcatgacggtcttgatgatgaactcgtcgtcgctggtgacgtagaagagggagccactggcgcccgggttggacagctcgatcagcggctcattgcacagggagtactggaagcagaggaggcgggtcagcgggccccaagctgccggacacacagacagcactggcttccggtctgcccaacagccccaggaactgatgacgggtcgctgcattttacagatgcggaaagagaggctcagagagggcgagagacttgcctgaggctagccagcaaggactggagcctgaggccgagctgactctgcagcccgagggctggtctgctagggcgcactccccaggctgc

SEQ ID NO: 34013 - DNA, 1300 bp, Artificial sequence
  DNA replication origin
cttctgcaggaactcggcctccttgtgcatgacggtcttgatgatgaactcgtcgtcgctggtgacgtagaagagggagccactggcgcccgggttggacagctcgatcagcggctcattgcacagggagtactggaagcagaggaggcgggtcagcgggccccaagctgccggacacacagacagcactggcttccggtctgcccaacagccccaggaactgatgacgggtcgctgcattttacagatgcggaaagagaggctcagagagggcgagagacttgcctgaggctagccagcaaggactggagcctgaggccgagctgactctgcagcccgagggctggtctgctagggcgcactccccaggctgcctgctgctctccttaggagcggacacctgatcgcaccggggtgctgacgcgcgtggctaaaaggtgctcccagcacccctgaagctgggtggggccacaacgccagctctgccccatgagtcataagcagaagctgtcaggtggaactcagggaaggctccacagatgggcgacaggcagctggcatacctgcgtatttgcccttctctccttcccacctatttccctcctgagatgctgatgtgatggctggaacctcagcagccacactggactagaaggtaagctctgggatggaagctgcatctctgatgggcaggccccactctggcccctggcaccccacagtccaagcccttcctccccacttctctgcccctttttctcagcccctgctgtttgtttcatgatgtgctcgctgtctctctgcccccacgccctctcctggacattaggcagaaggtccgtgcaggtggaagtttttttgtgtcactgactcgacaggtgctcgatttgctaaggactagaatgaagatgagacccacgggtgctaccctgcgtcttccgggtatggaaccaatgaagtgtgcatggggctaaggccatctgtgtcacgccctttaaaatcctaactggtcgccattggtgtacacggatgaggtcagagccagctccccatcagcggagcaagccaggccccccagggtcaacgctgggtccgtatctgctggacgacagaagggtggtctccgagtgctgcgtgccgcctccaatgctgctgtgataaacaggtggggggtgtccacgagagtcaggagtggtggcgagcagaagcgaggggaggccaggcacggcggctcacccagcactctgtaatcccaacaccttgggaggctgaggaggatcatttgagcccaggagttcaa

SEQ ID NO: 34014 - DNA, 1015 bp, Artificial sequence
  DNA replication origin
agggtggggctcagccctgcccagtggtcagcagagggtggagaggaggccaaggtcagcggcgcagctgccgagagccccagcaccgacgaaggaggctgtggggggttgtcctggcactgcctggctcagaaatccacgcatggggcctgcttccccgtagcagctgaggcccatggaggccatagccctgcaactgccattagtcatgtggcttcagaatttccctgtcatcggtgttctttgtacaaagccgaacgtgccctttccacagtgttttccgctctgcaggtgagatcggcctccccctcctgccaccgtggacaggcagcagtgatttgtgtctcggagggacactccggctgcttggggtgtcccctgctccgggtgacctgaggacagcggcccagggcttggcggggtcccctggcctcccagggagggcgccagccccaggagagacccgccttcgctctgcgctgctgcgcctgtgtctgggaggctggagggcgtcctgccgtggcggggaaggcggaggagccgcgtgggctctgtgtttcctgtggatatttgtggctcgtggctgtgggcagaaaaaggcaggcagatggctgggctgggcgacagcagtggcctggacagatctccctccagcctcagagtccaccccacacggctctctcaccctgcaccatcactcccagccaggccatggcagaagcagcgcatgcaggaggaaggaccctcgctgttctgagctgccaaggttggcagggctgttgctgactccgcaaaatccagcctgtgttgaccgacgtgtgataactgatggcgccgttccctggcccgagagcacctcgggcagtgcagggcgggggtggtgacttgagcccaaggagggactggggcattcccaggccctgggcctgatgtgacctcatgtttccggcgtcctctggtccccaaacatattcacagatcagagtgtgtgtggcgctggggacccaactcacgc

SEQ ID NO: 34015 - DNA, 1032 bp, Artificial sequence
  DNA replication origin
caggggtacgtgtgacacccccccctcccccgccccgagaactccagcctgttcaggtgcccgggagtcaccatgctccgggtcgtgtcgccaaggcccagcctccggacttcagtgtcccagcgtttgcctgagcttggcagggcagtggggagtgaaaacacagctggggtttttgcctagaaatggccctcgggtgacctggacgctaccgtgtgaggcggccaggaacagaaggcagcagcctggctcgtagcagagagacagcacccgtgtccattagcaggagtggacggataaaagccgatctggggccatctgggtctcacctagaacccgataagatcgcattccagggccttaggccaggtgtgcacccacagcatctggggagccagcccggtgttggtgacccccgaatccttctgctcatctcaggagtgtgagaattctcttgggggcctccggtgctgagcaggcggcagccccctagcctctgtccaggctgtggtgtgagtgtggccgtgtgccacagcgggaggacgggctagtgtgcgtgttgctgtccacagggcccctgagcttgagtggggacaggtagggttcggaggggactcgaggttgccggtgcttctctgattggacagctgaggtcacagtcccccctggtaaggggggtagctccaggaaggcccacagctcaggacagccaggaaggagaaggcggaggtgggatgcagggtggggctcagccctgcccagtggtcagcagagggtggagaggaggccaaggtcagcggcgcagctgccgagagccccagcaccgacgaaggaggctgtggggggttgtcctggcactgcctggctcagaaatccacgcatggggcctgcttccccgtagcagctgaggcccatggaggccatagccctgcaactgccattagtcatgtggcttcagaatttccctgtcatcggtgttctttgtacaaagccgaacgtgccctttccacagtgttttccgctctgcaggtg

SEQ ID NO: 34016 - DNA, 725 bp, Artificial sequence
  DNA replication origin
acgtgtgtttgcctgtgtgcatatttgtctgtgtgtgtgcacatctgcatgtacatgggtcctgtcattgctgcccgtctcctcccgagagctttctctgcacgttggccctgcctttgcagcttctgccagccccgtggcgccgagtggccttcttcccagccccagtgggcgcagtggggtgggccgtcctctgagggcacccgagctgctgcatctcccgtcttcccgcatgcagtcctcagggcacctgtccatgagccccattcacaggagcagtccccaaggcacctgtcccacctgggccacccttggccctgcgtccgtagccagagcttggagggctttgtccaccaggcctgggaccctgggatccttcctcagagtcccccggcgtgggggcagtgtggagggtggcgcgggtggagggtggcccgggtggcggggtgaattcctggggagagcctgccccctggcggccacctgggagaatgcagggaacatggctgagcagcgtcggctgtggagggagggcaggggcaggggtcagggctgcaggcgtgtccctggggctgatagcggtgggatggggtctggccagtggagggtccatggggtctcctagcaaacgcagtggcgctccttaaatgacggtgccaggcggggctgttctccttggttggcctctgtgtcccttcaggctcccaaggcccctcctcacatcc

SEQ ID NO: 34017 - DNA, 991 bp, Artificial sequence
  DNA replication origin
ccagaggtcaccggtttcctgtctgatacccagcttgtctcttctgcaggtttggctcagaagaaggcggccccaacagaggtgagtgtctggagcggacgaagggcctggggtccccaccctgacctgctgcctccctactcgcggagaagctgtgtggcctggggcagctcactacacctctctgggccccaaatgccgtccagtgtccacaagcaggatgaacgtgaggtctacaccaactgcgtcttgagaggtcggggtgaaattccgtgatggaggagggggccctgcatctgaggggccacaccctcagtggcaggggtgcctggtcagggctgcaggggcaggaagggcttctctgggttccaggccacgtggagcctggattctggggggtgggcggtggggagagagcagctctcgccgggggactgggggcaggaatggaagacctggctggagggttagacgctgcccagagggcgatgcccgaggctaccagctgcacccacgccctcagtgtctgtgagccacacaggcgtagtgcacagtgaggctgtgtgcagcctatgtgtgcatgtttgcctgcgtgcgtgtgtgcacgtttgtgtgtgtgcatgtttgcctgcgtgcgtgtgtgcacgtttgtgtgtgtgcatgtttgcctgcgtgcgtgtgtgcatctatttttgcttgtgtggatgtttgcctgtgtgtgtgcacgtttgtgtgtgtgcatgtttgcgtgcatgtgtgcacgtgtttgcctgtgttcatttgcctacgtgcgtgtgtgcacgtgtttgcctgtgttcatgtttgcctgagtgcatgtgtgtttgcctgtgtgcctgtttgcctgcgtgcgtatgtacacgtttgcctgtgtgcacgtctgcacgtgtgtttgcctgtgtgcatatttgtctgtgtgtgtgcacatctgcatgtacatgggtcctgtcattgctgcccgtctcctcccgag

SEQ ID NO: 34018 - DNA, 820 bp, Artificial sequence
  DNA replication origin
cgcccaccccccagaatccaggctccacgtggcctggaacccagagaagcccttcctgcccctgcagccctgaccaggcacccctgccactgagggtgtggcccctcagatgcagggccccctcctccatcacggaatttcaccccgacctctcaagacgcagttggtgtagacctcacgttcatcctgcttgtggacactggacggcatttggggcccagagaggtgtagtgagctgccccaggccacacagcttctccgcgagtagggaggcagcaggtcagggtggggaccccaggcccttcgtccgctccagacactcacctctgttggggccgccttcttctgagccaaacctgcagaagagacaagctgggtatcagacaggaaaccggtgacctctgggagtcctgggcccagcccccggcccaccttctggcgccccaggcctggcgtgtgtaactccgcgtggggctggtctcaaggctacacacaagtgaagacatggactgagtgcgctgggaggatgtgatgagggtgggggccactggggcctgccatggtcaccctggttggcagccactggggcctagagcaggggagaggctttgcagcctcagggagatgggcagctggtgacgcctaggcttggcacccaccacggagggcctggggcttggacctgcctggaggaggggaggggaaatagggagcaaacctcccccggctctgacccccttcacacccagacatgaggttctgggcagtcaacaactgagcaggtctgaactgaccaagccccgcttcctcggaggcaggc

SEQ ID NO: 34019 - DNA, 1451 bp, Artificial sequence
  DNA replication origin
cctgcctggaggaggggaggggaaatagggagcaaacctcccccggctctgacccccttcacacccagacatgaggttctgggcagtcaacaactgagcaggtctgaactgaccaagccccgcttcctcggaggcaggcgccaggagaggctcgggcatggggaaatcaggtgccagcgtggggagtgagggggggcaggcccccgctggggcgagggcaggctggagttgcagggagcgcccagcacctgggcagctgcggtcagtgggaactggccaggggtccccagggctgccgccctccctgcccctctccagagtgaggtttgtggaagggtaagagaggctgcgaggggacccccagccctgccctggctcctgggcccgcagcctccggtcagcgcagcagggcctgggccgcagctccagagaggacaacagaggcctgcaggattgagccaacgagcccaggcctgggctgagccgggagcaccttcctccatgcaaggaggctgggacgaggggagcaggcgagactcagctcctaggacccaggaccacatccccagccctggctcccagcagcagggccctggggtcctcatctggagaacgggaacagactctacagctgtgattacaggccctgagaccgacgggagatgatcctgggggacctgggagcccgatgtcctcacagggtcctcacgagcgggggcgagagggtgagtcagacagagactggaagaggctgcgctgtggctgtgaagagggaggaagggacctgagccgacagatgcgggcgcctctagatgctgggaaaagggggaaacggattctcctctgcagcttgtgctgggcccagccctgcccacagcttgactttagcctggtgaggccccgttctggggctggactcctggcctcggagccctgaggtgggaagcgatgtcagcgactgcagggatcgcacgtgctggcgtccaccatgcaggcctggggaagacctggtctcgccctcaaggggctcacggtcaacaggggtgggcgcagggctgggtgtttgatgtggggtgacaggcggggtgcggatcagcaagggggggcttccctgggctggtcctgtctgagctcagtgccgaacaaggatgccgtgggagccggagggagttccaggcggagggaacggcagcacaaaggtcacaaggtggctgaggcagccacgctgcacggataacagcagcgtcctccaggctcatgcagaggcgggtaccgaaggggagtgcctccctgttggattccgatgctggcaccacccagggcccaggggcatggagacaaatgcttcttttcaatcacaggggctgtgggtcagggctgactccaccccagctctgccagcatcttctcactccattcccccttcctagaggaagaggctgagggttggg

SEQ ID NO: 34020 - DNA, 926 bp, Artificial sequence
  DNA replication origin
cagtgccgaacaaggatgccgtgggagccggagggagttccaggcggagggaacggcagcacaaaggtcacaaggtggctgaggcagccacgctgcacggataacagcagcgtcctccaggctcatgcagaggcgggtaccgaaggggagtgcctccctgttggattccgatgctggcaccacccagggcccaggggcatggagacaaatgcttcttttcaatcacaggggctgtgggtcagggctgactccaccccagctctgccagcatcttctcactccattcccccttcctagaggaagaggctgagggttggggaagggagggctggctgaggtctggcagctgggggtgctggggcaggccctcaaaggggattattatgagcccgtggagacactcaggctgcgccggagtgtgtgcaggagggtgcggcaggtgccctgctccgtagggctcggccctctggctgcctccctgctctgggctgggcagcagtgcgttggaactggtctggccctggcttccaggccggctgaggtgagcaggggaggccaggacatgtgaggggccaactgggcgaggttcagggaggtgcagacaggtgaggaggtgggtgcggagtccgcggtgcagacgggggccgtcaggggtggggacccggctgggtgtggactcgggagaggggacagaggagaatttccccgagagacaaaaagtctttctggaccaaggccttacaaagccagcaaagagtgcagagaaggcgggagcccttctgttttatgacgcggaaagagatgctcagagggaggggtgaacccacccgaggtcacacagaaggagaaggaaagtcaaacctgggcctgggtcggcgatgccccaccctatcagccctgccagcgcccctcggcccccatgggca

SEQ ID NO: 34021 - DNA, 933 bp, Artificial sequence
  DNA replication origin
gggtcggcgatgccccaccctatcagccctgccagcgcccctcggcccccatgggcactgtgctgctctcggtgggtgcacgggagacccacgtgtgtcccatccagaggctgcaccccggtgaccgccctgccgtctgaaaacacgtccaccgcgggcactgaaggcaactgaatgcgacttggtggagcagcccatagctttgctctgctgccgggtcagaactgccggagacaagacgaaggcacgaggtggaaaactttgctggggtcaggagcctcggggcaggggcaggccggggaggggcctggggtcaggagcctcggggcaggcagcaggtatggagggggctggggccagaagcctctgcaggcggcaggtggggaggggactgcggtcaggaacctggggcaggcggcaggtggggagggggctggggtcaggagcctctgcaggcggcaggtggggagggggccgcattcgagacgctggtgggcccctgcagtcgtggtcagtccccacgcctgcctgagggtgcggggttggacggtgtccctccgacattcacgtccttccaagaacctcagcctgcaaccgtatttggaaagagagtctttgctgatgtcattgggtaagatgaggtcatgccggagtggggtgggccctggatccaccgctgtccttataagagaagccgctcagggaggccaagatgccgtgtggggtggaggcggggagggcaccactcctccaggccctgaaacgccaaggatgcccggaggcaccaggagcagaggggtgtggagcttctccgaggtcggtcgggagggcagagccctgcccactcctggacctcaggctcctggcctccagagctgagccagaacaaacgcctgttcaaggcctgctgctccaagccccccagtcccgggg

SEQ ID NO: 34022 - DNA, 1077 bp, Artificial sequence
  DNA replication origin
gtcatgccggagtggggtgggccctggatccaccgctgtccttataagagaagccgctcagggaggccaagatgccgtgtggggtggaggcggggagggcaccactcctccaggccctgaaacgccaaggatgcccggaggcaccaggagcagaggggtgtggagcttctccgaggtcggtcgggagggcagagccctgcccactcctggacctcaggctcctggcctccagagctgagccagaacaaacgcctgttcaaggcctgctgctccaagccccccagtcccggggactttgtctgggcagcccaggacctcacacggagccctccagtgaggaccccagccctgggtgggagggggcgtacttctcaaggcagcaagaacagctgaagggtcctcccctcgggccacctggatgccctgcagggctgggtgggcagcgggtgggccctggagggatctgggggacagacccatggtgctcactgcaggggcggggacggggacggagggagtggggtgactcaggattccggctgccacggtgaagggaaagacgggctgcttctctgtccttccagaggacagggccagtcgcccccaggtctctgacaggccacaaagggcctgctctgggccgcggcggggcggaaggtgctggacgctgacgtgatgtttgggttggcggcccgggagcagaacaattcacggttttacgtccagggtgtgggggaaggaaaagaagagagggcaggaagccagcggtgggccggggcgggacgttccagacctcatcgggggcccgggcgtccccctgctcggcctgtctggggcctccctgcccacagtcctgactctactcgcgaaaccacccctctggggcccccccacacccacttgggtgactcagctgttttcctcagtggccccgatgctgagaggtcacagcgcttgggtccacccctgcccggactctcccaggctccctacggccccgggacccagtggatgcagtgaggccctccagacccagctctgctgacctcaccaggcacctcggggtcacccgtgttg

SEQ ID NO: 34023 - DNA, 912 bp, Artificial sequence
  DNA replication origin
ttttacgtccagggtgtgggggaaggaaaagaagagagggcaggaagccagcggtgggccggggcgggacgttccagacctcatcgggggcccgggcgtccccctgctcggcctgtctggggcctccctgcccacagtcctgactctactcgcgaaaccacccctctggggcccccccacacccacttgggtgactcagctgttttcctcagtggccccgatgctgagaggtcacagcgcttgggtccacccctgcccggactctcccaggctccctacggccccgggacccagtggatgcagtgaggccctccagacccagctctgctgacctcaccaggcacctcggggtcacccgtgttgggtgtaggccccctgcctcagtttccctctgtggttccacgtcttcacctgcccgactcacctgagctggctaacggggagaggagaggagaggggcaggcggctcgggccctgctgggaacgtccctgcactgggggcctgtagggttaagggactggccggggccgaagcactgaggtggaggtggagcaggacggagaggggaggcactcggttgggggaccccagggaaaatgtggggctcccagggcaggcaggaacgggcagcaaggggagaccagagccgagtgtcctgtggaggagaggggacggggagaaagcacagccttgctgccaccgcctgcccagggggtgggggcaggtgagcgccatcttcactcaatcctcgctccccatgaggcccgctcagggcacagagcctgccgtgacccccatagggggctgtcatgacggtgagctctgctcagcctgagacgtgactaattatctgctgaatgagccaccccgttttcgaggaaattaggttttaaaaatagtcgggggaggaa

SEQ ID NO: 34024 - DNA, 1324 bp, Artificial sequence
  DNA replication origin
cagagcaggcctgggacccctgttgtggggatgacaacagccatgtatcaggtggtgccgtgtgccgggcagtgaggaggggatcgtttggtgcaggttggctggaggaggcctctgaggggtgatgttcaagccaggtctggggtgaaacaggaacaaaccgtgagggaatcttgggactggcaggccaggcagaggcaccgctcgtgcaaaggccatgacacagggtggcgctggcgtgctggagggacagcgagggcccgtgtggctggagcagagggaggagcagagggcagggagggggccacacagggtctggtggggtgacagggcctggtcttcaccctgcagggttgcagtgaggcctggggagacccttgtctgcggtgggggcggggtgggtgggccccctttcgcagaatccctcccctgccgtgggctctccccggccccccagtccccagccccccagtccccagcttcatcatcctgggccttccagggccctgcccactctccccccgcccccaccgcctccagggctggggctttctcctcccagccatgggggtctggaccttggttctacagggatgaggccaccactgttcctgtcctgcctgctgtcacagtgccctgcaggtgcccacaggggctgaggcaccttccacccaccctcgagcttgcctcgctgggccctctgccccacggcgccctgtcggtgagcccagaatgtgccctgtttcctctcactgtgatgcctccctccctctggccacctgtccagacctctccgtccccattcttactttgggtctcactgcagagccagcctgacaatctgcctcctcccccagtttagtcattccctgcctcagtgtccatgtcagacagatgtggagaggaagctctggcggaggcctgttgtgcagagaaaagaggaacgggtatctgtcagtccatgggtcagtcaacaaacacgcccatgctgtcagcccagggcaggccccgtcctgagggagcccccaggctcagcaggagggaccaggctggtctgcaggatggggcggtgtcagtggggtggcaaaggtggctggtgtgggacacagtgtccagggagcactggcagggccagggcggagaccaggcgcaggccagggaacagctgggtgcagaggcggccatgtggccccgtggagaatggcagtgcctctagggctcgagctggcttcagccgcactttatagagagagactgaggctcagagagaagccctgggcacacagggaggtggggtggccgatgaggtcaccgtgcagccagc

SEQ ID NO: 34025 - DNA, 964 bp, Artificial sequence
  DNA replication origin
gccagagcttcctctccacatctgtctgacatggacactgaggcagggaatgactaaactgggggaggaggcagattgtcaggctggctctgcagtgagacccaaagtaagaatggggacggagaggtctggacaggtggccagagggagggaggcatcacagtgagaggaaacagggcacattctgggctcaccgacagggcgccgtggggcagagggcccagcgaggcaagctcgagggtgggtggaaggtgcctcagcccctgtgggcacctgcagggcactgtgacagcaggcaggacaggaacagtggtggcctcatccctgtagaaccaaggtccagacccccatggctgggaggagaaagccccagccctggaggcggtgggggcggggggagagtgggcagggccctggaaggcccaggatgatgaagctggggactggggggctggggactggggggccggggagagcccacggcaggggagggattctgcgaaagggggcccacccaccccgcccccaccgcagacaagggtctccccaggcctcactgcaaccctgcagggtgaagaccaggccctgtcaccccaccagaccctgtgtggccccctccctgccctctgctcctccctctgctccagccacacgggccctcgctgtccctccagcacgccagcgccaccctgtgtcatggcctttgcacgagcggtgcctctgcctggcctgccagtcccaagattccctcacggtttgttcctgtttcaccccagacctggcttgaacatcacccctcagaggcctcctccagccaacctgcaccaaacgatcccctcctcactgcccggcacacggcaccacctgatacatggctgttgtcatccccacaacaggggtcccaggcctgctctgtcacctgctcacagactctggcaaagctctgagggcagcaagggaaggc

SEQ ID NO: 34026 - DNA, 1686 bp, Artificial sequence
  DNA replication origin
ctactgaaaatacaaaaattaggcgggtgtggtggccagtgcctgtaatcccagctacttgggaggcggaggcaggagaatcgcttaaacctgggaggcggaggttgcagtgagccaagatcatgccactgcactccagcctgggcaacagagtgagactccctctcaaaaaaaaagagacagtgagtccagttcaagatgctgaatcgtgttaagtgttgacaggtgggggtgctgaggtctgcaactttgaaaggcttccaaaaaacaagctgagagggatggcggaatggagggatggtgggatggagggatggaaggatggtgggatggagggagggatggaggatggaggatggagggatggagggagggatgcagggagggagggagggatagatggagggatggagggagggagggatggaggggtgggagagggatagagagagggagggagggaggggagggagggagggatggaggagggatggagggataaagggagggatggagaatggagggatggagggagggatggatggatggaggatggaggaatagagggaaggaggatggagggatggacagatggagggatggagagacggagggatggagaatggagggatggagaatggagggatggagagatggaaggagaatggaggatggaggagggagggagaatggagggatggagagatggagggatggagagatggcaggatagaaaatggagggatggagagatggagggatggaggatggagaatggaggatgaagggatggagagatggagggacggagggatggaggatggaggaatggagaatggaggggtggaggaatggagaatggaggggtggagggatggagggatggagggacggagggatggagggacggagggatgcagggacagaggcatggagggatggaggaatggaggatggagggatggagaatagatggatggagggatagagatggagtgatgaaggatggagggatggaggatggagagatggaggatggagggatggaggatggagggatggaggagggatggaggcaaggaggatggaaggatggtgggatggagggagggatggatggagggagggatggagagatggaaggagggatggagggagggatggagggataaagggatggagggatggaggggtggaaggagggatggagagatggaaggatggagggagagatggagagatggcgagatggagggatggcgagatggagggatggcgagatggagggcgggagggatggagggatggcgggatggcaggatggagggagggacagagggatggcgggatggcaggacggagggagggatggagggagggatggagaatggagggatggaggatgaagggatggcaagatggatggagggagggatggagggatggcgggatggcaggatggagggagggatggcgggatggcaggacggaggaagggatggagggatggaggagtggagggagggatggagaatggagggatggaggatgaagggatggcaagatggagggagggatggagggatggtgggatggagggatggcgtgaacacagccaactgccaattgcaagacccaggcggtaagtcgtgggtctactgcccaattctttcaacttttcagcac

SEQ ID NO: 34027 - DNA, 1070 bp, Artificial sequence
  DNA replication origin
ttggacacaggtgttttcaagctctgaagaaacacggtttttgagggaactctgcttgaggaacctgagtggggacacgggtcacagaggatgcccccaagctccagtgggccgggccctgtgcccaggctccccacccagcaccacacctttgaggggcatgttcctgcctcaggggccttgcgcgtgctgcgcctgtgtccctgcttggccggctcctgtcctcccgtttgggtctcagcctctcacctccccagggagaccgtcctcacagccaccttcctacccgccttgcatcccattctatttcctcacactgcacatcagttgggactgatcttgctccttcctgtgggagcacagacctggcgtctcgttcacggttgctctcccagacctactcgctactcagtaggggcgcagcagcaccggtgaatggagctggggcaggcgggctgggctggatctgggagatccagaggggtcctcagctgtggagggggagcactggagaggacgtgacctgggacctgggctcaggcacacagtgagttggctaccaagatggggcatcaggaagaagcacaggcttgggtcagatgtgctgagcagtcaggacctgcagggttggaggggcccaaggggcgccctggatgtggcttgacgtgctgcgctgggcacgcatggtggacggagtggtggagcaggcaactggagcctagaacgtgcccggcatgttgcagacgctcaagaaactttctgcagcaaacgaagaggcagatgctgtgggagacactgcccgggctatggtggggtttgggggatcccagctcctgccctctggccctgtgagaacaccctggctacagccccctcggggggacgtggcaaaggcctgaagccccacaatcaagcctggaacaatggccctgaagtgactacaggctagttcttaccctgaagatgcactctcttctgattctgagactcccagcgtggtgaatggtgtcaggtgattgtctgttggctcgttcatccgttcatccatccatccatccatccatccaaac

SEQ ID NO: 34028 - DNA, 1049 bp, Artificial sequence
  DNA replication origin
atggaagggaccctggcaggcagcaggtgtccccatctgtgtgtgagtgctgtgagattgtgcgctggatgatgtgtgtggggtgagggggcggcaatgagctcatcttgatgcctctaattataaggcaaagaaatgctcatgcgtgactggtgtggttaccactgcagcgctgtgagcgggaggctcttcttatcgttccgtctttattttgaggaatcctgaggtccagtgggtgacacagaggccacttcccagccaggaggctgtgggtgctgctccaggcaccgaagcatctgctctgcctctcctgtgctgggggccgggcctgctgcagagacagagtcagcactggtcggggtggtgggggctccaacatgggggaggtgtgggactgcccgggagaggaagcgggggctccagcgtggggggggtgtgggactgcccgggaggggaagcaggggctccagtgtgggggaggtgtgggactgcccgggaggggaagcgggggctggctgtgctctgcacaggatgttcctgctgtgcccgggctgatcccagctctccagacacggtcctgccccggggcctccgtactggctgtgcctctgcctgggaggcccctctgcccttcccccgcctggctcctcctcactctcctcccgtccctgctgtggtgacgcagactggggcctgacatcctggaatcaggtgcgtccacccctacatttttgctgcatgatcaggcaagcgatctgacctctctgagcctcagtttccgcctctgcataatgggagcagtaatagtgcctacgtcacagggttgttgggacaattgcgtgactaagccatggggttctcatatggtgcgggccccgccacacacacggcgaaggtgggctagctcgtctctggccagctcctgcctgcgctccagctgttccagggtggctcagtggttagagacgggaagcagcctgcgcccctgggctcttgaccccatccaaccccgtttccctcctgagccaagcccactgtgccctggaccc

SEQ ID NO: 34029 - DNA, 1008 bp, Artificial sequence
  DNA replication origin
aggccgtccccccctcgcaggtgaggaacaggagctcctgcgggctcccctgcggcaccccgctctgtttcccaccacggcctaacctcaggctctggaaggaattcccttcagggacactgtactccccggagggacgctgcgcccctggaggacagggacgctggggagccagccgcgaggggcgtccacctctgctgtgctggagacggagcgcgcaaggaggtggggaccacgcgcagaccctggctgcgggagcctcagctcggggcccatcaggatctcccgcagcccgcacgggccgggcttcccccaggggctggcgtgtgctctgtgcaccctgacccatcccgtcggccccgccacctgcgggctggccacgccccacagcctcctgccccggcccgcccgggagcttggtgctgagagtggagcctctttctccctggacattggggccctgggaaacgacccaacacctcagggcctgcggagttctggatgctccgcccgcctgcgcagagcttcctgtttaccggcctggctcctgcccgcccacctgctgcggggaaagcgatcactctatgccctgcggggagcacccggcagggagaagggagaaggggcaaggaagaggggcggcctactactcgggtggaccccaggctgtccctccaccgtgctggggtcccccaggtgtaccctcccctccagccacctcaccccttccttgctgtgtcccgcaggtgttctgtggtgtcctctgagggcctgtgcgtgtgtgtgcgtgtatgcatgtgtgtatctgcatgtgtgtgcgtgtgcatgtgtgtgcgtgtgcatgtgtgcatgtatgtgtgtgcgtgtgcatgtgtgcatgtatgtgcatgtgtgcgtgtatgtgcgtctgtgtccccttcccacaggccctcaccgctccctgcacctgtgggtcctttcttcctttcctgccctgttgggacatattccttattgcacacttggact

SEQ ID NO: 34030 - DNA, 1003 bp, Artificial sequence
  DNA replication origin
cgcaggccctgaggtgttgggtcgtttcccagggccccaatgtccagggagaaagaggctccactctcagcaccaagctcccgggcgggccggggcaggaggctgtggggcgtggccagcccgcaggtggcggggccgacgggatgggtcagggtgcacagagcacacgccagcccctgggggaagcccggcccgtgcgggctgcgggagatcctgatgggccccgagctgaggctcccgcagccagggtctgcgcgtggtccccacctccttgcgcgctccgtctccagcacagcagaggtggacgcccctcgcggctggctccccagcgtccctgtcctccaggggcgcagcgtccctccggggagtacagtgtccctgaagggaattccttccagagcctgaggttaggccgtggtgggaaacagagcggggtgccgcaggggagcccgcaggagctcctgttcctcacctgcgagggggggacggcctctggccccctgctgtgggcggggagggatctagaagaccggaaggctatttccagggcagcacccccaggactctggggcacacacgtccccaggcagctccggtgaggccaccctcgccccctggtttcaactcctgctgtgagcacctggcctttccctggtccactgagagccgcgtgtgttttttgcggttttgctggtgattctgctgctgaaattgcccccccaggcattgtcctcaggtggtttcgtgtccctcagggctagagacccggatgagccccatggagaaacccgtagtgagagaagctttgctcaaacaggactgagagcggaaagagagagagagagaggagagtggggggagaacgagagcgagagacacaccgagctggtgggccgggggagggggacccacacccacgtcgccatggccccccaccccgtttttgagcccccacacagccgaatacatgcccccggtcccccttccagccttgtccccaaca

SEQ ID NO: 34031 - DNA, 1541 bp, Artificial sequence
  DNA replication origin
gcagggtgtgcagggccttgtgggctgcagggaggacttgggctttgaccccaagggaggtgggagccatggagggctgcgggcagaggagggatgggcgagactcaggagctcacaggcaccccctggtggctgctgtggggaggacagatggggtgagggcgggacgtgggctaggggaaccagggcagaggggactgcactggcccaggtgggcgaagctggggctgggccaggtggggaccatgagcagtgcgccatctgggatggattttggaagcagagccagcaggaccttttgaaggttgagtgtggggctgaggggggattgagtttgaaatcaagattttagcctgagccctggaaggacagagctgccctcagccaagatggatgcaggaagggcagcatgggggccgccggggcccagcatggccgagctgcgagggaggccccaggagcccctgtagggagcgttgggggccgtggtgggagccggcagtgggactgggtggggccgtcgggaccctggtggtggctgtgctcagtggacggtgtctctgttccattgtgctgttggcaggaggacagctgagatgattgggttcggttgcccagccgctccgtgcctcagtttcctcatttggaaagcaatgtcccttgaggattagatgagtcaatgcacacaaaaggctcagagccggccctgcccatggtgggcgcccagggagtggggacagggacgtgagcgggcagctcccactgtgcacccttcccgtgcggtgcttggactggccacggtgcatgcgctgacatgggcggggctgctggggcagggaaaagagcctggggtgggagcagctgcctcggggcctgtgcctgtgggcgcgtatgagccagcctggcttggcgtctgctgctaaaacaaacatccccactctcccggccatcccagaggctcatttctcgcttgtgttgggggctttggtggttttgctccccgatctctcagatcccaggttgacggaggtgctgtcacccccagtgcagtaaaggctctatgcttctgtaacccagaaaggtggtacgtgtattcagatgcactctgattggtttaaatcaggcctggtgaggccaagagagcaggaggtgactgctattgaaaagctcttgtgttacagttcccgaggctttggttggaagggacgggccaggcggggtagatgggctgggtgtgcctaggatgggctggtttgactcccgactgtttgcggctcttggctgttggggtggtccctgttctgggagctggccctggggtgattcagggcagggaacctgggcgtggcgcgtgagagtttgatcaggtgcgtgggctcgcggttggttgctctgcacgtcacagtgtgctcgcaggcgggccgtttgcaacgtttaggaatccgcttaccctggaaggggccgtcatccccagattagcgaggcccccaagatgtcgtaaaatccagaaaacaaaacgcagcatcagcactgtaccagac

SEQ ID NO: 34032 - DNA, 1381 bp, Artificial sequence
  DNA replication origin
gggtgcgagggtctcgaacccttggtcccaagcagccctcctgcctccacctcccaaagtgctggggttacaggcatgcgcccccatggtggccccttctttcccttttggaacaagagctgcgggtgtcctgagtgcctggcaggacagggatgggtgaggccctagcccctgggaagctgcacgacctgggtctttgtttacagatggggaaaccgaggctccaggagggctggagagtccacacagggtggggctgtgaacgaggagcggggcccaggcctccctgccgcctgccgcctgccgcctggccccggcagcatgtcccttcacgcaggaccaggccggtcaagaccctgcaaggatttgccagcaggcgccagctggacggggcccgtggtggtgccagtactcatggggattacagcctgaggggattagctcggagcccctgcacctgcctccccgccaccctgagaggccagcttgggaggggctggagtcgagcatgagggcccccaggtgcctgagctggcatgggggtgcgaggggacccggcctctggctgagtgaagagaggaccccagcaccctgcccggccgctctcctccactgaaatgcctcatgcctccactttgcaggcagggctgctgctgaaggtttccgggagtggggtgtggttcgggcatcgtctacgtgtgctttcctgcgtgtgctgtggccgggtgctgggagcctgggggaacgagagggccaggccccctaaggaactctgggagtggggccaggacatacagacagcaaagaaaagcaaaacacgcaacgcagtggacaagtgccacggagaagagccgagcagaggaggggagagagtggcggcggaggtgccctcaaggctggggactcgggggccacacttgaacagagatccaggggaagtgagggggttgtggaagtgtggagggagctgtctggcagaggcactgtgcaaaggctctggggcaggaccacgcctggtgttttagaggaacagtgaggaggggagggcagggaggggacggggcagggtgtgcagggccttgtgggctgcagggaggacttgggctttgaccccaagggaggtgggagccatggagggctgcgggcagaggagggatgggcgagactcaggagctcacaggcaccccctggtggctgctgtggggaggacagatggggtgagggcgggacgtgggctaggggaaccagggcagaggggactgcactggcccaggtgggcgaagctggggctgggccaggtggggaccatgagcagtgcgccatctgggatggattttggaagcagagccagcaggaccttttgaaggttgagtgtggggct

SEQ ID NO: 34033 - DNA, 971 bp, Artificial sequence
  DNA replication origin
tgccaagcgagctcacctgggcgctggggtccgccatgggagtcggctcgtgaaagtgtgagttccactcctgggctccagacctttgttgagcacctcgtgtgggccaggtggggctcagggtgcccagtcttctggtgctaacgggactgcctcgctgaccccttggagccctcaggttgctgggcgtcaggctgcagatgggaacaagtggccacgtgagaccccacccgaatctgtccatgccgcttcttgtcaacaaagttttattggcaacggccacaccatttgttccgttgccggccttggtggcccccacgctgcagcggcagagctgggagctgagtggccatgcttggggctacgtgtcccacgaagccgaaaacacttgctgcccggtcctttacggaagatgtttgcccagcccagagccgggctgcgttgggcggtgatgagtgtggtgagggcacctgggaggtcaagtggccaggcctgcggcagctgaggactcggagggaggtgactgtccccacgagctgaataagggtgggctgtggctcaggcgatgtaggcagcggaatagtcgcgccgaggccgtggggtgggaacttgctgcacccacttgagccgcagaagtgaagtcaacgtggtgggagagggtcgcgtggggtcggacctgaggacagcgggtggcacgggcatctgagtggggcggcgagcccgattcacagcgcctggtgggggatggtccgtgggcagtgctctgtggggttggggcaggtgtccaggtgagtgccaccggtgcctggaggcagacgaggggcctggaaggattttggcctgggccctggagctggtggctggggtggcgaggactgaggacagagcaggactgggagcccaggcactgtggcaggtgtgtgccgatgtggggtgagcaggcagtggggacccccaaagcaggtggaggc

SEQ ID NO: 34034 - DNA, 1779 bp, Artificial sequence
  DNA replication origin
ccttcctccctggcactgctggcctcatgcacctgatgttcaccaggatctgcactgtgctgagctcttccgggcgcaggggatgccgcaggagtggcacagacggtcttggccctcgtggagctctcgctcaggaggagatggtcagaaaacacgtcagcagagccatatgtttcaggtggtgacaaacgctatggtggcacaatcagggaagaggaaccgggagggcaggggacggagaaggggagaccgctgtgtggtgacagcagggcagggaggcctcacggagaggagatgctcccacaaaacctggaaagcgctaagggagcaaaggacacagatgggaggaggggcattccggggtgggggtggggggcagccgtgcaaaggccccggggcaggaccatgccctgcatgctggaggaacagcaaggggcccatgggcctacagcagagtgcagacgggagggcagggagggcagagtgcggaggggagggcagggagggcagggagggcccggggcaggctgtgcagggcctgatgggcttcaaagaggactatgtctttgaccccaagggaggtgggagccatggagggctgcgagcagaggagggtcgggactcgggccgctggtttttaatggggtcctcctggaatgtgggacagggagcagaggaagagcaggggcgccaggcctggctcagggggcaaaggaggactgagctggaccgaggaggactgagctggacggaggaggatcgagctggaccgaggaggaccgagctggacaaaggaggactgagctggaccggggaggaccgagctggaccaaggaggaccgagctggaccgaggaggaccaaggaggaccgagccagacgaaggaggactgagccggacgaaggagaaccgagccggacagaggaggaccaagctggactggggaggactgagccggatggaggaggactaagctggaccggggaggaccgagctggacccgggaggaccgagccagatggaggaggaccaagccggatagaggaccgagccggatggaggaggactgggccggacggaggaggaccgagctggaccggggaggaccgagccagacagaggaggactgagccagacggaggaggactgagctggaccggggagtactcagccagacggaggaggaccgagctgtacggaggaggaccgagctggaccgaggaggaccgagctggaccggggaggaccgagctggaccagggaggaccaagctggacccgggaggaccaagctggacccgggagaggcagaggacagggaaggagtcagtgggttctgggccagttctgaaggtgaagctgccatcatttgctgccagatcagccgtggaagtggggcaggggcagggatgcagctgacctttccagggcatcacagagacagatcagccgtgggagtggggcaggggcagggatggagctgaccgttctggggcatcacagagacaggacagcctgggagaggctcagacacgcccaggccacagctcagaccaaactccaccacaggccatcggcccacacagtgggcacagccgcatcccaagccccggccttcccgagaccgcccccacgtgccccacggccacggcccatggagacgccattcaggccacgcctcgggagccaggagcccaggcaattagaggaaccaaattctaaacaccaacgagacattgctttgcctcccatcggatcagccgaaatcgccaaggacgat

SEQ ID NO: 34035 - DNA, 2400 bp, Artificial sequence
  DNA replication origin
cgcggcgtcgcacgcacgcaggccccgccccgtccgccccgcgccggcccggcgcgccctcccttggccggcggcgcttgttgttcggcggcggcggtcgcagctcgggtccccctcgggcgcccccgccgccgtccgcgcgcggccatggagctggaggtaccggacgaggcggagagcgctgaggcgggggccgtgccctcggaggcggcgtgggcggcagagagcggggcggcggcaggtaacggcccggcctcccggggctgcggcccgctgggctcgtccgagcgccgagagtcgcggggctgcggggccggggcgggggctgcacggtcgctgcgggggcgccgccggttccaggagcctggggcggggcagtcccctggagccgcggggaggacggggctgaagccgcgccgggaagcgggaggcctgcgaggggctacctcccaccgctcccgggccgggggcgactcggcgtgggcgccgctggggatccccgttctgcctgacccgctcccaggggctgcccgtcgtgtgagtggcggctgcttgggtggaggcgggggtctctgaggccgtgcgtgcccacctcctgatgtcacctccctttctgtaagtccccagacctgagtccgggtgcgcgacctttcctcaccttcctgggcctcagtttacctccctgctaaaatgaggggaggaaaagggttacatctcaagatgcctccaccgccccggctgtgcacacagggtgccctgtcgcccccttttcctctccccgagccttcccccaggacacactggtggggctgcgggctgggcggggggcacggctgtctcatgccccctttagctgcttcctggacctccagccgggtaggtggcggcagctgggccttcccttctgtggggacggtgtgcagagcccagaggaagggaacagttccttctcagtcgaggtcacaagctcccaaatcggaagtttccggattcacaaaatcctctgctcctcccaggcagccagcagcagcgtctctgtagacacccacacgggcatccgtcctccttctccccccaggcctcccgaagcttccttggttggcaggcgggcaagcgggcgggcgggcgatgcgtgctgcctgggagttggggagatgtctggagagagagagagtgtggaagtcatcaagtcccccccccaccccccgccttgaaagacactcgtggcttccctcccggcggccatctggaaccgcttggtaggtgacccggttccttccccagagccagtggcctcgcccctttctttgcgggcagccggtgtcctggcctggccagcaagagacatggtggaggaacccaggcagggcaccaggccccagcccgggttcctttcttgggccccccaacttccgctgtcagccctctgaccccagctggtcagagacaaagtagcccaggactcgctgaccaaaagaaaaccacaccgcgaccattcatcttatcaggggctctgggagcaccggggacagataaagttgccagctccagactgagcatggtggtggggtgggagagcgggggagtgggggggtgggggtggggggccggggagggctggaaggtcagggtctggcatctctgcccatccctgaaatccacagaaatctgaccccagctggccatatactgcttctgaatgtttaaaattcagagttgcctcactcctccaacgccatccctcctgatgttagcgctggtgagtttaggttgtgcctggctgggccacagagacgtgagcacataaaggggcctgcttgttcttcaccgagatggtttcatgcctcactggggcttctgtgccttggcagaggtattttgagtcaggaaattaggggtgctgagcaacgcccctggcttctgcccactccatgccaggagcacctgccagttgtgacagccacaagtgacccagacaccgttcagtgtcccctgggggcaggacggccctggtgagaaatgccacacgtttatgactctgtgaactgcttgctttttatctctggtcatctggagtctccccaccctatgttggtatcggtttgtagagagggcgagcgccaggcagtggttaagggggagccccagagttggtcccgccgatgtccccctcccagctccgcgcttcaggtgctgtgtggccgtcacttccccgggcttcagcgtcccgtctgtgaagtggggtgatgaccgtgtgtgctaggggctgagcctgggatgagttggcgctcgtgcttggtgattgtcgtgccggttggccacccctttccggcctctccaccatcggtgcctccaggcccctgctgaggcccatgcccgtggtttctggagtcaccgctc

SEQ ID NO: 34036 - DNA, 1286 bp, Artificial sequence
  DNA replication origin
agcccctcgcaggcctcccgcttcccggcgcggcttcagccccgtcctccccgcggctccaggggactgccccgccccaggctcctggaaccggcggcgcccccgcagcgaccgtgcagcccccgccccggccccgcagccccgcgactctcggcgctcggacgagcccagcgggccgcagccccgggaggccgggccgttacctgccgccgccccgctctctgccgcccacgccgcctccgagggcacggcccccgcctcagcgctctccgcctcgtccggtacctccagctccatggccgcgcgcggacggcggcgggggcgcccgagggggacccgagctgcgaccgccgccgccgaacaacaagcgccgccggccaagggagggcgcgccgggccggcgcggggcggacggggcggggcctgcgtgcgtgcgacgccgcggacggcgcgcggccaatcggggctcgggggcggggcctgcttgcgacccgcagccaggagcgcctcgagtgccccctcgcgcccaggggtgggagtacagagccaggctcgccattccatcgtattaggtcagtaagattgacaggcacgatacgtatcaataacattgctgtgcacaacacataccaataacatggatctacacaacacatgacaataatatggatctatacagcacgtgccaataatatggatgtacacagcacatgccaataacatggatctaaacagcacatgccaataacagggacctgcacagcgcatgacaataacatggatctggccgggcgcggtgactcacgcctatattcccggcactttgggaggccgaagagggcggatcacctgaggtcaggagttcaagaccatcctgaccaacatggtgaaatcctgtctctactaaaaatacaaaaaatagctgggcgtggtggcacatgcctgtaatcgcggctactcgggaggctgaggcaggagaatcgctggaacccaggagggagaggttgcagtgagctgagatcgcaccattgccctccagcctgggccacagagtgagactctgtcccaaaaaaaaccacacatggacctacacagcacatgccaataacatggagttacccaatgcatgccaataacatggatatacacaatacatgccaataacacggatatgcacaatacatgccaataacatggatatacacaatacatgccaataacatgaatctatactatatcattgacatggatctacataaaacatacaaatagcattgctatatgca

SEQ ID NO: 34037 - DNA, 952 bp, Artificial sequence
  DNA replication origin
caggggtggggtgagcaagccggctggggtgcgccgtggcgggggcggggcggggggcgatccttgtctccggagggatttcaccctccaggcatggagcctgggctggtttcttcagacccaccagccagggtagactgggactgcagcggtatgcggccagacccaggccactccgccccaagcttcaggacccggcacttctggttcccgctgacttcttccttgcctccaggcacagctctcagaatcccctccccaatcggtgtatttgttcgctgaaaccgccctctctgccattgttcctggagatggggtggcggggggggggggcacaggggacggcggcccgggagccccgtacccgggggcggtgtgacttggtaccggccccgtcccctctgggcgggcctcttgttcggtgtttgtgtccagccctgggcggggggcggggacaaagacccaagccccaccctctcagagttcacctggacaggggcagggctgggaactcaggacacacctgttgagcacctggccacagtgtgttttactcaaccattcactcattcctcaaactcttccctaagggggcctggtcctatggggtcccaggggcccatccctgcccatcgggagcgctcagactgagggggaaggtgtaaggtggacaaatccactctgacatcccacaccccaatcatcacatttgggccagagggaaggatgtatgatatgcgtacggaggaagaggctggggctgtgaaggatgaataggagtttgccagggagtccagtaccagcactcaaggcctggaaaggaggctgatggccaatcacctgggccttaagtagccagagagacagacatgtctcctttcacagcctaagaggaaagaccagaaacatactaaccgatggttaaagagaataaagatgatttttagatgcc

SEQ ID NO: 34038 - DNA, 2219 bp, Artificial sequence
  DNA replication origin
aagacctgcaccaagatggccaacatcgtgagtaggcagcccctggcatggccagcatctctgaccccagcctgggtcgtgccgctgtgggggttgtaagcttctgagagcaaggagtcatcttctcatcttacagtttggacattgaggcccagagagagactggtgtcccccagggccacccgggggctgagcagagcctcccccagcccttgcctgtagctgacccttcctgtcccctcctctaacagacagtgaaacgtccccggaggatccacctgcccgccaccaaagccagcccctccagcccagggcgccaggactcggatgaagacgatgggccccagcgggtggaggaggtggaccagggccggggctatgacggcgactcatccagtggctccggccgctcctgggacgagcgctcccgccggccgaggcctggtcgccggggccgggccggcagccatgggcgtaggagcccaggtggtggctctgaggccaacgggctggccctggtgtccggctttaagcggctgccacggcaggacgtgcagatgaagcctgtgaagtcagtgctggtgaagaggagagacagcgaaggtcagaagaggcgggaggtcggacacgatcagtactggacacagggcaccgtggtcggatgggcgacggtttcaagtgattctcctgcctcagcctccctggtggctgggactccaggcgcccgccaccatgcctggctaatttttgtacttttggtagagatggggcttcaccatgttggcaaggatggtttcgaattcttgacctcaggtgattcacccacctcggcctcccatagtgcttgctgggattgtgggcgtgagccaccgcgcccagcctggaagctacaactacacctggcatcttcttgctcctcgctccccccaccacaaatccccactttctgcttttctgtccctttctgcctgtctgtatttcatatattctctctagctctttctctctgaacctggtggtccctaattctgggctaggttgagccatatcacctgtcagccacttggggcccagaaccattttatcaacatgtccccgcgctgatccccgggacctctgtttaggccacctcacttagcaagagggactcagcagatgggatggagtgaaggaccctgagctcagaggtgatcctggatgatctggggggcccagtgtcaccacagggtccttataagaggaggcctggctgagtgtggtggctgatgcctgtaatcccagcactttgggaggccaaggcaggcagatcacttgaggccagtagttctagaccagcctgaccactatgatgaaaccccatctctactagaaatacaaaaattagccaggcgtggtggtgtgcacctgtaatcccagctacctgggaggctgaggcacgagaattgcttaaacccgggaggtagaggttgcagtgacctgagattttgccactgcactccagccccggcgataggagtgagactccttctcgaaaaaaattaaaaaataaaaaataaaaattgaaacaatgatgatgttatgagcaatagaatgcccttagcctgtgcatggcaacatcacgagtggcacggtgacctggtgtccccgccccgtggagatgtcattgacacaatcagatctcgggtcctacgggcgacatcactgttctccttatgatgccatcaaggtgttaggatgggagggcccgcacctggactgcttacagcaggagaatgctcccaggcacccgtctccagagtcctgcctcagtttccctcctccccccttacagagtttggcgtcaagctgggcagtcagatcttcatcaagcacattacagattcgggcctggctgcccggcaccgtgggctgcaggaaggagatctcattctacaggtgaggccgggcttcttgtcctgagagcagggagacaaggcagggttggggcgggcagtcccacggagtcatacagcaaggacagcagaactgggccccaaagcatttaccttcagtgttgttgcttgtatctcaaaggttgcagatggccaggcataaaaccccctttttccccagctactactaatccacagccaaatgtcggtttctagtatccccatggggttgtctgtttctaataccctctagctttgatgtgcatcagagactcatgtgggcagctg

SEQ ID NO: 34039 - DNA, 1365 bp, Artificial sequence
  DNA replication origin
acgggaggaggcagtgcagttcctgctggggctgccaccaggcgaggagatggagctggtgacgcagaggaagcaggacagtgagtgcgcgtggatatgggtgtgcctgtgtgttgcggggggaggacctggctgtgtggcctggtggtgagtgcagggatgtggttgaatctgcatctctgcaccctccatccctctccctggcccctacagggagagtgccccaaatctccagccaggcccactctcgggtggggagggctcagatcaggcagcagcccaggcagctcatgtggcctcccgctctccccagttttctggaaaatggtgcagtcccgcgtgggtgactccttctacatccgcactcactttgagctggagcccagtccaccgtctggcctgggcttcacccgtggcgacgtcttccacgtgctggacacgctgcaccccggccccgggcagagccacgcacgaggaggccactggctggcggtgcgcatgggtcgtgacctgcgggagcaagagcggggcatcattcccaaccagagcaggtggggactgtgtgctcctgcagtggggcacttctgcttcagcctcagtctccccgttagaaatgggctcgattgggctggacgcggtggctcaggcctgtaatcctggcactttgggaggctgaagtgggcagatcatgaggtcaagagatcgagaccatcctgggcaacatggtgaaacctcgtctctactaaaaatacaaaaattagctgggcgtggtggcacatgcctataatcccagcttcttgggaggctgaggcaggagaatcgcttgaacctgggaggcagaggttacagtgagccgagatcacgccactgcactccagcctggcaacagagtgagactcttgtctcaataaataaataaataggcatgatatcactgcttagcagtgttggtggttcaatctgaggaggtccacaaaaggctctgggcgggccccatttggtgctggtatgagcttcctgttgttgctgtaacagatgcccagaaacttagtggctttaaacaacacacacatcctcttacagttctggagagcaaaagtactaaagtcaaggtatgggcaggcctgggccctcccagaggctccaggagaaaaccaattttccacctttcccagagtctagaggggccgcatccctcagctcggggccccttcctcccccttcatagccacagcacagcctcttctagtctctctctgactctcaccctcccgcctcttcttgtgaggaccctgtgaggacatcgggtcccctgggtcacccaggatcatcatccacctcaatagcatcagtttaatcccatct

SEQ ID NO: 34040 - DNA, 1383 bp, Artificial sequence
  DNA replication origin
ccacagtcctgatccctgaccaagccctaactcccgacagaggccccaaaccccagctgggcctgcacagcgtctgtggggcctccctgcccgacccacccacaccgcggcagtacctgatcttccgccgtccagatgggccgcgtctgctgctctcgaatgatggccttgagctcctggtaccaggtgtcactcgtgccattcagagggatggtggctgcagggaggggacgtcagtgtgtgcaggagactcaggctggggcccacccgcctaccctgggacacccaccccccaacctgtgaagaggtggctgctgtgttttcgcagcttctgggcttgtgcgtagaggcgacgggtgctgcggcgggaggcaggcgccagccactggcgcagtgccttgagggccggccggctctcggggatgaagaagaccacaatggggtagtactgcacatagttgaggcgctcgatggcggagggggtcacatccaggagcgcatgcttgtcctgggccaggccggcggacgttggggtgagggggattgcagcagggtaaacagagagagaaagatagaaagatgaagagtctgaggtcagagtggaccccagcctctcacatccacaggctagcaagttggggatgggggtggtaacagcccaggtcgcagcatcttgggcatcaaaacctcaacttgagtctctctgcctttgcccagggctggctgctgtttgactccgagaagcccttgtctgtctcgggcctcctgcctcacaaagcctccaaaaggggctctatggaagactgcacttgtggggtgtgggctgagaacaggtcaggacattcagttggatgcccaggcctcggtttcccccatccatgaaatgggacccgtagcaggacccggcttactttttctgcaatcacccgcacggtgtctagtttgatgatcttggaggggctgtcggtcctggacacagtctctgtggacggcagagaggaccagcagcttcaggagggcagcccccgtcccctcaaattcatgcctacctgcccctcccctgctcaagaagccaccatggctccccattgccctggagagaaatcctaacagcagcagaaactcatgttggccaagtgccaggcactgcactcacatcccctcctgacctcagccccctcctcctcctgaggagtgggtggctggtactggcctatgtggcaggtggggaaactgaggctcagagacaacaggccacttgctcagggttgcagggtcagaggcctgatgctgagcctgagctgcagcccctggctctcccagactcagttccaactccagggctctgctcaggctacgaccccacaggaaactccactcttg

SEQ ID NO: 34041 - DNA, 892 bp, Artificial sequence
  DNA replication origin
atccgcgtcggccaccgcatcattgagatcaatgggcagagtgtggtggccacgccacacgcccgcatcatcgagctgctcaccgaggcctatggcgaggtgtgcgggtggtgggtggtggccaggggcgcccccacgtcccccacgagcccaggcctgccctgagccccgttccgcctccactccccaggtgcatatcaagacgatgccagctgccacatatcgcctccttacaggccaggagcagcccgtgtacctgtgaccacctcatcccttgcctgccactgtgccttcgcctccatggccccggagccccatcctgggcctgccctggctggccaggaccccagcggttcttggtcctgtatgatttcctaatataaaaacagtaaaagcttatgcatttggcaaagtctcggatcagggtctacgggaccgaggaccttgtccttcctggaagccactagaagccggtgctgtgaaaatactctgtttattaaagaccaggcggagggaggtaaggttgtgggttctgtatgggaaactgagtcccagccccagggagggagaaggaggacggaccagctggcagccttcgagaggtcacaggtcagtggccggaccccagtcatagccgtcttcatcggaggactccgcatcatgtactcgcataaactttttcttcagggcttcccgttcataggttctggggatcaggaaatagaatagatgctgtgggtgggaagggtgtgagctttctcaccataaactgaggctggctgtgctaggcacagtgggtgtgggcagagataagcacatctgggcattcatgggtagggccttgttaacaaactcctatgcatccctcaaagccccagctgcaatatcctgc

SEQ ID NO: 34042 - DNA, 1439 bp, Artificial sequence
  DNA replication origin
ccggggccatggaggcgaaggcacagtggcaggcaagggatgaggtggtcacaggtacacgggctgctcctggcctgtaaggaggcgatatgtggcagctggcatcgtcttgatatgcacctggggagtggaggcggaacggggctcagggcaggcctgggctcgtgggggacgtgggggcgcccctggccaccacccaccacccgcacacctcgccataggcctcggtgagcagctcgatgatgcgggcgtgtggcgtggccaccacactctgcccattgatctcaatgatgcggtggccgacgcggatgcccccacgctcggcgatgccaccacggaggaggctgcagatctgggggagaaaagagggggacgggaaagaggtgggggctgctcaggggccgtgctcagggccgccctacccccccaccccggggccaggggccggggcctcacgatgccgtcctccacgcagaagcccagctgctcgcgggcgtggggccggtggatgatggcggtggtgacgggagggcagtggacgatgctgagtgtcaccgacgtctgcgacttcgtctcctgtggggcgggggccgttggcctcactcagctgccggacagcctggcaggttgtagccccctctgggcctcagtttaccctctcataaaccagagacctggagtccaggggctcaattctggaagaccccctcagatgtgatagagaacagactcgggcccggtgggcatggggtcgaagctgtctgacccgagccatatcgcttccttatggccaaaagccaagccgacagccgggctctccaggcaggctgcaaacatctgtaagaggctgcacggactgtggcctcattcctctgacgggggcaggtccctccctatctctgggcctcagtttccccatctgagcaacaaaggttgagactcaaaaacatggccaggtgcagtggctcacacctgtaatcccagcactgtgggaggccgaggcaggtggatcacttgaggccaggagctcaagaccagcctggccaaccaacatagtgagactccatctctacaaaaaataaaacaataaactgggcgtggtggtgcacacctgtggtcccagctactcgggaggctgaggaaggagatttgcttgagcccagaaggtcaaggctgcaatgagccaggtgcaccgctgcactccagcctgggcaagagtgagaccttgtctcaaacaaacaaacccccccagaaattagctgtttcttgttagagagagagagtggcccagccctggagctgggccacccgcatttccatcctggctctggtactagggaggtgccctggacaagtggcctcccttctccaggcctcagtttccccaagggcacaccagtgggcaggacttaaaagttcgactttgtccctcctggctg

SEQ ID NO: 34043 - DNA, 1928 bp, Artificial sequence
  DNA replication origin
attagctgtttcttgttagagagagagagtggcccagccctggagctgggccacccgcatttccatcctggctctggtactagggaggtgccctggacaagtggcctcccttctccaggcctcagtttccccaagggcacaccagtgggcaggacttaaaagttcgactttgtccctcctggctgggctggagagacctggccagggaggagacctctctgggactcagctccccttcctgggagtgtgggggccctgccacaccaggaaactcacgcggacagcggcctggcacgcagccaggggcagccccaccaggctggtcccgttgatggcggtcaggcggtccccgatgctgagggcccccgagcgctcagcaggccccccgtgcagcaggttggcgatgacggctgtgggcagcagggagccccagcccgactccaccagggccacgcccaggccctcccctcgccgcttctcgaggtgcacctgggacacacagggggcgcggaggctgctcagcagggcccggtgcaggtgcacgggtgtggggggcaccaggtgggggctgcccagcacctcactcacctcccggcagttgtcactgttggagaagtggtccaggtccccattatggaggtggcaggcgcctgggctcgggtgcacgcccacctggctggggtcaataccgctttcccgtaggaactggctgtaggcggcggcgaaggcctggccaatggcctgggcgatgagctgggcctgcggggaggagtggcgcgtccctggggtgtcccacccacctcctccaggtccccaaagtccccagggtcctcagagctgagccctcctgtccccacctggggtgagagtcccaggacacagccttctgccctggggctttgggggaggtggagagacagccgcatcttggggaatctacggggagaaggaaggggaggggcagccctgggctggggggacgatgagggaggcagctccctgcgcatgggctgtgggaaaagctatcaaagacccagccagggggcctggggcctcatgggtggcagggacagcccaggagcgggcaaggtttcggggagtcggccgagagtcttggagtcttataggaggctggacgcggtggctcacgcctgtaattgcagcactttgggaggctgaggtgggtggatcgcttgagcccaggagtttgagaccgtgttcacctgggcaacagagcgagaccgtgtctctataaaaaatacaaaaattagccaggcatggtgataccccggtggtcccagctactagagaggctgaagtgggaggatcgcttgagcctggaaggttgaggctgcagtgaactatgattgcgccactgcactccagcctgggtgacagaaggagaccttgtcccaaaaaaagaatttaaaaataagcttatgggagggaggttaaatgcacggcccactgagggaggcgacagttgcagtgaggagggcctcaggagggtggccccgcgccctggctgctcacgtcctccgcgtagaatacgtggcagagcatcttgtagaggcggcggccgtggtcctggggtgccggcctccgtgccagccgccgccgcgccatcagcaccagcacgcagccgatgtcggctgtgtaggagatggtatgcagggcgtggtccatcatggcctcctggggcgggagaggcagcctgggtgggttggggggccgtgccaggctcgatcaccccacccgcatccctggggcgggtccctgccccgtacctgggagtccgctgtcaagaccttgatcctcttggtggagacgaacaggtccacctccgtcatgggctgggtctccccatcgggggcctgtgggtggcggcgtgggaggtggaggcccccacagacccagcctgcagccca

SEQ ID NO: 34044 - DNA, 1340 bp, Artificial sequence
  DNA replication origin
ccaggcaggtctcgaactcctgacctcaggtgatccaccccccccccccggcctcctaaagtgctggggttacagacgtgagccaccgcacccagccaggagtaaagctttatgtagttctgggctgggttgggagtattctggaactgtctagaattctcctggaacagaattgtttgttccttgactggtcaggtaattcttagaatccctggtgtagccaaaggtgtgaactactgaaggagattctagaaccacaggaagagctgcctgacgcgattgtgattaagatgttctggaatcacggagcagagaagtctgattctagagtgataataagattctaaaactcctgacagaattgctatgagacctgtcagagagttctggaatcaagggtcagaaccagctggggttctggagagtatgggaattttagacaggcagcagggtctgtctctgttctgagtggttctacaacccgggaacagagctgcctgctatcctgggctgactgcagacggttctagaacagtgggcagagctggccagttctagattgatggagggaattccagaaccaagaagcaggggtccactgtggttctagaatgttgtggaggtttcgaaattggagtggggggtggagcgtcgtggctcacgcctgtcatcccagtactttaggaggccaaggcgggtggatcacttgaggtcgggagtttgagaccagcctggccaacgtggcgaaaccccgtctctactaaaaatacaaaaactagccaggcgtggtggtgggcgcctgtaatcccagctactcatgagactgaggcaggagaatcgtttgaacccaggaagcggaggttgcagtgagctgagatcacaccaccgagctccagcctgggcgacagagcgagaccgtgtctcaaaaaagcaggagtgggactgtctggttccggcctgatcatggaattctggggacacggggtgaaggtatctgtgggtgctagatctggctttgaatccagccatggcctggactcactggtttcccacctgcgagtccttgagggatggacagaaggttctagacctgtgagggccaggctgcttggatggttctagaacagtgggctgtgcttcctggctggagagtgctaagccaccagctagaacactgtgtctcccggccatctcggagagcgtagccctggggcagagcctgtgggagtgggcccctgggggccgaccctcttcgctgtcgccctcagtgcctggtccctgtgaccatgaagacctcctggacggtgtcatatttggggccaggtacctggggtccaccc

SEQ ID NO: 34045 - DNA, 969 bp, Artificial sequence
  DNA replication origin
tctccacgacgcttccggtgcctcaaggtcccaaggaaaccacctctcacacttctttaatatttcccaaccccacttctccccatctgccatcctttggaataatgaacacagcccccagagccaggcagtgattattaaccctattttgcaggagaacaaacaggtcctggggccagccggggcagtctgcgggccgggaagcctgggattcgaactcccctccaacatctgcagttgtcccagcgcccccgcgtggcgaggctgggtgggagaactacatttcccagcaggcctcgcgaggccgcgcatgctcaatgggccagggctctgcgcggatagaggagcgggcgccgggaccgggaatccccgagctgcgccttctggggacgcggcccgggctacgtcggggccgtccgtggggagcggggtcctggaggctgcgcggggctgaggcggcctcgatttgggaagtgagtgtcctcgaggtgcagagcgcagtctgagtcggcgcttgaggtcttcggtctgaggggggactagggtctgggcttggggctgggtcctgaagtcggggtctgagtctggagtcgatcttggggtagcattggaggtttggagactggggtccgccttatggcgtcttgggtctctggtattaagtccagggtcctgggtctaaagttctggatggaggtattgggggttgaggtcatgggactggggtcttgggtctggggtcttggggaactgcctctgaccagtcggtagagtcagggtgtgaggtctgggtctccagcctgggttccgcgtcttgagggaggaggacctggaagaaccagggctggagtgaacagactccattagttgagagaggtctgggatgacacaggggctcgggaagccactgcctcacacctccccattctgtggctcagtttcttcatctgtaaaatgggaatcctaact

SEQ ID NO: 34046 - DNA, 1130 bp, Artificial sequence
  DNA replication origin
cctctgcctcctgggttcaagcggttctcctgcctcagccttcagagtagctgggattacaggcatgcgccaccatgcctggctaatttttttttttttttgagatggagttttgctcttgtcgcccaggctggagtgcagtggtgtgatcttggctcactgcaacctccacctcccagtgttccaatgattctcctgcctcagcctcccgagtagctgggattacaggtgcccgccgtcacacccagctaatttttgtatttttagtagagacagggtttcaccatgtttgccaggctagtctcgaactcctgataacctcgtgatccgcctgccctggcctcccaaagtgctgggattacaggcgtgagccaccacgcctggcctaattttgtatttttagtagagacagggtttctccatgttggccaggctggtcttgaactcctgacctcaggtgatccgcccacctcggcctcccaaagtgctgggagtacaggcgtgagccgccgcacccgtcctgcaaatacttattgaccactgactgcatgccaggccctgctctaggcttgagggatacagaagggctcaaaacagacacaagtccccaccctggcggagctagctggggaggcagacaggaaggaggaagtcaggcagctgtggtggtgacacttccaggaagggggcaggagaatgagggacagagccggggtgtttggctgctctagtttgaggtttgggggacacagaagccaagacgggagtgggtggaaggggctttccaggcagtgggcacagcctgtgcaaaggccccggggcaggaccgcacctggtgtgctggaggaacagcggggaggcctgtgtggctggagcacagtgaggagggcgagagagggaggaggtgagggcaggacctgtgggctgcaggaagggttctgctgtggccccaagctgatctgaaggctggggagggtcaggaaggctgagcaagtgggggcaggtggcatgatgtggacagtgctaggaggcaggagagggcttggcgtgtgccagcctcagatgtgccactgggatggggttggctccattgctgcatggccagggacccacccagcccagggtcgggg

SEQ ID NO: 34047 - DNA, 1202 bp, Artificial sequence
  DNA replication origin
gcaggtgcgcagtaatcccctccactccagagtcccctaagaggatgaaggttagggtttccctgagacgggccccgccccgcccatccagcttgtggacagaggaagccggagggtgggtgagcccagtccaaatcccccagggcacccacctaggcatgggtggggctgctgtggcaagggtggggccgagggcatgacccttgggggttctgcaggacgtggggtccatgaggtgatctacccccagcaagaggccccatcactccctaactacgtgtcaccctcagcctcctctaatctggtggactccagccctcgtgatcccgccccatcacagccaggcagggcaggagttgttgggactgcagggaggccagtcctcactcaggcctagggtcagaccctgggtcagggtcagggtgccgaaagccgactccagagggtggactgggggcggaggttgagacctgggctccagtggagtggacagaggacttgggggtggggaaggaaggcccaagcccctgggctccagggataggccagtgaggaccacgctgtgactgcagcaggaaggaaggggcagtcccttccctctgattctacttgctgcgctggtggggacgtcggccaggagccctcgggctaccctgcccatgagtgccagcccctgggggatccaaggaccctgagatggagagagccttgggtctgaataccgaagcacctggatccagccacacctaaagccacaccactacccgctccggacatctcctttcttgaagctcataaagcctcttttctgactctgatggcttgagatagttaggtttgagtcccttgcaaccaagagtggcttagctaggacaaccccctcacccagcaacttgagatttggggccggggcctcgtgagcagtgtcaggaattccaggagttggggagagaagcccaccaagggccggaggcacaggggacctgcagacggcccaccactggctggggtggaggctgggatccctggggtctgagggacccacttcccgccaggccgacaccagacaataccaaggggaaatagggtctacccagaaagctctttattggcctccagggccctggtccagccccactgtggggtcacatggaaacccaggctggggagccgcctcttgtctcacaaaagtccacgtcctc

SEQ ID NO: 34048 - DNA, 2311 bp, Artificial sequence
  DNA replication origin
agggctggggtgtgcagagggggtccgaggattggcggggagcggctgagctcacagcaaccccccttccctctcgcaccctccaggtgtggttccagaaccgccgggccaagtggcgccgccaggagcggctggagtcaggctcgggtgccgtggcagctccgagactccccgaggccccagcgctgccgttcgcccgccccccggccatgtcgctgcccctggagccctggttgggccccggaccgccggccgtgccaggcctcccccgcctcctgggcccgggcccggggctgcaagcgtccttcgggcctcatgcctttgctcccaccttcgcagatggcttcgccctggaggaggcgtccctgcggctgctggccaaggaacatgcacaggctctggacagggcctggccgccagcctgagcctgccgccctcccgggccccctcctcggcccaacccgagaaccggggacgtgccctggtgacagccaccacgccttggcctaggccgaggtcatggagcaaccgtggtcaggccaggccaccaccactggggagcgggaccagagagacaggctgctgggttccctgcccccatcccgtctcccaccccatcgccacccgtcctgctggcagcggactggcccccagtgtcaggcaggaggtgacccaagtattctcaggccaggtgcggggacctcctcccctcctggggcctcagtctcctgtctgttaattgggcgtgggggcctccgaggttcgagggctgcgaggctgtgggtggcgggaccgctgactctgtaagatgagtgtaaatctctctgcttctcctaatccccatcagcagagctgcccactctccaggctcccagtcccctggaaataacaaatagcagcagctcccgcgagcctggtctcctctcaccgtgtgctcgccatgtgagcactcccctctccgttgtgccctggacctcgggcacagctgtcagcccattctatagagagggaaaccggggcttaggcaggaagccaggtccccaaagtcgcacggccaggagtggatggagctgcctttcagacccatcaccggtcctaccgtccggggcacagcgacaggttctggagagagggtgggtcccgggccaggtgctggtgggcctccaggtggaggcgggctgatgctgggtgtgtcgtcatcgtcagaccgttcctcacgtccccacagaccccaggccctgtgcatgtccccagtggaggcatggccagcatctgctctgtccaacccagccgcatcgcccaagagctctgagcaaggaggctgtcgcggggccgagaacccgctgggactggcaagcacggctggcccagtgcagcaggagggggccctgaggcatgggatgggacagtctgggccagcgccacctcccgggacagaagtgcggcaccagggcaggagctgcagtagctaccctccccgtctccagcctgggctccccagatcactcccagatcaccaggtcaccccatctctaggcggcacctcacacaccagtcctgtggtccaacgccccgccatcacccaatgtcaccgcacaccaggcagtggggacacggcagtaagcacaagaaagatttttttttttaaagctaaaccaggccaggtgcggtggctcatgcctgtaatcccagtgctttgggaggctgaggtgggaggattgcttgagaccagcctgggtgacacagcaagaccccatctccacaaacgtttttaaaatgtgccgggtgtactggtgcacacctgtcatcccagctacccaagaagctgaggcaagaggatcacttgagcccagaaggtcgaggctgcagggagctgtgatcacactgctgcactccagcctgtgcaacagagccagaccctgactcaatacaaataaaaaacaaatctaaaacaaaagacttcagacagtgataagtgatagggagaaaaaaaaaccaggaaagtcagatgtggagtgtggcaggggctgcaattttaatagggagttctggaggaggggaggctggcgtgaaggtagagaccgggggcgggagggagaaggtctagggaaggagggagctgggcagaggcacaggctgtgcaaaggccctggggcaggaccacgcctcgtgcattgaaagaatagcgaggaggcccatgcggctggagcagagtgaggagggggaggagggaggtgatggggaggccaggcagggccagtggctgttataactttgatttttaccctcagaaccttggggaacaacagga

SEQ ID NO: 34049 - DNA, 1059 bp, Artificial sequence
  DNA replication origin
agagaggggaagagaaaacagggacggtgacacacacagagagaaggaagagcagacagaggcacagcaggagacccccccaagcccgaggaggacagcctggggatgcagagcgcatgccggccccagtggagggaaccgatttccccggagccgggaggcaagcctggggctcccctgccctgtccctgccggtagcccccccagccgtctccccaccatctgtcccgctgccgtcccaccaggtgggagccatgttcctgagcccgggcgaggggccggcaaccgagggtgggggtctggggccgggcgaggaggcccccaagaagaagcaccggaggaaccgcaccaccttcaccacctaccagctgcaccagctggagcgggcgttcgaggcctctcactacccggatgtgtacagccgtgaggagctggcagccaaggtgcacctacctgaggtgcgcgtgcaggtgagggcaccccccaacacacacatcttttgcaacctggggagggaggcaaagcaagatcctgaccctcccggagcaacagcagaagagaagctaggaaggcttcctggaggagggggtgtgggagctgaggttttgacatttgagtaggagtgtgccagctgggaaggaaaaggggagtttttctaggcatcctgaacagtgtgtgcaaagacatggaggggttaagttggaggcgtttcccttgagccaggggtgaaggaggaggcagagaatggtgtgggtaacaacgcttttgaaggccttgaatgccacgttaggcagctcaggttacttgctaagggccaagggaggccaaggaggggagtgaggagttggaggggagcctgggcttagggaacgcttgggagatcctcatcttcttggggcagaacagcgaagcagcaggtaggagtcgggtcagacgggagtcagaacccccagggctggggtgtgcagagggggtccgaggattggcggggagcggctgagctcacagcaaccccccttccctctcgcaccctccaggtgtggttccagaaccgccggg

SEQ ID NO: 34050 - DNA, 891 bp, Artificial sequence
  DNA replication origin
ccagaggaaccaactgcagtgccttcacctctggacctcagcttccccaactgcctctgacatctgtgagttctaagacacctttttctgcccccagcagataaaaatattaacagtgagcattcattaagtgccccctgtatgccaatttctgtgcgatgctctgagaagctgaaatccccccagggtaggtcctagtgtggcagttttacagccagggaaactgaggcccagagagggagaggcccttgccgtcttatggcaaggggccgtggagcctgtaagactatccccccagccacccacttagagccccagccctccatccaccctgccctccctcctggctcagaacagcccaggaccaagtgggaggggccgcctcaattaatcaccttgagctaatcctcccccacgcagccccgacctggctcggctccggcagggccaggccacagcagacgcagcgccaggcccgctggggcaggtgtcccgtggaaatcgacggaggggctgccgtgggcggtgagtgcggggtgggcactggtgggcctgggtaggaggtggtgggggcagagatcccctcagggtggagggcttagggcgtgagaagggatcctgccttccttgacgggggggcatccttgacccccccccgccgacacacacacacacaggccgtgacagtcacagagaggggaagagaaaacagggacggtgacacacacagagagaaggaagagcagacagaggcacagcaggagacccccccaagcccgaggaggacagcctggggatgcagagcgcatgccggccccagtggagggaaccgatttccccggagccgggaggcaagcctggggctcccctgccctgtccctgccggtagcc

SEQ ID NO: 34051 - DNA, 1078 bp, Artificial sequence
  DNA replication origin
gggcaggggagccccaggcttgcctcccggctccggggaaatcggttccctccactggggccggcatgcgctctgcatccccaggctgtcctcctcgggcttgggggggtctcctgctgtgcctctgtctgctcttccttctctctgtgtgtgtcaccgtccctgttttctcttcccctctctgtgactgtcacggcctgtgtgtgtgtgtgtcggcgggggggggtcaaggatgcccccccgtcaaggaaggcaggatcccttctcacgccctaagccctccaccctgaggggatctctgcccccaccacctcctacccaggcccaccagtgcccaccccgcactcaccgcccacggcagcccctccgtcgatttccacgggacacctgccccagcgggcctggcgctgcgtctgctgtggcctggccctgccggagccgagccaggtcggggctgcgtgggggaggattagctcaaggtgattaattgaggcggcccctcccacttggtcctgggctgttctgagccaggagggagggcagggtggatggagggctggggctctaagtgggtggctggggggatagtcttacaggctccacggccccttgccataagacggcaagggcctctccctctctgggcctcagtttccctggctgtaaaactgccacactaggacctaccctggggggatttcagcttctcagagcatcgcacagaaattggcatacagggggcacttaatgaatgctcactgttaatatttttatctgctgggggcagaaaaaggtgtcttagaactcacagatgtcagaggcagttggggaagctgaggtccagaggtgaaggcactgcagttggttcctctggacacaaggggtagggacccttttagctgggtctggaggtatgaatagacgttcaccattcacagccgggcgcagtggctcacgcctgtaaccccagcactttgggaggctgaggcgggcggatcacctgagatcatgagtttgagaccagcctggccaacatggcaaaaccctgtctactaaaaatacaaaaattagccaggcg

SEQ ID NO: 34052 - DNA, 1006 bp, Artificial sequence
  DNA replication origin
ttagtttttgggtttttttttgagacagagtcctactctgtcgcccaggctggagtgcagtggcacgatctcagctcactgcaacctccgcctcctgggttcaagcaattctcctgcctcagcctcctgagtagctgggattacagacacctgcaaccacgcctggctaatttttgtattttttagtagagacacggtttcgccaccttggccaggctggtcttgaactcctgacctcgtgatccgcctgccttggcctcccaaagtgctggcattacaggtgtgagctaccccgcctggcctatttttgtttttttgagaaggagtctcactctgttgcctaggctggagtgcagtggtgagatctcggctcactgcaacctccgcctcccaggttcaagtgattctcctgcctcagcctcctgagtagctcggattacaggtgcgccaccacgcccagctaatttttgtatttttactgaagatggggtttcaccgtgttggccaggttgctcttgaactcctgacctcaggtgatccacttgcctcggcctcccatagtgcaggagttccaggcgtgagccaccgcgaccagtcgggttgctatgttaaggaaggtggtgagaatggaagatggagtgcaaagccgcaagttctggacacatggggtgtgaaggatggagtgctggggaaccatgggaggttgtggagcagggacacagtggcattttatacaaacatcaatgatgagcagctgagaaaccaggggcaggtgccaggcaggtgaggctacagggtctagtcaggccaagggccgggggagatggggaggacagaagggtgggggtagcaattccagaggaaggaagctggagaggggcagggtgtgggtatggaggtgcaagggcgttgcccaggcccattctgggctgtgaggtgggactgtttcagaggcagaggcctgagaggtggagcgggctccaggggaagccccagagacgagtgc

SEQ ID NO: 34053 - DNA, 851 bp, Artificial sequence
  DNA replication origin
ccaggcgtgagccaccgcgaccagtcgggttgctatgttaaggaaggtggtgagaatggaagatggagtgcaaagccgcaagttctggacacatggggtgtgaaggatggagtgctggggaaccatgggaggttgtggagcagggacacagtggcattttatacaaacatcaatgatgagcagctgagaaaccaggggcaggtgccaggcaggtgaggctacagggtctagtcaggccaagggccgggggagatggggaggacagaagggtgggggtagcaattccagaggaaggaagctggagaggggcagggtgtgggtatggaggtgcaagggcgttgcccaggcccattctgggctgtgaggtgggactgtttcagaggcagaggcctgagaggtggagcgggctccaggggaagccccagagacgagtgccccccaagtccaaggagccagggggctcaggcaggggagtgccctagagatggaaaggagagggtactccagggacaatgggaaggggagaggaggggaggcctgatttagtgacatggaggacaggggggaggtgactgcggtggagtgagggggagacccaggcctgtggatgggcgaaggggccagtgcaaagtgaactagagatccttccagaatgttggcatgttggctttgaagggagagacacacaaagaaagagagacagagacagagacagagaaaggcgtgacacacacacacacgagaaaccaggtgcccaggccccagagtagtcccggtcggatcccagggggcaggtggcttcggcccaggatctgggtgtagctcccccatcccaggggccaagttcaggt

SEQ ID NO: 34054 - DNA, 1063 bp, Artificial sequence
  DNA replication origin
gtgcccaggccccagagtagtcccggtcggatcccagggggcaggtggcttcggcccaggatctgggtgtagctcccccatcccaggggccaagttcaggtgggcaaggtgcagaggcaaacaggggttcaatccctggccagaggggtggctgcagcttctgaggctccaggtgcctcccctggcctcagctgcccgtcggcaaggtgggcccaccaggctctgtgtccaaggtggagccaggcctgtcacccatcgagggacagggctgtgggctggggagagagaactcccctgatcgcttcatcactttagagcactaacgagctgcttcaggtctcaggccgcaattagctaattggccagtgtgggttaagaggccccaggaaggatcgtggcgtgaggcgcggcggggggggctttgggcgacttagccggacaggcagaagctgcagacgctgtgtcagcttagagggccggattaggagcgcgggctgggtgggcagggccaaggggacaggtggccccctgcagtggattaggcagaggccaggccactccgggcctttccagcctccacctttcaattttccccaagaaagaaccactaacctgcctcaggtgctggtggggagagtgaggcccgagggtgtgcagggctttaagggggccacacaggaggtcggcgtgaccttgggacatttccgtgtctcagctcaggctctgcttggccaggatgggagggtgggctgggagtcctggggtgggggccatacccagcctggccagagacccctctccgtgtatcctaaaggctggctccatgggactcagctgagagcaggtgttggaccgtcccagcaataatggagcaccagctgtatgcctgccttctaggtgcccctcccttcactgctcacacccctctgggaaaaggtgtccattggctggaggaggctgctgaggcccagagagggtaaaagctttcccagtagggaccacctctcccctgtttgcccaggactttccctgttttagcactgaagtctgacaccctggaaca

SEQ ID NO: 34055 - DNA, 2020 bp, Artificial sequence
  DNA replication origin
agagggtaaaagctttcccagtagggaccacctctcccctgtttgcccaggactttccctgttttagcactgaagtctgacaccctggaacagccctcagccctgagcaaaccagggtggtcacaccagggtggtcaccccagggccagcgtcacacagctggggggcgagtcaggattgaacctgtgtgtgcaaagtggatccccggcccgctgtgccagagaggacaggagggccagtgtttccctgccattctgccccccagagtcaatgggtcagcctgctaggtccctggacatttggactgcctctgtccaaggacagtgtcacctgagagctgtcactgcagaagctgtggtgatactcagtgcccagagggccagcacacagtcagcctgagacagaggccgggacgcccatgctgcacaactcccgggccagcttctcagccaacttgcagaagggtgcccagcgggcgggctctacctcccagcagctgctcatgaggacatgcatggggcctggacagcccttgggggctccatgtggtaccccttctccacagcctctgacacctccttcagcctggctttgttaagaggagaggtggatggatgtgtgaatggatggtgggtgggtaggtggatggagggatggatgaatgggtgggtagatcaatggaacagtggatggagggatggatgaatagagtggatgggtgggtgaatgaatggatgggtacatggatggacatgggaatgggtgggggatggatgggtggggagatggatagataagtggatgggttggtggatggatgcatgcatggatgggtggggacagggggatgggtgggtgggtggatggatggaaggatggatggatggatggatgaaaggatggatgggtatgtggatggatgatgggtagataaatgggtggacagatgtgtgagtggatggtaggtggatggatggatgggtggacaggtggatggatgcatgggtggacggatggatggatggatggatgattgggtggatggatggatgagtggatggtgggtaggtggatgagtggatggtgggtggatggataggtgggtgggtggatggatgagtggatagtgggtagatggatggatgagtggatagtgagtgggtggatggatgagtggatagtgggtgggtggatggatggatggatgggtggatggatgagtggatggtgattgggtgggtgaatggatgggtggatggtgattgggtgggtggatagatgggtggatggtgattgggtgggtggatagatgggtggatggtgattgggtgggtggatggatggatgggtggatggtgattgggtgggtgtggatggatgggtggatgatgggtgagattttcatgattggttcaggccatcatgaaagaagcagaagtgagagacatgcagaagtgggagaggcaggagcaggaagagaggggaacgaagcctgggctgtggacccagacaggcccagattcaaatccaggctctaccatattttcttggggcaacccagtgtgagcaacctgccctctctgggcttcagcgtccacgtctgtgaaatgggtgtaatcctggcactcacctccagtggcattttgggggtctgacctgaaagcactcaacatggggcctggccatgaatgggggaggcaggaggaggagggtggcctccccaggccatccctaaatggggctgctgccacacatgcagaccctcctggggctcccatcatgggggctcccatagggatatggatggctggggcctgagaaagggctgtggtgggaggggagacttggaccttgagggctgttggcagcctcccaagatcctttaagcctgggaccccatgggttgggaaagggtgcccaccactgaataccacatgccctgggggactgcagtggggaacccgtgggtaatggcaagtgggtcccctgcccagaatcccccagggaacggtgtccccac

SEQ ID NO: 34056 - DNA, 1077 bp, Artificial sequence
  DNA replication origin
ccaggatgcctggcgcctgggggtgtccgagagcagatcaccaaaggtggcccccggggaagagggcacggggacacagagacacacaggcgcctagagtccttagaatccgtctttatcgggcgatcatccttcgcaggtctggggtgtccacgggccgcccagagccccctacgtgggccagcccctgctgtgggcaccaggaggatgacttgcccgcctggaccctccttgggcctggtcagtgcccccacgccgcactctccactctctcggtcctctggggccaagggccccaccgggtggggtcagggctcctggcttcggggcgaggtggagccgtcggcgtcctgccctgagacggaggctggggcacctgcactgcgtagctcccgggccagcttctcggccagtttgcggaagggtggccggcgggcgggctctgcctcccagcagctgctcatgaggacgtgcacggggcctggacagccctcggggggttccatgcggtaccccttctccacggcctccgacacctctttcagtgactgcggacagcaggcgtgggcaggggtcagggccacagcctctggacctgcccggaacccagtgcctccctgggacccccgctcaccattttagggtacggagcccgtccatatgagaagacctcccagagcagcaccccaaaactccagacatccgacttgctggtgaacttctgtggggcccgagacgggggtgaggagggacccctcaggttttctgctccagcccctgcttcctccaggaagccctcctgggttgaccctcactctctggtcttctcctaattgagtcctcccccaacgccgcccgcagttgagtctagctcagccttagtgcatgaaggaagcctggttattcttcccttcagtcctgagcccacgcctttttcagagctggagaaactgaggcccagaggggggctacgaggaacaattatgggccaagagcttcctggggaggcatagccattgcccttggagtttcagagaggccaagggacatacccagggtcatacagcagagctgggg

SEQ ID NO: 34057 - DNA, 725 bp, Artificial sequence
  DNA replication origin
cagaaagctcggggtgcctggggccacaagctcacaaagcctccctgccccgtgcctcagtttccccttgatggatcttggaatctgcgccccgacgaccccagtgccgcagcaccctgagagtcccacttacagagaaaactgcaggagctgagcggtgttcacgagggctcgaccccgggtccgcagaaagttcaccaggttgccctgttgggggtgggagatggccgcgggatgttggggctgctccgctgcgtgggccccctccccgcctgggccccgccccaccttgctcacgtgctccatgacaatgtacagcccctggtgcaggatcacgcccaggagacgcaccaggttctcgtgttgcatcttcctgggggcggtggggtgggcgtgagggcagggctgggaccccccccgtcccacggtccccagccccaccctgggactcacgtcatgacggccgtctcgtccaggaaggcctgggctgtcacatcacacttgatattcttcacggccaccttttgccccaggtactcaccctgcaggacagctggggggtgggggtggggaacggggtgagatcaggacccccaacaaacagggacagagagacagacggacaggcccgctcacaccggtgcccatgtaacattcacacagctgcgggtccccagaccttgaaacacagaccccatgctcctcacccctgccgcccttgcaag

SEQ ID NO: 34058 - DNA, 1333 bp, Artificial sequence
  DNA replication origin
tggctgagaccctcagaccccacacttgccctccaggaactcccagtcaggcccaaggggtagtgccaggaaacacttcagttctcagagataagagctgcccttttctctttggctctcttgtccctccaaataccctctgggctcttccctacacagttctttacctctgaccaccccagaaacacacacagagcaaaaaaacacaacatggagacccataaaggttccagaatattccagggctctagcctccctgacccttctcccaagcactcctgtgttgtcccctccactgccctctggtcggttctgcagacgttctcttctccctccagaaagtgccccctccaaatgccacggtcttaagagatcattggccagggtgatgctagtctccacctggatgccatccctgatgggtacagacttccccagcagagagatactttcaaggagacagacatggggtcagaggaggcatttgcttttgaccttaaatattgaggatttcactacttaggggctggaaaagcatttcaggtgaagggaacagaatatacaatggctcagaggcatgaagaaaacgatgatcacagttgacctgggagggggtggatgtgtggaggaagggctttgcagatgaggctggaaaggtggctcaggccatgcaggcaggttctggaaggtggtggagctgctgggcctctctccctggaggcatggtttcatgatagaaagataaccttgaggctgcactcaaggcctgggctggaagggggactcgccctctgggaaggaggcggtctgatgggagggcctgaggctgggctgtggggaggggaggggagaagattcaccaggtcttgggaacctggccaaggagggaatgctggaggatggggtgggtggaggttcggggccaggtttctggctcagatggtggatgatggtgacagatgagtggcgaagctggggacctattgaataaaggactgatctgtgtctgtgggcacccccgaggcagcccaggtcttctatcccatagctgggcatggagacaggcttgggtgatctggcctcagaggtgcggggccccagggcccttcctcccggactgggctaacgtgggtagggaagggggtctgccctcctgggcgtcccctacccctggccagctcctcctcggccgacttggtcccgtgtttccgctttggtctcaccagcttggtgcagatagcgcccttgtccttgctgtaatgctgcaggatggtgggacagccatgagcccagccccagggaggggaaccccagcatcctgttccgttcccgg

SEQ ID NO: 34059 - DNA, 2096 bp, Artificial sequence
  DNA replication origin
ggccaggcgtggagcccgcgtgcgccccgggaccccgcccggggcgcgcgggaggcgccgggggccgcggaggcggggcggggaggggccggcggcggcggcggcgcgcggaggagaccgcagtgcggccggcgctaggacccgcgggggcctcccaggccgcggcgcctcccgctttcccccactccccgacccttcttcgcccccaaaatgaggaaacggagcaactcgctccaagttgtgcagccgggaccgcctcggggtgtgcagccggctcgcggaggccctcctgggggcgggcgcggggcgcggctcgggggcgccccctgagcaggtgagcacgtcggcggggagacgtggagagaccccgaggccggggtggggggaaaccccgagggctctaggcgggggtgggcccgggacgtgcgcaggaagggccggtgtgtgcgcgagtgtgcgcgtcccgggcgcgcagcgggtgcgcggctggggcggagggtgctcagaggcgatcggaccccgcgtggtggtggctggggtttcctgggtgcgggtgtgcgcggctacgagccccgggcgtgtgtacccgcgcgtccacgtggagggctgtgcgcgtgtggccgaaaagcgtgtgcgcggccctgcgtagcgccctgcgtgcccgagtggcccggcgctggcgcccaggtgttccagtgtggggcggctgtgtgtgtgccgggggcgggggacaggtgcgcacgttcccaggtgtggagcgcttgtgcgcgcggatgcgcggggacgtgtgcgcacacctgtttccacgtggacgtggtcctttgcttgtctgcgcgcagctgtgtccgagccctgtgtgtttctgtgcgtgtgcatgcatccgtatgcgtgtgagtacacgtgggactggaggatttcatgggaggcgcatcttggaggggccgagactcaccccccagcaccgcccacttcccagccactagcggtcggggagatgggggaggcagggaggctcccccacccctgcagcaatgagtgactttgtgtgtctgtcctgggtttggggggggatcagagaggctcagcgggtggccggaggagcccagcagggctacaggacccgcccctgcccccagctccaccccacggtcagagattcttgggaatgaccttgactcatccctatttccccaccctgcccctgcctaccaaccagaaaacaggaagaaccaggctcggtccagtggcacccagctccctacctcctgtgccagccgactggcctgtggcaggccattcccagcgtccccgactgtgaccacttgctcagtgtgcctctcacctgcctcagtttccctctgggggcgatggcggggcgaggctctctggtttcctggcgggcatttcacggctgtgattctgctgaggaacttccccgggtaaagatcacttccccacaggggcttggggagccagttctgggtcccatccaggatgcctctggggaggctctctctgcctgcccagccatcgcccccacctgacctgggctggaagtggtaggaactggaccgtgggtcccagcccagctcccacctggactctgtcccctccccaggtgagcccccgcttcctccgagcctggcacccccctcccgtctcagccaggatgccaacggtgagtgtgtctagcctgcttcctctgctccccgggtccttcttcaactccgtccacaccctgagaccccttcctgaagggctgtactctctgccccctacccccttctgctggcctcggcctggcctttctcagtcatcttggcttcctgaccttctgtcccaggccgcctctctttgtgactctacgatttctctctgagcaccccactccccctttctttcccccgatgtctgcgtctgttttctctgcctctccgctcttttccaatctctatacctttctccctcctgtcctctttcccctcccgtgcctctgctccccacatctccgtgatgtcctccctttgcccctctcccggccccctctgcagaggcgctgggccccgggcacccagtgtatcaccaaatgcgagcac

SEQ ID NO: 34060 - DNA, 1115 bp, Artificial sequence
  DNA replication origin
acccccgcctagagccctcggggtttccccccaccccggcctcggggtctctccacgtctccccgccgacgtgctcacctgctcagggggcgcccccgagccgcgccccgcgcccgcccccaggagggcctccgcgagccggctgcacaccccgaggcggtcccggctgcacaacttggagcgagttgctccgtttcctcattttgggggcgaagaagggtcggggagtgggggaaagcgggaggcgccgcggcctgggaggcccccgcgggtcctagcgccggccgcactgcggtctcctccgcgcgccgccgccgccgccggcccctccccgccccgcctccgcggcccccggcgcctcccgcgcgccccgggcggggtcccggggcgcacgcgggctccacgcctggccctgacctggccctgtcgggcgtgcaccccccacccaccctgggaagcggggttcttggagcgtggaacgggcgccgccagtgcgcgcggcggggaccgggggtgagggagagtgagctgcccgtccggggagataagcaaggcgccaagcccggactcccagaggacacttcgtactctgcaattccaactccctcagtgtcgcccatttgagcacccaccgtctcagagggctattggtggttgacaaaaaaaaagctttcaaaatgtcagccgctatcaatatcattatcataatcatcaacattaagggaaaattggagtaacagaatcatcgggaactgtaatcatccggatgcaaacttcttagagctgccctccttggagggtaaaaggggggcctgggagttggagggacctggctctgcccgtaggtaggaggtaccccttttccagccgggatttcctcccccatatggagggtgggggccccacccgctttcacctcacagaacagtttgatctcacttggtcttggtggacagggccctggcccccagcgatggctttgtggttggggtgaccaaaacgcccaatctgctttcacccaatgcaggcctttatctttatttttattcatttattttttgagacagggtctcactctatcccctgggctggagtgcagtggcgtgatcatagct

SEQ ID NO: 34061 - DNA, 1529 bp, Artificial sequence
  DNA replication origin
tctacaaagacattcagacagagccacatgcaggctgtccttcaaacacagagaaacaaaactgagccactggctggagatcacatctgcccaaaggtggacttttctcattcaatgccactgggcagctggccaaagaaaaaaaaactgaccaagcggaaggtttgaacaggttggggtggggactcagaagggggtgcccccacatccatcagtgccaggaggcgcctgcccaccatggccagcatccacaagacggcggcccctccccgggtcccccaggcacgggtcccgggccctgctaccacaaggggggattggggaccccctgcctcagggccagccaaggcctacatcagggagagagggaggaaggaaggacggaagctcaaatccaggcctcagtgacacatggcagagtgggttttctctgtgaaaggcactcagtggtacagggctcggggcggggggtgggtgggggtgcctctgggctccgggtctgactgtccagcacagctgttcccgggggaggcccagccaggatcctcatcgcccgtcggcgtgtccacctggccctgtggctctccccacaggggacgagcctggctcaggccctgctgacatcctggctgtggaggtgggtggggggtctgtttggagcaggctgggctgggggcgtggggatgccggctgggagctcccctgggcttgtcctgcacatgtggtggggccccagaacagggcctgcccacgtgatttcaaatccatgccgcagccgcatccaaagaaagttttgtttgtttgtttgtttgtttgtttgtttctttgagacagggtctcgctctgtaacccaggctggagttcagtagcgcaatctcggctcgctgcagcctcgaactcctgggctcaagggatcctacggcctcagcctcccgagtagctgggactacaggcttgggccaccacaactggctaattttttgtagagatggggtgtcaccatattgcccagactgatcttaaaccgctgggctcaagcgatccaccaagcttggcctcccaaagtgctgggattataggtgtgagccaccatgcgcagcccagaggaagtattttaaaaccccttcctgtaccacgaggtgagtttagagccagcaagatgcccccgagtttagaatctgcttgctgtactgctggcccccctggctgtgggggatggggccctcgaggaaggggtgccactcccagggctggatggtgtcatttctgtaacaatttaagcacaaatgttaaaaaacatttcttttaagtgacaaagtcttcttctgttgcccaggctggagtgtcacggtgcaatcacagctcactgccctcctggcctcaaggctccggactcagcctcccaagtagctgggactacaggtgcacaccaccacgccaggctaattgttgtgttttttactagagacagggtttcaccatgttgaccaggccggtctcgaactcctgacctcaggcgatctgcccac

SEQ ID NO: 34062 - DNA, 1060 bp, Artificial sequence
  DNA replication origin
ccgtggggcctcaggggcccgtgcatggggctatacttgcagccgtggcacctctgaccctcaggcctctctcagcaggttcagggtctcacccgggcacatgggggagtcctcctggcccctcaaagcctgttgggctgccagcatctcctgggcgttgtgtgtgtgttcgtgcctgtgtgcacccatgcatatacacatacgctgacgtgtgtgtccatgcgtgcccatgtgcacgtgtgtgtccgtgtgtgcacgtgtgtgctcattggcgtatgtgcatgtgtgcctgtgtgtgcatgtgtgcccgtgtgtgcacccatgtcggtgtgtgcttgtgcatgcacccatgtgtgtccatgcatgcacggtgtgcccgtgtgtgtgtgcatgtgtgcctgtgcatgcatgtccatgtgtgtgcccatgcgtatgcatgtgcgcctgtgtgtgcaagcatgtccacgtgtgcctgtatgtgcactcattccatgtgtgtgcccgtgtgtgtgcatgcatgtgcctgtgtgtgtgcatgtgtgcccgtgtgcactcatgtatgtgtatatgcccatgtgtgcatgcatgtctgtgtgtgcatgcactcatgtctgtgtgtgcccgtgcgtgcttgtgtgcccgtgtgtgcaggtacatccatgtgtgcacctgtatgtgcactcatgtccttgtgtgcccgtgcgtgtgcgtgcatgtgtgcccgtgtgtgcaagtacatccatgtgtgcctgtatgtgtgctcatatccatatgtgtgcccgtgcgtatgtgtgcccgtgtgtgcaagtatgtccatgtgtgtgcctgtgcgtgtgcatgcacgtgcctgtgtatgtgcgtgtgtgcccgtgcgagtgcgtgcgtgtgcccgtgtgtgcaagtatgtgcgtgtgtgcgtgtgcatgcctacacgtgtgctttacatgatggcccaggcaatgggccgaaagcttcatgctcccttttcacttgctatcatcctatgtcactaaaaatgactcgaaaacacccttttccgtatctggccgccaccctctca

SEQ ID NO: 34063 - DNA, 1621 bp, Artificial sequence
  DNA replication origin
tgtgttactgatgcctgtcttcgctgtggccgctggccaagaccctcgctgcccctagcctggcccggcccctcacccaccctcccaggcctggcaggtctggctttaagacccccgattccctacattcctaatcagtggcactgggactgtggtgactgatggacagagtcaaactgagcttctgccgtgacccaggggaaatggctcagacctgtcctttgccgccagggctggtgtcaccagggcctgagaagcaggtgccagccctgggtaagggcaagggaggtgacacggtgtcgcttgcccgagcaaggcccctgcagccaggctctgagcccatctgatgctgtcaccgactcgccgcctctgctgcccggagacccagctcttgtgtgacccatggaatcctcagggggacagcagtgctggagcgtggctgctgtggcatttcctgctcagggcagaggcggacgctgccccaggcctgggtgtggggagcgccctggggaagcgtgagggggacagtggttggaaggaagggctgggccgcacctgggtctgtggaggggtcctcccgcatcagaggtgaggtgacagatatggtgacctgcatcctgggctcctcacaggaggagatgacaatgttggcttcagggtcggaggagacctcatactcatcctcggtcaccatctgggaggggtaaatacaacacaaggccaccttactgcagcccagattcatgtgtaaatcagccaggatgtggttggtgtgtgtaaattaatcccgtcgggcctcccacacttgctgcctgggtgccgggccctgtgccctgtgtctggaacctccaagtgaccaagacacagccgcagccctccaggagtgcacacatgtagagatatgtacagacaacagatcatgtgatgcaaggagcctccatatgtaaagaatacctgtaattcaataacaagaagaccagcaatccaataaaaaaattggtgagtgaaataacagatacctggcagaaaaagaaacacaaatggccctttttacacagtgacacacattaccccatagtcagggaggagtaaactaaaaccataatgagacgccaccatctcctgtgagcaggacatagctcaagaggtctgtgtcacagtctggtcttcctgtccatggtcatcaccctccatgaggcctgtgctcacacctgagcctggcctcccacctgaaacgcacctctctccccatcctccatcccttcccttctcagggcctccctgctgcaaggcagcccccagggggctccgttgacattactggggtggatgttgtcagcttccccacagccttatacattctcatggggctcagttattgtctttgccaccaggctgcaagttttccagaaagcaggggctgtatctatcatgttgtggccactgtcatgttgtaggtgtgcaggaaatgtgagatgcaattattgaagtcagagcatgtcactcccctgctcaaaaccctccagcctccccacttccctaagaatgcaatcctacctcctggtacggccttcaggcctggcttgatctaggtgccccctcattccctcgtgcccacccc

SEQ ID NO: 34064 - DNA, 1378 bp, Artificial sequence
  DNA replication origin
cggatcacccgctgcaaaccagcctcgttcagtgccgagaagctccagctctgagacctggggaacttcctactcctggggctggaaagctgccgcgggccaccgacggctccaggcccatcagagctaggggttcctgcagggtctcgtcccgaggagctgacctctgtcctggctgagagccgggccctggggaaggggatctccaatgacctgcgcttgtcaccctcttcctctcggcggccccggtcctcctcggccagtgtgtcggacaccagcttgagggcccgctctgcgtgggacacggccctctgcacggccaggagctcctgctccgtggggtagatggtggcgtgcttgcacatgacgtgccggtcgtcgctggacgccggccgccgcccgggctgtggggagaggccgcacgtgtcaagggtggtctgtggggacccttggggagtgctgggcaggcgggcaggtgggggcaggtggccgtggccagccaggttacgaggcggcagcgtggccaggtgagaatccagtgcacacagagagccccggggtggggaacagggaagtacctcgggctgccccgatggctgcaggaagctcgggtctgagtgaaggaatggggggaaactccgccacctttggccatattcttaaatttccagaccagaggcttttgagtcagcctgggaaccctttctcacagcaaggtgcaaatccgaggttcccattgaggccgggcgcggtggctcacgcctgtaatcccagcacttagggaggccgaggcgggcggatcacctgaggtcaggagttccaggccagcctggccaacatggtgaaaccctgcctctactaaaaacacaagagagcccggcgtggtggcgggcgcccatagtcctggctactcaggaggctgaggcatgagaatcgcttaaaccctggaggcagaggttgcagtgaggccacgattgcaccgctacactccagcctgggcgacagagtgagactctgtctcaaaaaaaaatagttcccatcgaacctgggggctcgggctgcggggacaggtgcttctgagaagagacagtagtagccacagaggcatgaggctccccaagggaggcgaccacccggggctccaggaagcagaagggatctctgtggccagtggcaggggctggggtgctggggctcccatctgtggagtgaggaggcctgggccatggagccccatcccctgagtactatgtgggagttggggggaggccgggtcctcccgaggaggtgtccgctgctccggggagtgtgaggtcgcccgcgtttgcacacagaggaaactgtacctacctggagtggggcgctggcgggtgactcc

SEQ ID NO: 34065 - DNA, 1522 bp, Artificial sequence
  DNA replication origin
cgattgcaccgctacactccagcctgggcgacagagtgagactctgtctcaaaaaaaaatagttcccatcgaacctgggggctcgggctgcggggacaggtgcttctgagaagagacagtagtagccacagaggcatgaggctccccaagggaggcgaccacccggggctccaggaagcagaagggatctctgtggccagtggcaggggctggggtgctggggctcccatctgtggagtgaggaggcctgggccatggagccccatcccctgagtactatgtgggagttggggggaggccgggtcctcccgaggaggtgtccgctgctccggggagtgtgaggtcgcccgcgtttgcacacagaggaaactgtacctacctggagtggggcgctggcgggtgactccggcctgcccatgagcagaggctgggcccagtcgggcggcgcgtggggcggcacgtcctggggtggctcctcctccagccgcctgcaggaccgagacgtgacagagcatggtcaggccagcagtggccctaagctgggggcaagtcagaaacactggggccttatgctcccagcaaggaaggaagggccaaagctcttgctggggctccactgcactgcatgggtgcctgctgtatgcacagaagactgaggctgggaaggctggtgtggggggcagccaaagacaccccttaggcaaatgaggcccagcccgggcagccatggccttcaggaggtcctggttcccttcccaatgcagacctgctgctgctggacacaccagagtcagatgttacatcagaaaatgctctaggatggacacaggggacactgggaatgaggggacgctaggggatcagggggacacaggagactccaggggtcaaggggactcaggggataccaagggtaaggggacacagggtcatcaggggtcaggagacacaggaacaccaggggacagagggacaccaggggtcagggggactccaggggtcaggggtcacatggcacactagaggtcgggggacacagggacaccgggggtcgggggacacagggacactagaggtcgggggacacagggacactagaggtcgggggacacagggacaccgggggtcgggggacacagggacactagaggtcggtggacacagggacactagaggtcgggggacacagggacactagaggtcggggacacagggacaccgggggtcgggggacacaggtcacaaggcacctctgcagccgtgtggtccagcgagttggccggcagtgtccctgcgtctacggaggccctggagcccacgtgtcaggtccgcacgccactgtgcccttgcccgtctgctctggaaccctctcacgctcccacaccaggacgtgcccactgcccgggcacccgtctccccccactgctcgagagctcacacggaggagctccgtaatctgcagcagtgggcgtctaggttccacgctggacctgccctccctcaccaggcccccttgccaaga

SEQ ID NO: 34066 - DNA, 3053 bp, Artificial sequence
  DNA replication origin
gcgggtcagctctgacagctggggctttgcacgcagggaaggtagggtcacaggcagaggggtgtgaggattccaccttcatttcctggtacccatataactctgattctgagcccaatttgttcaccgtgagcaccagggcatgcaggggagcacagtggaggtggcagcccagggaaccctgtaggtgcagggtgagggcttccagagaaccccagcacccggcaccaggccagattctaccagaagaggccgggcgcagtggcttacgcctgtgatcccagcactttggaatgccgaggctggtggatcacttgaggtcaggagttcgagaccagcctggccaacatggtgaaaccctgtctctacgaaaaatacaaaaattagccgggcgtggtggtgcatgcctatagtcccagctactcaggaggctgaggcaggagaatcgcttgaacccaggaggcagaggttgcagtgagctgagatcgcaccactgcactccagcctggaggacagagcgaggctccatctcaaaccaaaacaaaacaaaaaaactctacaggaagaaatggcattaccattttattggttctgccagcactctctggaaatggtctcaaagggtctccaaggttcagggcggtgtgggccagtgggaggccatcttgctctgcaggaataagggagagacggcaccagccagcccctcaccaccccccgggaagacatgacgaaaatcgactggatggtagattttctcacgaaactttcactaggcggccagggctctggtgggtacacgaacacgcatacagacacacgtaccctcgcataaggccttcgaggccacgggtctcttggccagcgctggcctgctcgaggcacacacgctggggccagtgggggacgtgggcttggcctctgccccgggggggctctctgtggccagtgcaggctcgagggtgggaatgggcttccccagtttggcgtgcagcttgaagacctgcaacagacagagccgggctcccgcgtgagggccgctcccagcctgatggcctttttcaagaggcaggaagggcctccacgggcgtgcagcgcgagtgtgggctggccggtcccagggacccccctctcttctctcctcctgctctctggataacacccactccagaaggcccttcccaggtggcctcctgccttgcacacgtgcttgtgacttctctagcacggtgacactcctctagtgtgtgagcacgtggctcaccggctcacacggacgctcttcctcctcctccaccacgtgggctgccaggtggggccgtttctcagcctcccaagccccagcctagtgctccctgactgcccgggactcagcatgtgtggatggatggtgggtgtgcacgtgtccctggacggacacccacgttctgcacgcacgtgtgcacatggtcacgtccgtattctggccgtgccccattctcagcacctctaggtacaaggtgtttctggcaaaggttccgtgtgcacagggccactgtgtgtgtgctggggaccatctcagacacacttcccagctctgtctctgacacgctgtaccctggtacaagacctgccctgtaccccccaaccccacaacgggcagcagggcctgcctgacccccagactgagccccagcctgtgggggtgacacctgcagctctgccccaccggcccctagctctccggtccccaggccaagtctccttcccccgtttctctgccccgctccttccctcctccatgcctccctgctcattcctctttcccctgtgggttcacacgggccctcagcaagctgtcctgagccgagccagggaatgaggccctggatgagcctccaggcagctgggggagagaagccaggtcctcagccaggcctctcagggtggctcagcctgacagcccgggctacagcacaagccagctgtcccctccctgctctcaggtggggactccatcccctccccgccgaacatgacgaaacccaggcctcttttttttttcttttggcgacagagccttgctctgtcgcccaggctggagtgcggtggcgagatctcagctcactgcaacctccacctaccgggttcaagcaattctcctgccttagcctcctgagtagctgagattacaggcacgcacccaccacgcccggctaatttttgtatttttcagtagagacggggtttcaccatgttggccaggctggtctcaggctcccaacctcatgcgatccactcgcctcggcctcccaaagtgccgggattacaggcgtgaggcaccacgcccggcctgacccagaccttactaaggcctcaggagaacagtgatactacagcagggagtgtgaagagcaagacctcaaagggaacacagcattgggtctcatcacagggcaagccctgtctgtcaccacgcccgaatgccaagctttcttggaagtccgggtgtgagtgtctcggccacttcatgtttttgtgcaatgagcaggaaccctttttataagtggaaaggagtccccgcacggtggctcacgcctgtaatcccggcactttgggaggctgaggcgggcagatcacttgaggtcaggagttcgagaccagcctggccaacatggtgaaaccccgtctctactgaaaacacaaaaattagccgggtgcggtggcggatgcctgtgatcccagctactcaggaggctgaggcatgagaattgcttgaacccaggaggcagaggttgcagtgagccgagattgtgcccctgcatcccagcctggggaacaggacgagactttgtccccattaaaaaaaataataaaatgaaaactaaaataaaataactggaaaggagtttggatccttgaagatgaggacgcatgggcctgggcggctggcccttggggcgcgctccacttggggaggcttctcccagctccctctgatctccccaggtacctctgtgggtcccaagtgctgacctgggggccttctccccagggtggcagagcctgggccg

SEQ ID NO: 34067 - DNA, 1271 bp, Artificial sequence
  DNA replication origin
tgcacacacatacacacacgcttgcacacacaggcacatgcaggcacacatgcgcacacatacgtgcaagcacacatacatgcacactcacgtttgcacacacatatgcacacatatacacatgcataaacacacgcacacatacacactcacacttgcacacacacacaagcgcttgcacacacaggccatgcatacaacatgcaagttaacaccagaccttctttcagcaggcagcgaccctgaccaccccaccggcgcccacattcgggttcagacgttggggacagagaggtccctggggcctgcccatggcaggagggcgactgacctgggggccagcgcagctgatcttgcagatgtcgcagtagtgaagctggagctgcctgggccccgccttgggtctcggcagcttgctgggaagcggtggcttcgagtcggccctggggctgcttcctgagcctgcaggcgcgggcggcgggggcagctgctgcgggggtcccgggggaggcgggggctgcgctggaggatagaaagggctggcagcggagtacaccgacgcgtcatagttcgggtagcttggtgctgagcagcagagaaaacaatgagtcggggggagatgctgattccactgagttgaagtggggaccgacgggcagaccacctgggcaaggaacgctggtcttacccgtgtaggcggtgcaggtggggttgtaggagggcggggggtaggaggtcacgatggaagctgacgactcgggctggacgcctgtcgccgtggggtaggtgtatcccgaggacaaggtgctcgctggctgtccggactccactatgggcgcctgctgtgggggctgagcgtggctgtgactgccatgggggctgggctgcccgcaggcttcttgggtccctaggggacagggacaggccctctgcagagccaacccccaccccactgtccctcacctgcagatgggccctggactcaactggctggaacacgctagatgcttaagccaggaccagaggccagagccttgggccaggtgctggcagcgactcgcaggttaccttgtgcccacctctcctttccagagcccggcttctctctcctgccatgggggaggagggctgtgggtgccctagacaagctcctctgcatctccagctccatcacccacagagctcacctcctgccaccccgggaaagcttccttggaaaaaatgttagctgcattttcagtcctcactttccttcattcataggcccacac

SEQ ID NO: 34068 - DNA, 1230 bp, Artificial sequence
  DNA replication origin
aatggctttaacctgggaggcgaagcttgcagtgagccgagatcgcaccactgcactccagcctgggcaacagagcgagactctgtctaaaaaaaaaaaaaagtaagtttcccaaggtttccctgtgctgcggggagcgtctcctcgttcccagccccgaccctgcagatggctcacctggctggccggagtctgcggctgtcatgcgcccagactggagggcagcagactggaagtacggcctgtcctcatagctcctggcagctgctgactgtccgtagctgtaactgtcctatgtgggggtttcggcaggagagagacagagaacggaggagagcagctcaggcggtgggtgcgacgcgccctgccacactgcactctgcacttagtccttcctgcagcgctggctcctaagcgtctgcccaggaccaggccctggcccggaggcagggggcagggggcagggggcagggggcagggggcgtggttgacacagcagctgtcatggagccgacactaatttccaagagttcgactgcaatttacaagaggacgcttggtgcggcaggagagggcgggtttgcagggagaagcccccgaggccttggcaaggaaatggagaggggaggaagagggtggggtcaggtgggtgctgagcttgagtgacagggtggcctctgatgccgttgaccgacacaatctggggacgaggtgcgggtggcagagctgggaaattggagcatggtcacgggggacatctttgcgacaccaagtgggaacacggtggctggatctgcagcctgagtgcctcggttgggaaggtgaggtcgtcagcacccaggtgcaccccacacaccacagactccctcttagaaggtaggaatctggagcgtggggaaggtggggtgagtcctggtctctctgggcccaggtggccgaggccatctgccctgaccagggaggggtcctgtaacccaggcgaccctcctcctccttcatagtcactgctgaagctgggacaaagctctgtgcgccgtcactgtccccactgccccgacgtggaggtacgcatgcggcctgtccccgagagcagtggattctttcggaagcgactctgccctgatttctccccaccacgggtacgcaatgccagcagaagggtcccgaaggaaggatcacggttaagaggcctgggagaaggagtagctgtgggaagcccaccgctctcac

SEQ ID NO: 34069 - DNA, 885 bp, Artificial sequence
  DNA replication origin
gcctgccgtggcctcccaaagtactgggatgacaggtgtgagccatgtgcccggcctggaccactttcctaatcgactttttggccaataaagtctctgagacttccagaagagaaacacaaatctcacagtggccgatctgtggaatctgaatgtttcttctttatggatagggcccttctgcttttcctgggagagatgaaaacaccccacgatggtgcagatcagagcgtgtgcggtcccaggggacatgtccatccttctgtagagctgccgatttctggtccttcaggagaatcttggagaaacaggctgaggtgtctgacagagccctccccaacacaagcgccgttcagcacatgtgcctgacctccctagatgtgcatggagcccctgctgcatgccacgtgccgcggccccgggagacagctgggcagctgcagctggtcctgcatctcagggcatcgggaccagggaggagacggcctgtggacagacgtgcagtgtatactgggtggtgccaggaagaagaaaaagcaggaccaggggacagaggctgatcagcatcaggccacaggggctccaggagggctcgtcccagggtgtcactgagcagccacttgcaggcagcggggacgggagccatagacacggggggatgggatcggtgggatgtggctgtggcagggccttgggagggctttgagcaggagatggcatggttagggctgtactttgaaaagacccctctctggctgccaggaggacaaagaaatgctggcgaggagggaggagagtgaggggctggggtggtctccagcaagggctgtacagctgaggccagctctgctctgccccagctcccgtatggaaccttccaccttc

SEQ ID NO: 34070 - DNA, 1113 bp, Artificial sequence
  DNA replication origin
tggcctcaagcaatcttcctgcctcagcctcccaaagtgctgggattacagatgtgagccactgtgcccagctaattttttaaatttttggtagagatggggtctcactatgtcgcccaggctggtctcgaactcctgggctcaagcaatcctccacccttggcctcccaaagtgctgggattactggcataagccaacgtgcccagccaagtttttctttttttaatgtgaattttttacttctactttaaatcccaacttagcatggaaaatcatttgcattttcagaacaaaggaggccatcttctggctaagctgaaaaaaaaagtcattagaggccttctgaggcaccattttaaagatgatattgcttttgcgggttgcactatgagaaattctgtgtgtacaaaatacctgacagaaagtgaaagcagtcccgggcgatccggcggcagattcattgagtcattggataaatacttcctgggtgctagtggggaccagctgctgtcatgggcgctgtcacagcagcggggaataaccagaccaaagtcccgtcctccaggagggtgctgcgcgatagtccagggagacacggggtcagcaaaataattcaacgcgatctgatggttctcatgccgccgggaaggacgcggcaagggggtgtgagcagggggttgcactttctcacgggctggtcatggcgggcctggtgggtgaggaggagggtgaagacacaaagttggggaaacagggcagcgcatttgagcagagggaattgcatgggaagggcctgagggtgaagtgcccggaacctggattggtccagaaggcagcgtgactagagcggaaggaatgaggggagatggggtcagagaataaagggtgtggaacagggggcagaggacaccatgatggatgtcacaggccatcgtaggggctccagcttgtcccctgagaccccacgggggtttccagcggaggagggacatgggctacgttgtgatggggcctctttggcgctgtgcgcggatggaaatgggggcgagagcagaaggaagcgtgaaggtccaaaatacagacgaggcaggctggtgcgcggtggaggcggt

SEQ ID NO: 34071 - DNA, 2597 bp, Artificial sequence
  DNA replication origin
aagaggcagggcttctagcatgggcggggcttgagcagagacctccacatttgagtggttaagaggagggcggggctctgcgtaggaggcggggcctcggggcaggtgtggtcgcggggcggtgtctccctagcctaagagaaggaagcgagaaggtgagggcttcgcgcagggggcggagcttggggcgcgtggccaggcgcgagcggcacgcggctcgggggcggggcgggtgacgtcgcgggtccgccaggctcggggaagacgccaagatggcgacgagtcagtatttcgacttcgcgcagggcggcggcccgcagtacaggtaactgccccgccgcgccagcccccgccagtcccggcccctgcagcctggccgggaccccgcctaccccttctcccgccgcgtgcgcccggcccggccccagtcccagccccaacctggaaccccggcctgagggaagccgcggcgccgggagaagcaggcggggcggcctcaggttaggcaccgggcgggatgcgggctccggggctccggctgagacgtctctgcagccaacggtgtctgtcggcgggagcgggagggggctcctgaagtgggagggggcctgggtttgggcctgggcctgtgcggggtcgggggggtcagcccctgatgggggcgccacgaggagggcagcgagaggggacagacccgggcggggggtgggtggtctgaccgaggaggggaggggacggaactgacccaatgcagggaggagacctgggaggtgcctggccggggagtgggtggggatgggcagaggggagctgacccctgattgctggtaggggaagagaagacacagacctaggagggtgtctggctgggcaggaggaggggaagggcagaggggcattgacccccgattgcggggggaggagaagacacagacctgggagggtgcctggccgggcagggggatggacagagggtagctgacccccgattacttgtaggggaggagaaaacagagatcagcgagggttcctggctgggcaggaggaagccacagtcgaggggtgaggaattggcccctgatgggggtaagagagaagacagaaacctgggagggtgtctggctggacagggggagagctagagcggagctgaccccgattgctggtagggggagagaattcagacctgggagggtgtctggctgggcaggaggaggggaagggcagaggggcgttaatccccgattgctggaggaggagaaggcagagacctgggaagtttcccgactgggcagggggcagcaacattcgagtgtggagggcactgacccctgatggtgggggtaggagagaaggcagagacctgggagggtacctagcaggcaggggcagagacctggggtggggtgtggagtaggggtgggaacctgacccctgatgtggggtggaggagagaagacagagacctgggaggttaccccagggaggggcggaaaccgaggttggtggggaactgaggcctgactggggaagggggacagagacttggcgggaagccagtattatgtgggaggaggtcctgaggtcaaataagagggtgggcacctgggtttccagggaactgggaccctgctgggacagtgaggagggagaaagggccctgagtgttgtgatatttaagatccttttctaggtcttaaatatgtggtcgtttgggaggggagggagagaaaggatcctggaggagagatggcaggggatggggacacactgggaactggccaggggcagaagggctcagagggtagggacacacacggggtaagtttgtgccccaagtgtacaaacacacactctacactgttctcccaggcctgctcctcggagcatctctgctatcttcagcccgtccatctgcccccaagactggagtcccagtccgggagccagggctggcatctctgaggggaccagattccccccccaacagttgatcatttccgcgtgtcacccttgtgttagtttccagctggtagcttgctataaccttgtttctcacagtccctgctgagcccccacagatacaaaccaccccttgggcacctcatagaggggcctctgctgagctcaggggggtctttgccccccgcggtgttcctactgcatttcagcacatggaagagagatccaggctggtgtttcagcttcccgcggtggagcggcagtgccgacccttccaccagtgctgtgatattgctgtgccctttctaatggaatcacaaagagaaaccacccagggcttggaaaccagggctgtgggaatgaggagtgcatctgtttcctgcactcggagtggtttctctggtggagtatttgactagtaatggatttcctattagggaaagaatctatgacctgctgatttcccagaatggagcatttaatttttatttgatcttttcttttgcttccttcatcctcagtggtgttttgattgccagggctcagttaaagcggctggacttggctagcgatccaggctagtacaaacttctggacacactccacccctctgcctgctagctcttccttctttt

SEQ ID NO: 34072 - DNA, 1178 bp, Artificial sequence
  DNA replication origin
ctgctcccacccgccccatctgctggaaagggatttagaggcggcaaaggctgccggataaaccttccagggagacggtttatcctgggagaaggggagatgcgcgcactcacctctgcagctgagacagcctctcctccttactggcaaacaaaggcgagccctgcccgggtgcagctgggcatcgctcacgctccccgggccttcagagcctaggaggaagaggatgctcgcaggggcggattctgcatccgaggaaggtcacccagggcgacgtggccagcgcccgccagctcttttgtgcaggggtgggtggggtgcagggttagcggtgggctccccagcgcggggctgcggctgcgccccctctcatcgccgcccgcctgcgcgccctgcctccgaggtagctgcttcttcccagctcagggctggcagaggctcggcttcccgaagacggttaatttatgctgcttttgtgtgcagggaggagggggtggggggtggcggcctgacggaaaagcacagccccctgccagaatccgatcctccccattggctgacagacaagcatctccgaaagccacgccaggggcagaggcagaaataattttctgatggcgcatcagagatttaaaaacaaaacaacggacaaataaataaataaatggcaagatggcctcattccttagagaatggggggtgggggagttgggaaaggtcttcttggcacttctccttgcaaagggagcaggggtgaggggtggcatcccccaaaaagtctgtgcaggcaaagaaatgactgtccccaggtcggatgccatggctcacgcctgtaatcccagcactttcggaggccgaggagggaggatcacctgaagtcaggagttcgataccagcctggccaacatggtgaaaccccgtttctactgaaaatacaaaaattagccaggcgtggtggcgtgcgcctgtaatcccagctactcgggaggctgaggcaggagaatcgcttgaacctgggaggcggaggttgcagtgagccgagatggcgccactgcactgcagcctgggcggcagagggagactctgtctcaaagaaaaaaaaaaaaaaagaaagaaatgactgtccccaggtcaccgtgttgtgggtccattagatggtcacttaccattgattcagc

SEQ ID NO: 34073 - DNA, 2033 bp, Artificial sequence
  DNA replication origin
cagtggctcacccctgtaatcccagcactttgggaggctgaggcgggtagaccgcttgagctcaggagtttgagaccagcctggccaacacagtgaaaccccgtctctattaaaaatacaaaaattagccgggtgtgatggctcaagcctgtaatcccagcactttgggaggccaaggcaggaggatcacctgaggtcaggagttcgagaccagcctggccaacatggcgaaaccctgtctctactaaaaatacaagaattaaccaggcgtggtgatgggtgcctgtaaccccagctacttgggaggctgaggcgggagaatcgcttgagcctggaaggtggatgttgcagtgagctgagatggcaccattgcactacagcctgggcaacagagcaagactccgtctcaaaaaagaagaagaagaaggagaaggagagaggagaggagaaaggagagagggggaggggaagggggagggggagacggagggggagtgggagggggaagagctgcatggggtagacgattgtcattaggactattgtccagtaaaacccattcctctgcggcttcctttcaggggtcatccctgcttcaagccagtgcctcttcccagctcccatggggaccaccgaagccacgctccggatggaaaacgtggacgtgaaggaggaatggcaggacgaagatcttcccaggtaggacttccacatccctgagtcaaccgttgggggagcaggtgtctctcccaggtgggacacaggagcggcccgggtctctctctaagtgggaaccgcccggggctggcctggttccatctccgcgtcctcctctcccgcacactctgggaggcctgaggccctgtgtgcgagtcttctctgtggcctcacagtggggtagtcctggccaggcacataatgggtatttgctcaatgatttaagattcatttctgtcttccctgccccaaagctccaaaggaccccccacccctacaccattttaagagttcttaacattctggctgggcgcggcggttcacgcctgtaatcccagcactttgggaggccgaggtgggcggatcacttgaggtcaggagttcgagaccagcctggccaacatggcaaaaccgcgtctctactaaaactacaaaaattagctgggcatgccgggcgcagtgactcatgcctgtaatcccagcactttgggaggccgaggcgggcggatcatgaggtcagcagatggaaactatcctggctaacatggtgaaactccatctctactaaaaatacaaaaattagccgggtgtgtggcaggcgcctgtagtcccagctactcgggaggctgaggcaggagaatggcgtgaacccaggaggcggagcttgcagtgagccgagatcgcgccactgcactccagcctgggcgacaggtgagactccatctcaaaagaaaaaaaaaaaaattagctgggtatggtgtcatgcgcctataattccagctactcgggaggctgaggcaccatggtgatttattagcagcctttaggagacacttacctcccctaacatgctgaacttttttttttttttttttgagtctcactctgtcccacaggctggagtgcagtggcacgatctcaggtcactgcaacctccaggtcctgggttccagtgattctccttcctcatgcccccgagtagcttggattacaggcacccgccaccacatctggctgatttttctatttttagtagagaccggatttcaccatgttggccaggccagtctcgaactccgaaagtgcttggattccaggcaagagccaccgcgcccggcccctacgctgaacattttgcagggacatcttgtctacactctgtctccccaccacacggagcgccacaagagcaggggtctttgtttagctcactgctgtatcccaacctaaggatagtgcctggcatacagtcggcgcttaacaaatattgggtgacaggtgctgatcactggtcagaataagaaatcacaggggct

SEQ ID NO: 34074 - DNA, 1037 bp, Artificial sequence
  DNA replication origin
tccttaggtggataagatataataagcatgttttaacaattaaaaacacaaaagaaggaattgtaagaagcaatagatgaatggatgaatggataggtggataaatggatggatggatggatgagtggatggatggaaggatgtttggatgatgggtggatagatagatgaatgaatgagtggagggatgggaggatagatggatgataggtggatggatggatggataaatggatggatggatggatgggtgaaggttgactgtgtggatggatgagtggatgaatggatgggtggagggatggaaagatggactgatggagagatggatgggtaggcatatggatgggtaaatggtagatgaatggttggttggatgaatggttgggtagatgaatgggtgggtggatggatggatgggtagatggatgggtgagtgggtgggtgggtggatgagtgagtgactggatgggtgggcagatggatgaatggatgggtgggtgggtggatggatggatggatggatggatagataggtggatggatgggtgcatggatgggtggatggctagatgtgtgggtggttgtatggttggttggatgcatggatggatggctagatggatgagtgggtgggtggatggatggatggatggatggatggatggatggacagatggatgagtgggtggatggatgggtgggcagatggatcaatggataggtgggtggatggatggatggatggttgaatagatggatgagtggagggatggatggatgaatggatggatgtgtgggtgggtggatgggtggatggacggatgagtgagtggctggatgggtgggcagagggatgaatggatccctccattgagtgaatggatgggtgagtgagtgtgtggatggatggatggatggatggatggatggatggatgggtggatggatagatgtgtgggtggttgtatggttggttagttggggggtgggttgaagcctccctccaggctgattgaggttgccagtctccaggg

SEQ ID NO: 34075 - DNA, 737 bp, Artificial sequence
  DNA replication origin
tgggtggatggatggatggatggatggatggatggatggacagatggatgagtgggtggatggatgggtgggcagatggatcaatggataggtgggtggatggatggatggatggttgaatagatggatgagtggagggatggatggatgaatggatggatgtgtgggtgggtggatgggtggatggacggatgagtgagtggctggatgggtgggcagagggatgaatggatccctccattgagtgaatggatgggtgagtgagtgtgtggatggatggatggatggatggatggatggatggatgggtggatggatagatgtgtgggtggttgtatggttggttagttggggggtgggttgaagcctccctccaggctgattgaggttgccagtctccagggcctgttctgctgaggcaccaggaaggaggccctcagagccacacttagaaagtgggtggcaggagccgggccctgaagggcatgtgccactcttgctgctgggagttcacccacgctgggtgggatcattgttttggattacatacatgtagaagcgcattttgcacttttaacattaacagcaataacttggcctgtgtctttccctccctagcatgtcctgaggcgacgtgagcataacaaaggacatggaagaagattccagatgccagaaaacctctgtcagacgcccactggccccagatctcatcctgcctcatcctgagtcccaat

SEQ ID NO: 34076 - DNA, 999 bp, Artificial sequence
  DNA replication origin
tttaagagtacattcttcacaatgttttgcaaataccacctctattaaattccagaacattccattaccccaaaagtaaatctgtccccagcagccacagtcatccccacccacctcccccagcccctggcacccacgcgtccccttcctgtcctcgtggattgacgtgtcctgggcatttcatgtaaatgggatcactgcaccgtggggcagtgaggtcgctaatcaataccctgggacctgggactgcttggggactggcaggcatttgtagcccctgtggcttctccctctccttcctgccggggtgggctggcacagggaggcctcccagaggtgccctgccagggcctttatctgggcatgtcactgtcacctgaggccctgggccacgtgccccaccaagaggctgccaggaaattcttgccaccgaaactgggccagaggtgaagcccaggagccgggctttcctgggtgcctgcttgagcacctggaggagctctggccacagacatagccaccccgctgcactgccacagatcctgtggctgactgctttttctgagctttcctcatgaataccccaagatttccagtccattttgcaaaagctcttgaagtccagggtcacaattctgttaacaggactcataaagtacatcattggtcgggcgtggtggcttaagcctgtaatcccagtactttgggaggccaaggaggaaggatcacttgaggccaggagttagagacccgcctaggcaatgtaacaagacctcatctcttaaaaattctctctctctttggtgtattgatctcttactgcatacagacatacaaacttggccatcctatcaccccaccttcctagtcacttcccatcctctgatcacccccctgctcctgggctataatttcccacttttccttgtattggtggaaagggagaagattgaattcaatctccctcccatactacaaaaccccatggtagtagtccct

SEQ ID NO: 34077 - DNA, 3853 bp, Artificial sequence
  DNA replication origin
tgggtccgggagatgccctggacagggttggggtgggccgtgctatccaggcctcaggctctgggcacctggcacagagctccagccagctaagtggccagtgcctgtggcgttgggatgtggcccgtgtccagtggcgttttctctttttttttttttttttttgagatggaatctcgctctgttgcccaggttggagtacagtagcctgatcttggctcactgcaacctccacctcccgggttcaagccattctcttgcctcagcctcctgagtagctgggattacaggagcccgccaccatgcctggctaatttttcaatttttagtagagataggtttcaccatgttggccaggctggtctcaaactcctgacctcaggtgatccgcccatctcggcctccctaatttttgtattttttggtagagatggggcttcaccatgttggccaggctggtctcgaactgacttcaggtgatccgcccaagcctcccaaagtgctgggattacaggcgtgagccaccgcgcctggccgcctttttttttttttttttttttttttgagacagagtctccctctgtcacccagtctaaagtgcagtgtcccagtctcagctctgcctcccaggttcaagcgattctcctgcctcagcctcccaagtagctggaattacaggtgcacgccactacgcccgactaatttttgtatttttagtagagacggggtttcaccatgttggccaggctggtctcgaactcctgacctcaggtgatccacctgcctcagcctccggaagtgctgggattacagcccagagacactgtgcccagcccccagtggcattttctaggttaccgctggttccacccagtaattcaagacagggccctcaggagcccaccgcacccccagacaccaagtgcaccttctcctccacttgcactcttcatacgggacggtcaggaagtaccggcggctgtacaagtccaccaggggcctgggcggagtgggggagacacggtcagcacctgtgagctttccttcaaccgcagtcaaaatatccaaccccccagccttggctttcagagggtggcgagcacatggggtggtctgggccagtgagtttaggggtcagggagggaagctgaattggccaacatccctgcagcagccccccacaaaattgaatcacgcttcttctccaacttggacgggcacagacagacagaatgtcttgctcagggccacacagtgaagccagagggcgcagcctaggttactggtctgcccgagaagtctgaggttccagaagaaagactcagtctccccaagaagggtggctgtttgtcccagacttgagtttttagttttaattttttttttgagatggagtctctctctgtcgcccaggctggagtgcagtggtgcgatctcggcttactgcaacctccacttcccgggttcaagcgattctcttgcctcagcctcctgagtagctgggattacaggcacacgccaccacacctggctaattttttgtatttttagtagagacagggtttcgccatgttggccaggctggtctcgaactcctgacctcaggtgatccatccatcttggcctcccaaagtgctggtgagccaccacgcctggctccagacttgggttgatcccagctctgcccccaactcctgacttcccgtggtggctctgctcctgggtctcctgactattaaaatggagatgtgagccaggcgtggtggctcacgcctgtaatcccagcactttgggagtccgaggcgggcggatggcttgaggtcaggagtttgagaacatcctggtccaatagggtgaaacccagtctctactaaaaatacaaaaattagccgggtgtgatggcgcaggcctgtaatcccagctacttgggaggctgaggcaggaaaattgcttggactgggaggcagaggttgcagtgagtcaggatctcaccactgcactccagcctgggcaacaagagcaaaactcttgtctcaaaaaaaaaaaaaaacaaaacaaaaaaaaaaaaaaaaaaaaacaagagatggctatacccgcccagagagggccatgcctggggccagagcctgcagatgtttacttgtagctgtagagcaggaagccttccaggaggaggatgtgggtgtccgaggcctctggctggacgctgaccccgtgggcacgggcaaacttctgcgggctgctcagccaggcctgcacggtgtccagcatggcctccatgtccagagactccagcactggggaaaggggagcaggcattgcaggagggcagaccctgggggatagtggacggggagcgggcattgcaggagggcggaccccaggggacggtggatggggagcgggcattgcaggagggtggaccccggggggacagtggacggggagcaggtattgcaggagggtggaccccgggggaacagtggacggggagcgggcattgcaggagggcggaccctgggggatagtggacggggagcaggtattgcaggagggtggaccccgggggaacagtggacggggagcgggcattgcaggagggcggaccccggggtatagtggagggggagcgggtattgcaggagggtggaccccggggggacagtggacggggagcaggtattgcaggagggcggaccctgggggaacagtggacgggtagcgggcattgcaggagggtggaccccggggggacagtggacggggagcaggtattgcaggagggcggaccccaggggaacagtggacggggagcaggtattgcaggagggtggaccccggggggacagtggacggggagcaggtattgcaggagggcagaccccggggggacagtggagggggagcgggcattgcaggagggtggaccccggggggacagtggacggggagcgggtattgcaggagggtggaccccgggggaacagtggacggggagcgggcattgcaggagggtggaccccgggggaacagtggacggggagcgggcattgcaggagggcggaccccggggggacagtggacggggagcgggtattgcaggagggcggaccccggggggacagtggacggggagcgggtattgcaggagggcggaccccgggggatagtggagggggagcgggcattgcaggagggcggaccccgggggaatagtggagggggagtgggcattgcaggagggcggaccccgggggatagtggagggggagcgggcattgcaggagggcggaccccgggggaatagtggagggggagcgggcattgcaggagggcggaccccgggggaatagtggagggggagcgggcattgcaggagggcggaccctgggggaatagtggagggggagcgggcattgcaggagggcggaccccgggggaatagtggagggggagcgggcattgcaggagggcggaccccgggggaatagtggagggggagcgggcattgcaggagggcggaccccgggggaatagtggagggggagcgggcattgcaggagggcggaccccgggggatagtggggcttggaggtgatgcttgtccttaccgtcccactgtttgaagccgtcttccccaactgctatttggtcttggggctgaaacagaggagcctgaacctcgggctcagtgcccggtcctgcctcacccccggcctgggtgatggagtcttagggggtcccttgctggagctgctgaggtccctgaggcgtgggggctctgcctgaccctcagattttccccagaccatcaatcatctcattagccctcacccccacccacacccacaca

SEQ ID NO: 34078 - DNA, 1243 bp, Artificial sequence
  DNA replication origin
cccgggttcaagcgattctcctgcctcggcctcccaagtagctgggattacaggcatgcaccaccatgcctggctaatttttgtatttttagtagagacagggttttgccatcctggcctggctggtcttgaactcctgacctcaggcaatccgccctcctcggcctcccaaactgctgggattacaggcgtgagccactgcacctggcctgacggatcttagacagaacacggtagacaccaacagttaaaaaaacaggacccagtttactactgaagctgcagcgaggttacagaggcgtcttggggctcagtccctgagctccgggacgcccaactgggagtggggcctccactctcctacgtacagacacccccatagggaaacgctcacatgctgtcctgctgggacgctgcaggcctggccgttctgtggccgcatccgcgtccgggtccctgtgtcctggctgggcgagccggggagggggctgattcctgggagcggttcagcagcgagttctgaatgtcttccaggacttcacggaagagctcctctcgggacttcatgccgtccaggtagactgaaatcagaaaggctgcgtcagggctgccgggaggaagggggccagagcacggggggacgagtggacggctgggtcaggagcaaggagatctgcagagtcgggctgctggagtcagtttcctggaccaacagcaagagggggccgggcgcggtggctcacacctgtaatcctagcactttgggaggccgaggcaggcggatcacgaggtcaggagttcgaaaccagcctggccaacagggtgaaaccccatctctactaaaaatacaaaaattagatgggtgtggtgacgcgcgcctgtaatcccagctattcaggaggctgaggcaggggaaaggcttgaacccgggaggcggagattgccgtgagccaagatcgcgccactgcactccagcctgggcgacagaacaagactccgtctaaacaacaacaacaaaaatagcaagagggactgggggcgaggctcacggaggaatgtccaggtttccaaaggtcctgagtggggagtactgaagggcgtttagaatggtggccagctgcagtggttcacgcctgtaatcccagcacgttgggagaccaaggagggcagatcacctaaggtcaggagttcgagaccagcctggccaacatggtgaaaccctgtctctattaataatacacaa

SEQ ID NO: 34079 - DNA, 1594 bp, Artificial sequence
  DNA replication origin
ggtttcatagtttgaaggtccctttaggggagaacttacaggccatgtcctcaatgagccctgtttggattgactgcacctcacgggttccctgcttggagagccgctggacccccaccttgtcaccccctcccctaccttggagggggctgggccctcgtcctcccggaagctcagtggtttctcgacctcgttgaatgctgcagaagcttaacgggggcagagaggagacaaggccatttctcgggagcccgcagctcccccagaatgtgcagggtggatcctgtctggcctcttcagcctgcttctcccccaggccctagctgggcccacagctggccccaaggacacccccttaaggccctggcagcagggagtctggggcacccaagctcggtggccttggaggtgacagctttggccctggtagggccctggggtggggggcggggggcggcgccagcggagtaactgctgattaaggggccggctgactactacttgatgtgagtggcagatggttgggggtggggtgggggtgcctgaaatagagttggggggaggccggcactaaaacctcatcccccccacctcccagggcctctctgcttccatccgggtgggtctcagcctctctcttcccatggccagcaggacttctggggaagggcctgagggcagagtcccagggctgggtggtcccaggggagcgggcagggcagggcagggagttcaggttctccatggaagggactgtccatctgtctgcgcacacaccctccagtgcctcccaggcagggagggggctgcagactggcttcctgatgacccaggtggttcacgcctataatcgcagcactttggaaggctgagttgggaggcttccttgagcccaggagttcgagactggcctgggaaacagatcccatctctacataaaataaaaaaattagctgggcacggtggcacgccctgtagtcccagctacttgggaggctgaagcaggaggattgcttgagctcaagaggttgaggctgcagtgagcgatgagggtgcctctgcactccagcctgggtgacagagtgagaccctgcctcaaaaaaaccccccaaagattgccttcccagctggagaagccactgagccaggggcacagcggggtcctgcctgtctgtcccaggccccgggaaccctgagacacccctccccaacccctcacagggaaaggcttcagaagctgcaaaccaaggaccccactgtgggcacgagaatcccgccctcgcacgggagctcggaaggccagcttccaacgaggtcctctgccctccacagactccatgggctgcctgtcacctggggtcctgcaagggtcaaggagggaggcccccaggcaggggactttcagtagagccaggctaccctcagccaagttcctcaagctccgggaatgacttggcccagagaagtgtcagccacgcgacaacatgggggcctctgtgtgatggttggtgcctgccctggactctcagtcccttcctgggcccacgataggtacctcaagggagcggggcaggattttttgtttgtttgtttt

SEQ ID NO: 34080 - DNA, 2510 bp, Artificial sequence
  DNA replication origin
gctgggcagtctccgtcacgaggcgttgactctgctgccggatgagcccctgaacctcagttcacactggcaggtgggggctggcggggctgggtggcatcgcggggaccccgctcaggcttccctccttcctaggcgatccggcggcggaacgtgcgtggtgaggacagcggccgcaagcccgagcggcggcgcctgaagaccacgcgtctgaaggagtacaccatcaagtcgcactccagcttgccgcccaacaacagctacgccgacttcgagcgcttctccaaggtgctggaggaggcggcggccgccgaggagggcctgcgcgagctgcagcgcagccggcggctctgccacgaggacgtggaggcgctggccgccatctacgaggagaaggaggcctggtaccgcgaggagagcgacagcctgggccaggacctgcggaggctacggcaggagctgctcaagaccgaggcgctcaagcggcaggcgcaggaggaggccaagggcgcgctgctggggaccagcggcctcaagcgccgcttcagccgcctggagaaccgctacgaggcgctggccaagcaagtagcctccgagatgcgcttcgtgcaggacctcgtgcgcgccctggagcaggagaagctgcagggcgtggagtgcgggctgcgctaggcgcagtggggtgggccaggccccaggacagccggagctcggcctgcggtgggggcgcttcctgtggacgctgcgcctcccatcgcccgggtgcctgtccttgcccagcgccaccaggctggaggcggagtgggaggagctggagccaggcccgtaagttcgcaggcaggggtgggtgtgggacggggctgcttctctacacagcctccacgctggccttcaccttcacccctgcatcgtcggtgaccctgggaccctccaggcagcgtggcctgtggcaccgtgagggttgggacccaccgaggcgcagaggcggcccgaatgcagccctggttcaggcccggaggagggtttgcgggtagttgcacggacaattcggcggggtgctgcctgttgctgccattagcccaggaggaggtcgtgggacggggagggtgggatggacggcggacaggcagtccccacgctgctgggtggcgccgggcttggtggggtcttccactgtgtgcccttctcgccgaggccggtcccccgggtgtggggtgccctgctgcggactcctccgcgagccccatcgtcgcgcctgtggacgcctaggcaagagcggccctctgcagccaagagaaataaaatactggcttccagatacgcgggtgttgtgtgcctcaggccttggcaggggacagccagcccttggccactggggatatgccctccgcggcgttcatgtttctctctgtgttccatgcctgccgctgtgctcaggaaggaggggacaaaccgggggtcctcgcagaccttcacggtgtcctgggagctgccggatcttggtctcagctgccccgagtgttttgattgcaatgaggtggaagctctgggcagctgaggtggatcagaagcgtttcctgtccctttgcgccttacgggatgctgctgtgtcccacgtgggagcccctgccccgtctggagccacatgcaggtggccctggagggggagcggctcagctcagctgctagggctcacaggtggtttcagagaggggccccgaccctgtccatcctccctggaggaagtttttttgcttttttttttttttttttttttgagagcgagtctggccctgttgcccaggctggagtgcagtggtgcgatcttggctcactgtaacctcggtctcctggactcaagcgggtctcctgtctcagcctcccaggtgtctgggattacaggcatacaccaccacacgtggctaatttttttttttttttttttgaggtggagttttgctcttgttgcccaggctggagtgcagtggtgtggtcttggctcaccgcaacctccgtctcccatgttcaagcgattcttctgccccaacctcgcgagtagctgggtttacaggcatgtaccaccacaccgggctaattttgtatttttagtagaggcagggtttcaccatgttggtcaggctagtcatgaactcccgacctcaggtgatccgcccgcctcagcctcccaaagtgctgggattacaggcgtgagccaccatgcctggccgtaatttttgtatttttaacagagatggggtttcaccatgttggctaggctggtctcgaacttctgacctcaattgatctgcccttcttgtgctcccaaagtgctgggattacaggcgtgagtcaccgcatctggccatttttttttttaacttttttttttctttcattgagctatgattcacacaccctaaaatctttcttttaaagtgtgcaattcagtggttttatacattcacagaggcaggaaaaggtacatccacacaaaaattgtatgtgagcca

SEQ ID NO: 34081 - DNA, 1629 bp, Artificial sequence
  DNA replication origin
cacctgccgtcagcctgtcttctgtgctccgcctgtcgtgggcagccggagaggcggcgcggccgtggtgggagcccaggaccccactgagcccccacgcctgtctcgcagcctgagcggtgcatccccgttcctgggcgagaccaagcaggagacgctcaccaacatctcagccgtgaactacgacttcgacgaggagtacttcagcaacaccagcgagctggccaaggacttcattcgccggctgctcgtcaaagatcccaagtacgaggggccggcagggggcacggggtgggacatgggacacaggcccactccacccacggaggctccagaggactctcctcccagcgccacctccctgcggctggggatcagacattgcttaccccttgggctggagagagtaaactgataaactggtggcccaagctggccattgccatggtttttttttttttttttttttgagacggagtctttttttttgagacggagtcttgctctgtctcccaggctggagtgcagtgcagtggcgtgatctcggctcactgcagcctctgcctcccgggttcaggctattctcctgcgttagcctcccaagtagctgggattatagacgcccgccaccacgcctggctaatttttgtatttttagtagagacagggcttcaccatgttgcccaggcttgtcttgaactcctgacctccttggtttgtgatttgcctgccttggtctcccaaagtgctgggattgcgggcgtgagacaccgtgtctggctgcttgctgtgtttttagcaaacttttaattagttgccggtgtgtaaagtaaggatccatgtaaaattccaggtcacttgttttcctgtaaacacttagaattctggcagtgctgagccctcactcgtaggcctccccgggcctccatggccgcccagtccctctctcgggcgcctgggtttgcgactccagcctgaggtctcagctctctccaccaccccccagaaaaccccacgctccctgcagtacccttgttcagcttctgtggttggctgagcagaggctggggggcgactttagggcttttgggggtcccgggagtcagttgttcacgggaggacgggacagatggtgcaggtgtacctaaccagagcgggggtcttccaggcggagaatgaccattgcccagagcctggaacattcctggattaaggtaagtggggaggtgggggagctccctgggcttcccgccttggccttctcgctggggtcccggggggccttcagcatttaaggcttgtggatgtgacaacccccagtggctggggagggtccccagaggagtgagcctgtgtggcgggggttgggtcctgggcgtgggatgtccagcacccgacagacctggtggcatccttggctggtgtgtgtccaacggggctgactcctggggccagggccgcagcgtttttctcgagagagcactctcggctttgcgtcgggctgggcagtctccgtcacgaggcgttgactctgctgccggatgagcccctgaacctcagttcacactggcaggtgggggctggcggggctgggtggcatcgcggggaccccgctcaggcttccctcct

SEQ ID NO: 34082 - DNA, 1071 bp, Artificial sequence
  DNA replication origin
gaagccctgtctctactaaaaatacaaaaattagccaggcgtggtggcgggcgtctataatcccagctacttgggaggctaacgcaggagaatagcctgaacccgggaggcagaggctgcagtgagccgagatcacgccactgcactgcactccagcctgggagacagagcaagactccgtctcaaaaaaaaagactccgtctcaaaaaaaaaaaaaaaaaaaaaccatggcaatggccagcttgggccaccagtttatcagtttactctctccagcccaaggggtaagcaatgtctgatccccagccgcagggaggtggcgctgggaggagagtcctctggagcctccgtgggtggagtgggcctgtgtcccatgtcccaccccgtgccccctgccggcccctcgtacttgggatctttgacgagcagccggcgaatgaagtccttggccagctcgctggtgttgctgaagtactcctcgtcgaagtcgtagttcacggctgagatgttggtgagcgtctcctgcttggtctcgcccaggaacggggatgcaccgctcaggctgcgagacaggcgtgggggctcagtggggtcctgggctcccaccacggccgcgccgcctctccggctgcccacgacaggcggagcacagaagacaggctgacggcaggtgcctgggccactcacactcctgagcccttagaaccttcctgcaacgatcccagacaccacccaagaggcattcaaaatccacccccccaccccgccactgacagcagcagaaatgaacaggcagaagtctccttggagactcgaagtatctgtgcagacgcagagcccgaaagcccccagtgctcagtaacgccgaggggagggtaactgcagtggggagcccgagccaacaccttagccaaaggatcaaggtcaacagcccggcagtgagaggccccaacagcgtctgcctcccagcctgacgctgggagggtgacacagcatcatccctggggttttgagcagagacactgaagccccgtctgatcgtctgatcgtgacagcgcacgagactaaacg

SEQ ID NO: 34083 - DNA, 1047 bp, Artificial sequence
  DNA replication origin
tgtgagaaccttgaccccatgcctgtgtcttgagcctcttccttggccagcatgtccccagtgcctgacccacatctccctgttctgcagccccagagattgtgaactatgagccgctgggcctggaggcggacatgtggtgagtgtaccacctgctcccaccgggcctccctgcattcctggagcgcaggccagtgctgcagctggggatgaagcggggccttgctgctgttggggtatggggggaccgttgccctagaacaggggcgctggacgccacggtcctgggagggtgggcggccccacgctgcgctgacccttgcctcttgtctgtccccaggagcatcggtgtcatcacctatatcctgtgagtacctggcgggggccccctcggctgtgcaacacagctggcatgggtccccggctccgtgtgtctcatgtggacgccaggggtccccagcctggctgtgacccatcgcgggtactcaggggataccgggtgaacggatgagtgattctctgtggctgctgtcacagaggcttctggagagttctgaaggcaggacactcacagagcggctgagcaggctccgggttgggggtcgtgtgtgctcctgtccctctggctgctagggagcccagcctcctctcgaagtgcaaggaaggggtccgaccccacgctgggttttggctcctgtccctgggccacacgtgggcctgctgttgtttattatttttatttgttgagacggggtcttactctcttgcccaggctggagtgctgtcctagctcactgcagcctccacctcccagacttaagcaatcctcccacctcagcctcctgagtacctgggactacatgtgcacacaaccatgctcccatgctcggacttttttttttttttgatggagttttgctcttgttgtccaggttggagtgcagtggtgcgatctcagctgctcactgcaacccccacctcccaggttcaagcgattctcctgcctcagtctcctgagtagctgggattacaggcgcccaccaccat

SEQ ID NO: 34084 - DNA, 780 bp, Artificial sequence
  DNA replication origin
gcacactttgacctgaaggtgagccctgtagggccctgtggggccggcctggccagtgtgggggtggggatggggcggggaagagcctggaaggcacctcctgcgcgtgggggtgaggtgtggggagcgtgggggtgaggtttggggagcgtgggggtgaggttgggggagcgtgggggtgaggttgcggggagcgtgagggtgaggtttggggagcgtgggggtgagggtgggggaggcccgtgctttccctgctgagcctcctcccaccccagccggaaaacatcatgctgctggacaagaacgtgcccaacccacgaatcaagctcatcgacttcggcatcgcgcacaagatcgaggcggggaacgagttcaagaacatcttcggcaccccggagtttgtgggtgaggccctgcccagtgggcagccccggcctggggagggtggtctggggctgcctgctgtgcgtggggtgggtcatgcccggtgctgggtgccgcgtcctcggccctgaagccacccctcttgggcccggctttgcgggaggtctgggcctccatttggtgcagccccgctgtcctacccgtcaggccctgagggccagctctgccgcattcatgcccccaagggctgcgacatgtgagaaccttgaccccatgcctgtgtcttgagcctcttccttggccagcatgtccccagtgcctgacccacatctccctgttctgcagccccagagattgtgaactatgagccgctgggcctggaggcggacatgtggt

SEQ ID NO: 34085 - DNA, 733 bp, Artificial sequence
  DNA replication origin
aagtgccggcagaagggcacgggcaaggagtacgcagccaagttcatcaagaagcgccgcctgtcatccagccggcgtggggtgagccgggaggagatcgagcgggaggtgaacatcctgcgggagatccggcaccccaacatcatcaccctgcacgacatcttcgagaacaagacggacgtggtcctcatcctggagctggtctctggcggggagctctttgacttcctggcggagaaggagtcgctgacggaggacgaggccacccagttcctcaagcagatcctggacggcgttcactacctgcactctaagcgcatcgcacactttgacctgaaggtgagccctgtagggccctgtggggccggcctggccagtgtgggggtggggatggggcggggaagagcctggaaggcacctcctgcgcgtgggggtgaggtgtggggagcgtgggggtgaggtttggggagcgtgggggtgaggttgggggagcgtgggggtgaggttgcggggagcgtgagggtgaggtttggggagcgtgggggtgagggtgggggaggcccgtgctttccctgctgagcctcctcccaccccagccggaaaacatcatgctgctggacaagaacgtgcccaacccacgaatcaagctcatcgacttcggcatcgcgcacaagatcgaggcggggaacgagttcaagaacatcttcggcaccccggagtttgtgggtgaggc

SEQ ID NO: 34086 - DNA, 851 bp, Artificial sequence
  DNA replication origin
ggtagagacagggtttcaccatgttggccaggctgctcttgaactcctcagctcaagttatctgccctcctcgaactcccaaagtgctgggattacaggcgtgagccaccgcgcctggccccctcagttccctcttgatatgcattgaactgttcattctttcacttttcaaaaatacgccggtgccatggtgttaacgtgtggctctgcactcccctccacacacctgctgggcatagccctgggaggggtgggaacgccgcgtctgatggtgtggggcgctaaggaattgctctctgagaaggcgcagagtctgcacccccgcagtggccagctcatgtccttcaagtgcctggtgcagggccgcgcccaagaggagcaagtggaggtgacggggagccagccacccccacttactccctccgcctcctccacccccactcactccctccccctcctccagcggccagtttgcgatcgtgcggaagtgccggcagaagggcacgggcaaggagtacgcagccaagttcatcaagaagcgccgcctgtcatccagccggcgtggggtgagccgggaggagatcgagcgggaggtgaacatcctgcgggagatccggcaccccaacatcatcaccctgcacgacatcttcgagaacaagacggacgtggtcctcatcctggagctggtctctggcggggagctctttgacttcctggcggagaaggagtcgctgacggaggacgaggccacccagttcctcaagcagatcctggacggcgttcactacctgcactctaagcgcatcgcacactttgacctgaaggtgagccctgtagggccctgtggggcc

SEQ ID NO: 34087 - DNA, 1145 bp, Artificial sequence
  DNA replication origin
ccaggctggtcttgaactcctgacctcaaatgatctgcccgcctctgcctcccaaagtgctgggattacaggtgtgagccactgtgcctggccccagcccacactttttttttgagacggagtcttgcagtgtcgcccgggctggagtgcaatgccgcaatctcagctcactgcaacctccgtctcccaggttcaagcgattctccttgcctcagcctcccgagtagctgggattatagatgcctgccagcacgcccggctaatgtttttgtatttttagtagagacgtggctttcactatgttggtcaggctagtcttgaactcctgacatcgtgatctgcacgcttttgcctcccaaagtgctgggattacaggcgtgagccactgtgcccggcttcccagcccgcatttttaaacatcatgaactctatcagtagaaattgtcggtgtgtaggccacgcttgggtcgtgtctgggttgtggcaggcacttaggaagtgggttgggagtgacacctgagaccatcactgaggagggcttgctgtgcccccacctgcgctgggggctggggaagttacagagaagcgaagagggtgggctcagctcttggggagtttctttcccggctggggagatgaggcacgtttcacattccgtagaggaactgagagcctgccagtggccttgcctctaaggagcaagtctgtggccagtgagaccgggggctgtctggaggtgggcggctgtggtctgctgttgctgtaggaggactcagtggcagaacctgaaatctggttggcaatagcaaaacagggaaaggcgtggtttacagaaccaggttgtccaggtgtgcagcggccgcaggtgtgactgggtgctggtgcatatggtgccctgtgtccccggggccgaagtccactccagcatggaggaggcgccctggcagagtgaatgacggggcttatgtgccacccgcagtgcctggtggctcccctctcctggcctggtctgttcttaggcaggcttcttaggtagccttctacgtggtggcccctgccgcgagcctggatccaagcccagcagagggagagagagatcctctcttcccagcaggcgttcagagccctgtggactggaccggtct

SEQ ID NO: 34088 - DNA, 782 bp, Artificial sequence
  DNA replication origin
gaggagaacgtgcaggaatggtgggggattttggctgagcaggttgagagaagtctaggagtgagaggcaaaaaaagacgcaggcagcgtcggggaaatcagaattatgtgtctggagagagttttgcggggtgaaggtggcccagtggggctgttaccaaacttttgagtggttatggggctctaagaggtgacatgacaggacccagcccagtaaacacagcacctctttttgtcgagtttggagcttcagagtggagaggtgggaggcttgtgtttgctggacaggtctgtccattaatctaggagaaaagggtggtgtctcagttcctcacttctgtctttccctgtcttctccagggttgccattaggggactcctgaggtcctatctccaggctgcggtgactgcactttccctggagtggaagctgctggaaggcggaccggccgccatgtccacgttcaggcaggaggacgtggaggaccattatgagatgggggaggagctgggcaggtgagctgtctgcccgcacggctgggctccagggataggagagaggcgctgtggggttttctgaacagcagctctcctttcctgttctttatcctgtatgctgagaaggaatgagtcagtatcatgcggtgggggaacgaatttgggccgtggagtcagacagccccggctgtgaattcctgcttgggaatcctctgtgtgtttcctgtggggagaaaagtaattgagccgttacagcagccaagaccgtgcctggcatggggcac

SEQ ID NO: 34089 - DNA, 1675 bp, Artificial sequence
  DNA replication origin
ccattcgcccaaccggtgctccaggaaggcaggaagcgggatgcagggcttcagcctcacttctcgcagcttcagcacctgggtcagaggagaggcgggcggggcgatgaagggaccggaagtcggccttttttccgtccgcttgaccagcgtcgactgcagccaatgaaatcagggatggcgagtgttcagccagtggtgaggctgcatccgggtgtgggtgccgaaaaggcagctgggggcgggacgtcgaggtgcggcacgagcggcgggcgcaccggccaataggcggcggggttcgtttcccgggggtgggcactggcgggtgcggtgacgtcggcgcaggcgcgtcgcggcggcaggggcgcggggcttctggaggcggcggcggtggccagcgcggcggcgccggccgtattctccgggctgcggagggtaaagagcgggctcgggccgaggctggagggctgggtggggccagagcggcgcttcgggggcccgcggaggacgagggagggagagaatctgaggagctggtaggtttggggacccatctgggtgaccgggccggggaaagggctcggccgggcgtgcgaggggcgtagcggccccagggatgctggagcggagccttagggatgggcaaggccttgggggcggggggaggttctgcaaagggagccactggggtctgcctaggggcttgtgcggagattgcgggcgagaaggggcagaggacggtggaggagactcagatggggccctttttggcggcccgttttggggggtaggggagacggcggttgggggactttgatacatggagcgtggaggaagaggttaatcttgcgaggacagtggaggtcagcgggggagggaggcaaagtgggctttcaggagcgtggaaggcgtcgtccggttcttggaaaattcagaattggagggagtcagagatggttgggggtgggcgggggtgttccatcgatgagggtcttaagagacctgccgagggcaaggaccaggaggggttaaggtagtaacttgggaattttgatcggaatggcagcactttgggaggcctgggacgatcgcttgagccttggagttccaggctgcagtgagccatgattgcaccactgcactccagccagggcgacagagcgagactccttctcaaaaaacaacaacaccaacaacaaaagaagtagacttgagaacttcgttaagacattggccagggagtaaggtagccctgggatttgaggttgaggagaacgtgcaggaatggtgggggattttggctgagcaggttgagagaagtctaggagtgagaggcaaaaaaagacgcaggcagcgtcggggaaatcagaattatgtgtctggagagagttttgcggggtgaaggtggcccagtggggctgttaccaaacttttgagtggttatggggctctaagaggtgacatgacaggacccagcccagtaaacacagcacctctttttgtcgagtttggagcttcagagtggagaggtgggaggcttgtgtttgctggacaggtctgtccattaatctaggagaaaagggtggtgtctcagttcctcacttctgtctttccctgtcttctccagggttgccattaggggactcctgaggtcctatctccaggctgcggtgac

SEQ ID NO: 34090 - DNA, 818 bp, Artificial sequence
  DNA replication origin
cactttggaaagctgaggtgccggatcacctgagcttaggagttcgagaccagcctgggcaacatggtgaaaccccgtctctactaaaaatacaaaaattagccgggcgtggtgatgggcacctgtaatcccagctacttgggaggctgaggcacgagaatcgtttgaacccgggaggtggaggttgcagtgagctggataccgccgctgcactcctgcctgggtgacagagtgagaccctgtctcaaaaaataaaattaaaaaaaaaacaaacctgatacctcccagtgttgtcagttggcacatactatgtctcaataaaatgcttgctgttaccctctattttgagacgaagagggaccctgtgtatgacaaccccagattgacctcatttgcattttaagtatttagaatgtgggtaacagttttcagtggaggaaactgccacatagggactaaagcagtcccagggtccactccaggagctgccaggcgcgctcggccacaggtgagccatccattcgcccaaccggtgctccaggaaggcaggaagcgggatgcagggcttcagcctcacttctcgcagcttcagcacctgggtcagaggagaggcgggcggggcgatgaagggaccggaagtcggccttttttccgtccgcttgaccagcgtcgactgcagccaatgaaatcagggatggcgagtgttcagccagtggtgaggctgcatccgggtgtgggtgccgaaaaggcagctgggggcgggacgtcgaggtgcggcacgagcggcgggcgcaccggccaataggcggcggggttcg

SEQ ID NO: 34091 - DNA, 2040 bp, Artificial sequence
  DNA replication origin
gtcttctgtccacaaacaacacaaatgctctggaggggttgggacaggcctgctccagacctcgtttcttccctgttaatgcttaaaattccacaagcccgtggtttctgcgccggagagctcagtggagcccctgctccttgtccttgtctggagtgagatgcgcttggcactgcaacactgactccgcttcgttctgattgacgtggctctaccaggctgtatgaggtccgccttgctaggaaaagcttttaaggatgcgtctgtgtgtaaggtcacctctttctccaggcaagagtgggacttaacctctttttgcagaaatctgacccggtcgtctcgtaccgcgagacggtcagtgaagagtcgaacgtgctctgcctctccaagtcccccaacaagcacaaccggctgtacatgaaggcgcggcccttccccgacggcctggccgaggacatcgataaaggcgaggtgtccgcccgtcaggagctcaagcagcgggcgcgctacctggccgagaagtacgagtgggacgtggctgaggcccgcaagatctggtgctttgggcccgacggcaccggccccaacatcctcaccgacatcaccaagggtgtgcagtacctcaacgagatcaaggacagtgtggtggccggcttccagtgggccaccaaggaggtgaggcacggctcagcatgtgcagaccacacccgtttccaggctctagagggacctcatggtcctgcctcccgagacagagaccctaatggggccaaggcgggcaaggccccaggtccccctggtggagacctgcaggacttggcaggtggagggcaagcagccgaggtgtgtccggcccttgacggtggctctccccctcccccagggcgcactgtgtgaggagaacatgcggggtgtgcgcttcgacgtccacgacgtcaccctgcacgccgacgccatccaccgcggagggggccagatcatccccacagcacggcgctgcctctatgccagtgtgctgaccgcccagccacgcctcatggagcccatctaccttgtggagatccaggtgaggtctacccgcccaccgctgaccctgccaccgtcctgcccagcggccactgacaggttttctttcccttctggcagtgtccagagcaggtggtcggtggcatctacggggttttgaacaggaagcggggccacgtgttcgaggagtcccaggtggccggcacccccatgtttgtggtcaaggcctatctgcccgtcaacgagtcctttggtgagtgcctgcccggtgtggcctgcagagcctggcaggctggtttgggggacagaagcccagttaagcttagcaaggtgttaaaggaggcgtcctgatgggagcaggtgatggatggagcaggtggtccagtttctgacagcttgtggaccccctaaatcactgaattcccaggggaggggctctcctatccccagtgtgagaagggctctgggcctggagctctgaaggcctacgccctgggccggtagagcagccgagctgtagcacagggttgtcccaaacgagcagcggcatgaggcccatgagtggcctgctaggcccttcgtgaagtgctgggcaccaggccgagtgtctggtctgcagggtgactcaggctgaggaactagcctgagctcctgacaggactttccttctgccctgccaccttctcgatggcccagtgagcctctcgcttccctctgcaggcttcaccgctgacctgaggtccaacacgggcggccaggcgttcccccagtgtgtgtttgaccactggcagatcctgcccggagaccccttcgacaacagcagccgccccagccaggtggtggcggagacccgcaagcgcaagggcctgaaagaaggcatccctgccctggacaacttcctggacaaattgtaggcggcccttcctgcagcgcctgccgccccggggactcgcagcacccacagcaccacgtcctcgaattctcagacgacacctggagactgtcccgacacag

SEQ ID NO: 34092 - DNA, 1062 bp, Artificial sequence
  DNA replication origin
agggcatttctggagaagctccaagccccagggcacagcacacccctgctcatctgtgtccctgggcacaggtgggtggcggccgtcgacccatacccagggaggagggcagtgattctgaagaggatgtttcctgacagccccgacgcagcagtcagggccttgtggaagccaccagtctgccctgggacctggcaggagggccaccaactccgggagggacctgccctggccctccagggtccagcacaaccatccctgcggcctgctgccgccttctgcttcttccagaacaatcttgatgatgggccgctacgtggagcccatcgaggatgtgccttgtgggaacattgtgggcctcgtgggcgtggaccagttcctggtgaagacgggcaccatcaccaccttcgagcacgcgcacaacatgcgggtgatgaagttcagcgtcagccctgttgtcagagtggccgtggaggccaagaacccggctgacctgcccaagctggtggaggggctgaagcggctggccaagtccgaccccatggtgcaggtgggcacggagtgcacctgctgggagcagacaccctgaggggggacggcttgtgtcctgagttgtggctgtgtgggttgctgtggttggtggattggggtgactggtcatgaaaggaggggttcttggctgtggctgtaaatggagactcctgcccaggcagccaccaccctctcctaggctgctctgcgcgtgttcactgtagcttgtgggacttaacatttcttcaggagtttgtgctggtcccagtttcccagcaccttccctgaaatcttgttctggcggggtccctagctaaagggaagctgggagcctggtcccgcctgttccgagccgcctacccctttggtgctgacccgcatccctttcagtgcatcatcgaggagtcgggagagcatatcatcgcgggcgccggcgagctgcacctggagatctgcctgaaggacctggaggaggaccacgcctgcatccccatcaaggtgaggcgccagtgaccagccttccccacgccc

SEQ ID NO: 34093 - DNA, 1064 bp, Artificial sequence
  DNA replication origin
tggccaagttcgccgccaagggggagggccagttggggcctgccgagcgggccaagaaagtagaggacatgatgaagaagctgtggggtgacaggtgagccccgcgggatatggtgggggattcctgacacctgggggtagtggcagcgacgtaggggcgtggtgtgctattcacagcgtggctcaagcccaccaggtcttgcccaagcatgtccccttggcgaccaccctccccaagtcatcccctggagaccctaacttgatttggcttggcctctccttgccaggtactttgacccagccaacggcaagttcagcaagtcagccaccagccccgaagggaagaagctgccacgcaccttctgccagctgatcctggaccccatcttcaaggtgagtgagggctgcgccaggcaccccgccgatgcgactattggccctcggccctgtgggctccggccggtagcctgtcggctgactgggcccgtctccttgtggggcagatgcgagatgggaggaggcacagctcctaactgaggtggagtcagggctcctctcttaagatctggactgcatagccagagccttgggacctctcctgcattgagggggttgaataacttgtggctttggcggttcagtgcttgtaagtcagaacttgggtccttgtctgagtcagagtgggctttttcctctgctccaccacgaggtttcctccagctcccgatccgctcagctggctgggcccgtggtaggcaggccaggcctgctcctgctcccgtgctgcgtccccctgcgctgacctgagtcttccaagcaggaagcagtgccaggcttcctcctgctgttcccaaatgggctttcttgtttcttggtggggaatgtaggtgtttgatgcgatcatgaatttcaagaaagaggagacagcaaaactgatagagaaactggacatcaaactggacagcgaggacaaggacaaagaaggcaaacccctgctgaaggtgcggcctgggcccagccctcggggtggagggaacacaggctgctgtttccggatgctctga

SEQ ID NO: 34094 - DNA, 957 bp, Artificial sequence
  DNA replication origin
cttcactgatacccggaaggacgagcaggagcgttgcatcaccatcaagtcaacgtgagctccctgtgccctctgtacccaggcagggaggtgctggcctggcagctggaggccactgggccagggtgcgcggggagagacttggcaacgtctctttcccctggtttcttaattcatgggagaatgagtgaggttcagtccagcgagacaggatggagaggcacagggattcggggtactgcgagctggaaggttttcttgaggagggggcttaactccgtggttctccctccctgggggacttgcccccactcctacaatatctggagaggtttggctgtcacacctgggaggggagggtgttctagtgcttgggacgctgggaagctcctgtgttgcactggatgatgttcattccatgtcagtttctggccccgatatgagtagggggagcgcagagtacggtgaccccaactgctttttgtcctgggttggtacattggtgagggactctggctaaggctcttcatttcccctggagcaggggcagaagtgaggaggggagggtcggagtctctggaggcttttgccgtcctgctgggtcttttagttgctactttgagtcaggtgtgatgaatcttgggaccaagtcggtggggcaggatgtctggtcaggagggctctgaggatctggctatggggctggtaccaggagttccctgtcatgggggtggcatgtctcggacagaggcaaaggacaagggtgggttggctcttgtgggagcctctccagggatgagtcatggagggaggagcagcctggcttctgacagcatcccagactccctgggccaggtgtgtggctcctgtccccctgacgagtccctccctccatcagtgccatctccctcttctacgagctctcggagaatgacttgaacttcatcaagcagagca

SEQ ID NO: 34095 - DNA, 882 bp, Artificial sequence
  DNA replication origin
tttctccgtttccgagggcgccataaccttgcccagacctggttggagctgggttgttagcggggatgggggtggggaatgatgatgtggcaggcgtagtaatggcgggcaccgcggtggaagcggggagacagggaggcgccttatgtaacccgcgggccgcgagtttgagatcgattttctgccgggggactaggggcggcagggaatggcagaacgagcaaagcgacacctgaaaggctccccttttccttccaaataccttctcctgatgctgttaatcgtcgaccttaggcacttgtccttcctatgactcccagatgtacaaagactcttattgagacacgaggtgtaggcttgtggcagttagggccgttccggctccccgttatttcctggggtgggtggccttgtctgatcccgtttgccaaggggtgaccttgcattttatgatgaagcttcttgctcggggaagtttgggtggcccggtgacaacgtggagggggctttaggagaggattcatcccttacgtgtttggccccaaatgagactttagtatttgtacctggtatcaaggaaatctgttgacactcagttttattcctgagcacttttatttctgggttgtcaatcatgaatgacacctattaacggtggttccttggagattgcggggtggctcttaaggggtgttaggctggcaagattcggtgggcttggggcaccccagcaccaaccccctcctggccttgggcatgctggttcgtttggactgaacgctccgtgccatgctgtgttcctggaaatcacgagctggtctgagcctccttgtcttgcccaggtgaacttcacggtagaccagatccgcgccatcatggaca

SEQ ID NO: 34096 - DNA, 1699 bp, Artificial sequence
  DNA replication origin
cacgtgaccgctcaccactcgcgggcggggccgccgcccgggccaattagcacccgcgcgcgctcctcccgccgccggtgcgcgctgctgcctcctgcgcaggcgcgcgcggccaccgcccgggcctccggccaatcaggtccgtcctacaccagcgcccccccccccgctcgcggcgaccacgcctaccccggcggcgcctgactccttaaagtggtactagccctgcgcaggtggggacgggtgctcggtttcctctagggagggaaggcgagagggggcggtggcagcgacaacaatgcagctaggtgccgtggcttcctgcgcgcggcggccgccaggtgcgtctccagactcccggcggcgtcgggcaggggatggttgctccgccgcaacggccgccagtgcgtacagtgaggcgccttgcagcgcagcgcggtgcaggctccacgggcccagacaccccgcgcgctgcacatccgggtcctggtgtgcagatggggcgtgggctcggcaaccagctggctgggggcgcccggcggagaaaagcgggacccctgctcccaaattccttggagatcgtacagccctcacctctttgcaggcgccccccccatcctgcctccccacccatgggaaaccttggatctgcaccagttgggacctcttctccaaagcgctccttggctttggagctaagtggcttcgtgcccgtagaagtggatttcaaacttcaataatcaagtattttagtgcaatttattttttatttttatttttgtagagacgaggatctcattatgttatccagggtggtctcgaatgtctgggcttaaatgatccttctgtctgggcctcccacagtgctgggattacaggcgcgagtcaccacacctggctagtccaacactttaaacataaaaaaatcagtgcaaaagagtccatgatggatgaaataccaaattgttatttatttatttattttcgagacggagttttactcttgttgcccaggctggagtgcaatggcgcgatctcagctcactgcaacctccatctcccgggttcaagggattctcctgcctcagcctcccaagtaggtgggattacaggcgactgccaccacgcccagctaattttttttttggccaggcttttctgcaacccctgacctcaagtgatctgcccgcttcaacctcccaaagtactaggattacaggcatgagccatcatgcccagccttttttttttttttttttgagagccttgctgtgttgcccaggctggagtgcaatggagcgatctccactcactgcaacctctgcctcctgggttcaagcgattcccctgcctcagcctcccgagtagctgggattacaggtatgcaccaccatacccagctaatttttttttttttagacggagtcttgctttgtcaccaggctggagtgcagtggcgccaggctggagtgcagtggcgcaatttcggctcagtgcatcctctgcctcccgggttcaagtgattctcctgcctcagcctcccgagtagctgggactacaggtgggcaccaccacgctcagctgatttttgtatttttagtagagatggagtttcactgtgttggtcaggttggtctatgaactcctgacctcaggtgatccaccggcctcggcctcgcaaagtgctgggatcatgggt

SEQ ID NO: 34097 - DNA, 1861 bp, Artificial sequence
  DNA replication origin
ctcaggaaggcgcctctctccaggaaagcggagatctgtgcgaaacgctgtggactatttcagggagctcacagacacccctgccccaaacccgcctgcaggcctcaagctgagagtctcagatttcaaagttcaccaacaaacccccaacattcgcccctccgagcagtctgtgatgcaccccaaaagacagaatctgcagccatgaatatgacaggctggggaaggcccctgtaaagaaggggatgtttcaatgacatttaaggtacttggagaggtagcaacagactcaaggagaaagaaggttccccagggtccaggcccccttgaatggaggctcacggtttagagaacctgaaagaagggtcaacttgatttaattggggtgggggggggcccagccaccagagggttaaggaaagttcatcagatcatatttcaaggcctggatggtacaaaagagtgcagaccctgccctcagccagggtgggggttggggtccagggtcacagctccaagccccgaaacgggaggttacatttcaggactccaggacacttcaagcccagagcctgccactttgggtttacagagttcaggcctccacatctccagggcgagtctccacttttcaaaactctagagaggagcagaagtgtgcgcaggggtgtagggttgggaggcgaagagaggtatatgctataatcacagagccctgagtgctgtgttttcagatcccagggggtaatgtgagaggaccgagaagaagatacgtacaggtcaggaccgtggggagggaagatgtgaaaggggatgggggagggagaggtcccctaacctccccggaagccgtggccttgcgggcacttctaagggttttagaccctcagctctaggtaggcacctacaagaaggtacatcccctggaatggggatactctgagctcaatcccaggatgattaaaagtggttccaagctaggagatggtatctatgggacatgggacctggacaggacccaaagtataatagagcagcagcaacagttgttctaaagaggccagccttggacccagtggggaccctccagagatcaacaaaagagaataggcagaaagagaggggaccttagaaaccaaagttggggtgcataaaagttctgggggctgtgtagggggagggtgggtgtctgacctaagaagtagactcgctcaagagcagaaaataggagaagcagccaaggtttgaggacagtatctgatgctgcacaggtgaggtttagagccccctgaagcagaatcagtagcctcagattctgtcccgagaggaacgaggtaggaccaaagcacagtccaggatttaagattaaaaaaaggagaataaagaaggtctgtgaccaagaagagtggtccgaactccatcctatggggagggaaagggagggcccagccttcccccaagcgcccactccggcgtgtgagagacggtgtcgggaagggggcggggttctgggaccaatgcaggagctgaagaggggctcaagaccgagcctgaactccagaccccaagaggacgtgccgtgtcttgggggtggtctcagggccctgactcctccacctggacggtggcaggacactatccaggactcgggggacccttccgagcaggagactcgcaaaccccagcctggcctgttgggcggggacgagacccagatagcagtcctgggagccctgtgggcggggaggcgcagacactccccccaacacaccagccaaaaagcaaggaccccggctcggaaccaagagggcaacgagtagctcaacacgtcccgcatcccggcgggacggtgcctcaaccg

SEQ ID NO: 34098 - DNA, 998 bp, Artificial sequence
  DNA replication origin
gagtggagtttgaatggtttattggtttcttcgggtacccgccagctttccttaacacccttgacgcttgagctttctccccattcctcctggaagctactgtttcccaccacatctcattcatcccaggccagcttcagggctaagggtgggtggccctgaaaccctgccagcccatccctcgaggacacctggcttctgcagcctgttgaggagccttccttccccttcagggtcctacccctcatggaggtcaggccactgccagtctaccccacctcaaacaccagggtcagctgggctctgctgtttggtttttatttcgctggagaggcccggccaggcgatgagggccaggtcctgccaagcctcatttgtcgctttgacccaggtcctgcaacagcccctgtggctgctatcttccccttggaccggtcccccagggactcagggcaacgtgtggaggtgtgtttggtgtggaggtgtgtttggtgtggaggtgtggggggtgtggaggtgtgtggggtgtggaggtgtgtggggtgtggaggtgtgtggggtgtggaggtgtgtggggtgtggaggtgtgtggggtgtggaggtgtgtggggtgtggaggtgtgtggggtgtggaggtgtgtggggtgtggaggtgtgtggggtgtggaggtgtgtggggtgtggaggtgtgtttggtgtggagctgtggggtgtggaggtgtggggggtgtggaggtgtgtggggtgtggaggtgtgtggggtgtggaggtgtgtggggtgtggaggtgtgtggggtgtggaggtgtgtggggtgtggaggtgtgtggggtgtggaggtgtgtggggtgtggaggtgtgtggggtgtggaggtgtgtggggtgtggaggtgtgtggggtgtggaggtgtgtttggttgtcgtgagctgtgggtatttagcaccacacagagcccaggatggccccagtgtccacagggccaaggaggagaaaccctgc

SEQ ID NO: 34099 - DNA, 890 bp, Artificial sequence
  DNA replication origin
tcacatgaccggcttggttcccggcaggtgattagtactaagtaaactgtggctaccgttggcgagaccgaagggaaaacatatctgtggctgacatgggttgagcgcccgcccagccagtgctttatgtcattatcctcccgacgtagagactgagggtcagagaggcatttggtgtttgccggtaaggcactggcagaggctgtttacaagtaaagcacaattgtcagttcctgccctggggatgctttcaggctgaagacagggaaagagaacctaaaatagaagggggggcctagtcagaggcgcttttgctgcgttggcgatgctggggaaagtttgatgaggaggagggagggggcagggctttgctgggagggggcaccgtaggggcagggcactccaccagccccagccaaggctggcgcttcctggcgagtgggtgtctttcacggcccccacatcggggcctggcctccatggagtcccctgcctcgcagctgtgtcctctgagtgtgtgtgtgcttgctcctcctcagaacatggtgatgagttttcgagtctccgaccttcagatgctcctgggtttcgtgggccggagtaagagtggactgaagcacgagctcgtcaccagggccctccagctggtgcagtttgactgtagccctgagctgttcaagaagatcaaggagctgtacgagacccgctacgccaagaagaactcggagcctgccccacagccgcaccggcccctggaccccctgaccatgcactccacctacgaccgggccggcgctgtgcccaggactccgctggcaggccccaatattgactaccccgtgctctacggaaagtacttaaacggactgggacggttgcccgccaagacc

SEQ ID NO: 34100 - DNA, 1914 bp, Artificial sequence
  DNA replication origin
tttccagggtggacttggcacccctcggccgaggtggcctgagctgctcacccagtgccttgcacagctccgggtgctttaccccaatggtcttcagcctctgcagcagctccgatgaggtcagctgccgcaccaggtacagggccaccgagtagctctggggacagaaggaaggggtcagggctggcaggacggggccggggttggggggcagggtgggcacccgggcacgcactcaccttgccgtagttcccccaggtgacagtgatgcggttggtggccgaggacaggtacatgaggtgggtgaggttgatggggcggcacggcctcttgggctccaccccgggcttattggaggggtagtagccctgcaagcagatgggccgctcagcctcgagccaagagcggctgggaaatccgacggcccccaccctccctccacgccccccaaacccgtgcagccgacgcgggggcggggcatgctcaccgggacggagcagtagctgtggttgaccttcacagcgatgttgggcgggtactggtcctcctgagggcagctggtgtctgagtaacagattctgcaacgacaacagggaccatggggcggggagggggcgcacaggagggactaggctgctgcgggggtacacgagtggtagccaggcggcagtgatgggggcaccggagaatgtgacacggggggtatcagggcccccgggtgtggcctgagtgggggtcggatggtgatgtatccccagacagggatagacagcaggtgaggagagctgggctctgctgttagcaggggagactgagaagggcctgggccaggactggggggcggggaggggcgggtggctgggggtccagccctggggtcgcgggcacacctgggcatacctcaggacgacctgcacggctttaactccgggctgcagttccctgtgggtgtggagcaaaccagaggaaaggaaaggagagctgagtgaggagggcgtgaccccagcccacccgacaaggtggagaccgccacaccacaaggctccctcccccagagctgggaaactgaggcccaggactcttttgtacgggctgggtgagaggagtggctgtgaggtcaggagaggggctggcctccctggaaaatgcaacagaatccacagcaaaaccctgaaccagagagggcagccaggtgcctctccctgcgaagaaacatagctaaaacgtgcatgcgggaatctagcagctggctcacaatggcaagaaaacacccagtttgggaggtcaaggctggcggagctcttgagcccaggaatttgagacgagcctgcgcaacatggtgaaactgtctccacaaaaaattacccaggcgtggtggtgcacacctgtggtcccagctgcttggaggctgaggcagggggatcgtctgaacccatggaggcacaggctgcaagctatgattgcaccactgcactccagcctgggtaacaaagagaaacactctccaaaaaaaaaaaaacaaaaaccagtaacacctgaggataaactttaacaagaaacgcccccagaagaagaggaaaaagtctatctacccaaagacgcatccgtggatgttcacagcagaactgaccacaacagccacaaactagcagcatcctgagtgtccttccgtagaccgaaggaccaacacgcacgggacgcgacccagccatggaaaggagccaggctcagacccaggcctcagcacaggtgcaccgtgaggatgtcccacccagtgagagacgccagacacgaaaggacacacaaggcaggtggctcacgccagtaaccctggcactttgggaggcggaggtgggtgggtcacttgaggtcaggagttcgagacaagcctgggcaatatggtgaaacctcgtc

SEQ ID NO: 34101 - DNA, 3221 bp, Artificial sequence
  DNA replication origin
tccatgggtagctcaggagagaccccagccctgggccatggggggcaggccaccctggcccacaacccacagggcctctccatccaccacctggccctcagctgcctggtggaccagtgttgcttcctccaggaagccacctgcccaagtgacttggggtccagagtgatggtgccagcctgcccccccactccccccagctgtcctgacgttcctccgcctggaaatgcccctaccaccccttattggcctgaaacaccacttatctctgcccgcttgggagccacttcctccttcctgacccccacccagacccccagccggggtgtggagcagtgggctcttccttctcccgtggggacgtggtggcagccacgtgctggctcccagcagctcccctgcttgagccaaggctgccccagccgctcactcctcagctgagtttccatccttggatcccagctctggctacccggtgcccgggtggaccctcaagcctggcaaaggggcagctaggaggggatgcaggtgcccatctgattttaaagcaaactctccctcctttgtgtatggagagacgtgcgcagcaggaagggttcaagtgaggcaaaggtgaggacttcctaggtgcagcaagaaagaaatccagtgacagagaggctgagcctggggccggctgtgggaagcagcaggagaccccttcggagaggaagcctgaccccacagcccccagcactgcgggctctggtcactgaggagttaagcccggcccccaccccgtgggcctagaagaggcctgcccggccccagcctcctccctcaagttggccatgtccccacaggcagggaaggtcgggggcggttgaaaaaagggccctttgagggaagagggaggtggggcggggtaacccaggacacagaaccctaactttgccactctgtgcctcagtgtccccactggtcacacgggtacatagccaggccctccatccccgagcctggaggaggctggccaaggatgccggactccgtggagggacccctcaccctccacgtcctgctctgcagagggggtgctgccggctatctttcctgacttggggggctggagtgcacaggaggcttcaacacgatggggctcgcaggcccctggcagtgccagcactgctccaggcttctggacacccaggcaaggaggtgccctttggtggtcaggaacagggaccagaggcctgggcctggctgtgccaggagggcagtgctcatggggaactctctggcctgggcacaggggcctgggcagctaggaggggcagctggaagaccctctggcccacattctgccaaggggctggggtggtgcccagattccacctgaaaacagccaccattcgggaagggggtgcgagcaaacccggctggcccagaaccgccctctcgtcagcctggcaggtggtcccagtcctcacccacctgcctgactcccactcccagctccaaatgactccaggttaggcctagcctctccataagacaggcctgcagagcccactgaggcctgggccccaagcatgtggggtccagagagatgtccaggtgccctcaagatggctcagatctattctcctgaagacagtggccaccagagaaggccagcgactttctgaggccacacagccgccaggcagggctaactgctgtacgctggctttgtgctgcgtggctgcttggggtgaggactgatttgcctaccaggcttggcaggcttttttttttttttgagatggagtctcacactctcacccaggctggagtgcagtggcacgatctccgctcactgcaagctctgcctcctgggttcacgccattctcctgcctcagcctcccgagtagctgggactacaggtgcctgccaccacgcctggctaattttttgtatttttagtagagatggggtttcaccatattagccaggatggtgttgctctcctgaccccatgatctgcccgcctcggcctcccaaagtgctgggattacaggtgtgagccactgcgccttgccggcaggctttcttttaaaattgctctgcgtgtcacttaaaaaaaattgttttcattgttacaaggacaaaagagaccaggtgcgaaagtggccaagactgtaatcccagcactttgggagattgaggcaggtgcactgcttgagctcaggagtttacgaccagcctgggcaacacagcaagattccatctctacgaaacattaaaaaattagttggggccgggcgtggtggctcacgcctgtaatcccagcactttgggaggccgaggcaagcggatcacgaggtcaggagcttaagaccatcctggctaacaaggtgaaaccccgtctctactgaaaatacaaaaaattagccgggcatggtggcacatgcctgtagtcccagctactcaggaggctgaggcagaagaatcgcttgaacccaggaggtagaggtttcagtgagccgagatcgtgccattgcactccagcctgggcaacagagtgagactctgtctcaaaaaaaaaaaaaaaaaaaaaaaaaaaaattagttgggtgtggtggtgaacacatgtggtcccaagctactcaggaggctgaggcaggaggatggcttgagcccgagttagaggctacagtgagccacgatcccaccactgcactgtagcctgggcgatacaccgagacacttttttttttgaggtggagtctcgctctgcagcccaggctggagtgcagcgatgcagtctcagctcactgcaacctctacctcccagagaccctgactctctaaaaaaaaaagaaaaagaaaaagaaaaaagattaaacggggcctcaccaacgtgaggtcagaccgccgccgcccgtcttcctcccacagcaactgcctccacgaccctggccgtccgtgacccgccaggtcccgcagcaccctcggccccgctgaggcaacgagaaggggctgcttagaccacagctccctctgtgctcctctcacccctcccggcctctgtgctgtcccggaatgaggctccagctcttctgctgcttagacccctgtgggctggagcacctggggccagcaacacgaggtgtgaccccacaggcctccgcacagcagctcccactgccaagtgccccctctgccatccgtatcctccagagacctccccagccacagc

SEQ ID NO: 34102 - DNA, 1689 bp, Artificial sequence
  DNA replication origin
caggaccatgtgcccccactgctgtgtcttgctggggcaccatgtggtctgcaggaagcggggtgccaccgagacctccacggatgtccggctccggccgccctccccggggccccgggctcacccgtcgatgatgagctggtcgtagggggctggcttgtcgcacacggggcacatccaggtgggcttcttctcgttcatctgcaggtagaagacggcgtcgaagcactgcaggtgggcacaggtctctgcccggcagggcacggagagccgcatcttcaccagctgtgggggaggggctgcgtgagcagggcacccctcctgttgtgcccgcctgcccggtgcccctcacccccagctccatcctgtggctcgctccaatcactcatgcctcaggaacacggaggggacgaagaccagcctcgcccccgcaggctcacggcccagccaagccgccccgggcccagggccgccaggggggaaggccggccgcaggagaggcctcgaggaggggaccgcgccccgactcaccggacagatgagggacacccgcacaccggtggtggcgatctcgctgtcaggatcaaggcgcagcttctccttgactgtggggagggaacggaagacaccgtcaggagggtgggaacagcagggcgcggggctgtgattcgagttctctccggcactgacgtccacctcccagaacaggcccctgacgatgagtcccaagcttcgctgtgtggctcggggccgtgagggattggagaaagccgggtggcaaccaccattagatttgaccacaacctgggcacagcacagacccagccgaagcccccacacggaggtggcctatgtggcctcccccaccctgcgtggactatgacccatgggacttttctggcaagtttcatgcaacacagccaccgaaagagtcattgctgtgacttcattctgtcaccgaagcaccatccccaaggccacagcggggaatgaggcagggactctttgggagacggatcctggggcttcctggctgtgagccagcaagcggctgccgcccagccccagcaccgccccaaggcagcctgcagacaggagtgtagctgcttctttaaaggaaaagacggtgcccgccagcaagctgcacggaacatggggaaacatatgtgaaacatgaagtcttggaggcaggcgccgccctcccctcgacgggcagcaggcccacagccagaaggaaactcacgcagggaccctggctgccctcctgaggcttctgggatgtggctccatcccagggtaaactccatccatgggtagctcaggagagaccccagccctgggccatggggggcaggccaccctggcccacaacccacagggcctctccatccaccacctggccctcagctgcctggtggaccagtgttgcttcctccaggaagccacctgcccaagtgacttggggtccagagtgatggtgccagcctgcccccccactccccccagctgtcctgacgttcctccgcctggaaatgcccctaccaccccttattggcctgaaacaccacttatctctgcccgcttgggagccacttcctccttcctgacccccacccagacccccagccggggtgtggagcagtgggctcttccttctcccgtggggacgtggtggcagccacgtgctgg

SEQ ID NO: 34103 - DNA, 1240 bp, Artificial sequence
  DNA replication origin
cacagctgtcaggctgggaacagagcagccattcaggcagcccacgtgcccggcccaaaggactcctctctctacccgaagctgggatgcaagggggtggccacccagccctccacagaggggacccagactcaggctgggttcaagtctcagcctggccccgtgagccggggtagctccagctgctggttgcctcctctgagcctgtttcctcgtctgtaaactgaggacgctcacaggtctgtctcctgggatggggacaagtgcatgaaccggaggtccacctggggatgaaatctacaaccccagaggcaggccagccctgccttcacctgcacagtccgctgaggccatgcctgagggctggggacccggcccacccccacaggcagggcctgctcccgcctgtgagggcgccagcttgtgccgctgtggcctcgcgccctgccggcggctctggggacgaggtgggcgcggtcggcgccgggcaggagccgcatcaggcaccacagacaacggggctcagtttctggaaacttaagccctgggcagagccttccaccagggagaaaggtcttgtcctcctgtcccctgtggcctggggaatgcctggccacagctgtgccacctaggaagggaagggcatggcgtagccagagtgctccaggaggcgccacctcctttgcctttctgtgaggaggtcacccccaaggctgcgcgtcctggggtgaacgccgtgtgaaagcacgacctggctcagttttttgtggcacaaaccacactcctggagctcagggtcacacttgcctgaggtcacgtgggagcggggtggaccggagcccaccttctgcaacctaagctacgtggctgtcacctgcatagcaaaggctctgagaagttccgcgagaaagaaaccggctcttttcgcagcccggggtttccaaagctccaggaccatgtgcccccactgctgtgtcttgctggggcaccatgtggtctgcaggaagcggggtgccaccgagacctccacggatgtccggctccggccgccctccccggggccccgggctcacccgtcgatgatgagctggtcgtagggggctggcttgtcgcacacggggcacatccaggtgggcttcttctcgttcatctgcaggtagaagacggcgtcgaagcactgcaggtgggcacaggtctctgcccggcagggcacggagagccgcatcttcaccagctgtgg

SEQ ID NO: 34104 - DNA, 2795 bp, Artificial sequence
  DNA replication origin
cggccctggctgcggactgcgcggctggtggggtgaggcactcacccagcacgaggatggcgccctgcgggctgcagctgcgctccttttcggcgcggatcgggcaccacgagccgtccaccaggtactcgatctcgtcggcgtcctcacactcgctcaggatcttcgagaggagcctggggcgaggcggacagctgacgccggggctggaggtgccccacccccccaactccccagccctccatccctcccggatgcagccaggcactccccacttctctctgcaagagcagcctcaccaccccgaccgcaggggtccagggaccccgcattccctcccccgccctcaggcccctgcaggtgctgagccccaggcaggtctgcagtgcacggcactgccggggggacggggcatggacacacatacccagtggcccccaactacccacaagagcagggagtgtggcagctgcaggggtcctccccaccctgcccctctgggcacctccgggtgtgcacgcatgtttgagcgtgtgtggacgtgagtgtatctgtgcatgtgtgcgagcatgtgcgtgtgtgtgcacgtgtgcatgtgtggagtctatgaatgtgtgtgtgtgagcatgtgtacacacgtgtgaatggatgcatatgggcatacgtgaatgtggactgtatggatgtgtggcatgcgggtgtgggcgtgtgtgtgtgacggtgtggactgtacagatatgtgacggtgtggactgtatagatgtgtgtgtgtgtgtgacggtgtagaccatatagatgtgtgtgtgcatgtgatggtgtggactgtagagatgtgtgtgtgtatgatggtgtggactatatggatgtgtgacggtgtggactgtatagatgtgtgtgtatgacagtgtggactgtatagatgtgagacggtgtggactgtatagatgtgtgtgtgtatgacggtgtggactgtatggatgtgtgacggtgtggactgtatagatgtgtgcatgtaacaggtgtggactgtatagatgtgtgtgtgtttgtatgacggtgtggactgtatggatgtgtgacggtgtggaccgtatagatgtgtgtgtgtttgtatgacagtgtggactgtacggatgtgtgacagtgtggactgtatagacgtgtgtgtgtatgacggtgtggactgtatagatgtgtgacggtgtggactgtatagatgtgtgcatgtaacaggtgtggactgtatagatgtgtgtgtgtgtgacggtgtagaccatatagatgtgtgtgcatgtgatggtgtggactgtatagatgtgtgtgtgtatgacagtgtggactgtatggatgtgtgacggtgtggactgtatagatgtgtgtgtgtttgtatgacggtgtggactgtacggatgtgtgacggtgtggactgtatagatgtgtgtgtgtttgtatgacggtgtggactgtacggatgtgtgacagtgtggactgtatagatgtgtgtgtgtatgacggtgtggactgtatggatgtgtgaaggtgtggactgtacagatgtgtgtgtgtgtgtatgacggtgtggactgtatgtgtgtgttatggtgtggactgtatggatgtgtgcaggtgtgtgtgtgagacggtgtggactgtatggatgtgtgcgggtgtgtgtgtgagacggtgtggactgtatggatgtgtgcgggtgtgtgtgtgatggtgtggactgtatggatgtgtgcgggtgtgtgtgatggtatggactgtatggatgtgtgtgggtgtgtgtgtgtgatggtgtggactgtatggatgtgtgggcatgcgggtgtgggtgtgcacgcacacctgctttcacattgcactgtgtgcccgccagatcaggaaacaggctggagtgaaggtgctggctgctcaaagcccctgcagaggctgtgagggtagcaatgggagcagagtgcgggctccccacgcccatgccagccacagcctctccagagcacccccactgtgtccggcctttttactcggaggtcctaccagccccattttacaaatgcagaaacagaggctcgggaagggaacgagttccctgaggccacaaggccaactggaggcaggccctggttctgctccccaacccgtcttagccaaagggcctcagtctccccacccgcaggaagggaaaggtgcagtggctggggggcgtctgaggagaggccccctgccccacgggtccatgcagggcccaggctggcctgttactgtcaaggctacagctgctcccaggcacccgcagtggcatcgttctcatcacacaggagagccctcgtcccactctgggccaccctttctgaggctctcacccaggccagcccctccgccccgccgagctctctctgaggcgatgctcggagcccaccgtgccagggccgccccaggcgtagcacagccctgcctgcccacttccctgcttgcaaaactgcttttcaccctccaaagccccaccccacagcttctcttcctcctccccaagacacacacagcaacgggaacgtttatgtctggctctgctcctctatccgctcccctggccaagaacaagactctgaaggcagggtctgggacggggctcttttggggaccctggggtcacccagctcagagccagggacagagaggtgatagggctcatggaacaaagtatgaaccaaggacccctcctccaggaagcctccctggctacaccgagtcccatgggctgctgaggccaaggcctgcatgggacacag

SEQ ID NO: 34105 - DNA, 1035 bp, Artificial sequence
  DNA replication origin
tgacctttctttttctttttattgtcgttcgttttgtttttccacccttttgcctggctcctggcacctgtacctctggactctcctatcgggggattaaaaaaaaaagtaaaatgacaaaaaaagatacaaaaaagaaaaatgaaacaaaaaagtcaaactcttaaaaacaaggccggccacccacacagccgcctccccggctggagtccgagccgggaaggggtagtgggcgggagggaccaggacgccgccccgcgccctcccctccggatgccccgccgcccgccgccctctgcccacgaccattccagccagtgcgcggggacccgggcggcgggcggtggggcgcagcccctctctggcgaccactttgacgtttgtctcttcctttgctttttctctgcaaatgcatcctcgcccagagaccctcacgcgccgagcagcgagcgttttagccgagaagccatggagtgggttggggcggggaggggcagtagggtggggggatgggtgggcaggatgggggtacagtgggcggctggggagggtttagccacagatgtgttgtattttttgaaagtgcaataatttggtattttgaagacccggcgtgtggtcaggaacccccggggaaggcgggggcccagggtgcggcaccgtgtggcgtgggggggtctcagttttctagccagctacctcggtaattccaattcaggttaacttccctacggaacagcacagatgtccacagatgtccacagctgccgccgccgccgccgccaccataccccggtccttggggcatgggttgcggtcgcttcccaaggggcagcagggaccccggccaccccggctctcggtttgggttgattcctctcctttttgctcttggttttccgacgggtacgaggctggcccggcaccctgtcccccgggagcctcactcttccagcaggaccagaccaggggcctccttcctgtccccaggcgttcccggcccctcgcaggccccacccatgcccttggcctcag

SEQ ID NO: 34106 - DNA, 995 bp, Artificial sequence
  DNA replication origin
ggcccggcaccctgtcccccgggagcctcactcttccagcaggaccagaccaggggcctccttcctgtccccaggcgttcccggcccctcgcaggccccacccatgcccttggcctcagggtccaacaactgggggagctaccagggctctgccttcaggagcccacagctgggcaccccccttgccccgcaggagaccggggcgcaggcggggcaccggcctcacctggttctccaacaccgctgcctgcggtctgttttgcttttgtcctccccagcccagaattttcctttgtataaacagaactcctagtcaggaagcaatatcatttcaggtctaaagaaagggacgtgcatctggccgagggcagttcagtctcactgcagagcccgcagcccgctgcgcagctcggcccctcccgcccgcacgggcagctgaaggccgctgttttctaatatttgtattctaatttaattgtttttaaaaaatgcaaataaaaaaggtcgaggtgaagccatccaggcgtccgcttttctgtgccctgtgtctcttaagtgtgtaccctgtagtcggggggcggagttgggggaaggacagaaactcagcctcacccacatctctctttcttggttattgcctcagcttcagaattcaaaaggtgctgctcgtggtcaaatgaggcagatttttatttatttacttatttttaatagagacagggagtcttgctgtgttgcccaagctggtcttgaactctgggcctcaagtgatcctcctgcctcagcctcccaaagtgctaggattacaggcatgagccaccatgcccgacctgaatgaggccagttttactgtgtactgtactgcctgggcctggtgtccaccacgctgggagaatgggagaagggacttgggctgtacatggaattcaggtcccaggatcgtccatgtctctgggtggccaagacgatacacaaatgttttgcttttgtaaggt

SEQ ID NO: 34107 - DNA, 2436 bp, Artificial sequence
  DNA replication origin
ggaggctgtggaccaggatccgatgcccaggtcccgccccccaccccaccccaggcccagaatcgaggtgccttggactttggaggggccaggcctggtgaatggggggcggggcggcgccctcagggtacagagcacagacagatagacattccagagactgtattgagagtctttataaagtgtgggagatttaaaaaaaaaaaaaactgataaaaatgcactttttgggagtggggagggagaagctttaaaagtaataaaaaacaaacaaaaacacaaaagatgaaaaaacaaaaaaattcatttttcttgtacataaaaaaaaaaaaagaaccactaaacgcagcctgttacgaccgctgccgcctcagtcgcctcatttgatgttctctgtgttttgttcgggggaggctggggagcggggatggggggcttggggggggtcccccttttccccttttggccctgaagagactgggtgggttgagcacctcgtccacaccacacctttgggcccagggtgaccggatcctgggtcccaaggagagaagccccaggtccccgacccttcctgctcttcctgcccggccttggaagccaggcccatctctctggggtccgtctgtcgcgtggcagagaggctgggtgtggatggtgacccagagcaccggggtgggggtgagtgtccgaggagtacccaggtccagaggcccctcttgcggggaaggtgacccatagcccctggcgcgggcaggcagctggcacaggataaggccagaggggcagcagggagaaccggccgggcgagttgtcagcagaatccagggctgggccctgggcaccactggctccaggctttcccgaggccccaggcggggtagcctcacctgggggccacctgactctgctagaggaccccagggtgctgccccatgccaggccccagggacatgagccaggatctggagccggaagcctcagctagctgcagcccctacctctgggtagggtctctgagggagggcctcctccttcctcctgtcctccaaccagactcggcccatgtccaaggaatctgtccaggccagcaaaggtggggatggggccagccccaagggatggatgaggcactcatggaagcagatggcacagtgaggcagcaatggctgcactgagccgggcactgggtccactcagaaccccagctcctcctctgtggattgggctcttcctagtagccacaggaagtcaacaaagcctggcccagcccttgccaggaaacaccacagaggccacaccacgaagtctgagggcctccgggtccttgtgtggaccccatgctaaagcaccatacctgtgcgaggccacccatgaacctgctgcagccaggattcgtgcccaagtccccgacacgcgctggagcagggttgggggtcagcggttctacagccgtgtcctgagccccctgcaccgtggaccctcagggcacactgaggcctctgctcagaggtcccacatggggaagctgaaggagccgcagcctcaggaccacaagccagggttaggtgcttcctaacctctgtgcttcagagagggccgggagtggtggctcatgcctgtaatcccagcacattgggaggctgaggagggaggattgcttgagcccaggagttcgagaccagccagaaaaacaaggtgaaaccacgtctctgcaaaaaatacaaaaattagccaggtgtggtggtgcacgcctgtggtctcagctactctggaggctgaggcagaaggattgcttgagcccaggaggtcgaggctgcagtgagctatgattacaccactgcactccagcctgggcgatagagtgagaccctgtctcaaaaataaaaatacaaaaatataattcacataccatacaatttcccttcaaggccaggcgcggtggctcatgcctgaaatcccagcactttgggaggccaagaagggaggatcacttaagcccaggagttcaagaccagccagaaaaacaaggtgaagccacgtctatgcaagaaatacaaaaattagccgagtgtgatggtgcacacctgtggtcccagctactctggaggctgaggtggaagtattgcttgagcccaggaggtcgaggctgccgtgagctatgattgcaccactgcactccagcctgggtgacagagtgagaccctttctcagaaatgaaaataaatgtaattcacacaccatataattgctcttcaaagccaggtgcggcagctcatgcctgtaatgctcccagcattttgggaggccaaggcaggtggatcacgaggtcaagagattgagaccatcctggccaacatggtgactagtaaaaatacaaaaattagctgggcgtggtggtgcacgcctatagtcccagctactcaggaagctgta

SEQ ID NO: 34108 - DNA, 1785 bp, Artificial sequence
  DNA replication origin
cccgcctgaagccccccaaccccagcctggacctcactcccgctctcttgcacacacgcacacacgcgtccacgcaacttcaccatgagaatggaaataacaatttcgcattgtttttcttttttttttttctctttttttttttgtaccaggcagttaaaaaaaaaacaccccaaaaaaagaaaacacaaaaaaccccaaacaaccaaacaaaaaagctttgagctgtgtcctttcatatggagtcaacacgaccctcctcaaatatcatttttttttgtttgtttgtttcctgaaacgcgagaattcagcaggtatctttggcaacactttatcacgaccttaatttaaagaataaaaataaaatcgattcacgtctatatacagtatgtgattgcgcggagtctggggagggcggggctgggctgggggggtcccggctctgggcccatgcagaggctgtggcccccaggacgggcgggtagttaaggcaaagtgggcgggcaggacaggcgaagctgagtgcggagctaggaacgagggtttagtgcaatccccgaggtctgtgtaagtgtcgcggtgggccgcagcccttgttcctacggaagtcccagagggctccaccccccaagtccggtcgcccccactggctaggacgacagctgtgattttagagttggttttattgcgagggggtgcatggataggggaaggtggaaagagggctcacccctcagggggcctctctgggagctggggaggggtgtccctggcctgggtgttcaagctccccgctcagccacgacagatggttttctctccagaacagctcgccctgtgacactggggtgtgaacgcagccggggtgctgtcacccagccccaggggagaggggggatcctgagacatttggagggggctgacaggcttaagggggggtgggaagggaagggaaccaaaaccatcctgtagaaacaatatgaaaattgccttcttaaaaagcttccctttaacaatgaaagaaaaagagacgagaagatgtgtgtgtcacagagaagggggtatgggggggtcgggggcagggagacacccccccgccggttgggcattgacaagaagtctcagtgcagcagagcgtctattttcggggtcccatgctagcattgcatatgcaaacggggtgagggcgtcctggcatctggcgacatagtctccccaaccccggcccctgtccgtggcctgtggctcggtcaacaccgggccttgtgggagccagaggttggggggaggcaggtcccagtccccctggattacagtcagtgcctttgagtaaaaagaggggtgcctggggtggggagaggggcggtggttctaaggccctggaggtggggggcccctgtcacccacctcagcagggtaggcgcatccaaggtccagctccttggtggccatgcgggagggacaggcgtgttgggggattggggggtgccggatggggatcggggtgctccggctggaaggcccatccctgagctagggaggaggaaggagagaccccgtggacagaagcgggcgctaagacctcttcacgtcagaaccaaaaaaggggacagaaagggggagcggggggaacacagcacgaacaccccacagtcctgccttcgaggctgacgtctgggggtgaagcacaaacacctcggggcgtctcccaggtcccctgcgatggcttcctcctgaaccccccttctcgctttttggggaacagaagtggattctacgtttgtg

SEQ ID NO: 34109 - DNA, 891 bp, Artificial sequence
  DNA replication origin
ttttcatagaagttggttgtaacttgtaaacatgtttttaaattaagaattaagataaagtgtagtacccgttccgttacaaagtgccaagacttctaatgtggttggttgcctttttttttttccttcctttcattttgtaaaaccttttttttttctagtttgttttattgcttttgtgacattggaatttgtggattttctctctctccccccatccctgccatcaccagaccctggggttcctctgatcgtgactctgtttatcccacactgttgcctgctcctctgaggaaaagtatattatttatatatatatatatatctatatataaattttgtttttaaggaggaaagagaaaaaaaaatctaaaaagtgctttaaaaatttgggagagggggctcgggggagaggacgaagacagaagttttgaatctccaaacgtgggggtctaggtggaccgggcgggggtgggggggcgccctgaggggtggtccctgggggtcccgccggttgtaagtgccgtgaaggaaggcggcaggagcacccccaggagccatcctggcgccccaccgggaaccccagtccgatctcctttctccaggcctagaaataaataggtttgtgtctcagtggccaggagacgtggggtgggcgacggggggaggccgcaggcagggttggaggcggggaggccactggggagatggagagggagacccctcccttagtaagtgccctgaggaaggagggtgcgggtcgggggacgggggcccattttaacgtccgctcagagcagacagaaatcatttaaggtcttgtctgaaagactcatagaaaccagcgaggggaggaaattaaaagcccaccccagtccccccccagcgccc

SEQ ID NO: 34110 - DNA, 1338 bp, Artificial sequence
  DNA replication origin
ctgcggagggagaaaaacgtcagaaaggagggaaatctgagaaagcgctaccctagattctgtgacgcgtcatatatatatatctgtatatatatatatagatatagatatctgtatatagatagattttctttttttgtgtttttgggggggtggtgggtgattttttttctctctctctgtctctctctttctcgggtttctgttttctctttttggtttttaggcgagtccggctgtgaagttaccgtcggtggcggccccggggccacctccgctgtcacctcctccaccggcgcccgctacattcaaccggcccaagccgtcggggctggccacgtcctcgtcctcgtcctcgtccttaaagtgcttctcctggccgttgcgccgggcgtcgggggagctgggctgggcgggggcgccgggggtcgcggtggcccccgggctggggtcgggcgccccgccccggacgcggggcttgcggccgcggcgcgaggggacgccgttgcagccgtctttcttgaggtgtctgtgcaggtggtcggagcggacgaaggtcttgcagcagctgtcgcactggtaggggcgcaggcccgtgtgcacgcgcatgtggttcttcaggtcgtagttgtgggcaaaggcggcgccgcactgctggcacaggtacggcttctcgcccgtgtgcttccgcatgtgcaccttcagcttgtcctgcctgtggacggggcacggggcgggcacggtcagtggggccggggacccccgatccccgcccagggaccctcacggacacggcaggccctggatcatcacccttgcagaacacggaccgtgcaccagaggtttcggtgccccgatggggacggtccctcgaaaaacgagacgagtgggggcgatttcgcattctgaacatctaaagagggcctcggaccctgagtgctgtgtggccttgggaaaacgctatgcctctctgaaccccgtttcctttccttttttaactttttaagagacaaagtctaggccaggcgcggaggctcaggcctgaaatcccagcactttgggaggccgaggcgggcggatcacttgaggccaggagttcgagaccagcctgatcgacacggtgaaaccctgtctctactaaaaaaacaaaaaacaaaaaaacaaaaaacaaaaatcagccgggcatggtagcaggcgcccgtaatgccagctattaggaaggctgaggcaggaggatcacttgtatctgggaggtggaggttgcagtgaaactccgtctcaaaaaaaaaaatttcactttttaagagcgaaactccgtctcaaaaaacaaatctgcca

SEQ ID NO: 34111 - DNA, 1280 bp, Artificial sequence
  DNA replication origin
tatggtgaccggctttgtaggctagaggctccaggctaagctgggtccacgctgcccccatggggcgagacaggcagggaggggccctcaagtcacacccaacccctgccttctcggggctcacaatccaatcagggagacagaggagaaacaaggaaatcaacagaaacaagagagaccggccgggcgcggtggctcacgcctgtaatcccagcactttgggaggccgaggcaggcggatcacttgaggtcaggagttcaagaccagcccagccaacatggtgaaaaccctgtctccattaaaaatacaaaaatcagccaggtgtggtggcgcacgcctgtaatcccagcgtttggggaggccgaggcgggtggatcacctgaggtcaggagtccgagaccagcccggccaacatggtgaaaccccgtctctactaaaaatacaaaaatgagccaggtgtggtggcagagggcctgtaatcccagctacttgggaggctgaggcagaagaattgcttgaacccgggagacggaagttgcagtgagcggagaccacaccactgcgctcaagcctggaagatagagcgagactcggtctcagaaaaaaaaacaatagaagagtcaggtggtgatgacaggaggatggagacagggctggggaaggaggtgacatttgagcccaaatttgactgtgaagatccaggaggaaaaaagaaagtaccccggactgcgggagcagcacatgcaaaggccccagcgtagcttgtgctttgcacctttgcacgtcagggtggagcccagataggggagtgacgctgaagtgaggggagagtgggcagtcctgggtgtcgtggggtggggacttggttactagggtgaccaactgccccactttgtcccggacagaggggtttcccaggatgcaggactttcagtgctaaaaccagaacagttggtcaccctatctgtcaccaaacacctcggccgccgccagcctcgagagggcagggatgtttgcctgtcttgttccttgcggtattttcagcacctggaacagggcctggccctcagcgggcgctcggcaaaggtctgtggcatgaatgaaggcaccaggcactggctggcctcatcctaccccaggggtaggggcaggatggagtggcagaagcccactgtctccttctgtggtagggaaaggggttcatggcgggcgcagtggctcacacctgtaatcctagagctttgagaggccgaggcaagaggatcacttgagcccagga

SEQ ID NO: 34112 - DNA, 1812 bp, Artificial sequence
  DNA replication origin
gcgccggggacaggccttgccggaacctgaaggaggggaggagcagctgtgggaaagggcgttccaggcagagggaacagccagtgcagaggccctgaggccagctcagcttgagagatcactgtgcccccctgggagccacaggacttggtccctaaacagcaggagttcaaggccaggcccgggcagtttgcaattcggtctcaggagtccagaggtggctggctgggcctcgtagatccggggcgggctgtagcggtgggggcagggggctggcaggcagggacctggccaggctgggtgactcagcaccaccccctgccccccgcccgccctggggttcccccagccacgcccaccgaggctgaagaaagaggccattgtcccagcttcccaaccccaccccgtggggacaggaactgggactgacccctccccagcaccccggccccctccccagcaggccaggagaggaaggtgcggcctggactccggcgcccaggagtgccaggcagggggcaaagggcactttgggaggcaggcagtgtagctggtggtttgtccctccttggtgaggttggggtactggaggtcttggggggctcctcttcctccaggcaggggtcactgtgggttcgtctctgagctcaggaagagcagcttggtggggtgcagagaactggggtctgcagaggggaccaggctgagcgaaggtggtgacccccaccctgcctccctggccgcaggccacaggcccggtttcattctgactcgggcactgctggctatcccacccgacccggggctgatcccctcagtcagagaaactgaggcttagagagggacaattgtggagacctcttcctcccaccccaatttagacccacctgcttcctcttttcccccaccccgtgctctggtcccccctccccaggacaccagcacctccaccctccaaaagcctgggagcccgaggcccctctgagtcacagcagggcgttgagtaagtggggcctgtggtggccggggctataattacccaggctggggctcggggtgatgaaactagggatacctccgcccccaccccgcctctgcgtggccctctggcctgctgtgcagctccaggcaagtcccttcctctctctgggcctcccaggctcatctggggagtctctgcacggttctagaaaaacctagtggctgccatcccctctgtgaccccggccctgtgccagatctgggcaaggcagcccggagaccttgccgtgggctttgcagaaggtgatcagtaaaccagaggcctggaggctggtaacagacctggttaggccagggttctgttagcaagttaccacgttctgttggcttcagtggggcagcaaggctagagataaggtaggggtctggttgccaagggccaggccttgaccctcagggcaacagagccaaggaggggttaaagttagggacaccagctctgtagctggtgccagagggagggacttagggctggaggaacccagaggggagccaggtctttgggaattaggaaaggtagaggggcattcaaggtagggctttgagggatgagtaggagtttgccagtccccacactaaagaagtcttcagtctattgagtgtgagaaggaagaaacccgaggtggctcagatgtggggcacaacaggcagcagcaaggagtaggtcaggttctagccagggctcttgagacccagggctccctcctgccctccggatcccaggaaggagtacactttattactatagattggcatcactcaatgggaata

SEQ ID NO: 34113 - DNA, 1957 bp, Artificial sequence
  DNA replication origin
tcgctcagcctggtcccctctgcagaccccagttctctgcaccccaccaagctgctcttcctgagctcagagacgaacccacagtgacccctgcctggaggaagaggagccccccaagacctccagtaccccaacctcaccaaggagggacaaaccaccagctacactgcctgcctcccaaagtgccctttgccccctgcctggcactcctgggcgccggagtccaggccgcaccttcctctcctggcctgctggggagggggccggggtgctggggaggggtcagtcccagttcctgtccccacggggtggggttgggaagctgggacaatggcctctttcttcagcctcggtgggcgtggctgggggaaccccagggcgggcggggggcagggggtggtgctgagtcacccagcctggccaggtccctgcctgccagccccctgcccccaccgctacagcccgccccggatctacgaggcccagccagccacctctggactcctgagaccgaattgcaaactgcccgggcctggccttgaactcctgctgtttagggaccaagtcctgtggctcccaggggggcacagtgatctctcaagctgagctggcctcagggcctctgcactggctgttccctctgcctggaacgccctttcccacagctgctcctcccctccttcaggttccggcaaggcctgtccccggcgcctagaacaggcctggcaccagcagacgcttcataaatgttggctgattgaagcaaatgacccaggctcacgggaaactcagaagccgctccacggcctgggctgtccctccctaagcctgagggcctgtcaccctctcccaaagcagaaaaagaaaaaaatccaaaagtgcagaagagaagaaccagccctccaggaaggaagaacgactgtgccttcccgcccacctcccgcagctcaaccctgtccggcacgctttgcatatgatgtggctgtcatcttatgtctggcctgtgctgtcacccaccgggatgtccacccacaagggcagggcctggtctaggctgttcttaacagccacgtgggtcagggaagcgttcgttggctttgggcccaagaggtggggtgtgtctgtttgcgtgtgtgtgcatatatgtgtgtctgtgggtgcatgtttgcatgcatgtgcatgtatgtgtgcgcatgtacgtgtctgtgtgcatgtgcctgcatgcatgtctgggggtgcgtgtgcatctgtgtgcgtgcctgggtgtgcgtgtgtgcgtgcgtgcgtgcgtgcatgtgtatgtgatgtgtatgtggtgtgcgtgtgtgtgcgcgcatgtcggtgtgcgtgtgtgtgcgtgcatgtgtatgtgatgtgtatgtggtgtgcatctgtgtctgcatgtgtctgtgtagcatgtctgtatgtgtatgtggtgtgcgtgtgcgtgtgtgcgtctgtgtgtgtgcatgtgtacgtggcatacgcgtctgtgcatgtgtgtgcatgtgcgtatatatgtgcaagtgcgtgtatgtgtgtctgcgtgtgtgtggatgtgtaggtgacgtgcatgtgtctgtgcgtgtacgtgtctgtgtgcacgtgcgtgtatgtgtgcgtctgcgtgcatgtgtgcgtgcggtgcagggagagaggcgggaggggtcgtgagcggcggatgctggggcagagagcaggacggcgcctcccccgcggcgggcagctcacctggtgaagcggaccttgcagatgttgcactcgtagggcttctcgcccgtgtgggtgcggatgtgtcgcggcagcttgccggcgccctggatgaccttctcgcagatggggcacttctggaaggccttggctcggatcttcttctccaccttctgcgaccaggccgggtagacgtcgccgtcgtgggcgccgctgaagtacttcaggtagtagtccatgacgccct

SEQ ID NO: 34114 - DNA, 2334 bp, Artificial sequence
  DNA replication origin
tttttttttttcagaccgagtctcgctgtgttgcccaggctggagtacggtggctccatccaggttcaccacaaccttcgcctcccgggttcaagcgattcttctgcctcagcgtcctgagtagctgggattacaggcacgcgccaccacgcctggctgatttttttttttaagacggagtctcgctctgtggcccaggcaggagtgcagtggtgcaatctcggctcactgcaacctccaccccccaggttcaagcgattctcccgcctcagcctcccgagtagctgggattacaggcacgtgccatcacgcccatctatttttgtatttttagtagagacagagtttcactgtgtcagccaggatggtctcgatctcctgacctggtgatctgcccgcctcggcctcccaaagtgctgggattacaggtgtgagccaccacacccagcctaatttttgtatttttagtagagacagggtttcaccatgttggccaggctggtcgctggtcttgaactcctgacctcaagtgatctgcccacctcagcctccccaaaatgctagaattacaggcgtgagcaccgagccgggcctcaaagtgccctttcaacaggcattcccgggggccctcctcggaggggtggtgccagtgtgcttgtgaaatttaagcgtccagtgtgggttttgccagcctcatctcacgctgatgagacagaacagggcatctgactgctcttgggcacagctagggaaactgaggctgatggggggcaggaaacctgactgtcctcatgcacagctggggaaattgaggctgggggcaggacagctggccgcccttgtgtacagatgggaaacaggttgggagtgggacacctgattgccttcctgtacagctggggaaactgaggctggggacatgacgtctgattgcttttgtgtacagctggggaaacaggctgggggaggcaggacatctgaccattctcatgcacagctggggaaactgaggctagaggataggacatttgactgcacttgggaacagctggggaaactgaggctggggagccgggacatctggctatcctcatgcacagatggaaaacagtcttggccgggtgccgtggttcatgcctgtaatcttagcaccttgggaggcaggggcggttggatcatttgaggccagggttttttgatttgttttgtttttttgagatggagtcttgctctgttgcccaggctggagtgcagtggcgtgatctcagctcactgcaagctctgcctcctgggttcatgccattctcctgcctcagcctcccgagtagctggaactacaggcccccgccaacacgcccggctaattttttgtattttttagtagagacggggtttcactgtgttagccaggatggtctccatcccctgacctcatgatctgcctgtctcggcctcccaaagtgctgggattacaggcgtgagccaccgcgccaggccgaggccaggggtttgagaccagcctggccaacatggtgatagcctgtctctgtattaaagacacacaaaaaagaaaagaggctggaggcagggcatgtatcgctttggtgcacagctggggaagctggggctggaaaggcgcgacatctgaccgccttcacgtgcaggtgggaatgtgaggctgggggagcagggtggaacgctgcttctcaagggcctcgggcccttgtcagtgggcacaggaacccccgcacccccactcacgagcgccctctccttccccactgctgcaggtctcggcgcggaagatggccggcggcgtggacggccccatcgggatcccgttccccgaccacagcagcgacatcctgagtgggctgaacgagcagcggacgcagggcctgctgtgcgacgtggtgatcctggtggagggccgcgagttccccacgcaccgctcggtgctggccgcctgcagccagtacttcaagaagctgttcacgtcgggcgccgtggtggaccagcagaacgtgtacgagatcgacttcgtcagcgccgaggcgctcaccgcgctcatggacttcgcctacacggccacgctcaccgtcagcacagccaacgtgggtgacatcctcagcgccgcccgcctgctggagatccccgccgtgagccacgtgtgcgccgacctcctggaccggcagatcctggcggccgacgcgggcgccgacgccgggcagctggaccttgtagatcaaattgatcagcgcaacctcctccgcgccaaggagtacctcgagttcttccagagcaaccccatgaacagcctgccccccgcggccg

SEQ ID NO: 34115 - DNA, 1577 bp, Artificial sequence
  DNA replication origin
tcacctctctgagcctctcagggacctggggaagacgaagtgaaggtgcccagttagtttgggagcacagagggggccgaaatgcggcccgggtgccgtggctctcgacaaacactacagcaagtgacccttaggttagatgggaggtgggaccggcaggctgcacagccccctgcttctgggtatgcctggcagccagctgggtgggccggggcgtgggctgtctctggtttatccggcggtttgctgcgcccctactatgcgccaccctgggagggttgggcttaggggcctgggagtggcccggggggaggagggcgccccacctccagcccaggaggggcctgccagggcctgcccctcggccgccgagtcagcaccaagcagccccggaaatcccacggaggccagcgcgggggaggagctgtgatgaaagatggggccccgggtgggtgtgggccgagcccaggggaccctggccggcaggggtggggacctggctggcgtggggccggggcttcctggaggaggggaacgaaaccgccacctccggaggcgtgtaccgtgtgtcgggcgcacagtggggcttcagcactcggggactttttattgccaagactttgtggcccccgccgggggtgctctggctgggcccggcctcccctctcccacctcggaggcagggtcttcggccctttccttaggggaggcctccaggaggcctaggtgggggcattggcgcagggcgtggccggcaggtggcttgtgttcctggagtgagggcgtgggtcagttgtctcagagcgagtttagtttccagggcgagggcagggccttgccctgggtgggtggggggaccggcccctccatcatttcctggcccccagcccctgggagtcagccctgccgggcatccttaggccaggactgcagccctctctgggccccggcattctcatctgtaaaacgcggccacagtcctctcacgggggctttccttggctgacatcaccccgggcctcgctgctttgagggagggcctcagtgatatttaggggggaacaggggcccaagagagggtcccaggctggagagggcagagactgggacccccggacccaacctggaactgggatcttcacactggcggggacctgcaggaggtcgctgagccacctggattattttgggcccatcctccaggccccaggaaagacacctcccagccactccagagcggggaccctggtcacccgaggggaggaacggcccagcaggccagggatagccatcttggggcgttggtggcctgggtcagaggtctccccccatgctggggtgggtaggagggcccgggcccgtctgatccggagctccatctgctcacacgctccccgcggcccagggccagacggcagatggtggcagggggtggacaccaccaaaggggactcctcggaggcttcccagggccgagccttgggtggggtcgctcccctcctaccctccctgctcccagcagccacatctgagcccaccgccccaccacaggccttagagtagacgggggtgctgag

SEQ ID NO: 34116 - DNA, 1519 bp, Artificial sequence
  DNA replication origin
gtcccgcccatgagttgggcgtcagatgggatccccctggcctcctcatcgctgcccccatccccgctgtcacacttcccactgggtccccacggccttcctgcctctggccctttaaggcccaggcaggaagcccctccccatttagggcaataaatggacacgtaaaatggccgagggcctgtttgctccatgtctggcccagagggaggcctgcgggcgagggcaggcgggcagggggcgggctggcagctggcagccaccccaggccgttggtgccccccgatcgggacactgcattcctgtcccattaaacccaggccgaggactgggccaggcggggcttggcaccaggtcagggcggggttacccgtcgggaccaaccttgcaacacaggccgctgggcggggagggggcgggggctgccgggtgcgggcctggcagccgcacctgcacaccaggcttacagtgtgaccttgggccggccgcccaccctctctgggcctgatctccccttccagcttcctcctcaggccccaccactcactcccttggtaggtgaggaggggactgaattcccggaatagcattcaggagcaaagttcccatccgtgaggggtggtgaacagcctggcaatgtgttttggggactggctctggcgcacattaggtccctgggctaagtttgctgaatggatgtgagcgggaccctgaccacagtggggggcccctttccactgttacgacccccatcccccaggagacagaggctcagagaggtctcgcatcttgcccaaggtcacacagcttggaggtgggggagccgaggcttgaacccgagctgctctgcacagcacatgaggggtgagaggtccctttggcctccttccctgctctccctgggcagagggttgggtgggggccctgatcccctcattagacggccccctgctccaggaagtgaccttcgggaaggtggcgggtggcagttacctgcccagccctcaccttgtcgtgtgaccttggggaggcccctggctcccacaccctgcactagcgatgcagcctcctctctgccggtcccccttccccggtcgcccacctccaggcctcagttcctgatgctccccgtgctggggtgcccttcttgggatgccggggtccttcctaggcgacatctgctgctccctgagccacgtcagggtgcttccgagctcacgacacatcccccgcagctgggaagtggcagctgcccagatcagagggctgctgtgtgacctcgactgggccgcctcacctctctgagcctctcagggacctggggaagacgaagtgaaggtgcccagttagtttgggagcacagagggggccgaaatgcggcccgggtgccgtggctctcgacaaacactacagcaagtgacccttaggttagatgggaggtgggaccggcaggctgcacagccccctgcttctgggtatgcctggcagccagctgggtgggccggggcgtgggctgtct

SEQ ID NO: 34117 - DNA, 934 bp, Artificial sequence
  DNA replication origin
cacccctcacggatgggaactttgctcctgaatgctattccgggaattcagtcccctcctcacctaccaagggagtgagtggtggggcctgaggaggaagctggaaggggagatcaggcccagagagggtgggcggccggcccaaggtcacactgtaagcctggtgtgcaggtgcggctgccaggcccgcacccggcagcccccgccccctccccgcccagcggcctgtgttgcaaggttggtcccgacgggtaaccccgccctgacctggtgccaagccccgcctggcccagtcctcggcctgggtttaatgggacaggaatgcagtgtcccgatcggggggcaccaacggcctggggtggctgccagctgccagcccgccccctgcccgcctgccctcgcccgcaggcctccctctgggccagacatggagcaaacaggccctcggccattttacgtgtccatttattgccctaaatggggaggggcttcctgcctgggccttaaagggccagaggcaggaaggccgtggggacccagtgggaagtgtgacagcggggatgggggcagcgatgaggaggccagggggatcccatctgacgcccaactcatgggcgggactgaggcccaccctgttcccacactctgagatgtcatgggccaggaagcccagactacagcccgagcccaggttccaagaggaagcttcatgacgacagtggaggggctgagcttcccgtcactgggggcaagcaaggccagactctcggaagcccatccttgtccaccctgccatcagcccaggctgcacctgcttagctgagatgcctgtgagaggccgaggtgacctctctctccctcccctgagggaggcctgcttgtcacctggagatacctgccccacccccactctcgcctgagcaggtggaaggct

SEQ ID NO: 34118 - DNA, 2545 bp, Artificial sequence
  DNA replication origin
actaaatgttggcggaatgcagccaggagttggcggcgaggcggggggaggcagcaactcctctccccccagtcaggcggcggaagtcacagaggtgctggtgcccctgccacccgcggcacccacctggctcacccatgggtggcgggctcggtgggcccccccacctccctgccagctgcctccggagagggcgtggggattccgtgtcagtgccccccgccccaacctcagaactggaccagggcgtaaccctgagcgtgccgctcccacactgggggtgcctccccaccaccggccgatcacttcctattggcaaactggtctgggagaggtcccggggaggccaggctggggcaggggcccaggccaggccaggcctaagcccagccctgctgctgccagggcctgagggcttcaggccgggggcgtttgtccgcgagggccacccgccatggggccccgagagcacctatcggcggggccggggcctctgtttaccaccagccatcgctgtggagacagagcttgggggagaagggggggcaggagccggccgctggaaaagcgaagtctaaggaaggaaagaagagccaaccgggacactgaaattttaattcgtgggtcagtccggggggtatttattattcagttccgattggctgcgtggcggccagtcagcacctgggcccgggcgggcagccacgcatcggcagaggcccgcgggcggccgcaggcagtggatgggtcctttgctctgtgcgggagactgaggcgcggccgaggcagagcccagcctggggcctggtcggaaaggttcctggggcgatcacaaatccctgctgggtgtttgtttgtttgtttgttttttccttttctttccttgagtccctctgacctatagctgggtccacctggtggcagatccccgttgccatatgaggaggaaaccaaggccgggaggggaggtcaaatgtgagcctggaaactccggaggttagagcaagcctcggagcaggtgccggtactaggcaggggagactgaagcgtagggggaagcagagagcggcccaaggtcactcaggtggggtcagagctgccccctgtgctccatccttccagctcggggcctgtccaaagtcccctcccactgtgtggtggcccaggggcgcctgcccacctgtctttaagcagggccggaggttggcagtagaggctcaactgcaggcacctgcctgcaaatggagtgtcaccgaggcttattaaaccctgtgtccgaagatgacattgaggctcagagagggccagcatggctcccaaggtcacacagcacgagccacagccctctcgcctccctgcctcaccgggcaggccctggctggcgcacgtgcatacgaggcccctctgcaatcctgccgagccacaaactcgtctcaccttggtcctcagaggcgggcagggctctgggttttatgaccagaggagaccgaggtcacctccccagagccagcccactgcagcccagatgctccaaggagggctcctcaagggttggaatgctggcacgcttgctctgcgaccttggatgagccccgtgacccctgcagccggggcgcgctgtgttcctggggctgtggagggtcccccagctgctgcctgcaaagccacccgtggtgtcttttctcctccgcggcggaaactcccaggtcagctcagggcatggcagagacctgagtgtggggtgtgggtcagaactgcgtgagacacctgcacccccacctgtcacctgccagaccataaactgccctgcagtagccctgggcaacaaggacaagaggaacgagcttgggtgggggtgagccttgggtgggggtgagcatggtccagtcctagcccagcccttgggtccaccccagcagtcactccccctctgccagcctcagtcttcccatccagacagtggggagatggtcatcagccctagagtgttgtctcgagggttcgctcagcggctcattgggaatgcttgttgagcgactactgtgcactgtgtcaggcccctgcggagctgtcttgagagctggaggggcagaggcccctccctgagccacccatgtcagctggactccagccctgccccaggctcctgtgtgagagctcccttgcaaggcagctctgagggtatgaggataagccgtccttcctctcagcccccagggtagggggatttcatctcctgctggtatccgggggccaggaaaggggatggaaggagccgtgggaggactagttaggcaggccagagccagacagacggcccgtgctcaaattccagttctgctgcgcgaccctggccaagctgctccccctctctgatcccgttccccgtttgcaaaatggggcacagacacagatcctgccttccagcgctgtgggtgccgtcacgtaccgtgggtctctggggcgattatcaaggcccagcctcccccagctgctccgaggagcggctctggcccttgggccccgagcgccgagtccagagccc

SEQ ID NO: 34119 - DNA, 1043 bp, Artificial sequence
  DNA replication origin
ctctgcgcaggggcggggtgcgggggggcgcgggctgtgcccccgacgcccggggcgtggcaggatggcagcgggggcggggagcgcggtgcgcacagcgaggagcgacgcgggcgtgtgggtcgcgcggcctgggctgccgggggtgggttgggggtgaggcggtggggatccccccgcaaggccaggccctgggcctccccgggcctcagtgggacttgccgcgccagggaccccggggggtggccttgccaaggacagcccgggtccgcggggctcccgggtccctaaatgaaaccaccaacctgccctcccgcgattatataaaggagtcgcctccaccccgctgcgctaggggcgtcagcgggggaaggggttggcgaggggcggggagggcggttgttttcccggcttcgcgagttcccccacccggctgcgggccgcggggcgggacggggaccgggccctggacgcctggtccgcgcgggccgctccttggcacaagggggtctgcatggctcgcgaggggcggaggtggggagtggggaggcgttggttcagcgcgacttttttttttcccctgtccgtttctcccacttcctccccggtcgtgggagaggtccggcgggggacagggaagggggagcagggcacgagtggtgagaacgtcctggcccggcccggggagggctggctggtgcgaccgcgcgcctgggggggggggggagggctccaggactcagtttccccttcctcattcctccagacagagagagtactgacagctgctttagctgccgtttagtgagcgcttatccagtgggtgaccctgttccggggctcactgtgccttcattctaacacctaatcccagggtcattattatgttttattattatctggcattcttagtaccaacaccacctgacagcgggaaccaccaccggcctgggtgtagtgtacccagcctgtcctctgacttcaaagcctctcctgcgagagacacagtttatggcttcttcgcacaatttattaaaagcgcc

SEQ ID NO: 34120 - DNA, 864 bp, Artificial sequence
  DNA replication origin
agggggaggctcacagcctcaagagctttagagagctcagagggaccctagaacagcccagctgcccaccacacctagcccagaggtggcctcctctatccgagcacacagtcccgaaggtagaaaggctgggctttggatctcggacaaccggagaagcaggcgatgggcctccgggaaccccgaagaccccaggacaagccctcaccgtttcatctgcagcccactgcggcggaacagttcaaaggcccgaaagtgtcacatgccctggtggtcacttctgatttgttgggcgaggagaggtgacagaaccacccgccctgggctgggcctgctgcggacgcagggggagtgcagggcgtgtctcgggacctgctggggtttccaaccaaaccgacagcttggaaagccagcgcttcctttctgtggggctgagtctcagctcagctgccactgctgggagcccccactccctgaagcggggggacagggagaggatggtgccacgctggggaagaggcaggggcggccttcccgcggaggctacgtgacaggagcagtgtagaggaagtggtttccatcacggaaggccgaagctctgccttccacaggggcagagatggtggcggggaggacacagagggaaaccaggtggcatttcccttcttttttttcagtagccttgctctgtcacccatgccggagcgcactggcaccatcgaggttcactgcagcctcaatcccctgggttcaagcgatcctcccgccttaggctcccaaagcactggaatgacaggcatgagccgccgcccccagcctcactctccttccttttggtgagagccgccatcgcctgggggctca

SEQ ID NO: 34121 - DNA, 1122 bp, Artificial sequence
  DNA replication origin
ggggctcactgcaggtcttcatcccttgacccaaagggagaggcgagctctccctaagggagggccctgcgccctccagcctcggcgcccggcgatgcgggtcagctcagggatgtcctctccgtgctgggctgaagcaaagcccagcacccaacgccgaacggaagaaagaagcaggatggcgcggtttgctttttctctccctgttttgttttgtaacctaaggaagcagagcctctgagaccacacacagcagcgtcgcccgtccccagaggcaccccggccaggacgggcaggagaggagacccccgttcctgcatgcgctgtcgccccgccacggtgctctccgcaggggtgaggcaggagggtgggtggaggcgccagcctgtcctcagctggaagggcggggcatggacagggacggtgggcaggtcaccagcgggacgcagggagcccggccactgtcacacggcggtgcgcgtgggtgtgccgggctggttcagccgcagggttttacacaaccagccggcaaaatccacttcttccacctcggaccgcttgatgaaggtgtggttctgcaaggaaaggggagccgtgagcacccgggcctggagtcacagtaggacggggagggccagcgtctgcccagccctggcagatggtacgggacagaaagcaaaaaacagaggagaccctcccttccccacaggaagacgcactcggggtaggagagggaaagaaacccagaaaggggcagcggcgtgtgccaggcctgggaggggtctcaggatgctgcactccacctggggcggggacaccaccagcacggcagcctgcgctcccaggggagggtctacgctcgcgcaagcccagggtcctccggccgctgtggacaccggggccggatcattctctggcgtggggccatcctgggtactgcagggtactgagcagcgtccctggcctccacccactccatgccaggggcttccccaagtcgtgacaccacaatgtcctcagccattgccagggtcccccggagcaggacagcccaggcaagaacgggctgttccacagaactccgcgaagagcattgtacaggcaccgtcccactcgccagca

SEQ ID NO: 34122 - DNA, 1497 bp, Artificial sequence
  DNA replication origin
tgggttcttgatgaggctgggggttccaagaggcaggaccgggaggcggtggaggagacaagacagggcagtcagctggtggccccggggcacccgcgtgtgggccgtggtcggagggggcctggatctctccgaccagagagagtggcacagagtggctgctctgttctgcctcctggcagaggacgagggatccacctctgcactttggtgccaggggcaggacaccccccagcgggagggtgagagggaaagagggtgggaaaccccgcctggtgggtcagaagcctggacgcaaccccagctaactgtctaataaaaccccaggcccggggcaacatcgccggagcgcacgccaagggcccggggcaactccggcaccaggagtgcggtgccgttccacggcgtcccgagctcacacacatggaccggccctgtgggcagcggggtgtccgcagctccttccccgtggtctgcggcacatgcctgtgaagcccacgccacaggtgctgctgggtgcttgggggcaggagaatggagtggggctggcgaccctcccagaacctgcgggcggatcccggggagcccacagtcagcacaccaggggtccggggaccagacagaggcttctcctgctgcagacagtgagctggggacaccgtcatgtgcacagggcctgcaatcctgcttcacccctgggctcacggacaggatggcatggcagccgggagctgcagccccacagctctgggaaaaggaatctggcttcccgttgggctgagtcctgcctaacgctgcactgggattctggatgggcaggctgggccacgggccccacccaggacccggaaggagtggcacatctgggtcccggccaggggtgtgggcagcccggctccacctaccatttattgacaaactcctggaagtcgggggtgaacacaccgttgggcagcttaggaggtggctgtggaggagaacagagggtggggtcagccctgggcatcgtcagggaccctcggctgcagccctctctacccctcactgtcctgtccggtcacccaccctgcaggcctggccgacaccacatgccaactgggctgcaccctgtcagaggtggccttctcccgaaagctctcgtttgagagtcacggctgcttagagggaaagagtggggtgcgtcccccttttatcaacaggacaacctctcgagtgtcgtcacttgcttccttccccagtgtcactggctgaaggatgagctttgggactgggccccacagagggacatctggatccaaagttattttgttttgagacagtctcgctctgttgcccaggctggagtgcaatggcgtgatcttggctcactgcagcctccacctccggggttcaagggattctccagcctcagcctcctgagtagctgggatgacaggtgcccaccactgcgcctggctaatttttatatttttagtagagacggtatttcaccaggtt

SEQ ID NO: 34123 - DNA, 1745 bp, Artificial sequence
  DNA replication origin
gtgcgtcccccttttatcaacaggacaacctctcgagtgtcgtcacttgcttccttccccagtgtcactggctgaaggatgagctttgggactgggccccacagagggacatctggatccaaagttattttgttttgagacagtctcgctctgttgcccaggctggagtgcaatggcgtgatcttggctcactgcagcctccacctccggggttcaagggattctccagcctcagcctcctgagtagctgggatgacaggtgcccaccactgcgcctggctaatttttatatttttagtagagacggtatttcaccaggttggccaggctggtctcgaactcctgacctcaggtgatccacccactgtggcctcccaaagtgctggaattacacacctgagccaccgtgcccggccaaactgggtccacagttttaagcccaagcactggggagcctggcctgacacacgtccccggagcgggagtggccgtgtaagcggtgccagcagggcaggggcaggcctttcccgcgcaggggcaggggcgggaagaggcgggggagaggtcgggggatgtgctcactgggcatgggtgtggctgctaggtgcagggagagctgggtcaccagggccaccccacctggctccgtcatcatctcgccacccaaccccaggcctagcccagtctgcaggcagctcaaatgcccgtttctctgccccagctccaaagggccaccaaagacacagaaacccacagaaggcccagggaggtggcccggcctggtcacgtggccaacaggaccttggggtgcagtcctgtgcctccctgacagctgcaggcctggaaggaggccgcgtccctccttgtgccttgttttactcatctgggcggtggaaaccctcatactgtggctcactgggttgttatggggactgacggagcaggagccaccccgggacctacaggtccttctaggctctctgggcctccttccaagaggcaagggccattcctgtacctttctccgtggaagcggggtgatttatgagtccacgcccacgggcgccaggacgctctgatgcagagacactgggccactgctcaaggggcaggctggctcctcggcctgagcccagggctgctggcacacacctccctctggactcagggtgagaggctgcggtgggaattctgggttcgtcttcataaaaaaacaatgcccttgggaaggagctgggcttgtgcagcacagtagaagatgggagacgcgacacacgtggaattggttcaagaattgcttgaacctgggaggcggaggttgcagtgagctgagatcaagccactgcactacaaagctagacaatgtctcaaaaaaaaaaaaaaaaattagctgggtgtggtggtgcgcacctgtaatcccagctactcgggaggctgaggcacgagaatcacatgagcttggaaagtggaggtttcagtgagccgagaaggcaccactgtactccagccttggtgactcttgctctggtcagagagagactctgcctaaaaaaaaaaaaaaaaaaaaaaagaaagaagaaagaaaaggaaaagaaaagccaaaaggcatcaagcacaaacctcgttcacaatatagtccaggagttcaaagatggccatggcaggccggctatccatcccgtgacctgcacagggagagagatggaggtgagatgggccgatggccacctcacttctgctggggg

SEQ ID NO: 34124 - DNA, 1201 bp, Artificial sequence
  DNA replication origin
gggttgggctcccagggggctgatcaccaccaggcgccctcctccacatgccagcctaaattggaggcgggtgtgcagaggcactggacaaagctcccctgcctgactctgggttccattccctgggacagctactccttgcctgagcctctagtgaattaaaaaaaaggcaaaaggaacaagaacattttttgagaagtcacacatttggctcggtgaggcttgccggacgtgccaaagtcatcacccctcctctctggagggcagggggagggacggtgctgaccgcaggcaaggacagccgcgtgaccttgcatggagctgctggcggtgatgggggcaggccccaagtgccactcaggacgggagactggctaggggtggctgacccctgtctgagaaccagctggccaggcctgggcttggcagctggactttcgccttctgcccgtcctgaaatgggcaggtgggctggggccctgggctggggatggtataccacctgagagttgggactgggagaggctgaggctaggcctgaggataaggacttgggggcctctccctgggatgagatcaagacatcccagcagtctggctggagaggaggaggtgggcttgccagtgctatgaaaatctccttctcacagccccaatccatccgggtaggaccacaaaacgtggcctgttcgtgtcataaaatactactcagcctttcaaaaggacccaggctctgacacgcaccatggcgtggatgacccttgaggacactgcgctccaggagagaagccacacacaaaacacagaaggccacacaagtgtgtgaccccatttctgtgaaatgcccaggacaggccagtccagaggcaggaaggggatggagagtgacagctgatggggacagggtttcctcttggggagctgagaaggttctggaattagaggtgatggggcgcagcactgtgactgaaaaccactgaactgctcacctgaaatgagttgtggggtgtgtgctttgtagttcggaaacatggttttaaaaccaaccacagtccgctacagggtcctttggggtctgacgccaccaactctccctgatgtctgactttaaaaaaaatcacaggaccctcctgtgattctgcaccaagcagggtccgcccccggctcttccctcaggcggtggaagtgtccgctcggccct

SEQ ID NO: 34125 - DNA, 1274 bp, Artificial sequence
  DNA replication origin
ccaatctccacttcaggactccctggaaggcttggcccgcagcacaggagcgtgtcacctgcagaatgcaggctctgtggcggccaattccttccacttttctgtgcgtttgaatgctttcgggataaaatgttggaaaatccaactgcccaggggcttggtggcaaagctgcgctcccagatccctccagctggcaacaacaggtgcagctgccccggacagaacaggtttggggtgctcactgcttccagctctgtccccggaaaccccaggaccatgggaggactgctgaccacagtcggcaccatccagggggacaggtggtgcgccaggggcagaggggaggcagctgctgaccctggcacagcaggccccgcgcagggcactgcgcgtccagaccggaagttgcagattcaggccgtaccgctgacggggcgcccggggggcctcggccgaggcgagatgctgtgaggctctccttcttccccgtcgaccacgggccggccaaagatggcctccagctctttggcgtcgggcggggggatggggtaccttccgacggccagctccaccagggacaggcccatgctccagatgtccgactgcaccgagtaatgtgtgccctgcaaccgctccggctgcagcagagccagggaggaaagagcccagaggggcgaggatggcagctggaacccgggaggcttgccccgttacagcccccgtcaccctctccatggctaatgaccgcagcaatggatagagagctgttacgcaattctacctcccggctcacccacccagggcctccctgcggcacttgctgaagaggcttccagcccgaggcctggagctggtgttgaccgcagctcttgaagagcctgcaatgctcagcacttttgggaatggatgatgggccccaggaagcaggggcctcctcctccacagctaacatctcagaggctgctccaaggctcaatttggcaggttgctgaatccccagtcgtttcctgaaagaccccagattccaattccttggtccagaaattaactaagggccgggtgcagtggcccatgcctgtaatcccagcactttgggaggttgaggtggaagcccaggagttaagactaggctagccaatatggcgagaccccatctctactaaaaacatttttttaaaagttagccaaggctgccgggcacggtggctcacgcctgtaatcccagcactttgggaggccgaggcgggcggatcacaaggtcagattgagacca

SEQ ID NO: 34126 - DNA, 2752 bp, Artificial sequence
  DNA replication origin
ccaaggctgccgggcacggtggctcacgcctgtaatcccagcactttgggaggccgaggcgggcggatcacaaggtcagattgagaccatcctggctgacatggtgaaaccctgtctctactaaaaacacaaaaaattagccgggcgtggtggcgagcgcctgtagtcccagctactcgggaggctgaggcaggagaatggtgtgaatccgggaggcggagcttgcagtgagcggagatggcgccactgcactccagcctgggtgagagtgtgagactgtgtctcaaaaaacaacaacaacaacaaaaacaaaaaccaaattacccagctgtggtggcacatgcctgtagccccagctgcttggaaggctgaggcaggagaattgctcccgggtgggaggcggaggttgcaatgagccaagattgtgccattgcactccagcctgggtgacagagcaagactctgtctcaaaaaaaaaaaaaaaaaaaaaaaaaagaaagaaacctggtaggcactgctagagacaaaaacctaagagagaattccaacaggaaggggagatctggccgggcgtggtggctcaggctcactgctagtggaatcccagcactttgggaggctgaggaaagaaggtcacttgagtccaggagttcatgagcagcctgggcaatacagcgagaccccgtgtctacaaaagattagtaaattaacaaataaaaaataaagagcaaggggaatccgaaaagcaggctcccaggaggcaccagctttagacgtgccttgtggcaagtggggagagctgatgaaggggagggtgcagctggggtgggactgtcccgggggtgctaacagccatgtaggagtgtgtgcccacgaaatagttgggaaagcctcgtgggaggcggggagagctgcgcaggagaactgggagggacagctgcgcaggagacatgggggtgagagctgagggggagagctggctggcagagctgggtggggagagcttgggggagagcagcagggaggagagctggaggggagagccagcggggactcacagccatgtaggagcgcgtgcccacgaaggagttggccatggagtcgatgagctggccgctcaccccgaagtcacacagcttgatctcccctctagagttcacgaggatgttggagggcttcacatctggaggcggcaggctgcgggtgaggggcgcccaacagttgcctgccggcccccggggctctggggagggcgggctgggccttacctcggtgcatgatctggtgcttctctcggaggtacgccaagccccggagaacctgcaggggagcgcggagggagtcacgggacaaggccaccagggcttagctcctgaccgagcccgggggtcagagctgagcagtcagagctggagcgagggagctgcggcaggaaccatttcaggctgtgaggagctcgctggggtggagcaagcgaggccagagacgagacagtgctgacagccctgtgctggcgtgtgcaagtcaaccccggttcccatggccgcagtgccgccgatgccactactgcctttgattcagagcacacggcttagccccagggaagctgagatggtggcccatggcccgggagtaggctgggctgccgagtttgcccacatcagcctgaaaggcagcatctggggtcccagggactgtgctaagggcccccagatgggacgggctaagggtgcctgggaaggacgatgtttcccccaggcccgccctggaagcagcatcccgagaagtgaagcaagcagcacaggcagtgtgacggcagctttcaactcggaaacgcgtgtctggcagcatgcgtcctgtgtcttaatccaacactggtatgggcaggcgggactcggcccctgctatggacaaggtgcaagctccaagaagcaacacgcacggtctgctgaaaccacacggctctacggagcagctgtgctggagaccgggcagcagagacgcccttggccccggtgacatttctaacagcaatggtgagtgtgtctggaggtcctggcgtcccacatcccaccccagagtctccctttcaacaagctcctgtcccctgcaacgtgccagctgccaacatccccctgccacgaggggcagaggggaccagtgtggcaaacagaggatactaagagtgaagagggacctataacgtcttcacttggcagatggtgacctcaggccccaaaagggacgtcacttgttcaagctccacagcaggtgggcacagccttggccactctctttctgcaggggccaccctaacccccaccacactgtgagtggctcccggaaccctggccgtgtggaagaggtccgtgcagagtgcggtgggggcgcgatgtgggtctgcggtggactcaccgcgatgctgactttccccaggatctcctcgggaatcctcttggcctctttcagcacctggtccagggagccgccgtcctagagggcacacaaggagtgagtgcaggctctgcgcaggtggccgggaagccacggatgcgtccccccactcccggcgagggggtggtctgcctcctgacgggaagcaggggccggagcccaactccacccacgggccaagggcagggcgtcttctgacagttctgcctttgggtctgaacacccacccacaaggtggggaaggaacagggcccagggttcccccgcctcccgtcccatcctcgaatcagttgcgtga

SEQ ID NO: 34127 - DNA, 2442 bp, Artificial sequence
  DNA replication origin
agtgaaaccccatctctactaaaaatacaaaaaattagccgagtgtggtggcgggcacctgtagtcccagctactcaggaggctgaggcaggagaatggcgtgaacccgggaggcggagcttgcagtgagccgagatggtgccactgcacccccgcctgggcaacagagcgagactccgcctcaggaaaaaaaaaaaaagaaagaaaaatgtgttcacctactacctacgtaacaaaattacagttacaagaccattttaaacatcacacacacacacacacacacacacacacacacacacacacacacacacggtagacgtgtatggtcatgcacagagtgagatttggggtcagcagtacacagctgcaataccccctgcaccacatcctgtctctgtgactcagacaaattgcttaccctgccagactttggtctttatagctggagatcagcccttctcaaccaggggcagttctccctcccaggagacacctggcactgtctggggatgtgtgtggttgtcacaactgggggatgctcctggcgtggagtggatggaggccagggacgctactcagcgccctgcagtgcccaggtcggccccaccccagagagtgacctggccccgatgtcacagtggagaaaggcggctgcagagagagcgatgctcctgtgaggcgtcttccaccagctcctgaggctgcagcacagcgctccgcccgccctcatctccggggagaggctctttgaattttctcactaaacaaacattgattgcggccccaggagaaacgaagacggaaggagctgtgctggggagcaggggttttagggttgcgtttggtgcgtctgtttggttttcgccaccctgcctctttcgagtcgttggtctctttctggtttttgtttttttgagacagggtcttgctctgtcacccaggctggagtgcagtggtgtgatctcggctcactgcaaccttgacctcccaggttcaagggatcctcccacctcagccttctgagtagctgggactacaggcgtgcaccaccacgcccggctgattttggtatggggtctcactgtgtggctcgggatggtctcaaactcctcagctcaagcattctttttgctttggcctcccaaagtggtaggattataggtgtgcgccaccacgtgcggctttttttttttttttttttaattgaggagtcttgctctctcgcccaggcgagagagaagtggcacgatctcgactcacagcaacctctgcctcccaggttcaagtgatcttcctgcctcagcctcccgagtagctgagattacaggcatccaccaccacgcccagctaattttttttatttttagtggagatggggttttaccatattggccaggctggtctcaaactcctgacctcaagtgatccgcctgcctcagcctcccaaagtcctggcattacaggcgtgagtcaccgctcccagcccatgtccggcctcattttaagtaattcttttaaggtagattgataaaaactgagaatagaagcagcttccacctggccctggctcactggagctcccgtcctggcacctcctcctgggctgtctgagccctggccatacctgccctctcaccctgtgtgtctgcgtcttcagcctggagctggtggatggagtcacgtgtatgctttagaggtctcaaagcgtgttgggttttctagaactgccttcggcctttctctccaagcctagctgggcagaagtggccagagagcggcaacccgggcacccctgagtcccaggatttctcccccggctcctcccacccatgtgaatgaaagccatcccagggaaggctgggcttttgcaggagtcctggagcagcatggtggggaaatccaggctccccagccagcctctccaggctcctccagcccgccctctctagcctcagttccactttcctctctgctgagcacagaagagacgcacgccagacggtggcagtgggaacttggcctgtcacccctgctgtcctgggggtggcctggcaggtgtgtccggagcctctgcctctgaagaggcaccttgggtggctcccagtgcctggggttttggcatttgggggttttggtccccaggtttgttgccaggcagccttgggcaagacatggaatttctgtttcatcatttatgacatggatgtggggccacacccggggaccagcctacccatgatgactcgtttccaggccctccgcaggatgcccggcacagtggcgaggagaccacaggctgtggggaggggccgaggttaccgtcacctgggctggcgtcactgggatccctcctgcagtccatgcaccccctggcccctggtcctactcggcctggcctttctgccctaggtggcagggacaggcgcagggcagacgccc

SEQ ID NO: 34128 - DNA, 2444 bp, Artificial sequence
  DNA replication origin
gggtcaggacgggaacaggaatgggtaagaccacctcaatgtggcaaaaagtccaccaaggagaatcaacccaggtgcctggggagcagcaacaaggaggtgacactggggccgggccttgaggaaggacagagtcaccatgaggaggagatgggggagggtgttccaggcagagggacaaagagccgcctgtcagcgggcacggaggcatgaaggagccctcgctgtgttcagggcagcaggaggctgaccgtggccacagcacagggcgtgtgtggggagtggcccctgctctaggcctgtgaccttgagaagcatggcagggcccggggcacggtgcccacctccccccgcccggccgctcctcaggctaagcgtctcccaccttgaccgcagccctggcgctgcctgcccctgcctgcccgcccctgcctgcccctgtagcgctggcttctcccctcaggccagcctgcagaatccagctccagacggtggcccctgggctactccactccctcatggtgaccccacaggccccagggccaccccagcaccccaggatgctctcccctccagccaggctgtaactgagaggtgctggtgctcactcccgttgcacaagggcctggtactgaagcttggatgttcacgtggaggttgggagatttactggaaaaggccacatttgttttcacaccgagcccttgaagcttggtgcgtgttttccatgttcagcacgtccggactgaccgcattttaagagcccggtagccacatctgaacgggggctgctgtcttggacggctcagttcctgaccaaaaacttcaaaggagccacagatgggtgacaagaagcaggaaagagcgcgcgttcggctggccgtcgcaagtcgtaatttaggagaggaagtggcggatgggctactgggaggaatcccagaggccttggaacccaggagctccgaacgtgaaatgaggccgtcggaagcgagaggccttctggaaggctgtagtaaatagcagaggcgagggaggccagtctgcacagggcggctgcggcgtgatctcagttttaatggttctgtaatacctggggcctgtcgagcgagcattccagataaacgggcagccaccactgagggtgtgcaaggggaaaggcagacagacagacagatggacaggaggggagggggcgttcctgagcacctgcaccctctaaagttcaccctgacaagcccgggggatgggtgtactgccccactggtgctgactgagcaagctcaggttcggagcctcggagccatgttcccagtggcattagctgctaagtcaggactggggctgcctcggggaacactggagcccgtattctttccaggacaccacagcccaggccgtgccagctctaatagctgattaaatgtggatggtgtcagggtgttaaaactaaatgccagacctggctcggaggtggagacggttgctacagaagaatgaggaatttgagccaggggtggggttgggggattcggagtaggaaaagagaggaaagagcttcactgagtgtcagcgagagcaggaggggaagaggaggaccgagccgccccccggccgccaccccgcaggcctggaatgatctcagcaacctcgtaaatcatggatcagaaactgacagctcccaagctggatgtagccaagagtcacgtgcagcccacactgcgcttccaaacatcctgaattaggtgttgtcaaaaattggaagagagccggggcagtggctcacatctgtaattccagtgctttgggaggctgaggcgggaggatcgcttcaggccaggagttcaacactgggcagcgtagcaagccttcatctctacaagagattttaaaaattaacacacaggctgggagcggtggccagctaggggaccgcagtgcagtggatctggaggctcagccccggcagctgctcccaagtccgagcagatccaagagggttcgaatccgattcaggcactgaccccacacagcctcggtttcttcaactgtaaaacgaggctgctgttcaattttaatgagaacacgcgtcaaaggtgttggcagcggcttcgactcaggtcgtcacttgtgagacagcagctggtactgtgaggtggccttgggcaggccgtgtgaccgccaccctggaagtaagctacagcggagtggaggaactcagaggcgagaacaaacactctcatctctgctatgagcatggacaattcaaagaagccccacacgcgtaacaagcagcaagttcttcacctatctccctggcccaggtaacgcggggacgctgctccaatgggagaggggtcagaggccacggtcaagccaaaaagacatttacaaaccagcatgacctcaaataccgagactgggccaggcgcggtggctcacgcctg

SEQ ID NO: 34129 - DNA, 2222 bp, Artificial sequence
  DNA replication origin
gtccctgtgggaaaagacagggcatggagtcactgagtagcagaatggtggtaggtctctgagtagtgaaatggggtgaacggtccctgaatagtgaaatcggggagatggtggggtccctgagtaatgagattggagtgaggggagatccctttggggaaaagatggggtttggaatccctaagtcgtgagatcaggccaaggagatgtccttgcagagagaagatggggtgcagggcccctgaattgtgagatggggttgagggggtccctgggaggagaggatgtgtcggtgggggcctgtgggggaaggataggcaaggggtgttctgcatattgaaatgatagtgaagcgagtcccttgggggagagatggggtgagggggtccctatgggggaaagatggggtgggagggttcctatgggggagagatggggtgagggggtccctatgggggagagatggggtgggagggtccctatgggggagagatggggtgagggggtccctatgggggagagatggggtgagggggtccctgtgggggagagatggggtgggagggtccctatgggggagagatggggtgggagggtccctatgggggagagatggggtgggagggtccctatgggggagagatggggtgggagggttcctatgggggagagatggggtgggagggtgcctgagccacaggttgagagtgcagcacctgggtggggaggacaggctgagaggtcttgggggggcggggagcggtccttttggggaatgagtccctgagtaatgaggttggcatgggatgaagagggcacctagggtgccaaggtggggcaggggggtcccttaggggagaggatggggtgaggaggtccatagacaaccagggaaaagggaagagaggggaggacagggggctcccagaagggtcaggatgtgggagaggggtgtcctagggggtcacgatggggtgggagaccctagaaaggtcaggatcgggggactttgggggggtcagggtgggagttctggggtatctgaggacaagggggtgtcttaggggtgtcaggacatgggggggctttagcggggtcaggatgggagttctagcgggttccagatggaggggtttctgctgggggaggtctagtgggatcaggacaggggttccagggggttcatgttgtggggggggtcaggttgggtcctcgggggtcatgttgggggattctgggggggtcaggttagggggtcctcggggggtcatgttgtgggggttctgggagggcagagcagggggtcctaggggtctcatgttggggttctgagggggtcaggatggggtcccagggaggtcaagatgtcaagatgggcatctctgagagggcatctcctgcttgtggcggtgcccagtgtgtggagtccctgaagctggaagtgtgaggagacagggaagccagagtgtgaggaacgaggaggcgtggggatcaggggaccctgctggcccctgaaagcagaggtgcagattctgaagtgagtggaccggaaaacccttgtgaggggctgacccagtgcagaagctttgaggaggtggagggcgaccagaggcctgggtgaagggatctgagaaaggggtatgctggggtccgggtggcgtgctggcagaatcgcactgctccaggacgagggaggggactgggtgttgggggcacacactggtggggtcatgccagggtgatctctgcactcccgttctgcaggccgaggcagggcagggcgatccccggggcccttggctggggtccgggtgccgtgcctgcggtgtgacccctcaagaaccaggtgtcagggactgtggcatgtctggtggcctctcccgcttgggggtcggccttctgtgacccagatgaagactcttgatgccaatgtgtgcaagtcaacacgggcacagccagacacggggacccgttcctcattctctgcacagaactcgcccttcacatttctcttccgtgtggggtttgattcccatctcttgaaggattcccccaggagaggaagctggctgtagggacgccaaggttttgttttgttttgtttaataaccacagttgggttgccagtaaatttaagatggattagtcagctgactccagaatgcattttcaatgttttgagcagtacttgagaccttccaagtctgccatcagaagtgttc

SEQ ID NO: 34130 - DNA, 1706 bp, Artificial sequence
  DNA replication origin
tcccctccccctgcctctcggactcgggctgcggcgtcagccttcttcgggcctcggcagcggtagcggctcgctcgcctcagccccagcgcccctcggctaccctcggcccaggcccgcagcgccgcccgccctcggccgccccgacgccggcctgggccgcggccgcagccccgggctcgcgtaggcgccgaccgctcccggcccgccccctatgggccccggctagaggcgccgccgccgccggcccgcggagccccgatgctggcccggaggaagccggtgctgccggcgctcaccatcaaccctaccatcgccgagggcccatcccctaccagcgagggcgcctccgagtgagtgggcaggggtcagccggaggcttggggtgcacggggcagggagccctcggggaaggacggggcgaggggacgggggttcgcgaggagtgcacgaggcaggggggtcacgggggaggacggggtgagtggtgcacggggcagggggttctcgaggggaggacagggcaggggaccctcgggggaggacggggcagggggccctcgggggaggacggggcagggggccctcggaggacggggcgaagggtgcacggggcaggggggtctttgagcagtgagattgggcgaggggaggtccttgtggtggaaaagatggggtgtggggttcctgaagagtggaattgggataacgggagtctctgagtagtgaagttggggtgaaggatgtctctaagaggagaggatggggacaggggtccctgagcagcgaggttgagtgaggggaggtccctgcagtgcagaagatggggtgtggggcttctgaaaagtgaagctggggtgaggggagtccctcagtaggaaaatcggaatgaggggtgtccccaaggagagaacaggatgaggctccccaagcagtgagatcggggtgaggggtatctctaagaggagagaacacagtgtggggtccttgagtagtgaaatgagggtgaagagttcctaagaggaaaggacggagtaaaggttgccgtagtcatgagatgagggtgaggggagaccctgagtagggaaatcggggtgcagggcattcctgagaggagaggatggggtgtggggaggtcaggcagcccctgaggaggaaatctgggcaagggggctccagaggggagaggatggggtgaggggtccctgagtaatgagactgagatggggtagggtccctggtaggaaaagacggggtaagggtccctcaataatgagatagggccaagggaggtccctgtgggaaaagacagggcatggagtcactgagtagcagaatggtggtaggtctctgagtagtgaaatggggtgaacggtccctgaatagtgaaatcggggagatggtggggtccctgagtaatgagattggagtgaggggagatccctttggggaaaagatggggtttggaatccctaagtcgtgagatcaggccaaggagatgtccttgcagagagaagatggggtgcagggcccctgaattgtgagatggggttgagggggtccctgggaggagaggatgtgtcggtgggggcctgtgggggaaggataggcaaggggtgttctgcatattgaaatgatagtgaagcgagtcccttgggggagagatggggtgagggggtccctatgggggaaagatggggtgggag

SEQ ID NO: 34131 - DNA, 814 bp, Artificial sequence
  DNA replication origin
ccggcttcctccgggccagcatcggggctccgcgggccggcggcggcggcgcctctagccggggcccatagggggcgggccgggagcggtcggcgcctacgcgagcccggggctgcggccgcggcccaggccggcgtcggggcggccgagggcgggcggcgctgcgggcctgggccgagggtagccgaggggcgctggggctgaggcgagcgagccgctaccgctgccgaggcccgaagaaggctgacgccgcagcccgagtccgagaggcagggggaggggaggggcggccacaagatcgcggaccggcttctcgcgataacgggatcgggagccgcgatggaccccacccccagccgccgcgcctgcgcagcagcacaaggccgcctttcggaggggaaaggggcggagaccgacgcgaggcggtgccgggaccgggcgccctcgcttgccttaccacggcgcgtgtgcccaagcgcttggggcatgaggcgcgggagcaggggaggagacggagggatgaaggctggggtgatggtcgtgcacaggtgggcagggtagccagactcctgagagcctgtggtgccccaggctggggctgagagaacccgtaagaccccagaacagtggacgagacccacccagagtccatttaatctttttggcaagcgtggacacacgcccctagcccccaccgccttagagtgtcagttactccccctccttcatcagaacaaggccactctaaaacatttttaaaatttattttaattgacaaataaaattgcatatattactatgcgcatgttgaaac

SEQ ID NO: 34132 - DNA, 1489 bp, Artificial sequence
  DNA replication origin
ccagcacccggcacacagcaggtgctcaataaataacagttacaggaatgaatgaatgaatgaattctcaagcacagtgtcctccattctttaagaagggcagagcgagtcccccaaactcacaggatttggaggccctggctccagtgttctgtcttcacccacccctctgagagcagaggctggaactcctgggatccacccaggacatcagaggagagttggatgcctggagggtcaggtcctaatcaatgtcatcgcccgtgaggccggccagagtccccctgtggcctcccagcctctggctggcccctggcacacccacatcacaagggttttactcactgcctggctgtattacaagggagggaaggggaggagggggaggaaaaggaggaggaggaggagggagggaaggggagacgggagaggagaggaaggggaggagggcaagagggaggaggaggaagggaggagggaggggggaaggggaggagtgggaggaggagggagaagagaggaggagggggaggagggaaaggaggagggagaggaatggggaaagaaggggaggaggggaggatgacgggggagtggaaggagaaggaaggaagcacggaggagtgggaggaagaggagaaggagaaggaagggaggagggagaggagaagggggagaagggagaggtggggaggaggggaagagggggagaagggggaggtggggaagaaggaggagggtgagagagaggaggagggaggaggctgaggaggagggagaggagggagagaaaaagaaggagggagaggagtggggaaggaggggaggatgagagagaggatggggaggggaaggagaagagggaagggagcagggaggaaggggaggaaagagaaggggaagaggagagggaggaggagggaaaaggccaaggaggagggagcagggaggaggaggaaggcaagaggaacagaatggagagggaggagggagaggaggagtgggagctgctgccctcctggacccactcactttttccaccgggaactggcccacaagggtggtgctcaaggaccccagggcaagtccccccgaccccgcatctgtagcaggggacctgggtgttgtcagttctcctgcctgactcatgcaatggccaagtgagtcacatccccttatcagctcctctgtcctcctgtgcagaatggggactgtccttacgatcagagctgtgcagaggccaaagggctaaggcaaccaggaagggacagccgggcatccgctgggcgtcacgggactgcagtcagatagatttcttttttcttttttttttttttgagacggagtcttgctctgtcgccagtctggagtgcagcggcaaaatctcagctcattgcaacctctacctcccgggctcaagcctcctgagtagctgggattacaggcatgcaccactgcgccctgctaattttgtatttttagtagagac

SEQ ID NO: 34133 - DNA, 756 bp, Artificial sequence
  DNA replication origin
caagaccctgactttgggctgtgcttgtcagcaccatgcctggtgcctgagccacctgccggggttgcatcctagctctgtggttttagctcattgctcaacctgacaggactgtttcacgatctggaaaatgggctcccaatagcatccacgtgaaagcatggaaacacctagccaagggagacacgtgtcctgagtttgagtctgggcccagctccaaattgctgtgtgaccttggacaagatgccagccctctctgggcctccatttcctcacttacaggaagggccctggaacaaggtgagggcggtgggcagagacacagcaggactcacccaggtctatggtcacagaggcttcaggtacttggatcactggccctggggttgtggtggagcaagagttgccaggatgataggagaggcagggccccttgccaggctgggcaggatggcagccggcgggggaggtggctggtccgctgcgtggaggggtgtcctgggggtcggaggggaggtcttcggagatgccactatcactgccttcgggggaccagagtggggagctgggcagtgagtctccagagcccaggatggagctgaggaagtcgtcagagtcggggtttggcaggacctgctggggtggacagggaggggtagtaggaattaggaagtgctcactctttttagattagtgtgtggccccagggaaaccagtgaccctctttgggccttaggtgtccttcccttctccaag

SEQ ID NO: 34134 - DNA, 1279 bp, Artificial sequence
  DNA replication origin
gaccccacctccaccttgtcccctgtgatgccccccttccccaatcagtgttctccagaactttgcacaacgatgctgcctcccgcgtggctgctgatgctgtgccaggctccgaggccccaggaccccgacccgaggctgacacaacccgagaagagtctccaggaagccccggggcagactggggcttccaggacaccgcgaacctgaccaattcgacggaggagctggacaacgccaccctggtcctgaggaatgcaacagaggggctgggccaggtcgccctgctggactgggtggcgcctgggccgagcactggctcaggacgtgcagggctggaggcggcgggagacgagctgtgagccccgccaggactatgctcccaggcccctctgcccaggggtgccttggggatgctgcactgggcagctacccacctggggatgggacgtgaggccaagaccccagcagagatgccagaatgggggaggcacagctcatagccacacacccagggcctgactgaggcccacgcaggaaccgacactcagacacaaggcaaagagggccacaggacccgggaaatacacacagagccaggagcagaagcaaagagcagacacacatacagcctgaaacagacctggacagacagacacagcctgaaacagacccggacagacagacacagcctgaaacagacccagacaaacagacagacagacacagcctgaaacagacccagacagacagacagacagcctgaaacagacccagacacagcctgaaacagatccggacagacagacagaaacagcctgaaacagacccagacagacagacagacacagcctgaaacagacccggacagacagacagacacagcctgaaacagacccggacagacagacagacacagcctgaaacagacccggacagacagacagacacagcctgaaacagacctagacagacagacacagattgaaacagacccagacaaacagacagacacagcctgaaacagacccagacacagcctgaaacagacccggacagacagacagacacagcctgaaacagacccagacagacagacagacacagcctgaaacagacccagacagacagaccgacgcagcctgaaagagacccagacagagagacaggcagacacagcctaaaacagacctggacagacaggcagacgtagtctgaaacagacctgaacagacagacagacgcacacacacaacagatgcgcagcaactccccgccc

SEQ ID NO: 34135 - DNA, 1166 bp, Artificial sequence
  DNA replication origin
gggagggaccacggagggcaggtgtaacccctggcctggagcacagctctcagagccctgaggctcccggggacagaaacaagtaacaaagtgagaccacgagagaaaaagaatccacagtttctacaaaaagccccaccctccccaagcaccctggtcagctggggaccgccttggccttcacccttttggggggtctgtggggggcagggctggtgggccgctcccgtttggggctggcgggctctgagccgttgtgctgggcgcagggctcctgcttggggccggcggggatagagccgttgatccgggtgggagattcctccttgggctccagcttgggggtgggcgggcggggcaggggtggcagcgccctctccagcacacgggggccgtcccaggcggggatctccagccccaggtgcttcatgagccgggtcatgacctcgtcaacgtagccatggatgcggaggtcagcatggcggtcctgccgaggggcgggacgggtcaggcgtgggggacagagggtgcatggtggccctgggcaggggtaggctcagacacctacgtgcttggtgggctgcaggttgacgatgaccaggcggcctccccggcgcttggtagccagcggcaggttcccgctgggccggatctgcagcgatgtacccagcgtgatggacaggtcggcgttcctggggccggggagcgtgggctgagcctgatgccctgctcctgccaacatcccgagccagccctgggggccggttcacacctaggccatctgtgctcaccggggcggtcaaggccagccccactcccgagtcagcctttgggatcccgccctgccctcctctgcggtccgttggcggggtcattgatctgggcgggcccttagacacttccggggagtatcacagtgtggtaagagcttggacacctagggtgggaccctggctcggtcacctcccggctgggcagcactggatagaggagacacctggcggaagccttggtttccttgtgtagcacccacccagagccatgaggtgacgagtgtgtgtgagtgcgtgtgtgcagcccctggcctggcccacctgctccaggaagcctcccctcactgcctgtgagcctcagccactgtcccatgctggagctggctgtgtttc

SEQ ID NO: 34136 - DNA, 941 bp, Artificial sequence
  DNA replication origin
agcactggatagaggagacacctggcggaagccttggtttccttgtgtagcacccacccagagccatgaggtgacgagtgtgtgtgagtgcgtgtgtgcagcccctggcctggcccacctgctccaggaagcctcccctcactgcctgtgagcctcagccactgtcccatgctggagctggctgtgtttctgctgtcgtcccgccccgccccaccatgggctccctgggggtggggggtcagacctgctggcctcatcggcgagtgccaggtcccggtcgggcagggagtcctcccagtctaggatggtgtccctcagctctcccctgcaatgaggaagctgaggagagtcctcaggggcctcgcagcctcccctggagcccagggcatgggtgggggtggctcacctgcaggctcgcagcccccttgccttagccacggtgcagagccggcccgtggccttcaggcccatggtgcccacgactgtgtctcggacgtactgcctgtgtcagggaggaagggggaggatgggaccaggtgagctcccatgggtgactctcgcactgtttctagggtgacgttctcccagggaggtggggggtggacaggtgaccagaactagcacccagcgacacggaacgagtagccttccatgaataacgggctgggatgctgctcggtgcccggagcacagaaaacaaagcaggaaactgtcccagacagacgaaggggctcgagagacaagacccagcatgggatcccggaccaggagaaacaggaacaattggagcatgggggcgacaggccgagtctggattcgggattagagaaggcgatgtccactttacttttcctgactttaatcgttatactgggccgggcgtggtggctcacgcctgtcatcccagcactttgggaggctgaggcgggcagatcacaagg

SEQ ID NO: 34137 - DNA, 806 bp, Artificial sequence
  DNA replication origin
agatggagtttctctgtcgcccaggctggagtgcagtggcgcgatctcggctcactgcaacctccgcctcctaggttcaagcgattctcctgcctcagcctcctgagtagagtagatgagactacaggcacctgccaccacgcctggctaatttttgtatttttagtagaggcggggtttcaccatgttggccagtctgctcttgaactcttgatctcaagtgatccacccaccttggcttcccaaagtgctgggattataggcgtgagccaccatacccggcctgttagtcactttattccaccaacatttatagagcacttactgtagctcaggcactttctaggtactaaggccacagccaggagcaacacagattaaaaacccctccttctagtaagggagactgactaggggttgcatggaaaccagttggccaagggaggcatcactgtcactgaagtgacatctaagccacaagttacaggaggtgagggagggagccatgtgggtatctgggggaagagcattaaagggtgtggccctgaggcgggactgtgcctggtgtgatagaggaacaaggaggagacctgtgtggctggagcagagtgaggcagggagagggaggagaagagggcagggagggggcaagggaggtagtgcagggcctggtgggccgtgggaagggctagggctttgacaaggcaggtgggaggcatggaaggttgtaggaagaggaggggcatgaggacaagctgccttttccaatccattttcctccctcaggcaagacagggacagctcag

SEQ ID NO: 34138 - DNA, 2054 bp, Artificial sequence
  DNA replication origin
cactgtggccgggagctcggggcactggagctgcaggaggtaggggaggaaggaggtgggagaggcccaggacggaggatccccttatggccccaggcccctgagcccttgtatgtgggagaaagaagccgtgctgagtcctagccaggctgcggagctacccaggtaccctgacacacacatgcactcgttcacccacgcacttcccacttgccggcctgtgccctgcctagcttcctccaaggcaggtgctcaacatcccacccggccatcaggcccttcttatttaccatcacctcttccagcaagcagcttcctaaatttagcaggcgtttctccctcccccaagcccacggattgtcttctcccaagcagcctgtgaactcctctgttgggtgtcttattaccccctgctttgggtgtgattgaatcctccagtcagaggtagaagaaaaaagggtaggtagtgagtgaatgggcaccggtggaggggtagatgaatggatgggtgggtggatggatggggggcgaataggtggattggtggtttggtagatgggtgaatgggtagatgtatggatggatgggtggatggatgaatgggtgggtgattgggcaaatggatggagggatggataagtggatggatggatggatggaaggatccatggatggactggtgggtgggtggatggatgcactggtgggtgggtgggtggatggatggattggtggttgggtgggtggatggagggatggataagtggatggatgagtggatgggtgggtgggtggatgggtggatgggtgtgtgattgggtgggcagatgggtggatggatggatgcttgggcagatggatggatgggtggttgggtggatggatgaagggatggataagtggatggatgggtggatgagtggatggatgaatggtgggagttggtaggtgtttgggtgggtggatggatgtgtgggtgaaatctgattaaagggtgatgaagaaccatgagaacatgaattgggtgggtgggtttgtgggtggtggccagtgggtggttatacagtgcttaggtgggaggatggatgtccaggtgagtgcataggtggtaaatgcgtggaagggtggcttggagaattcacgagtagataggtggacaggtagaggccatgccaacccctactccttggtaagaggcaaatacagattctccatcacagaaatccctttcacacatagggcctcacagtcacacccctcaaaaaacacaccccctcaagataggcctgcctgacctccgtgcctgcccatgcggaacgtagaacaggcccaggtggacagaagtgcacgtgtgcacacgccccacactcaacgtcacacacatgcatgcagccattgccccagacctccacccactatgggtgaattgctgtcacatggaggttccctctgactatgtagcaaacatgcctctgtgctgagagccgtcagccctggcttcagtccccagggagcccctgactgttgaaaaggacagaatcagcccagacccttccagcccatggagccaggggtgaggcagaggcagagacccagccagggtaggcgggaacccaatttggggagttagatctctgcttgggaacaagaggcaaagctgataagagcaagggattttggaactgggctttgaaggatgagtaggagttcagagaagaaaaaagaaaccattctaggcagaaataactgcacaggtaaaagttaggagaccagaaaaggcttgatctgtttggaccgcaggaaataccagtgagatgcatttatgaagcccctcatgtttggccaggctctgtgtagggaccatgctgaaaactgaccatgagttggtcaagaaaggatcatttctgtcactgtatagatgagggaagtaaaacagagagggcaagtaaactgccaaaggacacacagcaggtaggagatagagcaggtctgtgtcttgctctaggggccaggactggtcaggaaggaggaagcggtccttttgaggagggcga

SEQ ID NO: 34139 - DNA, 1080 bp, Artificial sequence
  DNA replication origin
cagagaagggttagcaaattttttcttaaaaggccagaggattaatatttttggtttgtggtgcagaccagcctcagctctgccattgcagcctgagaatagcctttgactgtctacacttttttcttcatatcctgcatgtggcatccaacgatctacaaatgaatgggcagggcttggccccgaaaaaactttatttatggacactgaaatgtgaattgttttgttttgttttgttccgagatggagtctggctctgtcacccaggctggagtgctctcaggttactgcaacctcagcctcccactttcaagcgattctcctgcctcagactcccgagcagctgggattacaggcgtgcaccaccgtgcccagctaatttttgtattgttagtagagacggggtttcaccatgttggccaggctggtcttgaactcctgacttcaggcgatcagcccaccttggcctcccaaagtgctgagattgtaggcgtgaaccaccgcacctagccagaaatgtgaatttcatatcatttttcacgtgtcaggaaggatgattcttattttgcttttctctcccccctccaacgactcacacgtgtaaataccattctctacggaaacaggcagtgggcaggatctgggctgctgtgagcagtttgcattttaagctgagtgaggtctctggaggcttttgtgcaggagagatgagatctgatgcaggtttaggaagctgcctctggctgctgggggagaagggacaaggggacaaggtcagaggctgaagaagaaagatgcatcccagaggcagaacctgcagtgatggggctagactatggtggtggccgtggaaggggtgagaaggggcagaacaggacacagtgtgcagccagtgggcttggccggtggaccgagtgtggggcaagagagaggtgtcacggtgatgccagggcttggatgaagcctggagggctgacagtatccatggtacacacctcagtgggctccgaggggcatttgctctgattgattgattgatttttttcagatggagtctcgctgtgtctcccaggctggagt

SEQ ID NO: 34140 - DNA, 1530 bp, Artificial sequence
  DNA replication origin
ccgcgtcctcctcatcctccaggcgacaaggtcaggaggggccggggcggcgccccttccctcagcccccagcccccagccccctacctgggtcttcccattccatcccgtgggggagggggctggcgaggagggcaagggggagggggcggcaccagggagggcgggaccgggcgggcgggcggggcggggagctccggcagcgcccagccccgccctccggccgctccccgcggtccctccagaccctctggccgccgcctcctcttggaaccccgtgcgccccccgcgccccgcgccccggacgccatgaagcagctgtgtctgtgcgcagccgcctccttcgcggtagggcccggggagggggcgcaggagcgggcggggcgcgggtacctcctctcccctcccttccccgtccccggctgacctggaccacccccccattccagacccgggaaagatggtcggcggcggggggtgggggggaacagaggttggggcagcttttgggggaatggaagagacatttggggagacatgtggacacgttttggaagactctttgaaacaaatggggacatttaggaacatttagagggcattggggggtgcagttttgggaaaacattttggagacagatggggtcattgaggggacaacttggaagctattttgggagagccgattttgcgaagaggtaatgatttggagaacagtttgggagaacatttgagggatgtttttggaggatatttttgggacatgacggtatcattgggaaggatggttttacagaacacttcaggaatttgggggagacatttcgtaatgcatttcaggctatagtgttgaggggagaagcctcgggatgtttaggggacagtggtggcatttcagggcagttgtggataaacagggcagaggatggtcctgagaggcatttaaaggggacttttaggggttcagatgggactttggagggtagtttggaaaagactcatggatccatttgctgggggcgatgttgcaggggtggctttcactaagggatgaattgggggacaactttttttattgtacagagtgggtcttgctgtgttgcctaggctggtctcaaaattcctgggctcaaatgatcctcccacctcagcctcccaagcagctacaggcatgagccaccatgccccgctgatgatttttattttttgtagagacggggtcctactatggtgcccaggtttgtctcaaactcctaggctcaagcgatcctcccaccttggcctccccagatgctgggactacaggcgtgagcctccatgctcagcccaggggacaacgttttggaaatagatgccagggggctgctcaggggatgatgctggtggtgggcttttgttggacaactggggtgatgggcctgggggcagatgctgggggtcgcaggcttgggggacactgtctgaggaccccctcgcccaggaccacctccccctgcagctgcggctcagccccactgaccttggctcctg

SEQ ID NO: 34141 - DNA, 948 bp, Artificial sequence
  DNA replication origin
ggctcctgcccgccctgcggcccctgccccatcccgaagccggcagccagaggcaggcgccaggcaagtgcccaggggcaggtggtgagagcccggagcccctgtcgggggcgtggggaggggacagcagccaacactgccccacgcacttctgggcgtgccctgcagagtcaagactggggcaagagtgacgagaggctgctacaagccgtggaaaacaacgatgcacctcgggtggccgccctcatcgcccgcaaggggctggtgcccacgaagctagaccccgagggcaagtccgcgtgagtgcccgcgacccgggagtgagatggctgaggggtggcaaccttgcggctgaacccttgtctctcacctccaggttccacctggcggccatgcggggtgcggccagctgtctggaggtgatgatagctcatggcagcaatgtcatgagcgcggacggggcaggtactgccagctgggccccggggagggaggaggaactaagcccaggtgcccagcctgagggtccagccagaccctgctcccaggtctcaatgttccccgctgaaaaaaggggaggctccctctggtgctcctcccctgcccccagggagacacacaggggcatgttaggatggggtggccaaagatagagactgtggctggcaccgagcaaagccagtggacagcttgtggatggggagtgactaggattcaggtattggttcagttggatggggaagtagctggcatggggaagtagctggggcttgggggatagctgcaaagtttctggggttttgttgttttgtttttcttttttggggggagggacagggtctccctctgtcacccaggcttgagtgcagtggccatgatctcagctcactgcagtctccatttcctgggctcaagggatcccctccaacctcagcctcccaagtagct

SEQ ID NO: 34142 - DNA, 1286 bp, Artificial sequence
  DNA replication origin
tgttaggatggggtggccaaagatagagactgtggctggcaccgagcaaagccagtggacagcttgtggatggggagtgactaggattcaggtattggttcagttggatggggaagtagctggcatggggaagtagctggggcttgggggatagctgcaaagtttctggggttttgttgttttgtttttcttttttggggggagggacagggtctccctctgtcacccaggcttgagtgcagtggccatgatctcagctcactgcagtctccatttcctgggctcaagggatcccctccaacctcagcctcccaagtagctaggactataggcgcacaccaccatgcccagttaatttttctattcttagtagggatggggtctccctgtgttgcccaggccggtcttgaactcctgggctctaagtgatccttccacctcagactcccaaagtgctgagattataggtgtgagccaccatgccaagcctggggaagtttctagaaagtgactgaggcagaggaagaactggggcttgggagataactgggaccattggacgaactaagctttgaggtgcatctgggatataggagtatccgagataaaggaagtgactgaagggaactgcttggagtttggaggaggaactggattcatgggagtagctgagcttgcaaagtatctggggcaagagaataacaagtagagtttggggatatctgaggtatatgggatagctgggatctaggagtagctggagctgtgggagtagcttgagctcttggagtagctgggttacgaggagaacttgtatgtatgtatgacttaactggagacctggggggaataactgagataaaaatgtgtggccaaaaggagtagttggggctcaggaggcaactaggcatggggacacagtcaaatctgaagctttagggtcacaggcatggtgggcagggaatatggaatagctggggattcatggagcatcagacagggacagagttggcatttggaagaggaagggtatatggattggcaagaacatatacagcaactgtgggttgtgaagggcagagctgaaactttggtgtagtggaccctgtagagtatctggggacatggggagtagctgaggcaatagggcttgaggaataggtgggtgtggacagtcgctgagatgggattgtctggaatacagactagccatggcttagagagtctctgggtacagggaatagcatggttttgagaagtacctgatggccgggcaccatggctca

SEQ ID NO: 34143 - DNA, 862 bp, Artificial sequence
  DNA replication origin
aaaacagatgcatgcccaatagcagcaagtgatgcaaatggagataaagaggccgggtgcggtggctcacacctgcaatcccagcactttaggaggccgcggcgggaggatcacctgaggtcaggagttagagaccagcctggccaatgtgctgaaaccccgtctctactaaaaatacaaaactagctggatgtggtggtgggcgcctgtaatcccagctgcttgggagactgaggcaggagaatcgcttgaacccgggaggcggaggtggcaataagccgagatcgtaccattgcattctagcctgggcaacaagagcgagactccgtctcaaaaacaaaacaaaaccaaaaataaataaaaaaaaaataaagtgaactagcgagttggccgggggggtggtggggggtgatgttacaattttgaagaaagtgggcatgggaagtgggcatgggaagtgggcatgggaagtgtctttggcgaggagcctactgcataaagtaggtgaggtaaagagctgtggggccatctggggctagagcattccaggcagaggacacaggtggtgcaaaggccctgaggcaggactgcgctagagcattccaggcagaggacactggtggtgcaaaggccctgaggcaggactgcgcctggcgagttggaggaacagcgaggaggcccaggtggctgcagcagggtggggagggagagagatggaggagggaaggtgggagaaaagtagggggatcttcatgcctgcattgaccccacccaggctggcccacgcccaaatctccgaggcctcctaacctcctgctgcctccgttccttgtgctgttccaggccccggatcttctgcagg

SEQ ID NO: 34144 - DNA, 2199 bp, Artificial sequence
  DNA replication origin
aaaacaacctagttttaaaaatgggggcaggctcggtggctcacgcctgtaatcccaccactttgggaggccaaggcgggtggatcacctgaggtcaggagtccgagaccagcctggccaacgtggtgaaaccacgtgtcactaaaaatacaaaaattagccaggcgtggtggtacatgcctgtaatcccagctactctggaggttgaggcgggagaatcacttgaatctgggaggcgaaggttacagtgagccgagatcgtgccatggcactccagcctgggggcaaaaaaaaaaaaaaaatagggccaggcacagtggctcatgcctgtcatcccaacactttgggagactgaggcaggaggatcgcttgaacccaggagttcgagactagcctgggcgacgtgacgagaccgcatctctgaaaaaaaaaaaaaaaattaaaaattagccaagtatggtgttgcacacctgtagtcccagctgcttggaaggctgaggtgggaggattgtttgagcccagaggttggaggctgcagtgaactatgatcgcaccactgcactccagcctgggtgacagagtaagaccctggctccaaaaaaaaaaaaagtggcacggggagtgggtggcaaaggacatggaaggtgctcactaaatccttgtgggccaaatgcagccatctggtgctcgtgggagacatacaggtatgtgaacagcccagtccccactggagtcttggtggggacacacgggggctgagagcagaaccccgagctggactctgctccctccccccagaacgagcgggagaatactagctatgacgtaaccaccctgcaggatgaggagggtgagctgcctgaccttccaggtgagcccccacctccccacgcactcccagccgccttgtcccctggggccctggaagacggagcctctgggtgtgggggagtttgaagctgggagggaggtttgtactcatccgttttttaaattctgcttggctgagcctgccctgggaaccctgatccaccactccagccccccacctcctgtccccctgtggcccaggtccccagggcctgactctgcgtccccctccaggggccgaggtgctgctgtccagacaactcagtccgtcggcccaggaacacctggcctcgctgcaggaacaggtggctgtgctcaccagacagaaccaggaactgatggagaaggtccaggtagggaaagtgaggctggggacagatctgaggacctagggctggttccctgaggtcagggtgggcagggaaggtggcaaggctgccctgtgtccccacggtcacatcaactcctgccagactcctgccccccactccactccccagatcctggagaactttgagaaggacgagacacagatggaagtggaagctttggcagaggtcatccctcttgccctctatgactctctccgggccgagtttgaccagctacgcaggcagcacgctgaggccctgcaggccctgaggcagcaggagacacgagaggtccccagagaagagggggcagcctgtggggagagtgaggttgctggagccacggccaccaaaaacgggccaacccacatggagctaaatggctcagtggctccagaaaccaaagttaacggagccgagaccatagatgaggaggctgcaggagatgaaaccatggaagccaggactatggaagctgaggccacgggagccgaggccacgggagctgaggccacaggagccaaggtcacagaaacaaaacccacaggggctgaggtcagagaaatggagaccacagaagaagaagcaaacatggaaactaagcccacaggagctcaggccacagacacagagaccacgggagtggaggccatgggggtggaggccacaaaaacaaaagcagaggaagcagaaatgcaggcctacggagtgggtgctgggcaagcagagcccccagtcacagggaccacaaacatggaggccacgggctctagggccacagggatggaatccacaggagtcagtgccacaggtgtggagaacccaggggtagaggccacggtcccggggatctctgctggccccatcctacatcctggtgccgcagaggcctcggaaaagcttcaagtagagctggagaccaggatccgtggcttggaggaggctctccggcagcggg

SEQ ID NO: 34145 - DNA, 1153 bp, Artificial sequence
  DNA replication origin
acctccacttcccgggttcaagcgattctcctgcctcagcctccccagtagctgggattacaggcacgtgccacaatgccaacctaatttttgtatttttagtagagacggggtttcacgatgttgtccaggctggtctcgaacttgtgacctcaggtgatccactcaccttggcctcccaaagtgctgggattacaggcgtgagccacggtgcccggccatgagctcaggtgtttgagaccagcgtgggcaacatggcaaaaccctgtctttacaaaaaattaaaaagttagacgagcatggtggtgcacacctgtggtaccagctacttgggaggctgaggtgggaggattacttgagcccaggaggtggaggttgcagtgagctatgattgtgccactgcactccagcctgggtgactgggtgacttttcagacagagccacaccctgtctgaaaaaaaaaaaaaaagaaaggaagggaaggggaaggggggagggaagggggatgaagaaagaaaggaaagagagaggaaggaaggagaaataaagagaaagaaagagagaaaacacaagtggaaaattccaagaggtcaggatggctgcagggtcaaatgtctgttcaaggccaggtgcggaggctgatgcccataatcccagcactttgagaggctgaggtgggtggatcacctgaggtcaggagttcaagaccagcctggccaacacggtgaactcccatctctactaaaaatacaaaagttagctgggcgtgggggcaggtgcctgtaattccagctactccggaggctgaggcaggagaatcacttgaaccgggaaagaggaggttgcagtgagctgagatcacaccactacactccagcctgggcgacacgagtgaaactccatctcaaaaataaataaataaataaataaataaataaaataaagtaggtctgttcaagtaaaactgatgggttcaaaacacctcaaggctgcggggctaaaacaggccgccacgtggccaatgggggtggggcccgggtggtgaccagccctgctcacctggaagacctctgcgctggtcttctcatgccgccgtcccagctcctccagctgcccctccagctgggccacgttggcctgcagggtgcccac

SEQ ID NO: 34146 - DNA, 1962 bp, Artificial sequence
  DNA replication origin
gggtaaccccatcccaccattgggcacgggaggatgtgatttcccaccccagacatgatccgaggccagtcctcgtgtcatgtccgtctgcctgggccccccagtcccccaggggccccacatacctttccttccactgcagggcgggcagctggcccagaggacaagggccaggagaagctgcggggtcatggctgcggccagctctgctctcaggagtgggtgggaacgtcgtgggagacttgagaggggaggtgaggacttgggacctgcccaggggaaagcccagcccagggtcaaggcccgccccctccccgacttccttcaggtctgactcactggtggggctcgtggggccgctagggagatgaattagggtgtggaggagccccagccccctggggagcacaggccacccctgctcggaaggccccgagggtgggggcgggggaggaggctgtgaaagggagaagtggagacctgctggcttttcccagcacagcatgtcctgctggccttccttccgctgccctgaagcgggggaaaccccaggcaggcaggcaggggctcagggacatggagggagacagaggcagagatgggggagagaggcagagagacagagaagacagaaggaagacacagagagacagggagatgacagagacagagacacagagagagacacagatgagagaggcagagagacagagacaagaagaggaggacacagagatagagggatacagagacagggagatgacagagacagagacagagagacacagatgaaagaggcagagagacagagacgagaggaggaggacacagagatagacagggagatgacagagagacacagagacacagatgaaagaggcagagagaaagagacgagaggaggaggacacagagagagagagacagagacagggagatgacagagacagagacagagagagacacagatgagagaggcagagagaaagacaagaggaagaggacaaagagatagagagacagggagacgacagagacagagagagatacagatgagagagacagagatgagaggaggaggacacagagatagatagagacagggagatgacagacagagaaaggggcatgacagagacagaaacacagagagagacacagagatgagaaaggcagagatgagaggaggaggacacggagatagacagggagatgacagagacagagacagagacaaagatgagagagtcagagagacagatgagaggaggacacagagatagagggatagagagacagggagatgacagagacagagagagctacagatgagagaggcagagagacagatgagaggaggacacagagatagagggatagagagacagggagatgacagagaaagtgacagagatacagatgagagaggcagagagacaaatgagaggaggacacagagatagagagagacagagacagggagatgacagagacagagagagatacagatgagagaggcagagagacagagacgagaggaggaggacacagagatagagagacagggagatgacagagacagagaaagggggatgacagagacagaaacacagagagagacagagatgagaggaggaggacacagagatagatagggagatgatagagacagagagagacaggggaatgagagagacagagacagagatgagaggaggaggacacagagacagagagagacagggagatgatggaaacagaaagagaaacacagagagcagacagacagaggaagagagacagagggacagagataagagaggaagacagagatagggaaatgagagagacacagagacagagataagggaggaagacagagaaagagagacacagatgggaagatgagagacagagacagagagacagagatgagagagtaggatagacagagatagagag

SEQ ID NO: 34147 - DNA, 1000 bp, Artificial sequence
  DNA replication origin
cctacccctgtcctcatggaactcacaatccatcagggggaagacaggaaataaacaaatccataggtcacacagaatagggaagaaagctggggagtgcaggaatggcagtggccgcaatttttgttttgttttgttttgttttttgagatagagtctcgctctctcgcccaggctggaatgcagtggcacaatctcagctcacggcaacctccacctcctgggttcaagtgattctcgtgcctcagccccctgagtagctgggattacaggcacctgccactatgcccagctaattcttgtatttttagtagaggcagggtttcaccatgttggccaggactggtctcaaactcctgacctcaggtgatcggcctgcctcagcctcccaaagtgctgggattacaagtgtgagccactgagcctagccagagcttgcaatttttaataatctactcaggagaggtcttactgaggaggtgatgtatgcacagagacccgaaggaggtgagggaataagtcatggggacatttgggggaaggtgttccaggtagagggcaccgcccatgcaaaggccctggggcagaactattcctggcatgttgaacatcaaggaatcacatgtggccacagcagagtgagcaagggggagacagggaggaggggagggcatggaggagacagggcaggttgtccagggtttggtgggcagtaggaaggacttgggctttgaccccaaggcaggtgggagccatggagggctgtaggcagagggacgtgccctgactcaggtgctctcaggcgccctctggtggctgctgtgggaaggacagactgtggaggccagggctcaggatggaggggactgggctgtcaatgatgggggtgctccacgtactggtagaggagggggaagaaggggtcagatttttgcttaagtgtgaaggtgcagccgcaggactggaggacaggtgggaggtggggtggggggagctggaa

SEQ ID NO: 34148 - DNA, 789 bp, Artificial sequence
  DNA replication origin
gaacaatctgacacagaggaaacgtccatgaaaggtggggaggaggctggggaaggaggctggggaaggaatgggatgggaagtcctcgttaaggggaaggcacaggtgggcaatggagggacatttgggagacactgcgtatgtttaggaagttggtttggagcctgatctttaagtcaatgtctgtgactcaagagtcgtccagggtcctcttaagtcaccctatgtgtggccccaaccccatgtgagagttgcgggcccaggaacgatgtgtggattcccagagcccagaatacaaggcaggcgcataatacatatttgctgaataaaagaatgaagaacaagaggtcacgttacaaaattttaacgagccgctgcccgcttctagggggcgcagcgcactatacaaaattctccaattccacatggctcccggaatccttatttcgcgctactcaggttgcaactccggagggaagacgctgggacttccagcttgataggcggggattggaaccaatgaaagaggtctgctgtgtatgctgcagccaataatagcggccgaaggaagtgacgtttgcggaagtaaggcttccgtcggaaaagctcgataattacccagcctaaccatttctcaggtgcttgcgaggtgatcagaaggcaaagatgtcggagcgaaaagtattaaacgtaagtgttgggcgactggggcttttcaatcggagcaggacatcccggaactccgggagagggaggagcttcctgagatctcttctttggaacccttc

SEQ ID NO: 34149 - DNA, 1223 bp, Artificial sequence
  DNA replication origin
gtccagctaatttctgtagttttagtagagacggggtttcaccatcttggccaggctggtctcgaactcctgacctcaggtgatacgcccacttcagcctcccaaagtgctgggattacgggcgtgagccaccgaccgcacctagtctactttttaattttcattttttttaggaggaatcttgctctgtcgcccaggctggagttcagtggcaccatctcggctcactataacctctgcctcccgggttcaggcaattctcctgtctcagcctctggagcagctggaattacaggcatctgccaccacgcccagctaatttgtttttgtatttttagtacagatggggtttcgccatgttggccaggctggtctcgaactgctgacctcaggtgatccgcccgcctcagcctcccacagtgcaggatggcaggcaggagaccctgcgcccggccccttctacttttttacattaacttttccgtgtccaccgagggcagtggtgtggttaagtgcctggatgccggaaccagcctgtctggatggagcctggagggtaaccttggtggggctcatgcctggacctccctggacctcagtcccctccatgatgaagatcacactgacccccagggctgtgtgggtagtgaggttacagccacgcccggcacccggaaggtgcaggatgaacgcaggctcccaacactgttctgcacggtatcgctgctctgcacacccatcaggcactgacgtggaacctaccagaacctacctgctggaagccctggggacacaggagaggccaccacgtccctgtccttacagctcagattctaaaggagggaggggagatgaggcaccaggaaaggaggggatcagcacgcgggctcagaggtggtcggcgtcaaaggcattcaccagccaaccacaggggctcacacgtgtcatccagcacttcaggagactaaggtgggaggatcgcttgaggccaggagttcaaaaccagcctgtccaacatagcgaggtcctgtctctacagaaataaaaacaattagctgggcatggtgatgtgtccctgtggtcccagctacccagaaggctgaggcaggaggaacgcttgagcccgggagatggaggctacagtgagctatgactgcactactgcactccagcctgggcggcagagcaaaaccccgtctcaaagaaaaagaaaagcgtcgtcc

SEQ ID NO: 34150 - DNA, 901 bp, Artificial sequence
  DNA replication origin
tagaaaaggcctccagctccttaactgcaacagaagggaccctttaatctatattattaaaaaaatttttttggggggaaggtctcactctattgcccaggctggagtgcagtggtgcaatcatagctcactgcagcctcgaactcctgggctcaagcgattctcctgcctcagcctcctgcaggtgcacgccaccatggcaggctaacatttttaatttttgtagagacgggatctcgctatgttgcccaggctggtctcaaactcctggctcaagcgatcctcccgtctcagcgtcccaaagagctgggatgacaggcgtgagccactgcatctagcctcttcaatctgttttatgtttaaatagaggaagtggtaaccactgggttaaggaagtcccaatgggtgctctgccctcacggagctcaccgtgtggggagggagagggacaaggagaccaatacccaggataacatccatctgggtgagagagaagccagggtgcgtgagcttgaattgtgaggatgagcttctcagaggaagggcgtcttgcattgggtattgaagggcgagtaggagttcaccaagcgagtgcttggcaaagggggcatcccaggtaaggggaatggcatgggtaaaggcgtgatgagaagccacagtgtgattcaggaagtgccagggcaggctaggtgggatggagaatgggcagagaccttgagtgccaagctgacggtgtgaggggcggccactgctaaggtggtggagaggcctccttaaagttgtggctctgggccgggcgcagtggctcatgcttctaatcccggcactttgggaggccaaggcaggtggatcacgaggtcagatagagaccatcctggctaacacggtgaaagcccgtctc

SEQ ID NO: 34151 - DNA, 1326 bp, Artificial sequence
  DNA replication origin
gtcgcgctcctctcggctcagcggggagcccccagtcccgcggcccccgccgcctcgatccggccccagccacccgcacaaagggaaataaaaacctcctccaatcccccttcacgctttcggagagactttccccgccgccgccgggaggtgggacgctggggaggggggcgcgcaggaggacgcccctgttcccaccagccccgggccgcgtcccgggcagcagcgtcaaggctcccccacctcccctccgccgcgtcccccgcccctcccctccccctgcgctcccctcggaggtgactgagaccttcagctgttctggggagggagggagccgctgcccgcggagggaaggggggctgggggcgggagtcgccggggccgaggccgcggcagctggacactgaccgggacgcccgagactggccgcagcgagcgcggagcgcgggaggtggggagcagctgggagtgacactgctggggaggggaggggagagggagaaggaggggagggggaaattgcccgggaaatgggggactgcacttgaccgccaaaaggggtgaaattgaccagcagagggggtgggaatgaccgccagtgagggtcgaaatggaaccgatgtctggcggtgaaacggaccgggagagtggggatgtgcaaattggtggagaggtcactggctgaaattgatattggagcagcagaaggaagaggggggcaaaggaagggtgggtgcggatcgggcttcccctcccccaagagggctctgctctgtgccccgctcccgccccagaggactaattgcgggcagggggagggttgggggcagctggcttggggaagggagatggtatctgtgcctggcgcctgtcctctgcatctgtccttttgtggcttctgggggcggggtgggggggagcggtggcgggaagaggggcagaagtgagaggggtctggcctgaactggctgcctgttgtcagctgtcgttgtctgagggtgagggcactgagaggtttggggggtgggagaggaaaagggagccactggccaattttccagtgcagaaccgttttttttctttccccataagggggcttgcccagttcctcctaatgaggggagtgagagaggggtggtcaggaaggatgggaccccagattctctcctcttgtggccagccccctggtcaggcacaggtcatagcttggagagcacagttggaggacaagacagaagtcagaaccaacactgctatgactggggcctcctggcagcccggcggggctgagggcagggtctgtcactccctgagtcttggttttcc

SEQ ID NO: 34152 - DNA, 2018 bp, Artificial sequence
  DNA replication origin
gtttcctcgagtccctggctcttcttaccaacgtcttacttcttatttatttatttattgagacagagtctcgctcttgtcacccaggctggagtgcagtggcgcgatgttggctcactgcaacctccacctcctgggttcaagcaattctcctgcctcagcctcaggagtagctgggattataggcgcacgccacatcgcctggttaatttttgcatttttggtagagatggggtttcactgtgttggccaggctggtctggaactcctgacctcaggtgatccacctgccttggcctcccaaagtgctgggattacaggtgtgaaccaccacacccagcctttttttttttttttttttttttttttgagacagggtgttgctctgtcacccaggttggagtgcagtggcgcaatcatgactcactgcagctttgaccttctaggctcaagtgatcctcctgcctcagcctcctgagtagctgggactatggtgtgcaccaccacaactagctaatgttttgattttttttttgtagagacaaggtctcactctgttagcccgggctggtctcgaactcctgggctcaagcaatcctcccacctcgacctcccaaagtgctggaattacaggcatgagctactgcacccggtggcctgggttcaaatcctagtaagctagaaccccgtgagaccttagccaagtcactaccgttctgcgagcctcagtttcgcttctgtaaaacgggaacatagtggtaggaagggcagcatcaccgggaggatatttaggtgcccagcaggggagcaactcactcagatctattttaggaagatcccaccaggttccaagaggaaggggtgctgaggggagggggctgggggactgcaggggatgaccatggaggaggaggaggacccggagaccaagcagggtggtcagagaggcagaaggacaaccagcattatgcattgaaaagggacagatatccaccgggcgcagtgactcacacctgtaatcccagcacttcgggaggcagaggcgggaggatcacctgaggtcaggagtttgagtccagcctggctaacatggtgaaaccagtctctactgaaaatacaaaaattagccgggtgtggtggcacacacctgtaatctcagctactggagaggctgaggcaggagaatcgcttgaaccccaggaggtggaggttgcaatgagccgagatcccaccactgcactccagcctgggtgacagggggagactgtctcaaaataaataaatacataaaaagaacagacttccccaagcaggtggaggtctggaggactgggaagggtctgtctggtgccccagtcccctcctgtgatcacacataaaataagctctccacgatccagagagcccatcctgagcctcccctccacccagtctccccaggccacccagccacgcacctcctccccggggccgcccagaagggccttggctctggccatatccgcagcctccaccttgatgagccggtgcttgggagaaccatacttggcatctccggggttcttggagtccccagggcccgcggggtccggctccaagcggctctccgcgtcctcataggggtcctcgaagtccaggttcttctgcgcgcggtaggccctcaggatgtcgctctcggtgtagtccggggtgggcggctgcggagggggcctccgacccccaaagctcaggtagtcccgtagccacttggccatttgggcgcctgtcaccccaatcgggccactgtcagaggggcccccacatgcccttctccgggcccctttccccaaggaggaggaggaggtggagaggaagggaagagcagggaaggatgagaaagatcaggtgcgccctttggcggggctctggatggatagagggaaggaaaaggtgaacgagggggaggaaaaggaggcgacagaggagggaggaagagaagcccgccttagcccagcttgggaagcaccgcgggggaaggg

SEQ ID NO: 34153 - DNA, 1822 bp, Artificial sequence
  DNA replication origin
aatacaaaaaattagccagacgtagtagcgggggcttgtaatcccagctactagggagactgaggcaggagaatcacttgaacctgggaggtggagactgcagtgagctgagatcgcaccgctgctacactccagcccaggtgacagagtaagactgtctcaaaaaaaaaaaaaaaaaggccgggcgcggtggctcacgcctgtaatcccagcactttgggaggccgaggcgggtggatcacgaggtcaggagatcaagaccatcctggctaacagtgaaaccccgtctctactaaaaatacaaaaaatcagccaggcatggtggcgggagcctgtagtcccagctagttgggaggctgaggcaggagaatggcgtgaacccaggaggcgaagcttgcagtgagccgagattgcgccactgcactccagcctgggcgacagagtgagactccgtctcacagaaaaaaaaaaaaagagacagatcccccagaggtcagctggagagggcaggactctcttaagtgatcctcttggtctgtgtcatccatcctaggaaatgcattctacagcaacgtcctataccggccccggggggccccaaagaagagtgaggactgctctggagaggggaaggaccagaggggccagagcatttattcaacctccttcccgcaaccggccccccgccagccgcacctggcgtcaagaccctgccccagcccgagaccctgccccagccccaggcccggccaccccgtctctatggtcagggtctctcctagaccaagccccacccagcagccgaggccaaaagggttccccaaagtgggagaggagtgagagatcccaggagacctcaacaggaccccacccataggtacacacaaaaaaggggggatcgaggccagacacggtggctcacgcctgtaatcccagcagtttgggaagccgaggcgggtggaacacttgaggtcaggggtttgagaccagcctggcttgaacctgggaggcggaggttgcagtgagccgagattgcgccactgcactccagcctgggcgacagagtgagactccgtctcaaaaaaaacaaaaagcaggaggattgggagcctgtcagccccatcctgagaccccgtcctcatttctgtaatgatggatctcgctcccactttcccccaagaacctaataaaggcttgtgaagaaaaagcaaagctggtgtttgtggcgatttgggagtgctaaaaagatctgaagaaatcgggtgcggtggctcacgcctctaatcccagcactttgggaggctgcggtggaaggatcacttgaagccaagagtttgagaccagcctgggcaatagagcaagaagactccatttctacagaaaatttaaaaacaaggccagacgcggtggcttgcgcctgtaatcccaacactttgggaggccgaggtgggcggatcacctgaggtcaggagttcgagaccagcctggccaacatggtgaaactccgtctctacgaaaaatacaaaatttagccgggcgtgatggtgcagctgatgtctctggtctcagatatttgggaggctgagaggggaggaccacttcagccctggaggttgaggttgcagtgagctctaattatgtcactgccctccagcctaggtggtagagtgagaccctgtcacatacacgcaccaaaaagacttaaggggtcatctggggtcccagagctctcaggggtggctggagaggcccactgtggccaagggactttgtggcaactcaaagcccccctcccaccttatagggacaaatccaaggagga

SEQ ID NO: 34154 - DNA, 1676 bp, Artificial sequence
  DNA replication origin
cggccaggagggagggcgtgggggatgggggtcagggatgggactgggatactgggcagggtgggggggcgtagaaggcacgtgcctggccccaagccaagatgtgggggggctgcgtcccaaactggggtaggggggctagatccgggcggggtcgcgaatggggtggggcctcagccgcagagcagctggggtggaggcggggagggagtgggggcgctgcggcaacacctggtccccttccccgcccccgacgcccctgcgggcccgccctgccccaccccgtcctaccctctgttcttccatggctgcagcccaggtcaccccggcccggcccgcgggccccgcgcacgctgggtccccaagctgcctttgccgcggccggtagccaatggcccgccgagccctcgccgccgccgcgcccccggttagcgctccatcaccgcgcgcattgcgcaggcgcacccgccgcggccgcctgggaaatgtagttccgcgctggcctcgcccagagccctcacatccagcgcctggggctcactgggcggtgttggtggtgatatgtgagctggagagagccttggatgagaagacaaggggctcgacccctggccctgccgtgggacctcagaatcatctctaatgctcccgtgcctcagtttccccacttgttcactcacacaggttatccgttgctactcaaattgtctagcccgcctggcatttactgaaaatctaaggcttttgcccaagagggtgtttagcctccagtgccttctttccatttgtccctatgtcacaactgaactcctatacaccccacaaagccccaggctccaacagctcctccagaagtctccgtgccagcccaggtgcggaagctaagaatgtctgggtccagctttggaaggacctgggggctaatctatccagggtccctcagcagacggtggggggaagggtggagcttcagaatgttctggggaggggaaggagtgggtaggggaggctgggcgggtgtacgtgtctgcaggggaggtgcaggcatagccaccgcagaacctccctgtggtggaggggaacgctgtgtacgatgcaggccttctaggtccgagtgagaaaggaggtcactctgcagttgggtctgagacattgaggtctgtgggttcgccacctcctcccagaatgcactacagaatcaggggtgagggatgcagggctgggaggaactcgagagcccatgaacctcctccacgggacccccaagcaggtcatgtaataggacccaaagttatcaacagaaatctatttctctgaacctcaaaggaagattttttaaattattattattatttttttttagagacggactcactctgttgcccaggctggagtaacggggcgcaatcatggcttactgcagcctccaactcctgggctcaagcggttctcctgcctcagcctcccgagtggctgggactataggcatgcaccatcaccctgggttggttttgtatctttttttttttttttgagacacagtctcactctgtcgcccaggctggagtgcagtggcaggatctcggctccctgtaatctccatctccccagttctggcgattctcctgcctcaaccccactgagtagctgggactacaggcgcccaccactaggcc

SEQ ID NO: 34155 - DNA, 1672 bp, Artificial sequence
  DNA replication origin
ggctgaggcaggagaatcacttgaacccgggaggcggaggttgcagtgagctgaggttgtgcaactgatccagcctgggtcacagagagagactccatctcaaaaacaaaacaaaacaaaaaaaactcacatgagccaggcacagaggctcatgcctgtaatcccagcaatttgggaggccaaggcaggaggatcgcttgagcccatgagttcaagactagtctaggcaacatggtgaaaaccagtctccaccaaaaaatacaaaaatgagctgggcgtggtggcaccttcctgtggtcccagctacttgggaggctaagatgggagaatcgcttaagcctgggaggcggacgctgcagtgaggcatgattgcgccactggactccagcctgggtgacagaataagactctgtctcaaaacaaaacaaaccaaaaactcacatgcctaggccacatccgagctccagggctctagattccccctgggacaggaatctgggatgtcaggaagttgcccaggaggtctggatgcagcctgtgtgactccagcttggagtctgagtgacagcccacgggagccatgggtggtgtttgagtggaggtgataccttcagatctggggggccagtgggaagggctgagaaaccggaggcactgagtgaagacaggaggggaagatctgagccagactcggggacgccgtgatggagaggggattcagagagagcacagatgggccaggcgcgggggctcatgcctgtcatcccagcactttgggaggctgaggcaggaggatcacctgaggtcagcttggcccacacggtgaaaccccatctctactaaaaatacgaaaattagcccagcatgatggcgggtacctgtaatcccagctacttgggaggctgaggtaggagaattgcttgaacccaggaggcggaggttgcagtgagccgatatcatgccactgcactccagcctgggcgacagagcgagacctccgtctcaaaaaaaaaaaagagagagtgtacaggtggatggaggggtcaggggagagatcagaaactcgagagcacccagtttttggaggaaggtgccgaggtcagctacgttctgttgagtaggaggggcggggggagaggaagatgccctcagccctcacctgcagctcgtaggtacggctggcacggtcctgttttatcttcataagcatgccttctttcagctcctccaggagggagaagagggactggaactctgcttcgaggtcctcctgcaccttcgccgagttcgcctgggtcggaacagccagaatcggccaaagcccgtgttcagagagggaacctgagacctcccacaggcatcaacagcaatgggccagttcctaaggctgcaccctccagcttcctcccctccccttacctccccaggactgccccaccgccttcacctccacgttcagcagcatctgtttcagggagtagataaagctctgaatttcttcattcttcacagccagtgttttgatgatcttcctcagggcctcctgcaccaccagaagtgtggacacacacaggtgcacacacacatgtgcgcacacaggtacacacacgtgtacgcacatgtacacacgtgcacacacatgcacacacgtacataaatgcacacgcgtgcg

SEQ ID NO: 34156 - DNA, 1601 bp, Artificial sequence
  DNA replication origin
ggggaggatctcaactctggagagaatctggattgtgtacagagctgaagccaaggggtatcccaattcagagggttcctggagagtgtgatggaggtttgaggaacacctggattccaggaggagctgaggcctggagagtatctggcttggggaatgccttgggggaacttctggcctcagcagtagctgaggcctgggagaacctgccttccacgtggagttggggtctggatagaatctggattcagagagcaagaggagggagtcttgagtcctggggagtatctggactctgtcacagcaaggagctagagggagcttctagactctgccagagctgagaactagggggagcatctggaccctgccagagctgggaactagggggagcatctggactcgaggaggacttgaggcctgtgggaacactatgagtcttccaggaacaagggtttgaggatgatctagtttctgggaagaactgaggggtatttggacatggggaggaactgaaagaagtttctatggcttggaggagtctggaaggagtagcttgggcttgtagagaatctgaaaggagtaactgaggcttggggagtatctgggcttaataaatttctggaggaagttgataaagcttaggagtatctggggggaatacccgggaatcaaggaatatctggagggaatagctgggacttgaggagcatctggagggaatagctgcagcctgaggagtatctggggggaaaagctgggactgaggagtatctgggggaaacagctgggactgaggagtatctggaggggaatcgctgggactgaggagtatctgggggaaatagctgggactgaggagtgtctggaggggaatagctgggactgaggagtatccggggaaatagctgggactgaggagtatctggggggaatagctgagactgaggagtatctggaggggaatcgctgggactgaggagtatctgggggaaatagttgggactgaggagtatctggaggggaatagctgggactgaggagtatctggaggggaatcgctgggactggggagtatctggagggaaatagctgagactgaggagtatctggggaaatagctgggactgaggagtacctggaggggaatagctgggactgaggagtatctggggggaatagctgggacctgaggagcatctggagggaataactgcagcctgaggagtatctggggggaatagctgggactgaggagtatctgggggaaacagctgggactgaggagtatctggaggggaatagctgggactgaggagtatctgtggaaatagctgggactgaggagtatctggaggggaatagctgggactgaggagtatctggggaaatagctgggactgaggagtatctggaggggaatagctgggactgaggagtatctgtggaaatagctgggactgaggagtatctggaggggaatagctgggactgaggagtatctggggaaatagctgggactgaggagtatctggggggaatagctgggactgagaagtatctgggggaaatagctggatccccgaggagtatctgggagg

SEQ ID NO: 34157 - DNA, 1979 bp, Artificial sequence
  DNA replication origin
ttgcggtgagccgagatagcgccattgcactccagcctgggcaacaagagcgaaaccctgtctcaaaaaaaaaacaaaaaaccccacaaaaactaggagcctggaaggccggactgggtctccgtgggaggggcctgggtctggagagcagggcagggtctcctgggcctaggggatggggatggggctgggtctcagaggaggcagggtttacgtgcagaagagcggacttggtctccggggtcccgagtgggtgacgcggcccgccacaggtgcttcctgaaggtgagccggctggaggcacaactgctcctggagcgctaccccgagtgcgggaacctgctgctgcggcccagcggggacggcgccgacggcgtgtcggtcaccacgcggcagatgcacaacgggtgcgcatgcgcgtctggagagccctgggtgggaggagggtgggaagagggtgggcgcgggggcgtggtcagaagcaggggcggagtccgacccgctagtgggtaggccaggggacggagccagagccgagacgggcgtctggggacggagtcagagctgagctgggcggattgggggaggagtcagagctgaggtgggcggattgggggaggagtcagagctgggctgggcggattgggggaggagtcagagctgggctgggcgagctggggcgggtggagtcagagctgagcagagtacactggtggcggaatcagagctacgctgggcgtgttggggcggagtcagagctggggtgggcgggctgggggaggggtggagtcaatgctaggcaggggagcatgggggcggagtcagagctgggcagggagggctgggggcgggatcagagctccggggtcgtgggatcctgaggctggccttgccccaggtatggggttaatgcctagggaagaaggtagagcccaggccgactcctttgcaggaagagccaggtcttgggttaggagctgggactccctgtaggtggagtcagactcctaggttaggatcggcccctccggaacgtcaggtacgcaggggccaggtctgggccactggaggggatgaagtcaaatccagggatgggaatgggctctttgggcagcgtcaggatctacgggggggagtcatggccgtgatcctttttggaagttgagtagggctatggaggcggagccagccctgggggcgaagtcagagccttatgccaaattctcaagcccagtccagggttgggcaaggcgatgtagaaggtagagtcggtgcctgggggtggagccattacagggggcggggcctacctggggcggggtctttagggcctggttctccctaggcgcggtgccagaattaggggcggacctttcctagggtgttgtcagtctggcctggtccctcgctggaggtggtgccaagactagaggtggggtcttctgtgggggtgggtcggtcgggcctggtccccgctgggagcagtgctgggatcgggcagtcagtgctccgggaggtcaacggggcttaggtcctttatggggtggaaccagtcagtggcggggccttctgtgggggcggagccagtatggacctgtttctattggaggcggagcctggagttggggcggggccttccctgaggggcggtgtgggagcctgggctgagccactcactcgctttctcctggtgcaggacgcacgtggtccggcattacaaggtgaagcgggagggccccaagtacgtgatcgatgtggaacagccggtgagcgttgggccagagtccctagaagtgactttgtggggtccgcgtcccttctccagcagcctgaccgctcccccatctgcccccagttctcttgcacctccctggacgccgtggtcaactatttcgtgtcgcataccaaaaaggcgctggtgccattcctgttagacgaggactacgagaaggtgctaggtgggtgccccttcggggagt

SEQ ID NO: 34158 - DNA, 1546 bp, Artificial sequence
  DNA replication origin
gcctcggcctcccaaagtgctgggattacaggcgtgagccaccgcgcccggccccagcatctactctcatgcaacactcctctgcaaccctctcgaagccctctttgccctctaaggtgtcagagttcattgctctgagctctggcctcaatttgccactctgtgacttgggcacagccgtccattcccggctggccaggtgcagtcactgtccctcgatcgcccctcagctccgtgtcccgaccgacttgaccctgcttcctgggcacctatacatgatgtctgaagtcttggccaaagaggaggcgcgccgtgcactggagacaccctcgtgagtgtcccgcctgtcccgaggggctgcaggatggggacgggaggtggttgtgtggctgagggtgggcggtgagttgggtcccctggagttgggtcttggattttgcatgaggactgccttggggctgggggtgggggagggggagggggagttatggcccatgctggggaggcagggcaggatctccaggagcgggtctaggggcctagaggactggtaaggtcttcagtggcggggcctaggcctgaggagtagggacagggtctgggggtggtcagtctaggtgtctagaaggtgatgcttcgtctccggggaggagttatttgtcggagagggtaaccgggaccctagaggcggggcctggatggggggcggagcatcgtctttgtgggcggttcttggtgatcagggaggcgggcagggcctccagggtaaggtctaggtgtttggagggcgggacaggatctccaggggaggctctaggtgcctacgaggcagggctgggtctccctaggggttggagctgcatctccggggccagaattaagagcctggctggccgcggtggctcgcgcctgtcatctcagcgttttgggaggtcgaggcgggaggattgcttttacccagttcgagacccatcctgggcaacatagcgagaccccatctctaaagaaaaaaaaaaccaaaaaacccggccagatgcagtggctcacgcctgtaatcccagcaccttgggaagccgaggcgggcggatcacctgaggtagggagtttgagaccagcctgaccaacatggagaaatcccgtctctactaaaaatacaaaaattagccgggcctgtgaggaaggggaatcgcttgaacccgggaggcggaggttgcggtgagccgagatagcgccattgcactccagcctgggcaacaagagcgaaaccctgtctcaaaaaaaaaacaaaaaaccccacaaaaactaggagcctggaaggccggactgggtctccgtgggaggggcctgggtctggagagcagggcagggtctcctgggcctaggggatggggatggggctgggtctcagaggaggcagggtttacgtgcagaagagcggacttggtctccggggtcccgagtgggtgacgcggcccgccacaggtgcttcctgaaggtgagccggctggaggcacaactgctcctggagcgctaccccgagtgcggg

SEQ ID NO: 34159 - DNA, 1179 bp, Artificial sequence
  DNA replication origin
ctgagatgacaggcgcgagccaccgcggccagccaggctcttaattctggccccggagatgcagctccaacccctagggagacccagccctgcctcgtaggcacctagagcctcccctggagatcctgtcccgccctccaaacacctagaccttaccctggaggccctgcccgcctccctgatcaccaagaaccgcccacaaagacgatgctccgccccccatccaggccccgcctctagggtcccggttaccctctccgacaaataactcctccccggagacgaagcatcaccttctagacacctagactgaccacccccagaccctgtccctactcctcaggcctaggccccgccactgaagaccttaccagtcctctaggcccctagacccgctcctggagatcctgccctgcctccccagcatgggccataactccccctccccctcccccacccccagccccaaggcagtcctcatgcaaaatccaagacccaactccaggggacccaactcaccgcccaccctcagccacacaaccacctcccgtccccatcctgcagcccctcgggacaggcgggacactcacgagggtgtctccagtgcacggcgcgcctcctctttggccaagacttcagacatcatgtataggtgcccaggaagcagggtcaagtcggtcgggacacggagctgaggggcgatcgagggacagtgactgcacctggccagccgggaatggacggctgtgcccaagtcacagagtggcaaattgaggccagagctcagagcaatgaactctgacaccttagagggcaaagagggcttcgagagggttgcagaggagtgttgcatgagagtagatgctggggccgggcgcggtggctcacgcctgtaatcccagcactttgggaggccgaggcgggcggatcacctaaggtcaggagttcgagaccaacctgggcaacatggcgaaaccccgtttgtactaaaaatacaaaaaattagccgggcgtggtggcagacacctgtaatcccagctactcgggaggctggggcaggagaatcacttgaacctgggaaggcggaggctgcagtaagccaagatcacgccattgcactccagcctgggtgacagagtgagactccgttccccgctccccaaccccaccaaaaaaaaa

SEQ ID NO: 34160 - DNA, 896 bp, Artificial sequence
  DNA replication origin
gtccaggaggccaaggctgcagtgagccatgattacaccaatgcactccagcctgggagatagagcaaggccctgtctcgaaaagaaaagaaaataggctgggcgcagtggctcacacctgtaatcccagcactttgggaggctgaggcaggtggatcacctgaggttgggagttcgagaccagcctggcaaacatggtgaaaccccttctctactaaaaatacaaaaattagctgggtgtggtgatgtgcatctgcagtcccagctaattgggaggctgaggcaggagaatcgcttgaacctggtaggcagaggttgtagcgagccaagatcttgccactacactccggcctgggtgacagagcgagactccgtctcaaaaaaaaaaaaaaaaaaaaaaaaaaaaaaagaaaaaagaaaagaaaagaaaacaaaataataatatgggagggaggtggtaataggtgcattttagaaagagccctctggggcaatggtggaagaccgacagggtggggcatgagtttggaggcctgagactcactgcgatggccaggatttgggtgcaagaggctggaggtgtggctcagggttttggaaggcaggggacggaaaaaaagccaaagagaaagtgcgtaaggagttggggaaataaactgaggccggtttgggctatgctgagtctgcaggccttggggatgcccgttgttggctggacagtcagggtggggcccctaaagggtgcctgggctggacaacaatagttcacatgtacccagctcttgctctatgtcaagtcttcttcctgagaacattcccgagcaccctggagagcctcccccgcacccctactgtccagttcccacttcccgactgcggtctgggcaaagccaccc

SEQ ID NO: 34161 - DNA, 1148 bp, Artificial sequence
  DNA replication origin
ctccagcagcgcgtctttgaggagcacccgcagtgtgaccgcgcgcctggtgagcgcgcccccgggcccgccgcagccccccgccccggccccgccgccgccgcctcctccgctgacgctactgccgccgccgccactgcgtccaccgcccgctcccgcattcggccgctcagggtcctcggcctccgcttcgtcctcgtcctcctccggcgcctcctcgcccgcaccgcccgccggggacagcggctccggagctgcggacagcgagaggctgcagggaggccgctcgccccacggctctgcagccccgcgcccctgcagccccgcgccccgcgcctccgccccgctgggcccgccgtacctgccatggccgcgcctccccgcgcccggagctctagactccggcttcccggcacgtcacgcggccccgccccggggaggggaggggcgccccaaccattggccgtcgccggggtcgggggaagggctcggcgcgctggggtgggcggagaaactgaggcctcggggatgcccacgcgggagagagatcgggaactcagccctctgggaacattcgggaaactgaggcgtgacggggtgttgaccgggagctcattggtgcgaatggggaaactgaggcctcgctgtccagggatagaggttgcaaggtggaagcctggggcgggtgcgcgagtggctcagcctgctgcaaggagaggagaaggtgagacctgcggtcaccgcacttgaggaactcagaggcctcggcctttaggaccaggggagaaactcaggtccaggggaacaatgcggactccaatagggaacagcctcgcgcagacacaggtggagccaaagagcccaagccggcctcagtcgctaaagaattaactcccaccctcccgggcggccctcgactgattccatgattggaccgttgcggagcccgccagccaatgataagagtcccatttatttcaccctcaaccaatcgatagcaagctactggattcccgcaccaaccaatccgtgtcaactatctgattacaccaactcggatttgaccaatgggcagacgtccatgtaaaccaatcagtagaaacccttagttatgagcgcaaaccatcagaggcagggactggactcac

SEQ ID NO: 34162 - DNA, 1756 bp, Artificial sequence
  DNA replication origin
accccagcgcgccgagcccttcccccgaccccggcgacggccaatggttggggcgcccctcccctccccggggcggggccgcgtgacgtgccgggaagccggagtctagagctccgggcgcggggaggcgcggccatggcaggtacggcgggcccagcggggcggaggcgcggggcgcggggctgcaggggcgcggggctgcagagccgtggggcgagcggcctccctgcagcctctcgctgtccgcagctccggagccgctgtccccggcgggcggtgcgggcgaggaggcgccggaggaggacgaggacgaagcggaggccgaggaccctgagcggccgaatgcgggagcgggcggtggacgcagtggcggcggcggcagtagcgtcagcggaggaggcggcggcggcggggccggggcggggggctgcggcgggcccgggggcgcgctcaccaggcgcgcggtcacactgcgggtgctcctcaaagacgcgctgctggagcctggcgccggggtgctgtccatctactacctggtgagcaccccgcctccctcgtcccatcgcggctcgggcaggaaggggaaactgaggcctggagttcccttgctgcaggacaagcttcagtgtagggaggggacactgaggcccggagctcccttgctgagagacgagccccggtgtggcgaggggaaactgaggcccggggctccgttgactgcaggaagagctccagtgtgaggaggggaaactgaggctcggagctctcttggctgcaggaagagccccgacatgaagaggggagactgaggcccggagctcccttggcggcaggaagagccccggtgtgaggaagggagactgaggcctggagagctcccttgctttaggacaagccccagtgtggggaggggaaactgaggcccagagctcctttcctgcaggaggagctcccgtggaggggacactgaggcccggagctctttttacgggacaagccccatgtggagagaggaatctgaggcacagatgggtccttctggtggggaggacgtagattaccaaacaccccatcccacaaaggagaagctgaggctcagagaggagccaccacccgcgcagggtcagatgggcaacaccccggccttcctgtggtttcccagccgtgaaatggaatatttccccaccatgggaaaattaggggatggttaaatgaataaagccctcagcaggcgcctgccacatggtaagcactttatctgtggtaggtattagtactttttttttttttttttttttgagacagagtctcgcttttttgcccaggctggaatgcagttgctcgatctcggctcactgcaacctctgcctcccggttcaagcgattttctgcctcagcctcccgagtagctgggactacaggtatgcgccaccacgcctggctaattttttttttttgcagttttagtagagacggggtttcactatattggccaggctggtcttgaactcctgacctcgtggtccgcctgcctcagctcccaaagtgctgggattataggcgtgagccaccatgcccggcctttttttttttttttttttttttttgagacagagtctcgcgctgttgcccaggctggaatgcagtagcatgatctcggctcactgcaacctctgcctcccggttcaagcaattctcctgccttagcctcttgagtagctgggattacaggcacccgccaccacgcctggctaat

SEQ ID NO: 34163 - DNA, 1054 bp, Artificial sequence
  DNA replication origin
tgggactacaggtatgcgccaccacgcctggctaattttttttttttgcagttttagtagagacggggtttcactatattggccaggctggtcttgaactcctgacctcgtggtccgcctgcctcagctcccaaagtgctgggattataggcgtgagccaccatgcccggcctttttttttttttttttttttttttgagacagagtctcgcgctgttgcccaggctggaatgcagtagcatgatctcggctcactgcaacctctgcctcccggttcaagcaattctcctgccttagcctcttgagtagctgggattacaggcacccgccaccacgcctggctaatttttatatttttagtagagatggggtttcaccatgttggccaggctggtctcaaactcctgacctcaggtgatccgcccgcctcagcctcccaaagtgctgggattacaggcgtgaaccactgcacccagccctgtattattactattactgttgtcattattgtttgatttgtgaatggtagcacattattccccttctgaatgggagtttctgaatggagcaactgctgagtgttgcatcctggagacacagcagtgatcaagacagacagaccctatccccgatcttaggggtttcttggtcatggtgggcggggtgcagatatctgccaggcagcttggtgcaggctgatcaggtttgtgggtgtggactcccaggcactgaggaggccctgcagccggcctgagaggtgttcctggaagccctgtaaagacatgcctgagggagcgtaggtctggggaggaccccccgggagagagggcatggtgggtgttggtcctgggcccagccagctgactgtcactgcaggggaagaagttcctgggcgacctgcagccagacggaaggatcatgtggcaggagaccgggcagaccttcaactcacccagcgcctgggccacccactgcaagaagctggtgaaccctgccaagaagtcgggctgtggctgggcctctgtcaagtacaaaggccagaaactggacaagt

SEQ ID NO: 34164 - DNA, 1608 bp, Artificial sequence
  DNA replication origin
cagatgcccactaccatgcccagttaatttttgtatttttagtagagatggggtttcaccatgttggccaggctagtcttgaactcctgacctcaggtgatccgcccacctctgcctcccaaagtgctgggattgcaggcgtgagccagccatggagcctggtcaagagcaatgtcctttctgaaagtcaccttactgtagatatgaatcacatgtaacaaatgccatcgcagtaatgcctagatcagtgttccattaaattaccaggcactcttgcctagctaagatgacacaggaaaccattctttcagtatgtattcagttagtggccaactgtgtgcaaggcctgttttaggcactgaatataaagcagagggcaaaaaaagtcaaaaatccctgcctttgggtgggagttgtgggggaagaaggtggttgggggggcttcactgagaaggtgacatttgaacggagaactgaaggtggggagggagggagggtgccatgaggacttctgagaaacagcctctgcaaaggccctggggcacgaccgtgcctggtgtgttggaggaacagcgaggagcctgtgtggctggagccgagtgagtaagggagagagaaggaggtggggaggatgggaaggggacagggcaggtcatgcagggctctgtaggttatggggagaacttgggctttgaccgggaggaaggtgggagccatggagtgttgcaggcagaggaaggacaggatctgactgaggtgctcacaggcgttctctggtggctgctgtggggactagactgtcgggggttagggtgggatccagggaccagggcagaggtgagtgagctggtccaggtgagggatgatggagtggcccaggccgaccatggagcagggaagaagtgggcaggttccaggtatttttggaagtgtatccgccagatttgctgatagatcagatgctggagtcctgagcaagtgggtggatcgagctgccaaaattgggggatgtgggaagggcagatctgggggttcagtggggcccagcatggctgtgttgagtgtgaccctgtgagtcccccacatggagacatagagaggcagctgggccctgagtctggagccgggcgaggcttgggctggagacaggactgtgggcagtgtcaggtgtagacaggatttggagccctgagaggggatgaggccacctgggaggggtgtggagggaggaggcctgaaaacccagcctggggccagcaacagcgagaggggaggtgagagggagccaggcgagcgtgggatccgggggttgtgtgaggaccgtgtcctggtaggtaggaggctgtgctgggtcagatgctgccgagaaggtgacgaggacagaaagtgagatgtgacccagagaggtcacctccacaagggcagtttaggacagaactggaggagaggttatttttaatttgtatttttgtagacagagtctcgctccgtcacccaggctgtagtacaatggtgtgatctcagttcactgcagtctccgcctcccgggttcaagtgatcctcctgcctcagcctcctgagtagctgggattgcaggtgttcgccacc

SEQ ID NO: 34165 - DNA, 760 bp, Artificial sequence
  DNA replication origin
tggggccagcaacagcgagaggggaggtgagagggagccaggcgagcgtgggatccgggggttgtgtgaggaccgtgtcctggtaggtaggaggctgtgctgggtcagatgctgccgagaaggtgacgaggacagaaagtgagatgtgacccagagaggtcacctccacaagggcagtttaggacagaactggaggagaggttatttttaatttgtatttttgtagacagagtctcgctccgtcacccaggctgtagtacaatggtgtgatctcagttcactgcagtctccgcctcccgggttcaagtgatcctcctgcctcagcctcctgagtagctgggattgcaggtgttcgccaccatgcctggctaatttttgtatttttagtagagatggggtttcaccatgttggccaggctggtctcgaactcctgacctcaagtggtccaccgcctcagcctcccaaagtgctgggattgcaggcgtgggccactgtgcccgactgggaggaaaggttactgaaagacgtgaaagccacctatgtatggtgctggctcgctcaatgaacggagcatctaggtgtatgctaaatgctttgtgcgtatgatttcatttcaccctgatgccatccccgtggagttggaggtcattgtgcccttttacagataagaatagacttggcggccgggcacggtggctcacgcctttaatcccagcactttgggtggccgagatgggcaaatcacaaggtcagacgatc

SEQ ID NO: 34166 - DNA, 1049 bp, Artificial sequence
  DNA replication origin
accacacccggctaatttttgtattttttttcagagacgagatctcatcatcttgcccaggctggtcttgaactcctggacttgagcaatcctctcacctcagcttcccagtgaaaaaaaatttcttctttgtaaataagagtctcactctgtaactcaggctggagtgcagtggtgtgatcacagctccctgcagcctcaacctcccatgctcaagcgatcctcctgcttcagcactgggattataggcatgcaccaccacacccagtggccacctaatttgttctaacttgggctggggagggactgaccctgcctttttctctcccagaggccacaaccccagggaagcgggtggacagcaagatccgggttccggtccgctactgcatgctgggcagccgcgacttggccaggtcagactcaccccaagttctgcccctgccccagctcacctggatctcttgctggtcttggggtagcaagggcaggggtggggggtgggacagagcctcagatcctcagagctgtggggttgggggagtcagtgtgggggcgagggaagagcctggggattcctgagactgtgcgaccctcctggcccctacaggaacccccacaccctggtggaagtaacatcctttgcagccatcaacaagttccagccgttcaacgtggctgtttctagcaacgtgctgttcctgctggtgtgtggcccaccctgtctaggggcaaggggctccggagcccagtcggtgggcagcgggcggggctcccctgcgtatcagctccatgagagctggggccttgtctgctttgtttgctactggtacactgtgggtgctcaataaatgtatgaaggagggtgcgtggccaggcccagtggctcacacctataatcccagcactttgggaagctgaggcagcgggtcacctgaactcaggagttcgagacaagcctgggtaacactgaaaccctgtctctactaaatatacaaaaattagctgggcatggtggtgcacgcctctaatcccagctacctgagagg

SEQ ID NO: 34167 - DNA, 1489 bp, Artificial sequence
  DNA replication origin
agagtgcagtggtgcgatctcagctccctgcaagctccgcctcccgggttcacgccattctcctgcctcagcctcctgaatagctgggactacaggtgcctgccaccacgcccagctaattttttgtgtttttagtagagacggggtttcaccgcgttagccaggatggtctcgatcccctgacctcgtgatctgcccgcctcagcctcccaaagtgctgggattacaggcgtgagccaccgtgcccagctaattttttgtatttttagtagagacagggtttcaccatgttggtcaggatggtcttgatctctttacctcgtgatccgcccacctcagcctcccaaagtgttgggattacaggggtgagccaccgtgcctggtcaggatggtctcgatctcttgacctcgtgatctgcccacctcggtctcccaaagtgctgggattacaggtgtgagccactgcgcccggccttttttttttttttcttgagacattctcgctctgtcgcccaggatggagtgcagggcgcgatcttggctcactgcaacctccaccttccggattcaagtgattctcctgcctctgcctcctgaatacctaggattacaggtgtgcgccaccatctccagctaatttttgtatttttagttgagacagggtttcaccatgttggccaggctggtttcaaactcctgacctcgtgatccacccgcgtcagcctcccaaagtgctgggattacaggtgtgagccaccgcgcccagcctaagagcactgcttttggatctcctagccctggtgctgaaacctcgccagccccctcccctctcagagccttggtttccttgtctgtaaaatgagcggcttcaatgaaaggccatcagatccaggcaccgggggttcacacctggaatcccagcacttagggaggccgaggcaggaggtttgctggagttcaacaccagcctggggccacagcaagaccccgtctctacaaaagataaaaaaaattagccagacatggtggtacgcacctgtagtcccatctatttgagaggctgaggcaggaggatggattgagtccaggaggttgaggcttcagtgagctgagatggcgccactgtgttccagcctgggtgacagagcaagaccctatatctaagaacataaaaagtgaagggctgctaatattgaatgctcagtgccaggcctcatctattaaacactactcataagtgccagttgctattcttttttttttttccttttctttgagacacgatcttgctctgttgcccaggctggactgcagtggcataatcatggctcactgcagcatcagctgcccaggttcaacatcctcctgcctcagcctccatagtagatgggagtacagacacacgccaccacacctggctaatttttgtatttttagtagagaagggggtttctccatgttggccaggctagtcttgaactcgtgacct

SEQ ID NO: 34168 - DNA, 1245 bp, Artificial sequence
  DNA replication origin
ttgggcaacgctgctgcctccccctcgagagagccctcctggacctaagctaggtgagccctctggctaaggtcactcgtgatctctttgtggttggtttgttagtgatggggtcatgtctcagggctgcctgagactggaaccccaggagaggcgctgaggtacctcaggcttggagggagcctgggagtccatgctcctctgtcctgtagatgctgctggtggagttctacaagggttcccctgacctcgtgaggctccaggaaccctggagccaggagcacacctacctcgacaagcttaaggtgagccccaagtccccgcagacctcctaacggggccccaggagaggccccctgggcagcctaaaaggtggcagcaatgagccccgtgggcctcaggggcctgagacagcccagctggcagactggtgaccctggtcaccccgtggccaccccagcagggtgcaggccagatttgattggactgtggagctttaagctccggcagtgccggatgaggtcctggcagcgggttttgggagtggctcccctgcagagggcccagggtcctggccacccctgagtgtcttagggtagtggttcctggtttccctccacctggcatagaaagggactcattctgctcagctctcggctagctgtggaggctgtggtgtccccatgggtgtctggaaccaggcagggaggggctgaagtgggggcaggatcgggagtgtgcacataagccccacccctccacacagcaccgctgcccctgggagccaggccctcggttacatactgccccactgggtaagcagcaggctgtgctgcgggaccccagccctgtgcctcggtctcaggggggctcagtcaggatgctggacttgcacggtggactgtgaggcgcagggctggctaggacccccgggcacagcctgaggcccagccccctcgtttcagatctccttggccagcaggacgcccaaggaccagagcctgtgtcacgtcctggaacaggtgtgcggcgtcctcaagcaggggagctgagccttccagggcagggtgggctccagttgtcttgagggtccggatgggctcaggtaataaagaaacggaagcagcagccagccacgctggtctccccaaggctggggtgagggtggctgggtgcccaggctggtaccatcaccccagcttcctcacttccagggcagggcattaacttccaggatacccctca

SEQ ID NO: 34169 - DNA, 1458 bp, Artificial sequence
  DNA replication origin
agctgagccttccagggcagggtgggctccagttgtcttgagggtccggatgggctcaggtaataaagaaacggaagcagcagccagccacgctggtctccccaaggctggggtgagggtggctgggtgcccaggctggtaccatcaccccagcttcctcacttccagggcagggcattaacttccaggatacccctcagcccctgcacctgggaactggcacaaaagcctcagggccagtcccacccaccttgggctcaggagcacctggggtgctggagggacctcctggggtgtgtgtggctttggagccggcccctcaggaaggcggtgggtggcaggcccacccctgcaccaagacgaggcaaggggctgtagaaagagacatttaatacttctgtttacaaaattcaggcgtacatttcagtttgccctggaccgtgcccaaagctgtgtgctcatctctgcgcccctcatgtacttctgacgaggggggtgcagggcagggcagagcagagcctggggtccggaggcttcactggaccacagggggaggggaatgtgaatgtggcctggcccagagaactccccatttcatcgattttgcattgggcgatagaggaagcagatgtcggggctgcctgccttggtctagaggagatggctggggccacttcccacagggtgaagtggcagcggctcagcaaggggagcctggccaccaggggctgggacatgcgctcactggaacctttgtgcttggccctcggcagcgcggctgtggtcccgtgtgaggtgtgctggggtgggtgtgggtggctggtggtggcagcttgtgccagagtgacacaggcctccctgggttgggatgggggcagttaaaaagctgaaaaggtacttggctttctgagggcggggcttgggaggcagggccctgcaggagaccatgttctctgtcctcaggcagatcccagctggcctctgtccccgggctgcaagctgacagcaggcccgggaggcggtgaggccctctgccctggccttgaggagaaggagtgcgtgtgtgaggcgggggtgcattggccctggagtagggccagggcccatcaccagcaccaggctgggagggatttaaaaccagggtcctatctctgagccaccccatggggaccctcgatcccatcctgttaaggctgcgggactcgagggtaggcagtgggccgggcccccgtcgggtcaggacggaggtgggggctgccccagaggaacattagtgtttctaagagcaccttagtgttgccccgcctcggccagctgggcgagaagttggggagcgggggaggaggctggcgccatggagtggggaagggagccgtcaccgttgggagtcagcgctagtgtaaacaggcatccccacccacccagataagcccccccacccaagtgtggggtcctgct

SEQ ID NO: 34170 - DNA, 2103 bp, Artificial sequence
  DNA replication origin
aggcgggggtgcattggccctggagtagggccagggcccatcaccagcaccaggctgggagggatttaaaaccagggtcctatctctgagccaccccatggggaccctcgatcccatcctgttaaggctgcgggactcgagggtaggcagtgggccgggcccccgtcgggtcaggacggaggtgggggctgccccagaggaacattagtgtttctaagagcaccttagtgttgccccgcctcggccagctgggcgagaagttggggagcgggggaggaggctggcgccatggagtggggaagggagccgtcaccgttgggagtcagcgctagtgtaaacaggcatccccacccacccagataagcccccccacccaagtgtggggtcctgctcagggagtacctcaagggccggggcccaggtggcgccggcaggctcagacaccgccctggcagcaggggctccgtggaatgcaggagacccagcagggggtgccggccagtgtggacggaggggcggggcggggacacgggtgagtcactgcggcaggggcacaagcacctccacgtagctgagcgggaagaagcccgactggccgtccagcatgccctcgtaccagttctcatcgatctggttggtcagcgtgatgacgtcgccctcatggaagcccagctccccgtcgttctcgggctcgaagtcgtacagcgccttgcagctcggctggtccaggggcgctgggggcgggagcgggctgtggggctggggctgctacgcctcaccccgcccagtctggggtctcagacctgctgtgacctggagcgtgtgggtgggcatgggcctcccctctgccctgcctgggccaccccctgcccctgccacttctggggtccggcctctactgccacccaggagggaggatgggagaagcttggtttaagtggtcaccaaagctactcctgggaagtgctggggacacccggtgctgctgcggtgacagggagtgaccagatgccctcaagcccttgtagccaccacacagcctagagctagctgggctagtgcccttggcaatccctcattcacactgtgaggctgagacccagaggggtggcatcttgcaggctgtggggcctgtgccccctactgctgcacgagcctggcccctccctgcttgagatgggcagagaacagggcgggaggagaaacaccctccccgaatggccgagaaggcagcactgaggtcgaggcgggcctgggaacactcacgcatgctccggctaggggtccggatgggcttgtcggaagatcggaaagacgatgaagctaaacacaagcaaaacgaggaggctgtgggctcaaaacggtcgggcagggccccttctgcagaaggctggggccagcccttcccgtctgccttggcggtccagatggagcacggctgagagctgcacccaggagtctggcgctcagagacccaggacagggccagcccttggccactcccacccgctggcatttgcctccgcaagagggctccatgccccattacctgcgatcttgggggctgtggtgcaggggaagcccccgttggactgctcaggctctccaaggtcaaagggctcccggggcttgggcttatactcccgcttagggcgtgaggaagcttcccgcatcctgtgaagggagaggcgtgagtggaccgagcccgtgtcacggccgaggcagccccactcttgtatttatgctgctgcctaatgacctggcctgggactgcaggaagaggccgtcagtggggttgtgacacatggaccctgggacacagctagactgggatgtctacccagagggcctccagcctggacccccaccttggaggcatcccagagattgccaagcagctggggcctgccacagcatctacctacaacacccccagtcgcatcccctgcctcctcccccaattccccaccacggacggcgccccacatacgccaaggcccctgaagcaggtctggcctctgcattcagggaggggagcctgggtgttcctgtggcagcagcaacgtgcagccagggagggagtccccggggcctgcatcgggg

SEQ ID NO: 34171 - DNA, 1071 bp, Artificial sequence
  DNA replication origin
atgacttcaaagagatggagaaggtgaggaagaaactgcgtgctctgtgtggtggtggcactgctggggcctgacctctgccgggcatagtggaggcggccaaccttgatgggcctgggtctggagtgatggggcccggcaggtgtggagagatggggtggtgtgggggcctcgtcagctggacttgacgggcaccagctctctcccctgccgtgggcaggcagctgtggggacatggctgagctgaagacatggagagggggttggggggtcctggtatgggctcttagggcaggaggcggtgcagcagcgggggtcttgtgtgccttgggcccccactggctgtggagtcttatatgctgcttctcttcacagaaggtggatgtcaccagcaaggcggtgacagaagtgctggccaggaccatcgagtacctgcagcccaacccaggtgggtgctccagccactgccagggcctgccccaggccctctggcctctgtgtcagagggaaggcaggggatgacagaaccgccaggctcatgggttgtgggcttcaggcacagctggatcccggagtgcagaggccatccttggtgctgcatgctgcctttccacctcaaccagcagctcagcccctctgttggcttcactctcatgccgactggttcctcagggccgtcccagccttcaacccctcttccagccagcagtcctggcagggagcctctcccccagcttacttgtgggatccatttgtattggccgcccctccccagtgcccctggcctggacttcacctcttgggcttgggactgggtctccctggctgagagacgggcttttccccaaggaaaacccaaatgctggctccataggaggccacggacagggggcagacgcacacccagcagtgtccactcaggccctgccaggagcagacccaagcgggcagcggaagggacacagctcatcacccaccccgggagccttggcctcaaccaccccccgctgcacatcactgctgcgcctcctccctggcaccccccagatgaggggtcatagccacgttcca

SEQ ID NO: 34172 - DNA, 1092 bp, Artificial sequence
  DNA replication origin
tctttcctcgtgtggtgggaaggcagaagcaagcactgaattcccaaaccactccctctgacagcgcctgggatgcgaaaaacagccctgaaatgtcccatggaacatggcgggaaccactgaaccccagcaccgctgtctgagcacaggcgttgctttcttcaccccacgtatcccatgtgtgcctggcgccaagggatgccgcacagagtgaggatggacagtgtgaggcccttcccagcacacagcgcttcatgaagagccgagtggctgccaggccctgccacaaatggaggctcccagagggaggccgcctgaggtcacaagcttggccctgccctctgggggccaagtgtcacagggtgtgccatctctgaagtcatcggcaaatttaacatcccgggtctgatcacttgtgtgaagacgtgcacacacggcctgggcaggagagtgaggtgttgcgtgccgtgggccatggcctgtgcccctggtgctccccaggtctgattggtgcttgcctgccccgagctgtcacaagacgtggccaagggatgccatgagggtccgtgtggtgccacactgcgttggctgtgtggggctggggggtgtccagcagggcagtcaggagtttaggacccagcctgggaggaagtgacccaagagcaggaagtgcgggggcaggagaagcttgagcctggggctctgcccacgccaggcacctggtgtaccctctagcccatgcctggaggtcacagcccaaggcaccatgagtgcaaatgcccccaaccccaagttctgcaaaaggtagcctgcccggagtacacggctggtcttgtgtcctggcaacctgcccaaaaagacaccagcccctttgccaaggaattcctggccctcctccaaggcttggctctggaagcccccacaccacgggactgtcctcacccacgcatcgggaccctttctgtccacctgccttcatgtgcggggtgtgccgggcattcagtgagcacaggccccatgcctctgacccctgtccctttcctgcctgtgggttggtggctctcaactcagccacacagcaccttggaagct

SEQ ID NO: 34173 - DNA, 1066 bp, Artificial sequence
  DNA replication origin
cttctcccccacgcatggaggggcaggtgggtctcgtaggtgcccgaggggagcaggtcgggctcagtgctctgctgcctcctgggcagactggtagtggtgatgggagccccagggctgccggtcattagagccgagcccaggtcaccgccctgccaccatgtgctgggacagcgtgtggcccatggcttctgccagacgggcggtgagggagcccccaccattgggcagcactggccagcctaggccccatacggccaccaggcgcagcccgcagcctcccccacacccatgtggagctgggccaggcagggtgcgtcctcggcatgcgtttccaaggactgctgagtcacctcaggggtgactcaggggcccaggggccaggccagagccaagggggacagcaggggagaggccgggctgcaaggccacagcacgggaagggcagcatgcggaccagaggccaagcctctcaatgcagacgagggccaggaggccagggaggaggctgtcccgggagaaacgccgattgccccatctagggcggacgggccaggttcgggctggtggaggccttccgggatgcaggccctgcacagggttccttagggtttaaagtcagcagccagagctggaggcctcatcagaaaggcagtgtgggctggactcccgctggtgactttgctgtcagcacaggagaggtccttctggccctggggctgccctcacggagcctccggccaccagaccatcatagaccaggcctgaatgtcccctttctctctcggggatggtcacagagctggcccctggcccctggctgccactctgttgtggccaccgctgagcaatttcctgtcgtggctgtcaccacttcgtctgcgtgacttctttccagtggctgattccctctctgcttccagttcccctgatgtgttggcctcagactcttggatggggcctccagggcccatctggaggatttctcttgcctaagtttttttctccccctcattttcatgtgctgtgacttcaaatgacatcggctcgctgccgcgcacacaac

SEQ ID NO: 34174 - DNA, 974 bp, Artificial sequence
  DNA replication origin
ggtgtgggggaggctgcgggctgcgcctggtggccgtatggggcctaggctggccagtgctgcccaatggtgggggctccctcaccgcccgtctggcagaagccatgggccacacgctgtcccagcacatggtggcagggcggtgacctgggctcggctctaatgaccggcagccctggggctcccatcaccactaccagtctgcccaggaggcagcagagcactgagcccgacctgctcccctcgggcacctacgagacccacctgcccctccatgcgtgggggagaaggggtgccctctgctgtggaaagctgggacctactgtctgtggtgcgaggctgaccccacagagctccaggacaaccccgagaggagtggacagagccagccgggccctccagcccccacctggcccagctgccgcctctgggcagatgtctccacttgataaacaggacagctaagggcctaggagagacatgcctggcccaaggccagacagcaggagtggctaggaaggtcaagggatccccactgcaggccccaccaaccctggctctgcctggaatgcagtcagggcaggtggaaggggaggggcaacgccccagggctgggcgaggaatctgggagcaggtgggaagctcatgctaccttcccaggagacgggaggacaggcctgccaaccagggggctcagctatgtgggacacacgctcccacccttgcccttgcacagggtttcatccaaacatggagatgccagtgagtgcctggggctcctctcccaggaacaaaccacacccagagctccagcccgagcgaacacatctacatgaaaatcagcctcatgcatcatgcattgtaatttctcatcttggggaccaggcaggagggctgtgtgacatacaactggtaaaatcagtttccgatgaaaacttataaaaggaaaaagccaacccacaaacaaatgaggc

SEQ ID NO: 34175 - DNA, 968 bp, Artificial sequence
  DNA replication origin
tttctgtttggcctccagtgcttgcctctcccgtgtcctatccgcccagacctcagacctgtcactgttcccgggcatcctcctggataagaaactgcccaaatgtggtagctgggtccccaggatgtgagtcaggctaggcctgcctagctcacgttttgttctttgcaaattttcccaaccttgcagctctctggggagggagccagctccaggctgggaatgggcctggcggcctccatcagtgtcagcccaggtgaaccgtccacgagccacaaaagggaaggtgatgggaggagtatcatctggctgccttccgggtcactgcggggagttgctgcccccggagcttagctgctgtcaaggggtgggatgtggcgaggacccccaagaggttgcccggggtcctttattctagggcgctaagcattggagagtgcttcctgtgtctgagacgggacagcaggggacccgaaaacaagcaagcaagaggaatgcgaggccccgtgaggatagcaggagggtggggcagccttgcagccatggggacatttggatggacagagccctggtggctaagacccagcatgggaagatccagggaggctcagtgagggagaaggaacagcgagagcaaaagctctgaggggagatgggggggccgcccaggcagatgggggtgtaagatgaagtgtgaaggggcaggcgcacgagagaggaggcatcagtggtgtgttgggagaaggtgaggagaccagtgatggggatcaatcaggagagcttcctgtgggaggaggcttctctgaggtctgaggtctgggcggataggacacgggagaggcaagcactggaggccaaacagaaaccacctaaatccctgcctggctgccggcagggaggagggcgctgaggttctctacagaatgcacggtgggcagagctgtgagcgggcgctgaggaatgtgcct

SEQ ID NO: 34176 - DNA, 1956 bp, Artificial sequence
  DNA replication origin
caacggaagagagaacaagagatagctgttgaggggccagcgcctgctagctctgacaatggagggaggagggggccgtgagccaatggatgtgggtggcctctggattctggaaaaggcaggaaagccccagaacccccagaatagagtgcagctcatagtatctcaatcttagcccggggtgatccctgtcagggtctgacctagtgaagactttgtgttgctttaatatgtcgttgaagacgtcgtgtgtggctgtaagtcactaggtttgtggcgatttgttgtggtcatcgagaccatcctggctaacatggtgaaaccccgtctctactaaaaaatacaaaaaattagcggggcgtggcggcgggtgcctgtagtcccagctactcgggaggctgaggcaggagaatgttgtgaacccgggaggtggagcttgcagtgagccaagatcgcgccactgcactccagctaggcaacagagcgagactctgtctcaaaaaaaaaaaaaaaaaaaaaaggcgtgtggggggtgacagagaggcgggggaaatgaagagaggcagagggggtggagagggacaggggagacagaggcaggggagacggaggcagggtagacagagagaggcagggggaacagagagaggcagggggacagagacgggagacagagaagcagggggacagagaggcgggggagacagaggcaggagaacggagagaggcagaggggacagagagatgggagacagaggtagggggacagagaggcagaggggacagagagaggggagacagaggtagggggacagagagaggcagaggggacagatgggagacaggcagaggggacagagagaggcagaggggacagagagacgggagacatagggggacagagagaggcagaggggacagagggagacgggagacagaggtagggggacagagagaggcagaggggacagagagagatgggagacagaggcagaggggacagagagagatgggagagagaggcagggggacagagagagtcaggggagacagaggcaggggaacagagaggcagggggatagagagaggcagggggacagaggcaaaggggacagagagaggggacagagagaggcagggggacagagaggctgggggaacagagagagggagaggaggccggtggggaaacagagttgttttttcctctgttagctctcatccctgaaatcaacaaggaaataggaccggttcactttgccatgttggcttgaggtgccctgctaagagctggggttccatccagccttccttggctgtgacactctgtggaactaatcttcaacttcgcagaagttgttccctggcctctggaatcccaccttggtgacttaaaagctagtggactgatagaaaattcagtccccgttacttaacttggattttgaaaaccgtcccctcattcaggtttacacagaacatgctattgcccgtctaagcctgaggggaccacacaccccagaaacaccagagcagatcatgttcaaaaccgccgactgtcctgaagacagttgacaattcatgagtttgacgcacgttttttccagtccaagagctggagccagatacccacccgtgacgccctcccacatcttccaaacgggcacttccaaaccttgtcctgggcatgtttccaagccagcctcactgctgcaggctcatgtcatgccctctctcctgcgtgctcccagatcccacccatccttaaaagcccacggccacggccacctccttcctgcctcaccctggctccctccccgcaaggaggaagcggcccctccccgctggcgtcctgtctgtcatagggccttaggttcttgtgtgtgtgcgagcctgggttacgtgtctttccttttccactgtacctggcacaggtaaatactcattcagcctga

SEQ ID NO: 34177 - DNA, 959 bp, Artificial sequence
  DNA replication origin
aggacagcacccgccacggctgcccctcacctccacccctggaactgtgactgttcccttacatggaaaatgggactttgcagatgggacaaagggtacggacctgggggtgggagattatcctggcttatccacaagggcccagtcccatcagaaggccctcagaaagcggagcacctgggccgggcgcggtggctcacgcctgtaatcccagcactttgggaggccgaggcaggcggatcacgaggtcaggagatcgagaccatcctggctaacacggtgaaaccccgtctctactaaaaatacaaaaaattagccgggcgtggtagtgggcgcctgtagtcccagctactcgggaggctgaggcaggagaatggcgtgaacccgggaggcggagcttgcagtgagccgagatcgcgccactgcactccagcctgggtgacagagcgagactccgtctcaaaaaaaaaaaaaaaaaaaaaagaaagcggagcaccttcccctgctgtggtcacagggagctgagacaacggaagagagaacaagagatagctgttgaggggccagcgcctgctagctctgacaatggagggaggagggggccgtgagccaatggatgtgggtggcctctggattctggaaaaggcaggaaagccccagaacccccagaatagagtgcagctcatagtatctcaatcttagcccggggtgatccctgtcagggtctgacctagtgaagactttgtgttgctttaatatgtcgttgaagacgtcgtgtgtggctgtaagtcactaggtttgtggcgatttgttgtggtcatcgagaccatcctggctaacatggtgaaaccccgtctctactaaaaaatacaaaaaattagcggggcgtggcggcgggtgcctgtagtcccagctactcgggaggctgaggcaggagaatgttgtgaacccgggaggtg

SEQ ID NO: 34178 - DNA, 946 bp, Artificial sequence
  DNA replication origin
gggccggcaccggaagcgtgcggttgccatgtaatatcctggccgcgcgggcgcgcgagcggctgaggcggcgccggggcgggcgcggagctggcaagcgggtggcggaggcggcgccgacggggactgctgaggcgcgcagagggtcggcggcgcccgggagcctgtcgctggcgcggtccgggcgggaggctcggcggcgggcggcagcatgtcggtggcggggctgaagaagcagttctacaaggcgagccaggtgagcgcaggcccaggcgggagccgagtaccgggccccgggctgcccggatgagggagccaggcccgacctggcccgggagggggccggggggaccgaggtggggacgttggcgcgtgtcccctgccaggtgggaagaccaagggacggacgggggcgacgaggtggcccaggccctgcccgccatgcgggctccagaagcggggacagagcccctgggaggaggggagaggcaccctgggctgcccagggacgcggacctctcccctccttctctccgctgcaaaggcggggtgcggggagagaaggggaagagaggagtcccgaggctgtcgacacaggactcttgccagataacccagagccagggaaaagttgcgtctagagcagttacgttcaaaatcctctggatgggcaaggtacaaagttgaaaaggtagaggaagaagtcagtttcccctctctgctcctcgggcagccagcccttctccccagagacaagcgactgtcatcgactccgtatgtccctttcctaagatacgtgtgtgcctttcctttaaaaacacgtaccctgtgatagcatatgccacagaatcctgtgtgctgtgtttttcattgcttggagatcacactggagcgggatttctccccctccgtcggcactgttgacatctggggctggattgttctc

SEQ ID NO: 34179 - DNA, 1192 bp, Artificial sequence
  DNA replication origin
aatgaattaatttctgccttttgtcattagttctggcgagggtaggactcattcctcactggaaccccaggacctgttagtaactgatcatatttaccaggtcaataaatgtttgagtgaatgtataaatatttgattgaactgtgtagatcaagcagattaaaagcctcacacaaaacagagaacttcagtgtcagcctgtgagtgtagaaacaggttttctttctttctttcttccttccttccttccttccttccttccttccttcctttctttctttcttttttcttgagacggagtccctagtagctgggaccacaggcgcccgccaccacgtccggctaattttttctattttttagtagagacagggtttcaccgtgttagccaggatggtctcaatctcctgacctcgtgatccgcccacctaggcctcccaaagtgctgggattacaggcgtgagccaccgcccctggccctgaattgcattctagaagcatctttctggctgccatgacaaggaagaattggaggggaggactggtggaaagtatggtcaaggcatgaagacagacctagatgtctagatgtgtcacgtgggcaactgaatggatgaacacaggacagagagagagaggaagagaggtggccgggcacggtggctcatacctgtgagaccagtactttgggaggctggatttggtgggggggttgggggttggatcacctgaggtcaggagttcgagaccagcctggccaacatggcgaaacactgtctctactaaaaatacaaaaattagcctagcatggtggtgcgcgcctgtaatctcagctacttgggaggctgaggcaggagaatcgcttgaacccgggaggcggaggttgcagtgagccgagatcacgccactgcactccagcctgggagacaaagcaagactccgtctcaaaaaaaaaataaataaataaataaaaatgggagggggctgaacacttagacgaactggatttagctaagatgagtaaacaggaatctgaagaatcgtaagcaggggccccttctacttcccaacctccctggccaggtttaaactaagcgcgttttccaagacgttagggtcacctccacgactccagggggcgctgcaactgctacggcccctctaggctcgccccgctcaactcactgacaga

SEQ ID NO: 34180 - DNA, 1573 bp, Artificial sequence
  DNA replication origin
gacaggcctccgaggggaagcccagtccctcgcggatatgtcaatgggcgagccctgggaggaatggaagtcacggatctcgcgaggatgcccccggcgcccctcaattcccgaggcgggccgtcacgtgacccgggctcgcccaattggcgcgcggactgcgggggtcgccgcggttcccgccaaatacgagcgcggcggccgcggcggcagcagcggcgcgggcgggagggcgaagagcagcggccgcctgaggggagcccgcgcctccgccgcctgagaggaggtcgagctgccgccggggcgatgctggaggagctggagtgcggggcgcccggcgccaggggagccgccacaggtcggttcgggcccgcgccgaggggaagggggggcgcggcgcgcggcctggacgggccgaggcggcgatgggaggcggacgggcctccgggcgccaagcctggtcctgcgggccgggcgttcaccccctggggccttctcatccccagcgagggcctggcgtccccaagggcacccttgttgacgttattgttgtagccgcgaccatattgtttgtttccggcgcttttgcgtcagttcgtccctccaggactctctggggcggtgggtcggaggggccgagaggggaaactgaggcccagggaagcgaaagggcttgccctgcaggttactggatgcgtttgtgtcccttgaccatgttggaccttgcagcgggtggggaaactgaggcccaaggtcgcacgggctcggggaccagtaccgatgccgctgagggtcggggtaagcccgggtaagaagaggcccagatggtagagatggccaggagggtgggactcccgagttcttgctccttcctgatatgcaccgtgacttcctcctccgtgtgccttggaatggggtctttggagcccaccacaggcctcctgaaacgtgggagggtgaaccaaggaagaccagactgtccctctcccttgctggactctgcattacataacgctttggcagcacttggcattacgctttggcacatagtaggtgctcagtaaataacgtgaacgaatgaagggctagaatggacgccagtccagtttctcagcctcagcagtgttgatatttgttgccgtcctgggcacggcactgcagggtgttaagcatcatccctggcctccgccttttgcaggccagtagcagcccctctcaccatgccttagtaacagccagaaataccattgccctgtgtcccctatggggcagattccgccttggctgaaaatcatggctgtagttccttctagcctgtgggatttcccggagacataaaattaatataaagttggtactgtcgtggagctgtgatgttttaagtcaggatgtttaactttatttatttatttattttgagactgagtcttgctctgttgcccaacctctgcctctctggttcaagcgattcttctgcctcagcctcccaagtagctgggattacaggcctgcaccaccatgcctggctaatttttgtattttttagtagagacggggtttcaccatgttgggc

SEQ ID NO: 34181 - DNA, 2201 bp, Artificial sequence
  DNA replication origin
tgcactccagcctgggtgacagagcaggactccatctcgaaaaaaaaacaaaacaacaaaaaacaaacaaaaaaagaaaagccctgcagaggcccccacctgcccaccccacctcacctggccgtcgtgcctgcgcttcttcatgaattgggtgatgcacatgctgcccgctgacttcctcttcagcgagatgggagtgccctggctgggccccgtggaggggacgctgccactgtcctctttgggggccgagggcaccgatgtcacatagctccactggcacggcacgggcaggtgctcctgctggaagctctgtagcacctgcgggtgcacgtaccagcacatcctgaagtcaggccgcttctcatacactgagttctcggaaatgagccgcttgagccgggacttagaggggatggcggcatcctcgctgggggtgggggtgtgcaggtaggtggtggaggggctccgcgggctgccggtgtggttgctgagcagtccccggcggcagtgctcctggaactcccggatgatgaccttgctcccgttcacattgccgtgcaggagcggcagcagctgggccaggactggcaggagggaacatgggtgggcatgaggcttggggagccacccatcaccacaggccaaaaaacaaaacacatacacaagctcattgccaccgaggcttggggcatggccagcttcggggataggtggcctcatgagggcgggtgtaagacagggtagcacctacgcacctgcccagaagtgagccttggccgggcacgtgtgttgccagggctgacttcaaatgcctgctgttcctacccaaatgactgccctgctctccttgtgtgccatggtccctccccagttttttgagtttttttttttttttagacagggtcttgctctgtcacccaggctggagtgcagtggcaggatcatggctcactgtggtctgaaactcctaggctcaagcaatcctcccacctcagcctcttgagtagctgggatcacaggtgcgtgataccacacccaggtaattttgcattttctgcagagatggggttttgccatgttgcccaggctggtgtcgaagcactaggctcaagcgatcctcccaccttggcctcccaaagtgctggcatcacaggcatgaggcactgtgcccggcccctccctggcttttgagaaagcacagcccccactccagcactctctgtgcctgtgtcctggttgataaaacaagccaattaagggacctgcctcgtcctgctgctagggacatcattgaacgtacggacatgtacaggaaaagggctggcctctgttatttgtggaaagaacatttgcatcacggacccactagcctgtgactcttgccctcagccctggaattagctgggcccaggaacaggtgggtggcctggccccgcccacactcactctgctcgtctctcctctcccgcttggaggccttgggcgtctgctcctcctgggccggcagggtctccaggaagcaggctgcgaactgctgcagtaccttcaggtcatcgcctgcgcagtctctgtcagccgcccacacgcagccgatcttcacaggttgcaggacgcgaaagcgcttccccttagccaggaactcgtcccactccttggccttcagtttctggcggaccttatggttctcagggtcggcacactccttgtggtttagaaagcagaagtttatttggggttcttgctcccctatgcccgggcactcttttgaggaaccagtccccagccagctggggagcaagaggaaaggacaggggcacaaaacttcccacagtgtcagggccagggcagagcacaccatgcgctggctgcccctcttccagatggaataattcacacctggtctcctttgggagcgtcacagatatttctgaactcacccatgaggcctcttttaacacccctctgaattttctggtgaatgtgtgatcgtggagccgtttaacagggttgggtgtctacccacatggcccaggcatctggcagacacatgcagggcctgagaccactctctgactgacagttcaggcctcggtggtcagatatgcacaaggaatgcctaggcctccagtccaaccatgagacagtcccaccaaatccccacttcccaaacgacaggccttcaaaacaaaacaggacca

SEQ ID NO: 34182 - DNA, 2649 bp, Artificial sequence
  DNA replication origin
acgagttttttgaggccattgggttccagaaggtgttgcttcccgcccaggatcagggtaagtggacagggcctggctgagtagggaatggggacgaggggcctcggggcaggagggcccggcttgggggtctctccattgcacagtgacacccatgtcctgccacgctgtagaggaccccgaggagttctacgtgctgagcgagaccaccttggcccagccccagagcctggagaggcacaaggaacagctgctggctgcggagcccgtgcgcgccaagctggacaggcagcgccgcgtcttccagccctcgcccctggcctcgcagttcgaactgcctggggacttcttcaacctcacagcagaggagatcaagcgggagcagaggctcaggtgggcctgacgtccgcggagcagagtggggcggggcggggtggaagaaccccggccagccctcgtgacctggcccgcgtgtgcaggtccgaggcggtggagcggctgagcgtgctgcggaccaaggccatgcgggagaaggaggagcagcgggggctgcgcaagtacaactacacgctgctgcgcgtgcgcctccccgatggctgcctcctgcagggtgggcaccaacgatgcccgtggagggcggctcgggttggtagggggccctgggccccacccgctctgactcccccactccccaggcactttctacgctcgggagcggctgggggcggtgtacgggttcgtccgggaggccctgcagagcgactggctgccttttgagctgctggcctcgggagggcagaagctgtccgaggacgagaacctggccttgaacgagtgcgggctggtgagtgtcggcccgcaggagcaccgctgacccgatgcctctgcaggttctcctgggaccggcacagacacccccaggagggagcctccttgttctcagagcagggggcctgggcaggtccctgggtttgaatcctgctttcccacttactggcagcagggcctcgagcaagttcataactactccacgcctcagtttccccatcaaatgggagcggtgacgtgcgttagctagtgcagtaggtttaggcttaggtcctggagtcccggagggagagggcaggaggcctgggtgcgagccacagcctccaccagctgagatggcttccaggccggggcatccccgcgcccaggttgcccgctgagttccctgccgcggcaagggccgactctcggtctcagagtgacggcctacccctaccgcaggtgccctctgccctcctgaccttctcgtgggacatggctgtgctggaggacatcaaggccgcgggggccgagccggactccatcctgaaacccgagctcctgtcagccatcgagaagctcttgtgaaataaaagcagggttggcctcagccctgtgggtctgtctcatgctctccctgttcctctccccgccaccccagggcctccaagccacctctggaaatacttggctctgccccatgggcacgggaggggcgccagccgtggagctgtggaattgggccccgtggcagagcccccatcccttgggggctgtggggatgcgcccaagcccccgagggagaggcctggggacaccaacaaatctaagccctccctagctgcttggtaactgtgtcatgaagctgccggacagacacacgtggcatctccctgggcaggagagcaggcctgcagcatgggtcctgttcccgtgtgccgtgggtggcagtggctgcacctggcactagggctgctctgtggatgtgggtgacaacggcaggaggggatgctggccttcctgcacatagacctgcagttagtaaatcataagcccaaataaacaggttgtttgaatatagtttcttggttctccgttgaaaccgtgggacacagggcaggcccacctgctgaagagcggatggcttgggggctgggtgtggctccctgtcaaggtgggaccatgtggatacctgttctcaggccagcacctggccacaagtgcccgatgagccacccacctggggaggaagtcccgtgcgctaggggaggctgtgctgtgcccacaaaggcccagtccctgcaggggaggcgagtgctgtcacaggcctggcttccctgtggccagagggacagggtgtcctgagacggccacatcctattcctggaacctgcagatgcgcaacttcacctggcaagaggggcttgggtatgatgaaaggtcttgagctgggagatgatcctgggtggtccgggacccagtgtcctcacaagaggtggcaggagggtgaatcagagagagactggaagaggctgcgcatggctgtgaaggtggaggaagggaccccgagctgagggatgcagcgcctccgagcactgggaaactctccaggagggcctggtcctgcccacagcttgatgttagcctggcggggcatgtgtgcactctgacccccaagctgtgagatggtgacttgctttaagccaccaggtttgtggtacagcagccccaggagacacagggactctgccctgcagtgtggaaggcatgtgtgccccggccccactgctgacttggggatgcaggtctgcacctgggggaggtgcccggggcctatgctcg

SEQ ID NO: 34183 - DNA, 1372 bp, Artificial sequence
  DNA replication origin
ggaggtccacgctgcccgccaacgccgagggagcaccccgcaggagccccctgctggcactgcggcccttcagctctggctctccactcttccggcactgtggcttccccaccgctgtggttaattgtgcccttccagggctggtgggacggtgaggggttccgtggggctcctgctggcaccaggggtgggctccatggggtgtccgaggtgtgccttccacccggagatggtctgctgccctcgcgtcactgggccgcttcttccctctgactagaggccaagtgtggctgagctgctgttacctggagcaggaggcacagaggggccgggtgggcagcctgggctgtgccccactcaccttctccacctaccccaggtacctggacaacatccacctgcaccccgaggaggagaagtaccggaagatcaagctgcagaacaaggtgtttcaggtgggcgtgccttctggcccccggggcccaggctgggggtgggggcagctggcctgcaggagccggtggtggcccacaccaggcggtgggctccctggaggagctagcgagagttgagccacaagcagtgaagggttcggccagtagaaggtagcaggacaagatggagagcaagacttttatgcaccggtcaccccaaatcaacaaattctgcctctcctcacctgcatccttttcctcctcttcagctgggcttgtttgggaacatgtcgactctggggaggtttctcatgcaaaccagatgtctggttcttctgggggaaagggcagggactggggtcctgggcggtgttagcctcgcatcaggccccagcagtgtctggctcctcagcctcactcttcgtgcctggttgtgactctttcctctgtgcagagctgttggagactccacagcccccaccgtagaaaagcaggtttgcatccagcactgaggcacccccagggctgggccccatccaggggtcgacagctgctcccaatagcgagagccgggcccctggactgggtggggtgtggccaggccatggaggaagccaggggcccccagtgacgcccatctccacccccaggagcgcattaactgcctggaagggacccacgagttttttgaggccattgggttccagaaggtgttgcttcccgcccaggatcagggtaagtggacagggcctggctgagtagggaatggggacgaggggcctcggggcaggagggcccggcttgggggtctctccattgcacagtgacacccatgtcctgccacgctgtagaggaccccgaggagttctacgtgctgagcgagaccaccttggcccagccccagagcctggagaggcacaaggaacagctgctggctg

SEQ ID NO: 34184 - DNA, 1644 bp, Artificial sequence
  DNA replication origin
gttctgcagcttgatcttccggtacttctcctcctcggggtgcaggtggatgttgtccaggtacctggggtaggtggagaaggtgagtggggcacagcccaggctgcccacccggcccctctgtgcctcctgctccaggtaacagcagctcagccacacttggcctctagtcagagggaagaagcggcccagtgacgcgagggcagcagaccatctccgggtggaaggcacacctcggacaccccatggagcccacccctggtgccagcaggagccccacggaacccctcaccgtcccaccagccctggaagggcacaattaaccacagcggtggggaagccacagtgccggaagagtggagagccagagctgaagggccgcagtgccagcagggggctcctgcggggtgctccctcggcgttggcgggcagcgtggacctccaggcctgcccccgatcctgagacccggggagtggggtgggaccctgcctcctccacatgttccccaaggaagccagggtgggaaacccctgattccttcaacaccttcattttgcacacgggtaaactgaggcccaaggaggcccagccctttgcctgaggcctctgggtggagctgcctcactctcggcctatgctccttcccaacccacctcagcaggtaatgagggggccagagggggtgacagccccagtgggaggggtgctgggatgagctggaggggccaggcagggcaaaggggccacacgctcacttggcaatggtgtccacacccagcttcacccggtcctggtctttgttgaacgtgtagatcttcatgatggaggcggccactgggtcggtggagaagtgctgggaggagggaagcagggaaagccactcactgagagcccgggccgcacggccctccgctgcccaggtaacaggggcaggaaaaggaaggcagaacagcggcttggagcggccccagctgtgcgctcatcacagaaaggaaaagagagaccctccaagaccgcagccctgcccacgccccagggcagaggcgacgcagccaagacccagcagaactcaagtctccccttccgccttctcaaggctagatccatgggacttggaagccagtgtgacgcgacagaactgtgcctcacactctggctttagaactcgacctcagtgctgagatccatcaaggccaccgccacttacagaacctcccgccaccatggacgccccatccctcctgctctcgcagccccatgatggacgttctggaaccactcccgggcctcatgtttacaaagagaccgagaggcccatcgtccagggtcacagggatggcaggtggcagagaggacacaaatgagtctgcaaccctcaatgtctgaaactcaatagctggaagacggatacccccagcccctgcccctccccgaggtcccacctatccacctatgttaccgggggaggggagaagtcatagctggaactctgggggtttcccagaaccagccctgctgactgcgaacagcgtcccagcatggagaggctgagaacagtacgtaccctaagacctggaaaagattggggcacaaatccacgctcggcacagccatcacacacggccacacccagagagccaccc

SEQ ID NO: 34185 - DNA, 2856 bp, Artificial sequence
  DNA replication origin
aattttttttttttttttttttttttttttaattttcttccggtggctggtctccggcggccccgtccccgactgggccccgtgcccccccgcccccgcggccccccgccgccgggccagccgccaccatgaagaaattctttcaggagttcaaggccgacatcaagttcaagagcgcgggacccggtcagaagctcaaagagtccgtggggtgcgtgaggaacgcaggggcttgaggccctgcggggcggggacggccggggagagagatctggggccttgggcggctcgggagatcggagaggatgaggggctgggagcggcacgcgagggtcaggggagggggagaggcgccgggggcggacgaagtcgggccgagggtgggcgtcagggggaggggagagagatctgggggcggggcaggagggggcgggtatgacccgggggcgcggcgggggaggcgaggggaggggaactagcgcagggggcggggcgggaggggaggtctcgggggcggggccgcaggagggtccgatgcagtggcgggggattagggcgacggggctgtaggcagttgggggtcagtggaacgacctttggggaaaaacgggatcatgagtcctgagccgggtggtgagggagagctctgtctggggacccggctggccgaagaggccgggatgatttggggcaatctaggtgaccatggatgggagctgagcttggaggaggacgcacagctgtggggtggggtggtgaagagttgttttgaggtatccatgggaagaggggttctggatttggtatctggagcacgtgggaggctgatgggagactagaaagagtctggaaggccagggaggccggggtgggcagcgtcgtcagtgacctgggatgtcctggcgaattgagagggaggggctgaggaaggtgtgtgaggagagtggaggtgagggattctgacagatggactcttacccgggaggggcctgagaggagaagacgggtgagacagacgcgtcttagcaggctgggagaaagagcttctctgcgaggcttctctgccacgtcactgtgccaagtggattatggaagtgggagaggaggggaaaggagatagatgccgggcaggcttccggattgtctagggaggacttggagagaagggcctgagcagggctgagccagctgggagggccggggaagaagtggagctagggaaggtgcaaggctgagggctgttgggttgagaaaagggaaactggagagctggggccgctgcagggagctggctggccagagggtggtggggactgatggagagggactgaggaagtcagccaggcagccaggacacgggtctgtaagcaatagtggaagggattgtgagggagtgggggctgggagaggcagggaggtggcaggaagtgggggtcaggaatcacggggcagtggggtggtgatggaggtaggggcatagtgaggacgtcagggttcctgggggagagcaggagagcaaaggctgagtgagggagggagaggggtcagggagagaagggggcaaatcgggggagcccttcattgattcaaccaatagtgggtggggggtgctggggccactgggactgggcatgataggaaggatgcagggtatcggggtgatggctggatcagcccagagcctgggcggagaggggaaggttggaggggaaggttgggaaaggaagcggtgcggaggtcccttgtggagcgagactgcatatccagggtgtgtggggtgggtgggcaccaagtcctgttttaggctgcagtggtggacaggagaaggcctctgctgtcccagggctcaccttctagagggagccgatggacaaataaaccaacagaccttggatgagcgctcaggcgatgagtgcttggatgagtgcccagggcctccaaggagggtgagcaggggccgtcaggtggtttgggaaggcctctcccaggacacagtgagactcagctgtggggaaatctgcccctccttctctccctgcggcagctctagccctttccagacccccatcctcctcccactcccccggagaacattctgggcagaaggtgcagacagtgcaggggcctgcagtggggagcagctggggtgtgggaagaactgcggggagcccaggggagacaggccacgggagggcagtgggccaggctgggaagggctctctggccaagggaagctttaggattttgcagtgggagggcgttgtgcagtggagtgatgctgacgctccctggctgaggttccagaagggtccctgtggctgcccaggggggcagggtccatggctggttggggtgaggtgccctgggaaatggcattttgttggaaagacccagatatcggatgaggccggggtgggtcttcatgagtcatctcctcttccacccaagatgctcagctgtgggaggactagataggcaggggtgggacgaggagggagggctgcccgggtatgtaagcagagccagaggagtatagggcttgaactgagagcctggcctcccagaaggttttaatagacctacggcacagaaattgacacagcccgtaagttcatgggaggggcctgagaggagacgggtgagacagacgcgtccgagcaggttgggagaaagggcttctctgcgaggcttctctgccaggtcactgtgccacgtgggttacggaactctccttggtgtagggctcaacagggtggagccacgagtccatgagctcttcgtacttgcacagccctaggcctggcatggagtggccagggcgaggctggttctgctgtccgctctccccagggtccc

SEQ ID NO: 34186 - DNA, 1547 bp, Artificial sequence
  DNA replication origin
cctagaccccggggcgcggctccggcaggccccggacaaccccagacccctagggcgcagctccctgcggcccaggacccccagacccccagggcggggccgctgcgggtctcggacacccccagaccccatgaaccccagacccccggggcgcagctccttcaggcccaggacaaccccggccctccagtgcccgcctccggcccggggcccccgctgcccccccccccccccccaccggccccatctcccgcgcggcctcaccctggcaggccagtgagggtagcccttcatcttagcgaacaccaagtccccgggcttgaaggcgtgtggcatgctgacggcgagaggcccaggccgcggaaagcggctgcagcggcggtagcggctgcggcggcggcggcggcggcagcgggaggcgaagccgggggcgggagcgggacgccgagggggcgggggaggctgtctgggcagcctgccgacgcgcgcttattgggcgttgcgccaacggaagttcagccctccggccgtcacgggccggcaaagccgtcgatcaggaccacgtgcaggggacagagaagggaggcgaccaataagaacagaggttggagcacagcagttaacgggattggataacggacagacccaaggggcgtaacccagagactctaatgggaggttatgggaggtgaaagggaaaggtgggaggagacgaacagacgctctaagggagtgaaggggtggagcttaagggaaagaggcaggacatagacctccacaagagaaggggatataaggagggcagaacattggataccgcagaaaagaaggccaatcacttaacgcaatgggcgggtcattgacagcctctcccgctcaggaggagaggcttaaagtagatatgcaagccattggataccacaagagaagcgcctcaaggtagggagcaggcattggccatcacaagaggcggggcttcagcgggaacgtcggccattggctatcgaaagaagagcgatacaacataaaacagggacgggcgattgccagctcgaggaggcgggacttagaggaaggggcaggctccgggggagctcttagtataaacagccacaaaatgcacaaaatagttatttcttcacttagttaaaaacttaactgagtacctactatatgccagggccccaaaacgccacacagacctattcattcattcaagaaaaatgtactgaataccgtggggccgagtcacttgattgtcctgggcttcgctctctgcacttggaagatggggcccataatgattgtgaggaccctgctctagactgagcccggcaacaggaaatacaggaagtattagaagctataactcggccggacgcgatggctcacggctgtaaccccggcactttgagaggacgaagcgggcggatcacgaggtcaggagtttgagaccaagcctggccaacatggtgaaaccccgtctctactaaaaatacaaaaattagctgggcgtggtggcacgcacctataccagctactcagga

SEQ ID NO: 34187 - DNA, 2358 bp, Artificial sequence
  DNA replication origin
gagatggggccggtgggggggggggggggggcagcgggggccccgggccggaggcgggcactggagggccggggttgtcctgggcctgaaggagctgcgccccgggggtctggggttcatggggtctgggggtgtccgagacccgcagcggccccgccctgggggtctgggggtcctgggccgcagggagctgcgccctaggggtctggggttgtccggggcctgccggagccgcgccccggggtctagggatcctgggcctcagggagccccgccctcggggcctgggggtcctgggctgcagggagccgcgttcttgtggtctggtggtgttcggatcctgcaggacccgccgtctgggcctgcaggagcccctcccggggtctgggggtcctcggcctcagggagctgcgtcctggggttctgggggtgtccaagccctgcaggagccgcgccccggggtctgggggccctgggcctcagggggccgcgcctaggggttctgagggtgtctgcggcctgagagactctcgcccttggtgtatgagggttttggggctcagagagtcgctccctgggagtctgggggtatcctgggcccgagggagtcgcaccttgggggtttgggggtgtttggggcctgaaagagccgcgcgccgacggtctgggggtcccgggcccgaggaagcggtgccctgggggtctggggcctgataaattctcactctgggggaatggcggtcctggacctgagggagctgcgccgtggggatctggggggtgtccagggcctgaaggagctgcggcgccaatggtctgggggtcctgggcctgaggaagctgcgctctgggggtctggggcttctgtgcctgagggagctgcaccatggggatctggggttgccctggcccagagggagccacgcctcgtgtgtctgggggtgtccagggtgcctcagggagccgtgcgcagggtgtctgggagggtctgggacctgagggaccctcacctgagggcctggggatcccaggcctgagggctcaaggttcaagtttgagcagaactgcggaacttgagatttggggtcagatatgggggctgaagcactcccttgtgggtcctggagaagcccagttttgaggggctggggggccgagggccatgtgctaggggtccagggttggaggaggcagtcaggggggaaggttgagggtcaaggctaagggaagctgggacctctgagtgaggggctgggggtgggggaatggggctcggggctctgttcacggggtcactgggactcggggaactggaccttagaatgaagttggcatcgggactgttgggggaccctggggattggtcccctgtggggaggaggatgtagaagctggttttggagggacttgagggtggggtggtccaaccccaatgcttgaaatggagacaggcccgggcccagggagtgggagcgcttctgagggaagggggctggccgaggggaccttggatgcccctttggtggaagctggggtcccgacgacctggatagtcccaggtgtcctggcctgaaggatattccgcaccttggagtcccaggtgtggagggggtgagttccaggccctgagaggtacaggccagcgggaagcagggaccccaggctattgtcatccccaggtcttagggctgagtctcccagggctgaggttggtggaatttgccgggcaggactgaggaatttggcactgggggtggaaggctggggcagcagggaggggctgtggagggggacaccaaacggtgctctggaccagaaccagcccaggtccgaagctggcaatgccgctgggatgggtgggcctcggaggaccgtgggcgggtcttgggagaagcggggctgtgaggcatgccgggctggtcctcgggtggactgaatttaggatgcttctggcgggagagggatgctgggcctggcggcccatggccgagcccaggggccagggactctgataaagtagctctgaggagacccaagcgagaaggaagctgggtgagtggggcagggaagatcgggagccccctagaagctggagacgtggatggggaaggaatgcattgggaggggagaagccactccagcctgctgtgctcgcgctgactttcttgggggagaccagagcaatgcaactttataggcacttccctccctttcccagctctcttcttcccagagcactcgcttttctctcccccgtccccccttctccagcctgctctcctagccccaaacgtttccaagcacctgattggaagtgaaggggctgttagtctcctgtggggaggtgactgacagctg

SEQ ID NO: 34188 - DNA, 1903 bp, Artificial sequence
  DNA replication origin
aaaggcctccagcgacctggatcaggccagcgtgtccccatccgaagaggagaactcggaaagctcatctgagtcggagaagaccagcgaccaggtgggccagtggctccttgggatggcagggaagcgtggtggctgccagtgggccccagttcagctcacttctctcccccaggacttcacacctgagaagaaagcagcggtccgggcgccacggaggggccctctggggggacggaaaaaaaaggtagcgtgcacttgactttgtttcccatgcccactcgtggggcacctctgcggtctccagtgctgtccccagggcagggcgggccatttctggagggggtgggacacggactgcagggtacccgaggggaccgcctctgccctgagcgtggcacctcgttatggccgcactgcctccaggagcccaccatctggtttggaaaggggcattctgggatgctggcatcagaagggagggaagcagtcctgacgcgcctgcatgagagtgagagagtgagaaagcaagagcgcgagagggacacagaagagaggagagaggtgtgtgccagtgtgtatatgagcggattgtgtgtgtgtgttctgtctctgtgcacgtgtgtcgacgtgcatgtgtgtgtgtgtacttgtgtgtatgcatgtttgtgaccatgtaggtgtgtatgtgtgcagtgtgtgtgtagattgtgcatgtgtgatgtgtgtgtcgtgtgtgcacatgtcgtgcctgtgtgtgtgtttctggtgcctgtgtccctgtgcctgtatgcctgtgtgtgtgtgtgctgtacctctcctctgcgtctatgtgttgtgcctctgtgttcctatgtgagtatatgtggtgcctgtgtgtgtgcctgtgtgtccatgtgtgcatactgttcatgtatctatgtgtctgtgtttgtgtgtctgtgtgtggtgtctgtgttgtgtgtgtttgtgtgtctggtgtgtccatgtgtatggtttgtggtatgtgtgttgtctgtgtgttatctgtgtatggtgtgtgttttgtttgtgtgtgttgtctgtgtggtgtgtgtgtctggtatgtgtgttgtctgtggtgtgtggtatgtgttgtctgtgtgtggtgtgtggtgtgtgtggtgtatgtgtgttgggtgtttgtgtgtctggtgtgtctgtgtctatggtgtgtctggtgtgtgtttctggtctgtgtgttatgtgtggtctgtgtgtgttatctgtgtggtgtgtgtgttgtctgtgtgtgtgtggtgtgtgtggtgtggtgtgtgttatctgtggtgtgtgtgtggtgtctgtgtggtgtgtatctgtgtgtgtggtgtgtgtgtgtggtgcgtgtgagttgtctgtggtgtgtggtgtctgtgtgtagtgtgtgtgtggttgtgtgtggtgcgtgtgtgttatctgtgtgtggtgtgtggtatctgtgtggtgtgtgtgttgtctgtgtgtggtgtgtgtgtgttatctgtgtggtgtgtggtgtgtgtgttgtctgtgtgtggtgtgtgtgttatctgtgtctgtgtggtgtgtgttgtctgtgtgtggtgtgtgcgtggtgtgtgtgttgtctgtgtctgtgcggtgtgtgtggtgtggtgtgtggtatctgtgtggtatgtgtgttgtctgtgtgtgtgtgtggtgtgtgtgttgtctgtgtgtggtgtgtgtgtggtgtgtgtgtggtgtctgtgtgtggcgtgtgtgtttggcagggtactcgggtggaggcggtagagcacggcagcttgtctgatgtggcctccgcacaagattttgcataaagaaaaagatgtccccactgggaaacccgggcttctgatgtacccggttcactgaggaagatgaggggaagggccagcag

SEQ ID NO: 34189 - DNA, 1279 bp, Artificial sequence
  DNA replication origin
ggcctggcccctgccggggcgctcccaggcagtcccctggtcaccttggagccctggaagggaaggtcaccccctcctcctcttcctgtagcggagaagcctctcccgaagccgcgagggcggaaaccgaagcctgaacggcctccgtccagctccagcagtgacaggtgggtgctggggctggggtcccctctggcggctcctccatcggctgaggggcagggcgggctcctgagggaggaacggaggtccccaaccgccccctccgcctccagtgacagcgacgaggtggaccgcatcagtgagtggaagcggcgggacgaggcgcggaggcgcgagctggaggcccggcggcggcgagagcaggaggaggagctgcggcgcctgcgggagcaggagaaggaggagaaggagcggaggcgcgagcgggccgaccgcggggaggctgagcggggcagcggcggcagcagcggggacgagctcagggaggacgatgagcccgtcaagaagcggggacgcaagggccggggccggggtcccccgtcctcctctgactccgagcccgaggccgagctggagagagaggtgagccgggagggcgccgggagtccctgccttcactccacacgtttatggagcatctactaggtaggaggcagtatcccaggttccgggacccatcaagaaagcagtgcgtgggcccagaaactcctgccctggaggaggggacattcatgggagggagggggccgggcttggtggctcacgcctgttatcccagcactttgggcagctgaagtgggacgattacttgagtccagctcgagaccagcctgggcaagatagagagaccctgtctctataaaaaccttaaaaaattagctgggcgtggtggtgtgcgcctgtatagtcccggctgctcaggaggctgaggcaggaggattgcttgagcccaggagttggaggctgcagtgagctgtcatcaatccactgcactccagcctgggccacacagcaagaccctgtctcaaaacaaaacaaaggagggaggagctgtacagatgacatgagggtagtgcgtgctgtccggagttttcggtgctaaggagaagagtaaagtggggtggggggtttctcttttaaatagagtagaccctgaaggtgtgagtagactccaaaggcttgcgtttgggtttaagtaaaaggctccgaatgggctgggcgcagtggctcacgcctgtaatcccagcactctgggaggccaaggcgggtggatcac

SEQ ID NO: 34190 - DNA, 1040 bp, Artificial sequence
  DNA replication origin
aaacaaaggagggaggagctgtacagatgacatgagggtagtgcgtgctgtccggagttttcggtgctaaggagaagagtaaagtggggtggggggtttctcttttaaatagagtagaccctgaaggtgtgagtagactccaaaggcttgcgtttgggtttaagtaaaaggctccgaatgggctgggcgcagtggctcacgcctgtaatcccagcactctgggaggccaaggcgggtggatcacgaggtgaggagatcaagaccagcctggctaacacggtgaaaccctgtctctactaaaaatacaaaaaaattagccaggcgttgtggcaggtgcctgtagtcccagctactcaggaggctgaggcaggagaatggtgtgaacctgggaggcagaggttgcagcgagccaagattgtgccactgcactccagcctgggccagagcgagactccatctcaaaaaaaaaaaaaaaaaaaaaaaataggctccgaatgaagggaggggatctacgaagactcctgggaggggatacattctaggcaggagaagcagctcacacacaggcccagaggactgcgcctggcgtgctggaggaacagcgaggtggcctctggggctggagtggagggaggaggggagagagggaaaaggagggcggtggggaacggacagagcaggccgggtagggccatgtgggctgcagggaggatttgggctttgaccctgagggaggtgggagccatggagggcactggacagggtagggacaggccctcactcgggtgctctcgggtgccctctggctgccatggggtacagcttgcaggtgagcgtgggagcaggtaggaggcctcctagggtggtgactgtcaggactctcctataccacgtgtggtgctgcgggccctgtcacgccctctacccttgtggagattcaggcaatgtggcctgaatccagagtctcacctagactgagtgcctggggcccacgtgctggtgcccctcagccaggcctgccttctttggggaaagcacga

SEQ ID NO: 34191 - DNA, 1457 bp, Artificial sequence
  DNA replication origin
ctcgggaaaaggcttgtatctttgggcagctcgagcctgtggctgccctggtctgccctaggcctaggctgtggcagggcctccccgcctcccgtttcccggcttagctcccagggcctcccaaaggtttcctttgcagtgggtttgggtccaccccttcaggcgccagcccctcagtggcagagtgccggtgacggggcccgactgaggggagcacttctccacaggcccgtgaaggtggagcggacccggaagcggtccgagggcttctcgatggacaggaaggtagagaagaagaaaggtgaggcctggctgcccagcactgcccacactgagttcactgaggggaacggggacagccgtggcgtggctggcctgtcccgcctgtccctagagagggtgctcagcacatcctcggccggcctggccggcggtgcctccaggggtgggggctgagcctgcagacctggggcccccatgacaaatcctccagaggctctcaggctcctgcccttgaacagctggccccctgtggccctgcctgggcccacacggtgctctctctcctggcccagagccctccgtggaggagaagctgcagaagctgcacagtgagatcaagtttgccctaaaggtcgacagcccggtaagaccctcagggcctgtgagccaagcagtccccgctgccacctccctgccaggctcccttagatgtctcgggaaactgaggcaaagccggggtcctgcagttgggtgggccaggagtctgttccggttgctagtgagcgcatggggtctcctggccaagggccctgggggagctggtcctgacatgcagcacccagctttcccggcaggtggtgtgtggaggcccccaggaccaacccccacgtacctgggaccccaagtatctggctatccctggagttccccgtcaactggacgggggctgaggggagctgttctgcagatacagctcccctcaaggagagcccaggatgtcttcctccacccatcggggccctgggacccctggggatcccttggccaggccgtctccctcactcccaccccaccctgcaggacgtgaagaggtgcctgaatgccctagaggagctgggaaccctgcaggtgacctctcagatcctccagaagaacacagacgtggtggccaccttgaagaaggtatggcgggggaatcagaggcgcagggtgcagtcgggggagctgggagcaagtgcctgcccgggagcccaggcccccagcaggttcctgtcgggacagccctgggtcagcgaggaggccgtgggctgctgggtagaaatgcctggtgcttgccaggagtggtggctcacgcctgtaatcccagcactttgggaggctgaggcaggcggatcacgaggtcaggagatcaagaccatcctgaccaacatggtgaaaccccatctctactaaag

SEQ ID NO: 34192 - DNA, 1594 bp, Artificial sequence
  DNA replication origin
agaggtgcctgaatgccctagaggagctgggaaccctgcaggtgacctctcagatcctccagaagaacacagacgtggtggccaccttgaagaaggtatggcgggggaatcagaggcgcagggtgcagtcgggggagctgggagcaagtgcctgcccgggagcccaggcccccagcaggttcctgtcgggacagccctgggtcagcgaggaggccgtgggctgctgggtagaaatgcctggtgcttgccaggagtggtggctcacgcctgtaatcccagcactttgggaggctgaggcaggcggatcacgaggtcaggagatcaagaccatcctgaccaacatggtgaaaccccatctctactaaagatacaaaaattagccaggtgtggtggcgcacgcctgtaatcccagctactcaggaggctgaggcaggagaatcgcttgaagctgggaggcggaggttgcagtgagccgagatcgcgccactgcactctagcctgggtgacagggcgagactctgtctcaaaaaaaaaaaaagaaatgcctgctgcacagagctgtgctcccgggaggggctgcgggaggggcgcattgctggggcgaggggttcagagccggggctagggccgctgcacttgggtgagccaggcctcttctcttggtggccagattcgccgttacaaagcgaacaaggacgtaatggagaaggcagcagaagtctatacccggctcaagtcgcgggtcctcggcccaaagatcgaggcggtgcagaaagtgaacaaggctgggatggagaaggagaaggccgaggagaagctggccggggaggagctggccggggaggaggccccccaggagaaggcggaggacaagcccagcaccggtgaggggcgggtggggtgggccctgtacctcagtctcctcagctgaagaaacagatgctttgcagaacattccagaaggggagtacagctctactctctgccccaaacctgccagagtgtcatgtcctgttggggtctccgtgcagacccggctttaatccctggggcagccagtgaggggcattcaggtcctaccgtgtgccaggcagccagcatgcaggtaacttggggctcacgccagaggggtgacggggacagtgcatgacagcacacgcctccaccgtctcccaccctgggacgcccagagaggggggtggctctgtgcagcgggggcaaagagtgggggcattgttcagagaggcagtcggtggaggctcgggggcggaggcctcaggtgcccttgcttgcctggtgggccgacaggagatgaggtgtgaccctcggggctgctggctgtggggctactgggctgacatggccccattacaggtgctcagagcagccctttggagatgggatgggcgagcttgggatggggctttgcggcccagggggcagccgaaggctagtgtcttttttttcttttttcttttttttctgagatggggtctcgctctgtcccccaggctggagtgcagtggtacaatcacagctcactgcaaccttgacttcctgggcgcaagccatcctccacctcagcctcctgagg

SEQ ID NO: 34193 - DNA, 1484 bp, Artificial sequence
  DNA replication origin
cccccgtgccctctcgcgctcctgccggtcgctcccaggcctgtccaggtcgggaccctcccgtacgctgctggtgggaacagcaaaggcggtgtgaggatgccctcccgcccctgccctgcctgtagggcggttgggtgggatgggcaccgaggagtgtacccccgttgtggcacctgaggctcgagtgccgccctcctatctgcctgtcttctgccactagagaccacaaccatctccagggtccccacgctggcgccagccaggcatagcacaaggcagctgctgggtaagtgagtgactccactgagccttgtaccagacagcagcccacagtgatgggcacaggcaccgtcagatagccgggtgcccgtgctcggggcctacctacctgggccaccctggaggctcggcaagaagccaccttcccaggaggccaggggcaggcagctcaaagccctggagctgcctctctgtaggggccgccggaagtgccagccagcggggccctggggtcagctgtgaaggtgggaggcccgagtaaggacgacatccctgggacccatcccagagggactggcacaggaggagcggctcggacccagggtgcgcgtcacaccgctgccgctcaggagtccaaaccccacggcccgggacactcactcgtgcaggtcttcagaggagccacaccttggcccctcctccgagtcccgaccctcctcgtgctccttgtcctctgcgctctcccccttctgtgatgtggcctcgccattcactggggctgagagatctgggtgggacagaggggtcacaggacactgctgggctccagctgggcaccccagaacccttgcctgtcaaggactggaccaggggccaagctgagcgccgtgggtgacacatgcccatccacctggaccccagcacctgctgtccagtctgcaagctcctgacatgggatgctgcagccagccccagcccgagccacactggcctgcagaactgggggcccaagaaatgagggaacgtgggcagccctgagaaaagcccacagcagcctgggaaagacaaaggaagacaaggtcgggcacgggggctcacaatcccagcacgtgggaggccgagacgtgaggctcacttgagcccaggagttcaagaccagcctgagtaacatgccagcaaccctgtctctacaaaaaatacaaaaattagcacgtcctggcagggcgcagtggctcacgcctgtaatcccagcactttgggaggccgaggagggcggatcatgaggtccagagattgacaccatcctggataacacggtgaaaccccatctctactaaaaaatacaaaatattagcctggtgtggtgttgggtgcctgtagtcccagctcctcgggaggctgaggcaggagaatggcgtgaacccaggaggcggagcttgcagtgagccaagatcacgctactgcactccagcctgggggac

SEQ ID NO: 34194 - DNA, 1736 bp, Artificial sequence
  DNA replication origin
cggtgcctgtgcccatcactgtgggctgctgtctggtacaaggctcagtggagtcactcacttacccagcagctgccttgtgctatgcctggctggcgccagcgtggggaccctggagatggttgtggtctctagtggcagaagacaggcagataggagggcggcactcgagcctcaggtgccacaacgggggtacactcctcggtgcccatcccacccaaccgccctacaggcagggcaggggcgggagggcatcctcacaccgcctttgctgttcccaccagcagcgtacgggagggtcccgacctggacaggcctgggagcgaccggcaggagcgcgagagggcacggggggactcggaggccctggacgaggagagctgagccgcgggcagccaggcccagcccccgcccgagctcaggctgcccctctccttccccggctcgcaggagagcagagcagagaactgtggggaacgctgtgctgtttgtatttgttcccttgggtttttttttcctgcctaatttctgtgatttccaaccaacatgaaatgactataaatggttttttaatgaaaaaagaaatcacttttattggcttggttttctagcattgctggtgcagtgggggcctgagctggggcgcaggcggcagtgtcactgggcccgtttgggactgggttgagccatcaggccaccgtgagaagcgactaaaaggcactctgggcccagcccaaccctgaaaggccagtggcaggagagctgggcgggagcaagctcttcccaggagacaagagggacaaaccagggcatctaagctgtgctgcctgcgccctgccccgcacccacgaggctggggggtttgatgcttcctgcatctggcagcccagggtccaggcaggtgagcaggtccgatgtggggaggacgagggtccgcgaggctaggctgggagggtggagaccaggccttccctgagagccgctgctagccgacagtggtctccagcgttcagggagcatgggcctcaggggccagcctcgactcaccccagctgtgtcacccacacaccgtgtgactttggacaggttcccctcccactcggggcttctctttcctcctctgcataaggggctgtcacgtgggcacggtcccaagcaagtcaccccgtgctccgaagttgctcattccacagtggcgtctcgtgtttgtcgtcctgcccagcgtagccgagttgcctccgtcccagtaagaattaggctgtggtgtggcgggaagggacttcctgagctgcggccccatgcttggttggctggacgtgagctgcagtcactgtgcctgatttctgcaaatggctgtgtctggcatcctagcctccgatggccatgggtgtcgggctgaggagaaggcttgggaaggctcctgacccgtcccctctcacggcccgtcacctgaggcagtccttgccgtgccagcttccccggttcagagctgagctgaatgccccggcccctcacggcccctggtgcacacggtgacccctggggcccctccacccttcctccccctgggtctggggttcctgggctcgtgtcctaggagagcatggaaaggggacgacaaggttctcttaccgggtgagtggggatatggcttcctggggaggccgggctgaacggctcctccccgctggactgagcgcagccacggcacgtctcacacccgacctgagcctgcc

SEQ ID NO: 34195 - DNA, 1184 bp, Artificial sequence
  DNA replication origin
acccctgaggcttgtaacctgagcagacaaggagagcaggggggctgaggggaggccgggcgggttgcagagtggatattaggagcctggccttggacagggtgaggggagatgcctggtgggcaccgaggggacgcgtctgcatatgcagctggcttcaggtctccagcactggcgcggcgagggctgggagggcgacagcagtctggagtcgatattttgacggcgtgccgcatccctaccagccattgagatgatgaggaagatggggccctgtggacagggtggggcgtgggtgccacgtgctggggacacagcaacaacgaggacagagtcctgagtgttcccctgccaggggcggataaacaccaagtcaatgaacaccaaagccgcacgctgtgctcccgaggagaggggcagatgtgacgggagggactggggctgccacaccatgggccaggaaggtctcaccaagggtcacctggagctgaggccgaacgcggaccttgtgaagggcccgggaagcaggctcccggctgagtgggcagtgtgtgcaaaggccctggggcagaagcctgctggagtggccggagggcagaatggagccagtgtggcctcagtggagacagcagtggggtgccatgggagatgaggccagaggtgtcccaggggccagcccaccaaggccatggtgaggagctgggttttatcttaagggtactgggcagccacaggtttaggggtgaggagtgacacgaccccacagacactgtgttacgtgcactccctgatgacctcatggggaagtttgaactattgcctctttctgcaagacaacacgcccactgtggtacaactgacttggaactcgtggcctttctcccaggactgtgaatgtgcccaggtccctgggggagggggaggtgggggttgtgaaaggtcatttgccaagaagccatcatttccccactgtactctctctccagattgaaaaggcccagcaggctccagaagggcagccacgtctggaccagggctcaggtgccagtgcggaggacgctgctgtccaggaggtgggtctggcacagggctagggtccccccaccccgcccatgggtctccactcaccttgcgccttcctcccacaggagcgggatgccggggttctgtccagggtctgcggc

SEQ ID NO: 34196 - DNA, 1626 bp, Artificial sequence
  DNA replication origin
gagggtctaacccagggttctcagtgtggatgacctgcctccaggggacactagtccatgtctggggacatctgtggttgtcacaactgggggaagcccctggtggagagtagggacactgctcagcaccctgcagtgcccagggtggccccaccccagagaaccatctagcccccgtgtccacagtgccaagggcaagtctgtcctagggaccctcaggacacctcatgtcactgtggccacccccagatgcacagtcgctgccgtgcctctggcacgcggtacaatggcgcagttggaaggcgttcctgtaaacgccatggaggaatgaaggaatgggcccaccctcgcagcacgctgcaagcggctgatcacaaagcattttcccacctttgaatcctcacagcaaagtagcctgggccagaactcagcccaggcactcttcagaaggggagaaggaggccacaggaagagaagagctttgctcagggccacacgtgaaggatgctgggctgggaaatgggatgtggtgtgtgactcatcatgtctcacttgttcctttaagtgctactgaagaccctggatatccaggcctgcccttggggggtggggggcgccatggttggggaagacaattcacagatgaatatatagggcgtcgcgttggatgatgcttggaaaatggaacatgtaccaggataaggaagtggctgtgctggggctggtcaccctgaagaggggacacttgaagtcaggtctaaatgacagagagggagtgcgtcagaatgggcaggagtgtgatctgagcggagggcacggcccgtgcaaaggccctggggcaggactgtcccggcatgttggaggaataggaaggaggcctgggaggctggagccgagtgaggaggggatggggcaggttgggccggacctgggcttcgaccccaagggagttgggagccctggagggctctgggcagaggagcggcctgatccaaggtgggtttcatttaaaaggatcactctgatgggggaggtcaggccaccgggtgggggcgagggccagaggagacagtgggacgtaaacccaggcaagtgctgccgggcctcaggagtcacgctgtggtggtgagaagtagctgggctctgggtgtttcgaagtcagagctgcccgggtccgatgtgggaggtgagagaagaccccaagagacccctgaggcttgtaacctgagcagacaaggagagcaggggggctgaggggaggccgggcgggttgcagagtggatattaggagcctggccttggacagggtgaggggagatgcctggtgggcaccgaggggacgcgtctgcatatgcagctggcttcaggtctccagcactggcgcggcgagggctgggagggcgacagcagtctggagtcgatattttgacggcgtgccgcatccctaccagccattgagatgatgaggaagatggggccctgtggacagggtggggcgtgggtgccacgtgctggggacacagcaacaacgaggacagagtcctgagtgttcccctgccaggggcggataaacaccaagtcaatgaacaccaaagccgcacgctgtgctcccgaggagaggggcag

SEQ ID NO: 34197 - DNA, 1289 bp, Artificial sequence
  DNA replication origin
tcagcccagtttgcatggcccccttggccacattcgctgcccctgtgagcccagtggacatcgtgtctttcgtacccatgaccatagacttggtggtatccaggcccccctggatggcctctttggccaagttcacggcaccggtcaccccactgcagacagtgttcttggtgccagttaggacagtcttggtggtgtccacgccggtctggatggttcctttggccacattcatggcaccagtcaccccactacagacggtgtccttggtacctgttaggacagtcttactggtgtccacgccggtctggatggttcctttggccacattcatggcaccagtcaccccactacagacggtgtccttggtacctgttaggacagtcttactggtgtccacgccggtctggatggttcctttggccacattcatggcaccagtcaccccactacagacggtgtccttggtacctgttaggacagtcttactggtgtccacaccggtctgaatgcttcctctggccacattcactgcccctgtgagcccagtggacacagcatctttggtgccggtcagcacagccttggaggtttccacgccagtctggacagtccctttggccaagttcactgcccccatgaccccagtagtcactgtgtctttggtgccggtcagcacagtcttggtggtgtccacaccggcctgtacggtccctttggccacattcactgcccccgtgagcccagtggacaccgtgtccttggtgccggtgaggacagccttcgaggtgtccagacccccttggacggcccccttagccatgtccatggcccctgtgaccccgctggacaccacctccttggtgcccgtaagtgcagaccgagtggtgtccaggcctccctggaccactcccttagccacgtccaccacgctggccaccccggaggacacggcatccttggccctggacatcttggaacacaccaggtctttggccccggacaccatctgctgagaaaggacacaggtggatcaagagaaggactgagaggtgtactccaccccgatgtctgccagcccagccccctagtgtgctttggggcaaggaactgcaggcacccagaggccccacctcctcaaaaagcaagctgcttcctcctcaccccgaccccggtcagccagacattcatcgggctgtggtgtggcaccctggctctccgggatgaagtcctcatgagctcacagcgccagcctcttccattctcacgcaccccctttcccggctgca

SEQ ID NO: 34198 - DNA, 1536 bp, Artificial sequence
  DNA replication origin
aaactgaggcataaatatggggggtgagtggccgaaggtggctttcaacccagcctgtctccctgcaatgcccccccactcagtccctcggccgttcccccaccctgcactccgtttctgatgcaccatggcccaggctgggtgctctgcccatctgagctcatcagagtgagatccagactcccagggaggagcaacagctcccctggggtcacacagcccaggggctccccagcctcctgtggctcagcttgggcgatcagggacggtgacagggaacccagggttggggcagccgcctgagctgggcctccctctgggcccagagccccaggcagctgacttctgctccacatgccttggcctggcaataggcagcaggcagctgcggtgggggcggggcgggctgggcaaggggctgttcccccatgccaggctatatgaaccccgggactcagggtgggtgtccacccagcagaggaagttccacagagccctacttcagggaacagcggccctgggcttggggggagcccccagcggggttggggggtgaccaggtctggctggtagccgtggatgtcacctcctgctgtccctggcggggtagctgaaacattcctgaccttttaggctgtgcctggctattgtgcaatgggcagccgggtagatggttctaactgcatccctcactctccctgaccggcccctgtccccacagtggctgcccacccagagcagacggccccatggacggagaaggagctgcaaccttcggaaaaggtgagaggatgtgcagggcagggtctgatgtggcaggagccctgggggtgccccctcctgcgacatttcagttcctgctatctggggggctgctccctcctgggacatttcagttcctgctatctggggggctgctgtgggcctgagggaaggcagacagcctggggatcccaggcggagcttcccctctgagcctctatttccacatctgtgaaatgggtgcagtgctaccccactctaatcacgtaaggttccagtctacacagggctgtgcctggcaagatgagaccaaagcgacagcagcgtaagcactttatttcttctacttttattttttgagatgcagttttgctgtttcacccaggctggagtgcagtggcacaatctcagttcactgcaacctctgcctcccaggttcaagcgattctcctgcctcaacctcctgagtagctgggactacaagtgctcaccgccatgcccagctaatttttgtatttttagtagatacggggtttcaccatgttggtttcaccaggctggtctccaactcctgacctcaagtgatccacccacctcagcctcccaaagtgctgggattacaggcattagccactgcgcctggcaagaggatctgttttaatcagcattttccagatgaggatattagctcagagagggcatgtggcttgcctaaggccacacagcgagtgtcgggagcaggagagggtaaaaagctgggacttgaacctgggt

SEQ ID NO: 34199 - DNA, 1264 bp, Artificial sequence
  DNA replication origin
aggaggcctgtgtggctgggatgaagcaagcgaaggaggaagctgggggagatgagagcagagaagaagctggatgttacgggacgtggtgcggagtacgagagagaaacctgaagcaaaaagatggtaactggccaaggcatcctggtgcagcagagatttgaactacacccacctcgtggatggaactggaggctcaggggcccgggaggggagcccatctggcctgtgagccactcagcctgatgcaagctgtgggcaggaaacaggggaaaggtgctgggcctgggcccatgctgggctgggcaggtagccatgtgaccgtccaggccacctcccccgggcccattggccgcctgccgctgctggctgggcctgcgcctgccccggaccctataaggccagggagctgagggtagagccagctgccagccgggccggtccgtcctccaggggaccccgcgcagtccaggtgagcggggccgcgtctgcttcggtgacaccagggtgaggccaggcctgcaggtgggtgtcgggctgctcaggctttcagtggggagtgggtgtgggatgggaggctagggaacccccattcacgcaccttctctgcccccttccagcttctcacgttctcactatgtctgctccagacgaagggagacgggatccccccaaaccgaagggcaaggtaaagaggggaaatggggcagattcttgctggggcctggagatgccccagagccggggaaggtgacctccacagtcctggggtctcgaatctggagaggtgcttccctggtgggctggtgggggcggtctgggagccatgatgccaatcccttcctttctgacccaagctggaggcgggggacccacgcagacctcgacaccttccccagcaagtgaccttgggccggcctcagctccgcccctctctgagcctcagtttccccatctgtgcagtggggatcctggaaggaaaaggtctttggagatcgggtagacgatcttttcctctgtgcatgggaggcaggctgagtctgcccattgcccaggtgtggaaattgaggctgagtggctgaaacactttcctgaggtcacccaggagcaaggggccggggcggcattgggctgatcaatcgatgcttcctctgacccgttcctgccgaggcttggcctgctcatcctgcacaccccccgcccccatgcagaccctgggcagcttctttgggtccctgcctggcttcagctctgcccggaacct

SEQ ID NO: 34200 - DNA, 1163 bp, Artificial sequence
  DNA replication origin
ccctttgggaaggggaggggcacccagagctctcccagccacccttgggaagcactggctggtagaagaggttgggggacacccccccttctgttcccccactgtttggcaaacacagtgtcggctccaaggagacagacggcctgggaatcatcagatcctgtggctgtaccctccctcctcccagcccagtgcccagagccacccatggggtctgccctctcacccccaataacacagggctaggaaccctgtctcaggggcaggtaggagggggacacagcccagggtgggcgttacggccattcctctgcccacccacccacagacagcccagcacataggctgggctcagcacgaaggtcctgggtctgggtttgaatcccgtcctcaccacttcctggaacaggagggtctgggtttgaatcccatcctcaccacttctggaacaggacgcctcctccagggagcctccctgggttggcccaagccccccaggctgggtttccactcctagggtgcccccagcttggctggtgctccatcttggtctgcgttttggcccaagtcccttccggagagtgatgggctcccctccacactgaggacaccccctgctccttgccgagaccccgagaccccgcttctgcctgggtaacgcgaaggcagcatttgttcagtgcatgacctcatctcacagaggctcacaaccactctctgtgttgctccattgagccaaacgtgtattaagcgccaaatgtatgccaggcactgttctgtgggcggaagagggtgccctgtgggaacctgcagggaaggtgttccaggcagagggcacagcccgtgcagaggccctaaggcaggaccgtgccaggtgcgctggaggcatagcgaggaggcctgtgtggctgggatgaagcaagcgaaggaggaagctgggggagatgagagcagagaagaagctggatgttacgggacgtggtgcggagtacgagagagaaacctgaagcaaaaagatggtaactggccaaggcatcctggtgcagcagagatttgaactacacccacctcgtggatggaactggaggctcaggggcccgggaggggagcccatctggcctgtgagccactcagcctgatgcaagctgtgggcaggaaacagg

SEQ ID NO: 34201 - DNA, 1289 bp, Artificial sequence
  DNA replication origin
gcctgtaaccccagcgctttgggaggccgaggcaggtggatcacgaggtcaggagatcgagaccatcctgcctagcacagtgaaaccctgtctctactaaaaatacaaaaaattagctgggtgtggtggcgagtgcctgtagtcccagctactcgggaggctgaggcaggagaatggcatgaacccgggaggcagagcttgcagtgagccgagatcgcaccactgtactccagcctgggcgacagagcgcgaccccgcctcaacagaaatatatatatataaaatatattttttttatttatttttttttttttttcttttgttcttttgaggcggggtggcgctctgtcgcccaggctggtctcaaactcctgtgctcaagccaatcctcctgcctcggtctccctaaatgctggggttacagggtgagccatggcacctggcctgaggtatatattttttaaagggagaggagatccaggaatgcctctttgaggaagtgatatttgaggaaagacctggaaggaggtgagggatgtgggaaagggtgctggaggcaaaagcaacaacccacacgaaagccctgaggaagggtgtgcggggctaagcaggcacagtcacgtgtgtctttgagggactctgtcctggcatgttatgggaacagtgaaaaggcccgtgtggctggagcagagtgaagagaagaaggagaggaaggtggggagcagacgaggcaggttatgcagggcctaccgggctgcaggaaggggacttgggctttgaccctgggctcccaccccggagaaggtgggagccatggagggtgctgggcagaggaggggtagatcctggctgggatgtttatgatcactttttaattttttctctccacacactgggctgtggctgccctttgggaaggggaggggcacccagagctctcccagccacccttgggaagcactggctggtagaagaggttgggggacacccccccttctgttcccccactgtttggcaaacacagtgtcggctccaaggagacagacggcctgggaatcatcagatcctgtggctgtaccctccctcctcccagcccagtgcccagagccacccatggggtctgccctctcacccccaataacacagggctaggaaccctgtctcaggggcaggtaggagggggacacagcccagggtgggcgttacggccattcctctgcccacccacccacagacagcccagcacataggctgggctcagcacgaaggtcctgggtctgggtttgaat

SEQ ID NO: 34202 - DNA, 1430 bp, Artificial sequence
  DNA replication origin
gagacccccagctgcccggtcaagcacaccctgatgcccgagctggacttctgacccatgggccagtggaggcggggaggaaaggccacctgcacaccccgatccctgctgccccctggtggccacacgtaagctcgaggccttggccttgacccttctttggaatcaggcccaactccggatctctgaccacctttttggtattggactctcccattttttccttgaacacatggacaaagaggcccgggggagcagggcctcgaaccctattcaggccaacttgagccacaagctgggttcttcacctatgtcctgctccctggctccatgaagcgaatccaaatctttccaagaggctgggcacagtggctcacgcctgtaatcccagcactttgggagtctgaggcaggtggatcatctgaagtcaggagttcgggatcatcctggccaacatgatgaaaccctgtctctacttagaaagaaagaaaaaaaaaaaaaaagccaggtgtggtggtgtgcacctgtagtcccagctagttgtgaggctgacgcagaagaattgcttaaacccgagaggcgcggagcttgcagtgagcagagatcgcgccactgcacaccagcctgggtgacagagcgagactccatctaacaaaaaataatagtaacagcctcccgaagaaatacacattttgcccaatgccttctgtttggggctttgaaaagtgagccctgactgggtgtggtggttgacacctgttatcacagcactttgggaggccaaggtgggaggactgcttgagcccaggagttggaggctgcagtgagccatgatcttgcccctgcgctctcgcctgggtgacagagcaagactctatctcaaaaatgtttttaaaaaatacttcctagggaaacacacattttgccctatttggaactttgaaaagtgagccctcctctgcccatgggccgtgctgctcagcctgccatactcgcttgctttgctgtttgggatttgcctccagaataaaggtcctttttgttgttgaaaggcccacgtgtgtgttccagccagggtgagtctcagtcccagggggctgggggccacggaggtgtgtcactgctgagacatggagaagggggtgtgtagagccagagttcaagatctagaagaatggtgcttctctgacctgcctgtcatcctgtctgggatccaccgttactgcccagcccatgtggggtaagcattaccacttaaaattagccgggcaccatggctcatatcggtaatcccagcactttgggaggctgaggtgggaggatttcatgagcccgggagttttgacaccagcctgggcaacataggagaccttgtctctacgaaaaattttaaaatgacacatggtacgagcctgtgccccagctactcg

SEQ ID NO: 34203 - DNA, 897 bp, Artificial sequence
  DNA replication origin
acaggttgacagctccactgtgggtccatcagagaaaccgaggcaggacagcagtcctcctgggcgtccataggggaaactgaggtccccgccccctgcaggcagagctggagacgctggtgctgtcccgcagcctgacccaggagctgcagggcacggtagaggctctggagtccagcgtgcggggcctgcccgccggcgcccaggagaaggtggctgaggtgcggcgcagtgtggatgccctgcagaccgccttcgctgatgcccgctgcttcagggacgtgccagcggccgcgctggccgagggccggggtcgcgtggcccacgcgcacgcctgcgtggacgagctgctggagctggtggtgcaggccgtgccgctgccctggctggtgggacccttcgcgcccatccttgtggagcgacccgagcccctgcccgacctggcggacctggtggacgaggtcatcgggggccctgacccccgctgggcgcacctggactggccggcccagcagagagcctgggaggcagagcacagggacgggagtgggaatggggatggggacaggatgggtgttgccggggacatctgcgagcaggaacccgagacccccagctgcccggtcaagcacaccctgatgcccgagctggacttctgacccatgggccagtggaggcggggaggaaaggccacctgcacaccccgatccctgctgccccctggtggccacacgtaagctcgaggccttggccttgacccttctttggaatcaggcccaactccggatctctgaccacctttttggtattggactctcccattttttccttgaacacatggacaaagaggcccgggggagcagggcctcgaaccctattcaggccaacttgagccac

SEQ ID NO: 34204 - DNA, 1356 bp, Artificial sequence
  DNA replication origin
gggggtctcgggttcctgctcgcagatgtccccggcaacacccatcctgtccccatccccattcccactcccgtccctgtgctctgcctcccaggctctctgctgggccggccagtccaggtgcgcccagcgggggtcagggcccccgatgacctcgtccaccaggtccgccaggtcgggcaggggctcgggtcgctccacaaggatgggcgcgaagggtcccaccagccagggcagcggcacggcctgcaccaccagctccagcagctcgtccacgcaggcgtgcgcgtgggccacgcgaccccggccctcggccagcgcggccgctggcacgtccctgaagcagcgggcatcagcgaaggcggtctgcagggcatccacactgcgccgcacctcagccaccttctcctgggcgccggcgggcaggccccgcacgctggactccagagcctctaccgtgccctgcagctcctgggtcaggctgcgggacagcaccagcgtctccagctctgcctgcagggggcggggacctcagtttcccctatggacgcccaggaggactgctgtcctgcctcggtttctctgatggacccacagtggagctgtcaacctgtctcatagacctcatagtcctgtcccctgtagacacagaatgtgacccagccctgactcagtctccttcataaacacacaatggggccggtcgcggtggctcacgcctgtaatcccagcactttgggaggccgagtcgggcggatcacctgaggtgcggagttcaagactagcctggccaacatggcgaaaccccgtatctaccaaaaatacaaaaattagctgggcgtggtggtggacacctgtagtcccagctacttaggaggctgagacaggagaatcgcttgaacccgggaggcggaggttgcagtgagctgagatcgcgccactgcactccagcctgggcgacagagacagactccttctcaaataaataaatataaataaagtggaaagtggagagatggtttctaggctataggttcagggagagaatgtggagggagggaaagcgagaaggggcgggaagccagggactactgcttgcttgggccaacacccccctttccccccacctccctccatctcaaaaataaataaataataaaataataaaactccatctcaaaataaatacataaataaaacacacaatgggacttaaacctgcctcagtttccccccccagacacctcaactagctgagctcagcacttggtttgagatagcttgagttgggtccccggcagtactgggctgacccgcagtccgtcgctccccctcttcctccgcggcctggtggca

SEQ ID NO: 34205 - DNA, 916 bp, Artificial sequence
  DNA replication origin
ggaaagcgagaaggggcgggaagccagggactactgcttgcttgggccaacacccccctttccccccacctccctccatctcaaaaataaataaataataaaataataaaactccatctcaaaataaatacataaataaaacacacaatgggacttaaacctgcctcagtttccccccccagacacctcaactagctgagctcagcacttggtttgagatagcttgagttgggtccccggcagtactgggctgacccgcagtccgtcgctccccctcttcctccgcggcctggtggcagacaccacctcacctggcactcctgcggtctcacctggctccggcggcggctctccggagggcgctggccccattccccccacagctcgtgcaccttcccagggcaggccggggcggtgggggtcaccccacactgcatgtggtctatctgcaaggacagaaatggtggtcttcagagctgggggagctgggggagctgggggtcggggtggggtccaggaccactgatctggcctcagtaagcatttaggagaccgaggcaggttgtgcagggccgtggggaagacttgggcttggaccccaagggaggtgggagccatagagggctgtgggtaaagaagggacagacctgactcaggggctcacaggtgccctctggtggctgctgcggggagggaagagctgaggatgggaggattctgatgaggaggaaggctctcttctgacctaccctaacttgctataaattccagcttctccttcccctcttccacaaaacccctccctgactctccaggcagagccatgacatccctgggctcctccaggcccgggtcccccagccctgaacacatgcagctggagacagctgcacccagctccgcctcctgctttagg

SEQ ID NO: 34206 - DNA, 1014 bp, Artificial sequence
  DNA replication origin
atttaggagaccgaggcaggttgtgcagggccgtggggaagacttgggcttggaccccaagggaggtgggagccatagagggctgtgggtaaagaagggacagacctgactcaggggctcacaggtgccctctggtggctgctgcggggagggaagagctgaggatgggaggattctgatgaggaggaaggctctcttctgacctaccctaacttgctataaattccagcttctccttcccctcttccacaaaacccctccctgactctccaggcagagccatgacatccctgggctcctccaggcccgggtcccccagccctgaacacatgcagctggagacagctgcacccagctccgcctcctgctttaggctagcacgggatccggtattcagctggtgctcaatccatactgattggcctgcatcccggagcaggggcgggcagcgggctctcaccagctccagcgtctcctgcagctgggccagggtgtcctgggcacggtgtttgctctgcctcagtttccccacagagtgctcgtaggccaggtggcggatccgtgctgacagggagccgaggcgcacaaagtagccctgctgtctcctctgatcctccaccgaacccacttcagggccttcagcctcagccgccagtgccgctggaggacaggatacggggacagcacggggacaggatacggggacagcacggggacaggatacggggacagcacggggacaggatacggggacagcacggggacaggatacggggacagcacggggacagcatggggtcagcacagccacccaccccctccacatctgctcacccacctctgggtacagaagccacaggttcccacattcacagttccccttgactgacatcaacccatttggtcttccccaaaccctaagatgtaggcactatggtgggccctgttttacacaggaggaaaactgaggcaaaggagaggtgagatcctgcaggatccaagaagcagacccag

SEQ ID NO: 34207 - DNA, 2387 bp, Artificial sequence
  DNA replication origin
gcccggaccgccggcgggtggtgtccgcgcccacgggccccttggacccagcctcagccgccgatggcctcccgcggccctggagcccgcccccgacgggcagcctgaggaggccactgggcccccacgcccctccggccgccaccctgcgccgcacccacacgttcaacagcggcgaggcccggcctggggaccgccaccgcggctgccacgcccggccgggcacagacttggcccacctcctcccctatgggggggcggacaggactgcgccccccgtgccctaggccgggggccccccgatgccttggcagtgccagccacgggaaccaggagcgagagacggtgccagaacgccggggcccggggcaactccgagtgggtgctcaagtcccccccgcgacccacccgcggagtggggggccccctccgccacaaggaagcacaaccagctcgccctccccctacccggggccgcaggacgctgagacggtttgggggtgggtgggcgggaggactttgctatggatttgaggttgaccttatgcgcgtaggttttggttttttttgcagttttggtttcttttgcggttttctaaccaattgcacaactccgttctcggggtggcggcaggcaggggaggcttggacgccggtggggaatggggggccacagctgcagacctaagccctcccccacccctggaaaggtccctccccaacccaggcccctggcgtgtgtgggtgtgcgtgcgtgtgcgtgccgtgttcgtgtgcaaggggccggggaggtgggcgtgtgtgtgcgtgccagcgaaggctgctgtgggcgtgtgtgtcaagtgggccacgcgtgcagggtgtgtgtccacgagcgacgatcgtggtggccccagcggcctgggcgttggctgagccgacgctggggcttccagaaggcccgggggtctccgaggtgccggttaggagtttgaaccccccccactctgcagagggaagcggggacaatgccggggtttcaggcaggagacacgaggagggcctgcccggaagtcacatcggcagcagctgtctaaagggcttgggggcctggggggcggcgaaggtgggtggggcccctctgtaaatacggccccagggtggtgagagagtcccatgccacccgtccccttgtgacctcccccctctgacctccagctgaccatgcatgccacgtggctggctgggtcctctgccctctctggagtttgcctcccccagccccctccccatcaataaaactctgtttacaaccaccggcccccatgactctggctctgctctgcctcctgggggtggcacgggtgggggcaccctcaaaagtcaaggccaggccgggcgcggtggctcacgcctgtaatcccggcactttgggaggccgaggtgtgcagatcacttgaggtcaagagttcgagactagcctggccaacatggcaaaaccccgtctctactaaaaatacaaaaaatcagccaggcttggtggcgggttcctgtaattccagctactcggccgactgaggcagaagaatagcttgaatctgagagtcagaggttgcagtgagctgagatcacaccactgcactacagcctgggtgacagagcgagacgctgtctcaaaaaaaaaaaaaaaaaaaaggctgggtcaaaacaaatctggggagctgagtgtggaaacatggagacttcggggtccccatcttcatctgcataggagccagtttctttttctttttctttttctttttttgagacagagtctcactttgtcacccaggctggagtatagtggcgcgatctcggctcactgcaacctatgcctcctgggtgcaagcaattctcctgtctcagcctctccagtagctgggactacaggcacccgccaccacgccccgctaatttttgtatttttagtacagacggggtttcatcatattggtcaggctggtctcgaactcctgaactcaggtgatccgcttgcctcggcctcccaaaatgctgggattacaggcgtgagccactgcgcctggccagccttatgaattttgttttaagtgggacaagaagccatcagagagttttaagcagggatgtgatctcatttcattttaatggatcgttttgttactgtgtcactacatttcacaagccttccttcctctcagtccatgttgattaagaccaactaacggctgggctccggagactgggcagggcacaagactgacggagtgcagtggctcacgtctataaccccagcactttgagagactgagaagattccttgagcccaggagtttgagaccagcctaggtaacatacaaaagaattttttaaattagccaggcatg

SEQ ID NO: 34208 - DNA, 1029 bp, Artificial sequence
  DNA replication origin
tactgcgggagagggaggtgggtggagggtgtgtcagacccgcccatgatcccagatccccctgatctctgactgtgagaggggcctctgctgacggtgcctcctctccccattagagccgcctttgagcaggacgtgtccggggccagcacctcaggcttaggggactgcacaggtgagttggggggacggcaggctaagacccccatcccccactaccatgggggaggggagggaggaggctggaggaccctcgaatcctctgggaggtgggtggggaaactggactccatcagagaactttagaaaggcatggggtgggccgggcgcggtggctcacgcctgtaatcccagcactttgggaggccaaggtgggtggatcacgaggtcaggagatctagaccatcctggctaacacggtgaaaccccgtctctactaaaaatacaaaaaattagccgggcgtggtggcgggcgcctgtagtcccagctactcgggaggctgaggcaggagaatggcgtgaatccgggaggcagagcctgcagtgagccaagatcacgccactgcactccagcctggacgacagagcaagactccgtctcaaaaaaagaaaagaaaggcatggggtggtctcatctcatttattggggagggagataggggaagaacagagacaccaagaaacaggcaggctttggcaaggacgaagagacaacagaaggcagacagaccaacttcaacaggacagaaggggccaggcgcggcagctcctgcctataatcccagcattttgagaggccaagacaggacgatcacttgaggtcaggagtttgagaccagcctggggaatatagtgaaaccctgtctctaaaacaaaaacccaaaaataatccagacgtggcagtgcatgcctgtagttccagctacttgggaggctgaggcgggaggatcgcttgagcccagggaggtggaggctgcaatgagctgtgatcaggccactgtactccagcttgggcaacagagtgagaac

SEQ ID NO: 34209 - DNA, 1252 bp, Artificial sequence
  DNA replication origin
gtggacgtgggagccggcccctggggcaaccagaccgttgtcttcctgggttctgaggcggggacggtcctcaagttcctcgtccggcccaatgccagcacctcagggacgtctgggctcagtgtcttcctggaggagtttgagacctaccggccggacaggtaagtctgggcaaaggtgggaaggggtcgccagcaggaggggagatgggctgagatgcgctcagcctcaccactctgcttgtccccaggtgtggacggcccggcggtggcgagacagggcagcggctgctgagcttggagctggacgcagcttcggggggcctgctggctgccttcccccgctgcgtggtccgagtgcctgtggctcgctgccagcagtactcggggtgtatgaagtgagtgtccaccccaggccagccgtgggcgggaagcaagggaggatgggcacagggagggacagctgggttccagtcaaaagcccaatgatgtcctggtcattgagctgggcagagggcatggcccgtgcaaaggcccgcgggcaggaccactcctggtgtgttggaagaacagcaaggtggccggtgtggctggagcacagtgagcaagggggagtgagggaggaggggaggacggggaggggatgggagaggacgaggcagtttgtgcagagctttgtgagcctcggggaggacttgggctttgaccttgaaggagatgggagccatgtagggttgcaggcagaggagggactggccctgactcaggtgcttacaggtgccctctggtggctgctgccaggaggagactgcaggggaaggagaaccagggaccagggtggaggctgtttccccgtctctaaaatgggaggaaagctaggatgcatgccagtgctggcacacgcctgcactccatgtgagccgtcaatgcggaggaccctgcttcctgcccgccgttattgcaacaatgacccagtagctccgagtccaagggcacagcctctggcacgatgcctgggctcccatctcagctctgccacttgggcaaacatttactttctggagcgtcagtttgcttatctgtaaagtggggagtgaacagtgccctgcacacagatttgttctaaggactccagaagttgctattaagaagagggactgggcttggtagctcacgtctgtcatcccagcacttgggaggccaaggcaggaggactccttgagccgaggagttcgagaccagcctgggcaaca

SEQ ID NO: 34210 - DNA, 1549 bp, Artificial sequence
  DNA replication origin
ggatagagagaaagctaggtgagtggatggatggatgcatggataggtgaataagtggatgaatgaatggatggataagtgggtggatggatggatggatggatggatgggtgagttgggtgggtagatggttggatgggtgagtggatggatggatggatggatggatggatggataggtgagttggatgggtggatggttggatgggtgagtggatggatggatggatggatggatggatggatggatggatggatgggtgtgtgggtggatgggcagataaatggatggatagatgggtgggtgcatagatgatgagtgggtgaatgagatggatggatagatgagatggaagggtggatggattggcagatggatggatagatgaaggatggatggatgggtgggtggataggtagatggatgaatggatgggtggatggattggcagctggatggatggatggatgtgtggatggatggatggatggatgggtgggtgggtgggtgggtgtgttggtggatgggtagataaatggatggatgggtggatgggatggatggatggatgaatggatgggtgaatggattggcagatggatggacagatgatggatagatggatggataggtggatggactgatagatggataggatggaagggtggctagatgaatcgatgggtggatggatgcatggacagatggatgagtgcacggatggatggtagtgggtggatgagtgagtgggtgggcagatgagtagatggattaatgggctcatgaaagtgtgggtgggctgaagaacagacagatgggtaagtgggagggtgagcaggtagacggatggacaggggatgaaggatggataagtgattgtggctgggtgggtgggtggacaggtgaacagcaacagcaccaggtgtatctgacttccaactcaagtccctcgtcagggctgagtgctccacggctgctccgtagatgtcttcagcctcagggcctgatcatggctggaaaggaggccctggggaccagaaatggagggcaggaccctctcaccccatgcagggattcatggatccacctctgccccctcacttcgcatgatcagagcctctcaacttcatgccccactgcaccggcctcaccttctccaggtagttaaactccatcgcaatctcccggaagaagaagtagacatggctgccccactccaccgcatggacaaagtaaggctctgcaggacaggaggggtcagaactcagcccctgacatgacaaagggggtttctggggctaagaactcactggcttttatggtgaaggggggacataggctggttacccagacaatatgaaacagactcaaagtttggtattttgcaggggaagggaggtcagaagcctaaaatcgctgtgtctcttgctgcaaatggcaacatcaactattttttgttatcttcctccctcatgtgttgaagagctgagtcctgctatatcttttctgtggttccattttgggcttctaagccacccacttccagcg

SEQ ID NO: 34211 - DNA, 1682 bp, Artificial sequence
  DNA replication origin
aaatgccaggtcttgcctgtggctggggctgatcagatggaggttgggggggtacttaccagagaagagggcaacattggcgtgcttggggtcgtacgggcagcgggccataccgctgatgttgtctccgacgggctgcagggtgtctatctgcagggaccatggggcctgagtgacagatctcctgaccccacctagcagcccctggctccctcagccccccactccagggggaatcctgatccaccacggattactgtgtgaccttggccactcacttaacctctcagggcctcagtttactgatctgtaaatgggtttaagagtcaatgcctagttagacctgtaactggctcattacctaagtagctacggcttccccggccccctgtacaggcctcgtttggacagcgctgactcctcttgagctcagggggaggaggcagggagagtatatccaggaaggcttcctggaggaggtgacacggcctggggaaaagccatggccagcggaggtcgggcgagcagaggcctggaggttggacctggggcgcagggagtctgaagactcacgctgtagttggcgcacaccgggttgaaggcgttggaaccgcacacaaagagcgtggactcgtcccgaaggagcagcacctttacgaagtttcgacactcgccctgaggtggggacaggaggaagcggggagcgcgatgtgggcgtggtcatggtgatgggcgtggccagaacctgagttgtgtgggtggagggccggtctgttgtgggcatggccaaggcaggggctgaacctaggactggctggggacacggtgcgacccagacagggaaacactttgtatcagcaacgcaggcaaggccaggatggtgggcattgtcagactgtgggcataaccatggcaatagcagagtcctaacctgggatggaggagaaggatccgccctgggtgtggtcacggccgattggggtggggcatggtcgtgaccagaactaactggggcgtggtgggcacggttatagctgattggggccaagttgggagcgtggccagagctggtggggtgggcgtggcctgggcttattggggcgggccgggggcgtggggggcggcaggactgataggggaggggtcgggatggggacctgatcgattgggtggggagtgagctattgggtggcgtgtgaacatggcctgggcttgttggaacgaggctgggggtggtggtaggactgacaggggcagaagtgtgggcatagccagaactatttggggcgtggttatggataattgtggctaggctggaggccgggctaggaccaattgggtggggacgtggacgtggccatggctgtttgggggtgtggccagggctggcagttgggcggggccagggctgattgggggtgggttggggcgtggccagggctggcggggtgggcgtggcctggtctgattggggcggggcatgggtaatgccagggctgattcgcaggggccgggaccgagccagggccaactcacctcctgtttgcccttcatccgacacacgtttatgtcgctggggttagatctccaggtcagcttctgcagacagagagagctggtgagggggtaacgggtcccagcagccctgagtgaccccgccgtgctgggccgaatccacccag

SEQ ID NO: 34212 - DNA, 1323 bp, Artificial sequence
  DNA replication origin
tcacctcctcctgtcgcctggccctcgccatgcagaccccgcgagcgtcccctccccgcccggccctgctgcttctgctgctgctactggggggcgcccacggcctctttcctgaggagccgccgccgcttagcgtggcccccagggactgtgagtctgggggtgtctttgggcgggggtggagtcccgtgggagtatctgggttcccagttgggtctgctgcccccactgggggactcaagcagtccaggagccacccctagaaggggcatgacctcaggccaccctctcttcacccccagcccttgctcacacccctctccaccccctcactcagacctgaaccactatcccgtgtttgtgggcagcgggcccggacgcctgacccccgcagaaggtgctgacgacctcaacatccagcgagtcctgcgggtcaacaggacgctgttcattggggacaggtattgctggggacagcaaggaggcctgtgtgacgagcagaatgagcgagggggagagagagaggaggcgagggcagggaggggatggagcaggtcgtgcagggcctgttgggccattgggaggacttaggctttgacccggaggaaggtgggagccacggagggttttaggtaggggaaggactggacctgactcaggtgctcacacgcgcccgccctctggtggctgcttctgggagggggcgagaatggaatccaggggaccagggtggaggggactgggctgtccaggctggctatgattgaggctggaccaggtggaagctgtcgtggggagaagcaagtgtgagattacggggcttctagggatgggcttcccaggaaggagagagaccggacagatcaaatgctttggagaggatgaggaggatgcggaagtgaccactgggcttaactacacgaggtcaccaatgacgttgagcagggcggcttcctcggcaagggtgtgaggggagagagcctggtgggcgcctgggaggcgccgagtggggcacctgacctaaggccatgggacatggtgttgggggcagtccgtggggcgtgccgggcaggaggtggagtgcaggatatgaaggcctgctggggcccttgggggggtgtggtcggcgctagagttgctcgtgtcagaggcattggcatggccctgcatgcccccgtgtgcacaccacattggcagtgggaaggatggaacgggagagggtggcggagcccccagttctcactaactatgcccctcccccagggacaacctctaccgcgtagagctggagccccccacgtccacggagctgcggtaccagag

SEQ ID NO: 34213 - DNA, 1184 bp, Artificial sequence
  DNA replication origin
gggggaggcgcacaggcgtcgggtaaccccagatcgagggggtaaactgaagctaagtagatggggttcgttgtgaagtggcctggactccccgcagtaaacatttggggttcagttgtgtgttattatcaaaataagtaaaatggagcaggatctgtgggctccgctgatccctgacttcgggcaaatgactttacctttctgtgcctcagtttctctgtctgtataaggggcctattaagagaactcaccaggccaggtgcggtggctcacgcctgtaatcccagcacttggggaggctgaggagggtgggtcacttgaggccaggagttcgaaaccagcctaggcaacatggtgaaaccccatctctactaaaaatacaaaaattagctgggtgtggtggtacatgcctgtaatcccagctactcgggaggctgaggcaggagaattgcttgaacccgggaagctgaggttgcagtgagccgagatcacgccattgcactccagcctgggcgaagagcaggactcttgtctccaaaaaaaaaaaaaaaaaaaaaaagagcactcaccccttgggggtgttgtgaagattaaatgagttaatttaagtacttatgacaatgcctggcacctagcaagtgctttgtgtttgctaggtgttttgttgttgttgtttttttgagacagagtctcgctgtgtcacccaggatggggtgcagtggcgcgatctcggctcactgcaagctctgcctctcgggttaatgccattctcctgcctcagcctcccgagtagctaggactataggcacctgccaccacgcccagctaatttttttgtgtgtttttagtagagacggggtttcaccgtgttagccaggatggtctctatctcctgacctcgtgatccgcctgccttggcctcccaaagtgctgggattacaggcgtgagccacggcgcctggcctgttgttattttatttttttgagacagggtctcacgtggttgcccagactggagtacagtggaccaatcataactcattgcattcctgaactcttgggctcaagccatcatcctgcttcagcctcacaagtaactgagactagaggcatgtgccaccacgcctggttaattttttatttcctgtaggaattgtgagggggtgtctcactatgttgcccag

SEQ ID NO: 34214 - DNA, 999 bp, Artificial sequence
  DNA replication origin
cgcccaagaggggcgtgagtcgagggaaaagagagacggagagctggcggttgaggggggtgcaaggcgggacagaaagctgggagtgaggctggcgagtgtggggcatgggggtcgccagaggacagagctcccaggaagaagagctaaactagggggtccccgaggacgtttccattcctgagcttcagtttccacatctgcacagtgggctcatgtttgcagagctggagtgacagctgggggcctcctggagggagctgttgctttgtggcccctctcccccaacaaggcgcccccacagagtacatgcaagtccccagggttgcaggcaggagccccccaacccctggggcacgcagacatgtgggtgcacgggtgccccggagaaccccgcacgccacggggcgcacccgccagccccgtggctccctgtgaccaggtgtccggcagccgcagcgtggcaggtgttggggccgcttctgagcaggcaggcgccgagcggctgctggcagaggctcctcgagtttcacggagagaagcagatggtcttggggatagggggaggcgcacaggcgtcgggtaaccccagatcgagggggtaaactgaagctaagtagatggggttcgttgtgaagtggcctggactccccgcagtaaacatttggggttcagttgtgtgttattatcaaaataagtaaaatggagcaggatctgtgggctccgctgatccctgacttcgggcaaatgactttacctttctgtgcctcagtttctctgtctgtataaggggcctattaagagaactcaccaggccaggtgcggtggctcacgcctgtaatcccagcacttggggaggctgaggagggtgggtcacttgaggccaggagttcgaaaccagcctaggcaacatggtgaaaccccatctctactaaaaatacaaaaattagctgggtgtggtggtacatgcctgtaatcccagctactcgggaggctgag

SEQ ID NO: 34215 - DNA, 2940 bp, Artificial sequence
  DNA replication origin
gattcaaggtagattgaaagtaaaacttccctgctcaggcaaaaaagaaaaaaaaaaaaaaagggccaggcacggtggctcacgcctgtcatcccaacactttgggaggctgaggcaggcggatcacctgaggtcagaagttcaagaccagactggccaaacatggtgaaactttctctctattaaaaagacgaaaaaatttagccagtcatggtggcgggtgcctgtagtcccagctacttgggaggctgaggcaggagaatcgcttgaacccgggaggtggaggttgcagtgagtcaagatcgcaccactgcactccagcctggacaaaaagagtgagactccatctcaaaaaaaaaaaagaattttagctacagaccagctatcaggaaacaaaaaaatgtagaaaaaaacatatttcacctgccgcacattggttcagattacattctttcttcctcatggaggtgctttagggttgaattttaaatcacccacagtgtacagagatggggaaactgaagcctggagaagggaagtgactgtctgcggtcaaacagctgaggcagagccggggtttgaacctgggctgtgcagttctggagccaaagctcttcttctgggacttcttcagctgccgatgttttctgtccgggcctcagtttccccaaccagccagtgagattgggctgagcagggcggggcaggatggcttgtcgatggtgcccctggttcactggggtttttttttttttttttttgacagagtctcactctgttgcccaggcaatggcgcaatctctgctcactgcaacctccgcctcctgggttcaagtgattctcctgcctcagtctcccgagtagcctgggattacaggcatgcaccaccacgcctggctaatatttttatttttagtagagaaggggtttcatcatgttggccaggttggtcttgaactcccgaccccaggtgatccacccacctcagccttccaaagtgctgggattacaggcgtgagtcaccatgcccggccccaacaagcaattattttaattttattttatttgagacagggccttgccgtgtcactcagagtgcagtggggcaatcgcagctcactgcggcctccacctcctgggctcaagcgatcctcccacctcagcctcccaagtagctgggaccacaggcacacatcaccacgcccagctaatttttgcattttttgtagagatggggtatttctatgttgtccaggctggtctcaaacacctgagctcaagtgatcctcccaccttggcctcccaaagtgctgggattacaggcgtgagccaccgtgcccggccccaggtgattattttatttggggaatccacgcatgaagctgcacctctcagagtttgtgatgcacgtggatccctgcaggatcttgatcaggtgcaggcctgggtgagcgggcctggtcctgggattctgcatttctgacagtggtgcccacacagctgttcccagacccacactcccagcagcacacgggcctgcgtgtgatgggggaggagaggagggcataaagtggggagggcagaggcgtctgggttccaggaaggtccaaggggagcctctcttagatgacctgaagtgaggaagtgagttgcgtgtgtatctgggggaactcccaaagcagagggcacagcctggggtaaggccctagggcaggaccatgcctggcctgttggaggaacagcaaggaggcccttgtggctggagccaagtgatgagtgggagagagggaggaggagagggtagacagggcatggggcaggttgtacagggccttgtgggctgcagggaagaccccggctttgaccccgaggcaggtgggagccatggaggggtaagggcagaggagagacgggacctgactcatgtgctcagaggcgtcctctggtggctgtttcgggaaggacagcctggggatcagggcggaggggactgggctgggctgagctgggccaggcaggcggggatgtgagtggccacggcatggacgggaagcggtgagagttctgcgtaaactcgaaggcagaggccgcaggagtggctaatgctggctgtgaggctggtggaatggggtgtggcggggaagtcaggatgagctccagttgtgtcctaagccatcagctgagacggaggacgcagaagtggggccgggtcgggggacatcgaccatccgttgaccccgattggatcggtagcctcagtgccactccagcgagaaccccattagggtttttgttttatctgttgtttgtcttggaactcacaaccggatcctaaaacttacaccgaagcctcaggggccaagaacagcccagacgcgctggcctggaggagagaaggttgggggagagttcccccaggaaattcaggcccatgacggggtgacagtagctagggcggcgcggttctggggtcgtgccccgtatggctgagggtgagacttcatgagccccgtgcctggagcggctgaggggaagttgaaccccgaatccggagctgggggaggcctggctacagtcaggacggtgggtgtcatcggatatagacggggtttcgggacccaggagcgtacaaggccgcccaagaggggcgtgagtcgagggaaaagagagacggagagctggcggttgaggggggtgcaaggcgggacagaaagctgggagtgaggctggcgagtgtggggcatgggggtcgccagaggacagagctcccaggaagaagagctaaactagggggtccccgaggacgtttccattcctgagcttcagtttccacatctgcacagtgggctcatgtttgcagagctggagtgacagctgggggcctcctggagggagctgttgctttgtggcccctctcccccaacaaggcgcccccacaga

SEQ ID NO: 34216 - DNA, 871 bp, Artificial sequence
  DNA replication origin
gggggttgcaacgaccattcagaggaaattaaagtgtcatttatacccagcaggtaattaagggacccaggagggggtggctcgagggggctggggctccaagggaatccaggctggggctggggcgtcgagcacccacagattccaaagcaggtttggggacggacaggtcctcccttcagacccaatttggaggaagtacagaggggtgggtcgtgagcttgggacccagttgtggagttcagaggagaataaggttctgttatagggactccacttagggaggaagaaagatggcccggcctttgggggcttgatctaggggcagaaaatgaggagcccttcccctccaagttggggttctgggtgcccttccccgcactgctgaactcctcccccagaattcctccagtctctgcccctcccaagaggctggggatccccaggtggccgggaccagtgtgagaggcctggagggggccccgctgagagaggtggtggggaatgggggtggaggtctcagggagtgccaagtgctgctgggaacggaagacctggcgaatgaacttgaagaagacaaaggcgggaaataggtcccaggggaaaggccccggggtcagagcggaccacaagtcctggtgagtcagggctcaggaatgatggaggggctggcagagtgacgtgggtgctgggggatggggcttgagaaccgtcagactgtggagaacagtgttcgaggggaaggggcccccagtttgctgggtcatctcagggaggctgtcatccccatctgtgcctcactgctccccagagcctgaggctccgaccttcaaagagggacaacagcaaacacttacagggtgcctacccc

SEQ ID NO: 34217 - DNA, 1177 bp, Artificial sequence
  DNA replication origin
aggccatggactcagagcccctggggaagctgaagtagccattctgaattatcgccctcataggcagccgtagcatttggatcagactgacttgagattgaatcagttttttctctcactcactcatgccccctctctgagcctcagtttccccatgggtaaaacaggggttgctgttctgcctcccttagggttgaccatttaaacaagaggttgcaggcaaaatgccacatatagttctgttgggtttctgactccaagaaaaggaacaaccttgcaaagcagaaacgtggagcttctggccatgatctcatttggagctgtgggagcattgcttgcatttaacaagtggactgatgtttagtgagcacctattaagtgccaggtgccgcggacccagcaatgaccaaggcatagactactgcatcctgcccttgtcgaattcccagctgggtggggggacaggggagcacagacactaactagagaaagggcaaggtaaatcaggtatagtcagtgccctgaagacagttatcttgcaagtggctgagaagggcggggctgtgttcactgaggctgtcggggagggtgtctctgaggagatgacatttgagctgagacctggaagatgagaaggagctggtcatgcagagatcttgggaagcagcacttcaggcagagggcacggcccgtgcaaaggccctggggcaggacctcacctggcgtgttggaggaacaccaagtaggcccgtatggctgcagcagagtgtggaggggagagtgggaggagggaagggcaaggagagtacggggccagtcatgcagggcctcgtgggctgcagtgaggatttgagcttcgacccccagggaggtgggagccatggagggctgcgggaagaggagggacaggacctgactcttggtgccctctggtggcagctttggggaagacagacgggggcgaggctggaattgaggaccaggtcctggtaataattgatgggggccggccaggcaagggtaatagaggggggcaaagtggatggataggggacagatttttggagtcacccacaaaacttgctgagatggatgtgaagaggctgaaagcccctttctctgggggcagggcagtgctgtggttaacagcgcagcgtctggactcctgggcccgggt

SEQ ID NO: 34218 - DNA, 962 bp, Artificial sequence
  DNA replication origin
tcgcagaccctcacccccgccgccatgtggccctctctctctcgctgaggtctttgacatcctctacctgaggctgtcatctttgacccctagactggagcggaacggggacttggagttactggggtgctctgaggctttggggttctgggtttgggtttaaggagggaggagggagagagggactcatggctatggtgactgaagggggcccctgccccatttgtaaaattgcatttctgtttttctgtgttccttcagcttgtgagaaggtccaaattccctctccaaaataaaaattcaggacccctggggcatcccccttgcccccaaaccctttcccacatcccgggagaccagtttctttcaggcgcgggacttcaggatgtacctgaacaattgctttaaactctacatagggagagcacaggttgtggggtgggtggtggggaacggctggggccaaggctgagttggaactcacctgggagggggtcttaaactctccgggaagttgtctgggagtcactgccacccacacagagacgcctcggatattgggtaggtggcagcctggcgtcagcctcttgtctgttctgaaccggcccatcccaacagcaggtggggaaactgaggcccgaggaagccgttgaaacccaagagctctcctgcatcccagctcctcctaagggttgccctgaagctctgctcctcccttcttccccttgactctgggctatgcaggagctttgagaggaggcgcttagctgtgtggcctcaggctggtccctagtcctttctgggcttcagtctccccaggagatgcgctttggttttggactggagttgggggaggtgaggcagagaggggtcgcttgagactgtcttgatctgtgcctgccccattttgcctctggttcccccaccagactcggctggggctgagcccccacaggatctta

SEQ ID NO: 34219 - DNA, 1118 bp, Artificial sequence
  DNA replication origin
cggcaccgcagcgggtggagattttgtcctgggggggcccggagaagacacaataatgaggctcgcggctgcgccgctggggagctggattggggcccaggtggggggttcggggcaggcagggggcctgttggtcgggggttgggggtggcgttggggggcggggtcctgagagccaagtcgaggcgacccggggctggtgtgggggtcctggcactgggaggcccctccgccccacttcgcgtccggccgccgcaccttgggcgcccgagtcctctccggcctcctgtccagcccagaacaggacgagtcgcgggtccaggccgcggggcaggggtcgcagtggtgttggaggggagggccggccggtccggatcccccccgctgcagtgggggcctgggggttcgggggcccccaagagctgacaaaaggacaaagaaaacgtctatctccaagcgcgccgggatgggtggggggcgccgagtgtggccccctcccgcgggcgctgattggtccccggggtgggggtcacgtgccctcctctcctgctctccgcctctgggcgctctccgagtttggggcatctcccagagggggcgctactgtcatgaacccccacctctgccccggccgggttaatgctggagctaggagcgtttgcaagagtcctggggttgggggagggattcgcagaccctcacccccgccgccatgtggccctctctctctcgctgaggtctttgacatcctctacctgaggctgtcatctttgacccctagactggagcggaacggggacttggagttactggggtgctctgaggctttggggttctgggtttgggtttaaggagggaggagggagagagggactcatggctatggtgactgaagggggcccctgccccatttgtaaaattgcatttctgtttttctgtgttccttcagcttgtgagaaggtccaaattccctctccaaaataaaaattcaggacccctggggcatcccccttgcccccaaaccctttcccacatcccgggagaccagtttctttcaggcgcgggacttcaggatgtacctgaacaattgctttaaactctacatagggagagcacag

SEQ ID NO: 34220 - DNA, 1009 bp, Artificial sequence
  DNA replication origin
ccgggccgggttttgcgcggctccagcccggctttggggaggtggggggttgctggaaagggggggcggaggtggcagagccgcgagtcgcagcggcggccgcggcgggcggaggagatgcggccgcggcgcgcccccggtccggccgccgcgcagcgccccccccggagccgacgccagcgcgcggggggccggggctgagccccctcccccagcgcagcgccgtgggcccgggggcggggagagcgcgcgcccccagcccccctccccagccggggatgccgggctgagcggcccggccgggacaggtgcgcgcacggacccccccagcccgcgccctcccgccctcgcgcctcccgcccgcgcactcgcggcggccgcggctccgaggtaagcgccccggggcgtctgcggagggggttgggggaggcgcggggatgggggcgtctgtcggcacgcagctggggggaccgaaaggctggctggggtggccaggtcaggcgctaggactggggggcctgcgggccctgccactgggaggggacggatttggagccagggagggggtttggggagcgctagaacgagggggggaatctctcagccacacaactggggaggggaccggattggagagggggtcgctggccgtatggagggatccggtgggggtccggtggcatcgctttggaggggctggattttggcctggggcgctccctgagcctccattatgggggtgtctaatggcaccgcaacgtggggggggcgcttggattgttgactgggggcctgtatgtgcagctaggttgggggttctgtcggcaccgcagcgggtggagattttgtcctgggggggcccggagaagacacaataatgaggctcgcggctgcgccgctggggagctggattggggcccaggtggggggttcggggcaggcagggggcctgttggtcgggggttgggggtggcgttggggggcggggtcctgagagccaagtcgaggc

SEQ ID NO: 34221 - DNA, 1316 bp, Artificial sequence
  DNA replication origin
accccagccagcctttcggtccccccagctgcgtgccgacagacgcccccatccccgcgcctcccccaaccccctccgcagacgccccggggcgcttacctcggagccgcggccgccgcgagtgcgcgggcgggaggcgcgagggcgggagggcgcgggctgggggggtccgtgcgcgcacctgtcccggccgggccgctcagcccggcatccccggctggggaggggggctgggggcgcgcgctctccccgcccccgggcccacggcgctgcgctgggggagggggctcagccccggccccccgcgcgctggcgtcggctccggggggggcgctgcgcggcggccggaccgggggcgcgccgcggccgcatctcctccgcccgccgcggccgccgctgcgactcgcggctctgccacctccgccccccctttccagcaaccccccacctccccaaagccgggctggagccgcgcaaaacccggcccggagcaaccgcggcgcggagcggagggcggagccggtgggtggcgtttgggtgagttgtgggggaggcccaagggggtcaccctgctttggtccaggtggtggacttattaattgagccgccccaacttcctctcctggtcccctctgttcaaactcgcatccccaggatccagccccaatcacacccagcccatggggtcaatgaggctgtcaggaaccctacggtctgggtggcccccttcatagacgagatcatttcttcaatccacaagtattccatttagcaacattcactcgacacttcaggaaactgaggcacagggaggtcttgtccaaggtcacccagttagagagcgtcagggggttttcgacctgagcaaaccggctgcagagatctccatggttcacgactcccggacctgcccctctgtcgccagcgccctgtgggacgtggcccagaaaggagtttttcgaggactgcaggttcccccatgaatttgagaccccaggacagagcctagaggtttcagagaccttcctgtaaccctcctgacccttcgaatgaattcaggacagcaggggctgctctccatgcctcagtgcccctccctgtccaaagtacctccccatgtggatgtgatcctgtacgtctcccccactggactgagtgctgtcctggtcgctctggcctctctccatacagtagatgctctgtaaacacttattttttcttgtcttttctgtttttcttatctttttctttctttctttgagatggagtcttgctctgtcacccaggctacagtgcagtggcatgatcttgactca

SEQ ID NO: 34222 - DNA, 931 bp, Artificial sequence
  DNA replication origin
gtctctctgcctagaacgccctccccgcacacccctacccccacccccctgcttggatctatggtccctctaaggcctccatgccacctcctcgaggtcctcctggacctccagccagtctgtctcagcctgcagttctgtgcccactggtttctgtatccccaggctagacaaaaggcacagggcagatttgtcttgttgacagctcagtccagtatctggtacacagtaggtgctcaataaatgtttgctgaatgactagggtgcagaagtacccagctgggcacagccaagaaggcaggggagggaggggatgccaggggctgggcacagcgcagggaagggagtgtaggtgggaggacgcagattctagaccccaagccttggagctggggctcggccccctcccttgtggagcaggcctcagtggcccccagcgggcaggacacggggcggggtgggggctggacaccagcaggtgccttggctgatttgcctgggatgctggggcggccggaaggcgggaagggcaaaaccacgggcaggaaggcctggctgctcccggaggtttgtggtcaccaggatggccctgggaacatgcccaggaactggaagacctgggctgtctccatgggtgccagggagcctgcagattgccgtgggtggcctggggagcggggttcaagtcctgatacccagtccccactgagtggctgctggaagccagtgcacaacctgtctggaccccctggatggcacggagccagggatggggcatagtggccccagcactcagtaagtgtgcaagaaaagtcacaagctacataacaacaaagtgttggctggtctcagtggctcatgcctataatcccagcactttgggaggccaaggtgggaggatcgcttgaggccagtagttcaagaccagcct

SEQ ID NO: 34223 - DNA, 1042 bp, Artificial sequence
  DNA replication origin
ggacccccgggagtcacacagcggggcgacgaggctagtggtcctgatgggggcgcgcaggcattggggcggggcttcccttcctggcaggcgccggcagtaaggggccgagctcagcctcaccccatcccggggaccctgaaggccttctgacctcctccgggtctccccgggcctcctcggacccggggccgcagcccgggccgcactgggaagaaggtgtcggtggccgcgggcgcccgcaaaacccgcactggaatccacccggtcggagcaggacgggagcgctgcgctgccaacgcgcccgcccaggccggggaaactgaggcccagcggggcggggctttgctcagaatcccacggctgggagggcgctgctggctctggtgacctcgggcgatgccctgcccctccctgggcctccctggcccatcctgccactgtcctccaggtcagggctcagacagccaggagccctgggcgggaggagggagaggcccggcctgaccttgccccggtccaggacatgaaagacccattcatggtcgcagaagcctgggtggcagctgagccaccggtgggggtggggcctccctcaaggcctttgtccccgaggtctctctgcctagaacgccctccccgcacacccctacccccacccccctgcttggatctatggtccctctaaggcctccatgccacctcctcgaggtcctcctggacctccagccagtctgtctcagcctgcagttctgtgcccactggtttctgtatccccaggctagacaaaaggcacagggcagatttgtcttgttgacagctcagtccagtatctggtacacagtaggtgctcaataaatgtttgctgaatgactagggtgcagaagtacccagctgggcacagccaagaaggcaggggagggaggggatgccaggggctgggcacagcgcagggaagggagtgtaggtgggaggacgcagattctagaccccaagccttggagctggggctcggccccctcccttgtggagcaggcctcag

SEQ ID NO: 34224 - DNA, 1525 bp, Artificial sequence
  DNA replication origin
ccctggctgaaggtctcctgtgcacccggagcttgcatatataacccctctctcaatgagagggaagcagtgaggtgtagggaactcaggctgaccatgggaccaggcgtcctgggttctgggttggagtccttgtctccattcgaaatgcgcaaagcacctggagctgtgcagtgcacacagtaggtgcttaataagtgcttccgacattattatttccctggatacccctgctgcatactggggaggtggtcaccattatgtcctattttgctaaagagaaaaataagtgactctggtctcactctctgatcaatgggcctcagtttcccctttgatacaatgaaggcaagccctgttgaaatctcagactcccactcattcactccttcattcgttcattcattcaccacatgtgttgagtgcttactgtgtgcttggctctgttttaagcctcgtgacacagtggagtcctggacagacttgggaacttgactgtcttggggagggattggaagagaaacgagtaaatgcataagagaaagtcctattggtgaaaagttgaacaaaaccatcaaaacagggtaaagagggatgaagaggggaattatttttatttatgtatttagttaagagacagggtcttgttctcttatccaagctggagtgcagtggcgcaatcctagctcactgcagagtgattactgaaatgaggggaggctggggaaacactggaattgagatttggggtaggtgaggaaaggagccatttggacatctagggaaagagtgcacaaggcagaggggacaggcagtgtacaggccctggggcagtacaagctctgtgcaaaacctacatattcagagacactggctgtcccaataaagctgtacccttggcatttcagaatggagctgcctcctcctccaggaagccctcctggatcttcagtgacaatcatgattaggctgaaaaagcaaggcagggaggcagtctgtgtcaggctcaggggcaccaggcagggggcagggaagaggtctaagagaccccactcactcaccccaggtcacactcacttgccttaaggcccctccgattagggggatccctgagacactaatgctgtcctgagagttcttccaggacagtggcaccttcttcttaaaagctggggttcaaatccaggctccaccatttcctggctgtgggatcagtcaagtcacggctctctgggtctcagtttccacctttgaaaatggagtaatagcataatagtcctagaatcgtgggggtgcatatagcagaggcctaatatgttaagtcatcatcataattattaatatatgcgcaatacagggcatattttggacagcacgcccagggatgctgtgtggtttttggaaagggctccaccctctctgggcgccagactcccccaaatcctctcagcagctccaggagggaactggaggttgagaaagtgtcctcaacagaatcccggcccctttccgcgaagagtcaggg

SEQ ID NO: 34225 - DNA, 1369 bp, Artificial sequence
  DNA replication origin
ggatgaagggatgaagtcagaatttctgcccatcgcgcacttccatgctgggggaaccccagctcaaggatgaggaatcaggtgctgaggtccacgctgggatctgaaggggtcttcatggaggacggtccttctggcagggtctctgctcaggggagcccagcccgggactggtgtgccgggcagggggtctctgtagggagagtccctgccgaaggggctggaactgtgcggggcgcccctgaatggtcgaacctggagagctttgttgctcagatgaggaagggccagggaggccaccctggaccaaagggtcacgtttctattcttcctggcccagaatggacagccccagaagaagctgacagtcggggtgcgccccgcaaggggaggagctgagagaggggcggggctgagagaggagggggctgaggaaggagagggggctgagagaggggaggggcttagaggggaggggtgagggaggagaaggggccgagagggggagacgttcagaggggaggggtgagggaggagaggggggctgagagacgagaggggctgagagaagagagggggccgagagaggacggggttgagagaggggaggggctgaaagtggtaaagctgagaggagaggggcggggctgagaagaaggggcgaggcgggaaggggcagggctgagagaaaatgggtggggctgagaggagaggggcggggctcggaggcggggggcgttgtggggcagggctgagtggggcggggttgagaggagaggaagctgaggttggggaggggcgtggagaggggagggggggctcttcgaggggcgggaacagggctcaaggaggctgagtggggcagagggggccgcctaagttctgtcctcccctggggccccaggacacagggtcaggagtgtatcaagtcaccgggtttctgaccatccagaaacctgaccgcgtgcgtccccggggctcggggtcgcccctatcccatgctctacctccctccctctcctcgggccctcctggctccctctgacctccccaccgccagtcagctgtgtctgtatttagagcggtgcaggcctgtgtcactttacttccgaaagggattttgcatctcttagtgctgccttcagaacccccaacacctgttgcggcgcgagcccgtgccacggggagggggtggtctcgcttctggagccactgtgggggaggaggctcagctgcctcccctccccgagaaccttctccctttgtgcaccccctcccttctgagccccttctctaagtccccatgtccccctcccgtcccggagcccccccttctctaagtccccccggccctgccccctgccctctc

SEQ ID NO: 34226 - DNA, 1534 bp, Artificial sequence
  DNA replication origin
gtggccacgtgacccctcagctccagcccgcgccgggctcagcccagcgcctgcgcccacggcagagccacagcctcctcattaaagcaggccttttacttaggcaggcgctgccaattctaattgattgtctgcgtccctgggggcactcgagttcccgaggtcagcagctgggccgggtccaggccgaggcaggcgggagggaagccggctcccggagagggaacaaggcgtggagattggacccgccgcctctacctacgcgctccctcctgtggcccccgggactggggcacgcgctgccctgcaggctcaggttccggaggctgatgtggcccccaccccagacccgtgcaagctcctggtatgtgtgatgttcctgcacctggtcatgccaagaacacgtgttgacaaacccacaggtccagagccagaggtggtagcacacaggggctggactcggggtggtgggggggcgggggtggggggaggagaggggagtgggggggctcaaatctaacagctctatgcctcaattttcccgtctataaaatgggatcctaatactactacctttttgttgttgttgtttttgagaccgagtctcgctgtctcccaggctggagtgcagtggcgcgatctcagcttactgcaacctccacctcccgggttcaagtgattctcctgcctcagcctcccaagtagctgggattacaggcaccgaccaccagacctggctaatttctgaatttttagtagagacggggtttcgccatgttggccaggctggtctcgaactcctgacctcaggtgatccacccacctcagcttcccaaatagctgggattataggtgtgagccaccatgcccagcctctaataccacctttctcacggggcttcttggggtaattaaataaatgcatgcctaggaaatgctgaagcccggctctagcctgtacttagtgttctgtggaggttatcacttatgcatttccacaagtattgagcacctactgtatgccaggctgtgcagtttcagtagtgaatagaacacgcagattgctgtccttgtagagctgacattcaaatggtgagagagagtaaacctaattttaaaaaagtgaacattggggctgggcacagtggctcacgcctgtaattccagcactttgggaggctgagaggggaggattgcttgtggccaggagttcatgacaagcccgggcaatagcaagaccccatctaactttttaaaattattattttattttattttattttttaagacagactgttgcgggctgggcgcagtggctcacgcctgtaatcccagcactttgggaggccgaggtgggtggatcacgaggtcaggagatcgagactggcctcaccaaaatggtgaaaccccgcctctactgaaaatacaaaaattagccgggcgtggtggcgggcgtctatagtcccagctacccaggaggctgagccaggagaatcacttgaagccaggagaatcgcttgaacccaggaggcgg

SEQ ID NO: 34227 - DNA, 929 bp, Artificial sequence
  DNA replication origin
acaatgtgtgcttgttcctatctgcctcctgctctggaatgtcaactccaggagggcagacttctgtctgtcttgaatgccacagtgtcccctgtacctcaaatactgtttggcacacagtaggcactcaatacgtgtttgtttattccgcaaacaactatgaagcacccactgtgttgttctcacacggaggtggagtttttcatgctccgaggacttggggcagagagaaggacaagtaggagccacggtgactgcgacttccttttttttttctgcagcctcaggtgccagcagcaataacacaggacctctaggcagaggaagggaagaggcgctgagggaggcagggcttctgcggcggggaggggggggcagagcccctggggatcaggccagggaggcgggagtcctgctggagtccctggggtccccagcagagaggctggctggctgccctgccctggcctggctgctttttctggcttggacgggaagggctgacaccgccagaggagggcagggtggaggcggggagggggcccgcacctggacccaggaagaggtgggggaaagaagtggagcctgggaaggggagacagaggaggtgaggagagaaagagagaaaccaagagagatagaaagagacccacacagagaagctgagctggagtcagacagataaaagacacggagagactcacgcagaaggtggcaaagacagaaacacagagagatggacagagacagtcagagataaagggagactcagagagacagaggagacccacagagatacagactcagagagatagagagacacagacctagagagagagagaacaacagagacagagatagaaagagatagtcagagataaaaggagactcagagagatggagaattagccgggcgtggtggcgggcgc

SEQ ID NO: 34228 - DNA, 1333 bp, Artificial sequence
  DNA replication origin
acgcagagacagaggagagggagagacagaggagagggagagacagaggagaggcagagacagaggagaggcagagacagaggagagggagagacagaggagaggcagagacaggagacgcagagacagaggagagggagagacagaggagagggagagactgaggagacgcagagacagaggagagggagagacagaggagaggcagagacagaggagagggagagacagaggagaggcagagacagaggagaggcagagacagaggagaggcagagacagaggagaggcagagacagaggagagggagagacagaggagaggcagagacagaggagagggagagacagaggagaggcagagacagagaagagggagagacagaggggaggcagagacagaggagagggagagacagaggagaggcagagacagaggagaggcagagacagaggagagggagagacagaggagagggagagacagaggagaggcagagacagaggagagggagagacagaggagaggcagagacagaggagaggcagagacagaggagagggagagacagaggagagggagagacagaggagaggcagagacagaggagagggagagacagaggagaggcagagacagaggagagggagaggcagaggagaggcagagacagaggagaggccgagtcagaggagaggcagagacagaggagaggctgagtcagaggagaggcagagacaggagaggtgggggaggaaggccagaccatccccctgtgcccagccagtgccagatccacagtggcgtggggaagggagaaagtggagaagagggaggggtggggaagaaggtggtgggtgaagctggtgccccatgggaggagcagagacaaaaagatacagaagcagagagacccaggtggggggtcgggggaagacagagaaagagagggctggggagagagagagaagaatgagaaagggcggggagagagggggaaagagagaatgagaaaggggagagagagaaagagagggggaaggaaagaggagggagagagaaagagaaacggagggagaaaggggggagagggagagagagagggagagagggagatgtagacacagagagacgtgtagagacccagagatacacacagagataaggagagacggagagatcatcatggagaactgggagagagggagagagatgtggccagccctagacactcagagtgctgttcggatcataatcgcctgagtagcttttgggggttcttttagcaggcatcatggggtattcgggccagtcttggccagtgctggagcct

SEQ ID NO: 34229 - DNA, 1774 bp, Artificial sequence
  DNA replication origin
ggctgtgcaacctgcagctagcgaccctcttctccgggcctctgccccggcccagtgccatgggatcccgtttgggggagctatggaaccttgaatgtggggtcgatgggactccgtttgcggggatgatgagaccctggttgggatgggggatgggattccgtttatggggtgatgggatcctggttgcggggggacgatgatatcccagttgaggggcttgaaggaggcggcttattctgttctgcaggagcctgtgggactcgtcttgggggccagaacgcactcccctcccccttacccctctcccagtggtaactcctacacgtccgccatctgtccccaggccatctgtctgtctctgcaagaccctttccaaggccgcttgagaaagggagtgggtgggcgggcccagagcagggacagaaggaggggagcgaatcttgctggagcgctcacctctcaaagtccaggcccgggggcctcctggaactttcccaaggtcactggaagagagggaggggctgtcaccctccctggggtcgggggctgggcatggggtcaggggcgcactcctttccccccaaccactaaaccaactccctctatcttcctgctgccagagaaggagccagcctgcccccgaaggagggtggatttacaagtgtcagccgtgcagacgccagcctgtgtcagccgggtgtctggggaggtagacggtgcgtgtgtgcccgtgtgtgcccctgtgggtgggtgggtgggtgtgtttggggagagggcagcccgatcttctgctgcccctggggatagagcgtccttagtcatcccgggcaggaaaggaaacttcactttttggaacctcagtgactgcatctggaagatggatgcagtgatcgtagcagattcagagatttgtaaaactgcaaggacagggtgctgggactcagcactcttgcattgtctgatggcctcaataagacaccggcagccgggcgcggtggctcacgcctgtaatcccaggactttgggaggccaaggcgggcaaatcacttgaggtcagttcgagaccagcctggccaacatggtgaaaccccacctctacagaaaatacaaaaattagccaggcgtggtggtgagggcctgtggtttcagctacttaggaggctaaggcaggagaatcatctgaacctgggaggttgaacctgggaggttgcagtgagccgagattgtgccacaggactccagtctgggtgacaaagcaagactctgtctgaaaaaaaaaaaaaagaaaaagaaaaggaaaaagaaagaaaacagctgagaatcgccgcacccagagatcagaaaagctagggtatttatcccctcatgttcaaccagcgttgacaaaggactactcccaggaaccttagctctgggcagagagaacgccccaaaacagggagatatgtctgtggttctgagcagctgctacaggacatgactcagtgtgggctgatgagagccagccccggggcttagtccagaactacagaggaggcagcaccagcctggggaaataccagctgggatctgctaaggactggtatgagatctgccttgtggcagaagccaggggaggagaacagagctaagtccgggaaggagactgaatactggggccccttgatcaaactgtgcctgaagcccctctagactaggcaaggacatttctctctctctctctttctctctctctccctctccctctctccctcctctctcctctctctct

SEQ ID NO: 34230 - DNA, 809 bp, Artificial sequence
  DNA replication origin
actctattggagtttgaggcttggctcaggaccagggctcaaagacagatcagaggctctatccaaagttggggtctcagcccaggtcccagctctactgggattgaggtttagcccaaggcgggagctcagcccagtgtcgcggttccttaggaggtcggggatcgatccagagttgggggctctataacccggtaaagctcagccgggtgggagtcgggtccggagtcccgagggtccgggagtcgccgccgcgccgtttccgatcatgcccggcagagggcgcgctctgcccacagcccgggctggcggcgccttcgcttccccggaacccgcggccggggcgggcgggatctgcgtgcggggcggggtctccaggcccaagtctccccgcggagcctagacccaccagagtcacccgcacccccaggccaggcctcgcaccctgccgggctgtgcaacctgcagctagcgaccctcttctccgggcctctgccccggcccagtgccatgggatcccgtttgggggagctatggaaccttgaatgtggggtcgatgggactccgtttgcggggatgatgagaccctggttgggatgggggatgggattccgtttatggggtgatgggatcctggttgcggggggacgatgatatcccagttgaggggcttgaaggaggcggcttattctgttctgcaggagcctgtgggactcgtcttgggggccagaacgcactcccctcccccttacccctctcccagtggtaactcctacacgtccgccatctgtccccaggccatctgtctg

SEQ ID NO: 34231 - DNA, 1611 bp, Artificial sequence
  DNA replication origin
agtcccacaggctcctgcagaacagaataagccgcctccttcaagcccctcaactgggatatcatcgtccccccgcaaccaggatcccatcaccccataaacggaatcccatcccccatcccaaccagggtctcatcatccccgcaaacggagtcccatcgaccccacattcaaggttccatagctcccccaaacgggatcccatggcactgggccggggcagaggcccggagaagagggtcgctagctgcaggttgcacagcccggcagggtgcgaggcctggcctgggggtgcgggtgactctggtgggtctaggctccgcggggagacttgggcctggagaccccgccccgcacgcagatcccgcccgccccggccgcgggttccggggaagcgaaggcgccgccagcccgggctgtgggcagagcgcgccctctgccgggcatgatcggaaacggcgcggcggcgactcccggaccctcgggactccggacccgactcccacccggctgagctttaccgggttatagagcccccaactctggatcgatccccgacctcctaaggaaccgcgacactgggctgagctcccgccttgggctaaacctcaatcccagtagagctgggacctgggctgagaccccaactttggatagagcctctgatctgtctttgagccctggtcctgagccaagcctcaaactccaatagagtctccatcgacctgagctcccaactcagggctgagcccccctctaggctgaggtctgatacggaatagagcctgcgaccccttctaaatcccgactctgggctgagcctggaccctcgatagagtctccaactctaggctgaaccctaaccctgggctgcacccttactgtagacagagcccaatcccagcagaggccctattctcactaagccccatcacccagtaagcctgcattcccggccaagatcatccctcccccacccctaacacccactgaaccctagccctcccgagtcccaaccttcttatctgatacagaaaagagaccaggtgtggtggttcttgcctgtaatcccagcgctttgggaggcagaagcaggaggatcgcttgaggctaggagttcgagaccagcctgggcaacatagtgagacaccccctatctctatttaaaaaaataaaaattagccgagcttggtggtgcacacctgtgatttcagctacttgggaggctgaggcagaaggattgcttgaacccaggaagttgagactgcagtaagctgtgactgcaccactgcattccagcctgggtgacaaatcgagaccctgtctaaaaaaaaagaaagaaagaaaaaaggtgaaatcatgctaggctcagatgcctccagtcctcctgccctgatggggagacccccttgatgctggggttgcgagaggagctgtacacaccacaccaaagtcagacctaatcaggtcctaatcccatctctgcctcatctggctgtgtggcctggaacctatcccttcctccctctggggttccatttcgtcatctgtgaaatgggacagtcactcctgactctaccaccttgtgcctgtgtgacctcaggcaagtta

SEQ ID NO: 34232 - DNA, 1713 bp, Artificial sequence
  DNA replication origin
acctatacagcgagagtgacagagagacagacggaaactgaggcaggaatgtagacggacaggcggtggggtgcagaagcattaaggggcgggagagacagagggcggccaggtggcccccgagatgcgctgaaatggggggcgccccggcactgctcgctcacctactctcgaagcagagtccgtacgtccaaccgtcgggggtccgtccagccgcctccgtgggccggggccgttgccgcggcggtgggagcagcgccggagccggggccggggccggggcggggcgggcagcgcggccccgccctccactcgcctcgcccctcggcaggccacgccctccactcgccccgcccgcgcggaagggaccggagagttgccaggcctggggggcgggccgagcgctccggattagccaatgacagggcgggcaatgtacgaaaaggccaatgggagcagggcactgcgacgggggggaagtggggggaaggggcggagcctgggggcggggtcaggcggctctgggggattcctccggaatcgcgaaggggcccggatgcgggggcgaggccgtcgtgggggtgccggccacagaaaagggaagagataagagtacgagacagacagagaacctggggagggaggcacagagacaccaacaggaagagaccagagagccaaaaggcaaaacagaccaaccacgtggttctgcacgggccccttcctccttctggggctagtttacccgcctgggtaataggaatttcggcagaagcgtgtttctcaaagtacggcctcggggaacccttcgcgtcagaaagatctgagagtccattttaaaatgcagattccaactaggtgtggtgcctcacgcctggaatcccagcactttgggaggccaaggcaggaggatcccttgagcccaggagtttgaaaccagcctgggcaacctagggagaccctgtctctacaaaaaaaaaaaaaaaaagaaagaaagaaaaagaagaagatcaaaataagttaaaattttaaaaatacagagttctgtgccacaagaagggatgaatctaacccagggttgtggggctatagatgaatctttggggtgaggtggagggctcctggagacctcatcagaggatccccaggtccagcctcgatttccgtaggaatgagcctgcaggacacacaggagcctcccggctgcgcagcgccagctggggtcccccggggaggatgcagctgtgagtcctgggaaccaggccctggagctgctcccaggtcccctgcagcaccatttccgccctgcagcccaactctgggtcccggttgcagctagggcctagggagcccatagcaacctcgctgcttcttcctccaggaagccagacaacaaattgttgagggcctgttgtgtgtcctgacctgcacacgggattcaggaagaccgaggcacaggcctcaggaggcaaaagtaagttaaatatctcattggctgggcccggtggctcacccctgtaatcccagcactttgggaggccgaggtgggcggatcacctgaggtcaggagtttgagaccagcctggacaacatcgtggaaccccgtctctactaaaaatacaaaaattagccgggtgtggtggcacatgcctgtaatcccagctactcaggaggctgaggcaggggaatcgcttgaactctggaggcagaggt

SEQ ID NO: 34233 - DNA, 2958 bp, Artificial sequence
  DNA replication origin
cgtgcagaaccacgtggttggtctgttttgccttttggctctctggtctcttcctgttggtgtctctgtgcctccctccccaggttctctgtctgtctcgtactcttatctcttcccttttctgtggccggcacccccacgacggcctcgcccccgcatccgggccccttcgcgattccggaggaatcccccagagccgcctgaccccgcccccaggctccgccccttccccccacttcccccccgtcgcagtgccctgctcccattggccttttcgtacattgcccgccctgtcattggctaatccggagcgctcggcccgccccccaggcctggcaactctccggtcccttccgcgcgggcggggcgagtggagggcgtggcctgccgaggggcgaggcgagtggagggcggggccgcgctgcccgccccgccccggccccggccccggctccggcgctgctcccaccgccgcggcaacggccccggcccacggaggcggctggacggacccccgacggttggacgtacggactctgcttcgagagtaggtgagcgagcagtgccggggcgccccccatttcagcgcatctcgggggccacctggccgccctctgtctctcccgccccttaatgcttctgcaccccaccgcctgtccgtctacattcctgcctcagtttccgtctgtctctctgtcactctcgctgtataggttagggggagacagattgagtctcaattgccccccttggcgtggggctctgctctgggaccagcacccccatcccccatgtggactctagtggactctgccccctttaactgtagggccgcaggtgctcaggccagattccagaaccctgagggcattccaggcggtgggcagctgggccagccgtgcggaggtgggcatgactgtagcttctagctaaaccaggcatcggtccaggcatcggtggcggggagccaggcctaggccagcccgggcccacccagactggcccctaatgagctcccaagtggcctgtggggacttggcctcagttttgccagctgtgaactgggaccgtcgctgctaaggtaattggcaggtgatctgaaggacacctgccgcctcctggccttttctgtgaagtcgaactaggcccatttcctgggatgggaaactaaggcctagaaagaggccaatgcttccaatgtttgtccagggaagtggggacagaggcaggacagaatctgttttctctgcatcctcacatttcccagcaccttctctatggaggggggaagggctggtggaggagcagccccaggtgtaaacaggccgccagagtttatttcctgagccagtcccagctcagctggaggcgatgaacgccttgggaggccccaggggggccagcccagtggtggcggagcttggaccaatctaggtttgagctctgccacccgcatgatatcttgaaccagtttttcaattctgcggagcctcagtttcctcatctgtaaaacaggagtgggtcgtaactccccaagttgagggctgctgggggatcagatgcaggaatacaggccctgctcataacctgcctgactctcgctgtggctctgccccagtcacactggcctcctcctgtttctccaacaccccaggcgaggtcctctctcagggcctttgcatgggctgtgccctctgccactacggcaggtccgagggcgccaactttgaaacataacaagctccctggatgggccggacccaggacctgcacaggcaagggctgggaggggcagaggaggggccgctcagggacgctgtacctatggaaaccgtgaacaaagggctgtctccagccacacaaacacctgggtgaatcgggcactggccagaggctggagcagcctgggatacaggtggtgggtgagtgcctggacccctgcagggaatatggggccgggggggggacttgaaccctgctccaatggtggggtggctctgcagacgggtgcaggtctgaggccccgcggtacggcccctcccactgtgtggccttggaccgacggtcaggtgcccccagagcctcagtttcctcatccccgttcccccaggggtcagcccaggtgggtgaggggtcttttgattgcttgacaattcagtatggtgggttccggaggcctcagtgtccctgtctgtccaatggggccacgaaagggtgccttgaggacaaaactccagccgttgacaggggaacactcctcccagagagacgtcaacgctaaaaaatgactcacacttgcccaggtacagctcaggtgttacagacggggagcagggcaaggaggcagagcgagaggcaggaacggcccagttccacagcatgcctgccccttcccagcatctcccgacacccctcagcagatgacctccctggaatcacacccgctcgagctttgacgcagggacctctggcagagttcttgggatcttgtaaatccccagcttctaggcctcagtttccccatctgtccaatggggctggtcatctcctttttcttgtggggctgagataactgtggggagggagggtgctttgaggggtgggggagattcaacaagatattgttaaaagcccgaggaggggattacaggacacagtacttctagaagcttcctaaggcttcgatccttcccctctggggtgggctctgggagagacgagacttgaaccccaaatgtgccattgactaggatgaggaaaggattgcactaggttaaaggctgggttcaaattctgattctgccacatcactgctttataaacaggcaagctcctgaccctctgtgactcagtttccttataaccaaaaacttgcaggtccatctagagaatttcccagcctgggcaacatggtgaaaccctgtctctacttaaaacaaagaaaaaaaaattagccag

SEQ ID NO: 34234 - DNA, 1051 bp, Artificial sequence
  DNA replication origin
gctgaggtgggaggatcacctgagcccagggaggttgaggctgcagtgagccgagctcatgccactgcacttcagcctgggcgacaggagtgaaaccctgtctcaaagaaaaagaagagaattggctgggcgccgtggctcacgcctgtaatcccagcactttgggaggctgaggtggccggatcacctgaggtcaggaattcgagaccagcctggccaagagggcaaaaccctgtctctactaaaaatacaaaaatgaggcgggcgtggtggtgggtgcctgtaatccagctactcaggaggctgaggcaggagaaacacttaaacccaagaggcagaggttgcagtgagccgagattgcaccactgctctccagcctgggttgacagagtgtgagactccatctcaaaaaaaaaaaaaaaattaaaaatatacacataaaataaataaaatagatgggggatctgggagggcttcctgaggaggggccatgtaaacccagacctggatgacaagaaggaaacagccatgtggagacctgggagaagagcagctcaggcagagggcacaggttgtgtaaaggccctggggcaagatggcgcctggcatggtagaggagcagcaaggaggcccgtggggctggagcagtgaggaggaggagagagggaggaggggagggcagggaggggacagggcagggtgcgcaggatcttatgggctgccaggaatacttggctttgaccccaagggaggtgggagccatggagggtggtgggcaggggaaggatggaacctgactcaggtactcacaggcacccattggctgctacagggaggacagacggggggcatggggatagatggtgctgagggacgaggggaccaggatggaggctgtgggggagataagaagtgggttgcgttaggccaggcagggtggctcatgtaatcccagcactttgggaggctgaggcaagtggatcacctgaggtcaggagttggagaccagcctgaccaacatggtgaaaccccatctctactaaaaatacaa

SEQ ID NO: 34235 - DNA, 930 bp, Artificial sequence
  DNA replication origin
gtccaggggcctcatccccagatgcagagaaaggccttttcctcttcgagtcccctcggtttattcatctatgaactggggaggctggacccaggggttcgggagtttcctcttagaatctgcaaacatccttttttttttttttttttttttgagattgagttttgctcttgttgcccaggctggagtccagtggtgtgatctcagctgactgcaacctacgcctcctgggttcgagcgattctcctgtctcagcccccaaagtagctgggactacaggcgcccaccaccatgcccagctaatttttgtatttttagtagagacggggtttcaccatgttgcccaggctggactcgaactcctgacctcaagtgatcctcccgccttggcttccgaaagtgctgggattacaggtgtgagccaccgcgcccggccagcttttttttttttgcacagggaatctcactgagatagaactaggtctgcaagttcacagagctgaggtgggcacggaagggcggaattccaggcagtggttgcagcctctcgtccagaggaagctcacagcttagggggcattgcggtttggtcacaagcttctgccccaggacaaagttcgttccgatcttccccatatttcagatggggaaactgaggcacattgttaagttgcttgctgcagaggccagagctgggagcaggccctaaatatcagggttgccctctaagactcacggccagttgagggcgttaggtggggaaggcacagggagttggggttcaagggcgttgagagccagtggttactgtattgctgtgtggtcttggggaagtggctcagcctctctgagcctttgtggtctcttctgcaaaacaggcaacctgcctagtacatggtggcgatgacaaagtgggcacacatcgctgac

SEQ ID NO: 34236 - DNA, 1272 bp, Artificial sequence
  DNA replication origin
tcagggttgccctctaagactcacggccagttgagggcgttaggtggggaaggcacagggagttggggttcaagggcgttgagagccagtggttactgtattgctgtgtggtcttggggaagtggctcagcctctctgagcctttgtggtctcttctgcaaaacaggcaacctgcctagtacatggtggcgatgacaaagtgggcacacatcgctgactcagggtctgccacgtggcactgagtcaacagcacccctcttctggcctaggcctgtgcagagccagggtctggtgaccgaggtcggagggcaggggcggcccatccagcaattcccgtgcctgccctgacctcagagggcggccgagggtttggaacttctcccggagtctgaactcacacaaagaccggctttgtgggggctcctggggtaggtgggtgcccacatggcattccaaggctggcagcctggcgctggggtgggagtggaggctgagcagggtctggggcagtgagagagaccgggggcgggtctcaggccctccctcctccgccagttcttccacactcccctcttcattcagcagatgtttctggagtctgcagggacaccgtggataaggaattgggcccatgacctcccctgtggcctggggtgaggcagaccagttggggtgcagagctggggagcagaggagcaatggggatgcctggggaacctgcggctcagaggaggcagagacttgggggccaaagtgatggggatgtatagtttaccagggaagaggcaggggcttgggggccaggctttggggggtgtataggagttcaccagggaggagatggggccttagggtattgaggtccacagggaagagtcagggctccaagtgaggtgtggagcttggtcctgggagctttgaggagctgtcagcttgttctcagcaggtaagggctatgccctactctgagatttaggaagaattccggagctgcaggaaggaggtgggtggagggggaagctccagggctggggaaactgggcaggctacagggcagggtggacagagaaaaggagcagacagggacagggggatggttctgcagtgagaggcctggcccttatgcctcgagagctggccaggctctcaccttggccacctccccagtcccagcctggacgggggctgtccaagtcaatgtttccctgttggaggaatcatcggagccatgccttcccagaaaccccacaaatggccccctgtgaacccatc

SEQ ID NO: 34237 - DNA, 1042 bp, Artificial sequence
  DNA replication origin
ctgtaccgcgccaccagggagttcacgcgcagccgcaaggaggcccagaagatgctcaagaacctggtcaaggtggccctgaagctgggactgctgctgcgtggggaccagctgggcggtgaggagctggcgctgctgcggcgcttccgccaccgggcgcgctgcctggccatgacggccgtcagcttccaccaggtggacttcaccttcgaccggcgcgtgctggccgccgggctgctcgagtgccgcgacctgctgcaccaggccgtgggtccccacctgaccgccaagtcccacggccgcatcaaccacgtgttcggccacctagccgactgcgacttcctggctgcgctctacggccccgccgagccctaccgctcccacctgcgcaggatctgcgagggcctgggccggatgctggacgagggcagcctctgaaccccggcgccgcccaaccgcgcccctcgcgccttttggggctctcctgctgggcgcgggtggggtttgtgggtttttttccacctcttttctcccaatcggactccggccaaactcccctagacagatgggtgacctgtctcctttgagaggatgctgaggcatctgtagcagctgtttcaaacaccaatgtcacctctcctcctggcccccgcccaatggggagaggaatttggggccctactctggggaccacctttcacccgtttgtactttctgggccacgccgacccctgggtcgcttgatgtaaaagccaaaagctgctgcctcccacttggatcatgtcgcctgggattttcatccctcgcacaaggactacgggttcacacggtgaactgggggaagggaagtgttagggggcaagtcgcggcacccccccttccataaactcacgtcctaacccccaggacctcagaagatgatctgatttggaaataggatcattacagatggaattagttcagatgatctcatcttggagtagggtgggccccaattcaaggactggggtccttaaaaaaagggggcctggggcagggcgcg

SEQ ID NO: 34238 - DNA, 1962 bp, Artificial sequence
  DNA replication origin
cctggctgagtcctattccagagggctccctgcaggaacatgtggagctcagatccccccggctgaaggaggcaggctgaggcagggagcccctccaggcaccaaccaggatggagtcgggggttgggggtggggcgcagattgaagcctgtgcagaatgaggatggggtgggtggagagggcacagattggaggctgtgtagaatgaggatggggtgggtggggagggtagattggaggctttgtagaatgaggatggggtgggtggggagagcacagattggagactgtgtagaatgaggacagggtgggtggggagggtatactggaggctgtagaatgaggatgaggtggggagggtagattggaggctgtagaatgaggatggggtgggtggggagggtagattggaggctgtgtagaatgagggtggggtgggtggggaggatagattggaggctgtgtagaatgaggatggggtgggtggagagtgcacaggttggaggctgtagaatgaggatggggtggggagggtagattggaggctgtgtagaatgaggatggggtgggtggagagggcacagattggaggctgtgtagaatgaggatggggtaggtggggagagtagattggatgctgtagaatgaggatggggtggatgggagcgtagattggaggctgtgtagaatgaggatgggatgggtggagagggcacagattggaggctgtagaatgaggatggggtgggtggggagggtagattggaggctgtgtagaatgaggacaggacgggtggggagggtagattggaggctgtgtagaatgaggacaggacgggtggggagggtagattggaggctgtagaatgaggatgaggtgggtggggaatgtagatcggaggctgtagaatgaggatggagtggggtggggagagtagattggaggctgtagaatgaggacggagtgggaggggaaggcacagactggaggctgtgtaaaatgaggacagggaggaggggagggcacagattggaggctgtggaatcagctagctggggtaggaggaggaggaaggtgctgggcagagtcctggtggaactggcggagctggtgcaggtctgggctggggacgagctaggcaggtggcaggtgtgggagtctgtggggtagtggctgtggaggtttggatgatgctatctcccggggaatgtgtcccaccagaaggggccccagctgtttcccctcaggcaggtctttaccagcatgttctctgaaggaccagcctgatggctcatagccttcttggggtgcagacatctgggaatcagacaaaagctgtgcactctcttccacctgcccgaacacacatgcatctgggtccacagcccctccccaagtctccccagacaccgcccgattctgcccctgccgccatcctctgtcaggctcatggtttatgggcttatcccggctccactcgccccactcattctcgtaaccccactgcctagatcccagctcgatctgggcaaggtcatgaagggaaggaagccgtcaggccccccggtggggagggggtcgggggcttcaggaatcttgtcccttcttccctgatccttggcccagaatgtctcagcccaaacagtgggtatttcttgagcctttattttgtgcagacactttggagggagaagtccaagctatagctccaccactgcggtcaggttaaagcacgttgacaaatgggaggcagagatcagggagtggcgacgtttaactgaaggacagggtgtgatttgctgcctcgtgtgggtgttgtcccgccgtgccctgcggggcgctttacaaacagcaggtgtttctggggagattctcacccactccatggaactggctgcatcacaggcaggccaaggccccaggaggcatcaggagggtcattgagaggagataggccccat

SEQ ID NO: 34239 - DNA, 1725 bp, Artificial sequence
  DNA replication origin
ggaccctgagaccccaaaacgaactccattaccacctgagggaccctccaaggatcgccgggctacgcagggtccctagggtacgaggccgccccctcggcggccccgccccctcggcggccccgccccctcggcaaaagtcccgccccctcgacaaagtcccgcccccaagatggtggccccgggcggtggacagggcggggcgtgccgggtcacgtggacagccgacgccgacgtggcctccggcggacgctccacgtgtccctcgccgcgccccgtctacccgcccctgccctgaggaccctagtccaacatggcggcgcccagcggagggtggaacggcgtcggcgcgagcttgtgggccgcgctgctcctaggggccgtggcgctgaggccggcggaggcggtgtccgagcccacgacggtggcgtttgacgtgcggcccggcggcgtcgtgcattccttctcccataacgtgggcccgggggtacgtgccaccgccgtcccggatatttgagtgctggcaggcccggggagggggcgcggagcattgggggcggggcccgaggagggggcgcggaccgcggaggtgggtactgaagaaggggtgcggattgttagggtcggaggctgagtggggggcgcgggaccgtgaggccggggtcatcactggggcaggactgaactcatagggagcggggccttgtgggccccggcggcgttgagggggcgtgatcacctgtcacctgtcgcctgcctggagtgtccaggcacccctgccctccagacgcagaggtggggaggggtcagtgatgggagcggcaggaggctaaagggcatctgccctcctgggcctgaaggaaatcagtcgctgcagctccgaagagggaggaagtgctccttccttccattgcacaaggtcccccctcaccgagggtgtgaggccgggccctcagccctgtactcagcttgtcggcaaagtcctttcccctctcagcctccctttccccgcctgtaataacagtatctttactgttttttgactatttctttttagacttgcgtgcagtggcgggatctcggctcactgcatccttagccttctgggttcaagcaattcttctgcctcagcctccccagtacctgggattacagacgtgtgccaccacacccggataattgttgttgttgttgtttgagatggagcctcactctgtcgcccaggctggagtgcagtggcgcgatcttggctcactgcaacctctgcctcccaggttcatgccattctcctgccgcagcctcccaagtagctgggactactaatctttgtatttttagtacagatgggatttcaccatgttagccaggctggtcttgaactcctgaccgcaggtgacccgcccacctcggcctcccaaagtgatgggattacaggcgtgagccactgtgccaggccagtttgttgactacttccttatagttaggtgtgatgccaagtcctttatatgttaggcccaagttacagatgagaaaatgcttcacataaaaaagagaaacagagagaaactagaggctcagaaaagttttcacttgtccaggtcccatggcaaaacccatctctacaaaaatacgaaaaattagccaggtgtggtagcaggtgcctgtaatcccaagtactcaggaggctgaggcaggagaatcgtttgaacccgggaggcagaagtt

SEQ ID NO: 34240 - DNA, 1682 bp, Artificial sequence
  DNA replication origin
ccccctcctcgggccccgcccccaatgctccgcgccccctccccgggcctgccagcactcaaatatccgggacggcggtggcacgtacccccgggcccacgttatgggagaaggaatgcacgacgccgccgggccgcacgtcaaacgccaccgtcgtgggctcggacaccgcctccgccggcctcagcgccacggcccctaggagcagcgcggcccacaagctcgcgccgacgccgttccaccctccgctgggcgccgccatgttggactagggtcctcagggcaggggcgggtagacggggcgcggcgagggacacgtggagcgtccgccggaggccacgtcggcgtcggctgtccacgtgacccggcacgccccgccctgtccaccgcccggggccaccatcttgggggcgggactttgtcgagggggcgggacttttgccgagggggcggggccgccgagggggcggggccgccgagggggcggcctcgtaccctagggaccctgcgtagcccggcgatccttggagggtccctcaggtggtaatggagttcgttttggggtctcagggtccctcaccagccgtgtgactgactgcagctctttcagttaggagatgtacagggagtgagggaaatcgaaggtcaccattaggcgaacttctcataatcgttgcagccaagatgtgtgtgcatcgatattcaaaattagcagagggaaagtaggatgagaagcaggatgcttgcttttgtttccctcttgttgcccaggctggagggcagtggcgcgatctcggctcactgcactctccgcctcccaggttcaagtgatgcacctgcctcagcctcccgagtagctgggactacaggtgttcaccaccacccctggctaatttttgtatttttagtagagacaggttttcaccatgttggccaggctggtcttgagctcctgaccccaagtgatccgcctgcctcggccttccaaagtgctgggattacaggtgtgagtcatcacgctcgatcagtctgtgtatttgttaataggattatgtgggtgttcacttcctggctttgataacctggcttgtcctaggggttacagacgatgttcacattagggggagttggatgaagcgtattaggaaaccctacagtttctgcagattttctgggaggcaaaaattatttcaaaataaaaagttaaaaagaaaataatccctacctcaaggagttgttgggaggagtaagtgagggaattaagttcccacaccgggacgaatgaactgagaattatatattgtagctattgctatcattagatcccaggttttcaactagagaaggaagtcattctttggttacaaatggcttaacatttcaagaaaacaccagtggccaggcctggggggtcaataattaagctggtgtttctagtccttcccaactggcaaaaaacagaatccagagagaaaacgtcatagatgactcctaagatgggttataattcaccctttgaggaattaaatcactctactccatagctacggagggtggtgagccccagggaggtgagaaggatccccgtggaggctgactcctctgccaatgacagaagtccaagccagttgcctttctgcagtggcagcctgttctaaattgggatacctgcttgcgttagg

SEQ ID NO: 34241 - DNA, 981 bp, Artificial sequence
  DNA replication origin
ctaaatatcattttgtactggaatttttttcttttttatacttcctttttgatgttgttgttgttgttttggagactagggtcttactctgtcacccaggctggagtgcagtggcatgatcacagctcactgcagcctcgacctcccgagactaaagtgatcctccagcctcaacctcctgagtagctgggactgcaggcatgcgccactacacccagctaatttttgtttttgtagagccagggtttcacaccatgttgcccaggctggtctccaactcctggactgatgcaatccacccatcttggcatccaaaagtgctgggattacaggtgtgagccaccacgcccggcctcgtatgtttttttaagcccccccccccctttttttttttttaaaaaaagtggaaatttccaaaggatggagcaagtggataagcagggcagtccatccctgctgttagaaatggagcccacatgccccgcacgttgcaaacagggtctgctgggtgtcttggctgctgggacgatgtgaggagggccttggcctgtcgtggtcctcagggtgcagagtctcaggtagaaaaggaggtgttggctgggggaggatccagcatggaggatgctgtaatttgggttgtgctgaggctctggggagcccggggggccagtccaggccacacacgacagccagagctgagtccctggagaccggtagaccttcctagaccagcgaggacaggactaccctcatcaggtggctggggccatcctctgtgggtcagtctgatcagggcatggtgcccaggcagccccagcaccccaggagtccccacagatggcagtgcccttctgccatgtcttgtctgttgccccccggaagcccctcccactcaggagccccaggacttagaaggaacctcaggcaggtgacatgtttccaactggaatcgtttaatgtgtctacttcttccacgcataa

SEQ ID NO: 34242 - DNA, 1359 bp, Artificial sequence
  DNA replication origin
cctcgtctcccaactgatccgagcagggaaaccttaccagctccaggtgggtggctgttgggggcttcggcccctccgcgagccgacagatccctgggagtggggggtgggacgaggcggggtggcttcccactgtgaccaggggctccctgggggatctggggctcccagccccccaccccacagccctgtgtccccgccctcccagctcccagggccattgatgtatcagtcctgtcttgacagctcagggttccgcctgccttcggtgctggaagcacgggatcgggggctgccacacccacccctgctccgggcctaatggagggaggaacccttaccgaaattgccccgcagacgggctttatttgaaactgagaaattgcgtagaagaaaccgctgagtgctgaaggccctagcaggctccttcctaaggcgctggggccaagcattccctgaggaggcagcagtgaagggtgctagagtgagtggagccagccaggcttgggggaccgagcgggaggagagtgggggagtgggtggagccttggcagcaacgtggggctcagtctaggtgggcggggcttctgcgctaaggggtgggcatggttatgggcggggcctcaatggcgaggagggtgggacttctgcagagggacggggcttcagtgttacggtgggtggggcttccgcagtaaatggttggcctcggtgtggggaagggcctcggtagtggagagggtggggctcggtgtgggagcagcgcctcagcggtgaggagggtggggcttctgctgtagaggagggggggccctcagtaagcagggtggagcttctgctatagaggggtggggcctcagcgggggcggggcttcggctggattttcaactgagggtggtgggaggtgactcgggcttgtgagcagagcatagagttgggcggcttgccatttgacccacatttctctggctgctttgtggatggcctgtgggggacagtgggacgtggtccatagttgtaccggcgggagattcaggaggtatcttggaggcaagagggccaggttttattacctgtggactgcagacaatttctgcttcctgggcgcctcggcatgctctgtcctgtggggagcgtcctgttgcctttcaacagagcagggaaatggggccgcagagcaggagggaggcagagccaccttgtgcggtgatgagctgatctcttggcggtgccccccaccgacaccccacatcccaagcagcccagggagtgatatcaggcagggctggaatggaacttcagatgtctcttcccagcctgagacccgagcccactgccttcccaggggccaggtagct

SEQ ID NO: 34243 - DNA, 2663 bp, Artificial sequence
  DNA replication origin
tgttcaaggtgggtcccacccctggccggcctcagccacgcccctccctgcccccttccccatctacgccgcgtttgcccaccgcccgcgccacccggagcccacctaccggggaggcgcctcggcaggggccttgccacgtggctgtttctccctgcagcagccccacggggccgagcccccctcctcattgcccgccaccgccgaccgcaggatggcatccggctgcacaaaaccccgccagcagctctctgtgggaggctgagcccgggaccccggcctcggatgggcagaggtggggcatggtgtgcagagcggcgggggggccccaggccggcggcagtcagggcactgcggggcggcggcgatgaggaggaggaggaggcagacgggcagtgggacccggccctctgcggcggcggggaggggccgcacctgcccgcctgtggcgccctgcccacccccatgccacgcaccgtccacgggggccacgcggtctgagggccccttccttgccggccccatgtgcatgagcgctcctcacgggctccagggcggccccgggacagcggctgatgctggctgtaggacccgacgcctgtttctctctctctctctgcccccatctgtctgctgtgtccctcaggtggccatcgcgggtgccccggtcaccgtctggatggcctacgacacagggtacactgagcgctacatggacgtccctgagaacaaccagcacggctatgaggcgggttccgtggccctgcacgtggagaagctgcccaatgagtaaggccactgccctgccctgcgctcctccccggggcttctcctgcaccccggcaccagctgtctctatgagggtgccctcctgccccagctggccctgcccagggagcctcaggccatgtggagcctccccgctgtgctcctgtggtggcgtctgcctgcatgtgcctcacagtcccctccagcccaccctccctcctcactgcaccttgcaggaaggggcacccagggatgcttgtctggggaaggaggctcacagccctgccctgggaaagatgagggaattcgagtcactgcttttcacaggcaagcctcccccactcccctgcatcctgctggaggccccatcacagcctctgtcttgtgcttcaggacatagatgtccacagggccagggaccagctcagatgtcccattttatgcttttgacatgggtcttattctctgatggagagaaaacagtgttcccattttctggcacgtctccagaaaatgttccccggaatcccatgcagtcacctagggggttaaaaatctgcctgggcatgggccgggcgcggtggctcactcctgtaatcccagcactctgggaggctgaggcgggcggatcgtgaggtcaggagattgagaccatcctggctaacaagatgaaaccccgtctctactaaaaatacaaaaaattagccgggtgtggtggcgggtgcctgtagtcccagctatatgggaggctgaggcaggagaatggcgtgaacccgggaggcggagcttgcagtgagccgagatcgtgcgccactgcactacagtctgggcgacagagccagactccaattcaaaaaaaaaaaaaaaaaaaaaagtctgcctgggcactttgggaggccaaggcaggaggattgcttaaggtaggagttcgagaccagcctggccaacatggtgaaaccccgtctctacaaaaaaatacaaaaaataagctgggcatggtggtgcatgcctgtaatgccagctacttggaaggctgaggcaggagaatcgcttgaacccaggaggtggagttggtagtgagcgaacatcgtgccactgcactctagcctgggcaacagagagaaactgtctcaaaacaataataataataataggccaggaacggtggcttcaggagttcaagaccagcctagccaacacggtgaaaccccatgtctactaaaaatataaaaattagccaggtgtggtgacacacacctgtaatcccggctactcaaggaggccgaggcaggagaattgcttgaacctggaagggtgaggtcgcagtgagctgagatcgcaccactgcactccagcctgggcaacagagcgagactctgtctcaaaaaataataatttattgtggtgaaattcacagaacctaacagtcaccttaaagcagccctcggtgcatttgcagtggttccagaacctttccagcactccagcgtcaaaccctgttcccattccttagcagtcactccctgtcccggggcagccaccgatctgtgctctgtctcaatgggtttataagttccgttaatttggatgaatgtaaactggaatttcaacggcgacgtgtggccactggctcccgtatcggacaggaagggctagggcagccgattctggtgaggctgcgtgttggcctcaccagtagcccatgccacactccagaccacagacagcagcagacctaggtgggtttttgttttgttttgttgagagagtctcactctgtggtcccggctggagtgcagtggcttaatctcagctcactgcaacctccacctcccaggttaaagcaattctcgtgcctcagcctcctcagtagctggaattacaggcatgcacta

SEQ ID NO: 34244 - DNA, 3277 bp, Artificial sequence
  DNA replication origin
gtcctacagccagcatcagccgctgtcccggggccgccctggagcccgtgaggagcgctcatgcacatggggccggcaaggaaggggccctcagaccgcgtggcccccgtggacggtgcgtggcatgggggtgggcagggcgccacaggcgggcaggtgcggcccctccccgccgccgcagagggccgggtcccactgcccgtctgcctcctcctcctcctcatcgccgccgccccgcagtgccctgactgccgccggcctggggcccccccgccgctctgcacaccatgccccacctctgcccatccgaggccggggtcccgggctcagcctcccacagagagctgctggcggggttttgtgcagccggatgccatcctgcggtcggcggtggcgggcaatgaggaggggggctcggccccgtggggctgctgcagggagaaacagccacgtggcaaggcccctgccgaggcgcctccccggtaggtgggctccgggtggcgcgggcggtgggcaaacgcggcgtagatggggaagggggcagggaggggcgtggctgaggccggccaggggtgggacccaccttgaacacctggggcttgtggattagccccatgagcgagaggaagcccccgtaggaccagccatggatggcaactcggctcaggtcgatgaagccatacttctcggccacgaactgcaggccctccacctggtcctcgatctccacctggccctgagggatgaagccgggcacctctcagtggcctcctcccggtatgtccctcccctgcagtgacacctctgctcctttcagggcgtctctccctcttggatgaaaagtggctcgctggaagccccctgtccttccaggccctgctaaccctgcctgctatctggggatggctggacagatccagcagccatcttgctctgccacctcccaggtgagtggctctgggagccacgtcccctctgagggcgtcagtttgcccatccctaataaagggacattaacaggaagaggacccattttctagagggcacaaggaagaaaaagacgggtgcccaggcatgtgcaagggcacaaagaatggctggtgccatcgccgttgtcactaccagccacatccccaccaccgccactgccacgatttcaatgctggtgtcccctctgaagtccgtgctgagatcactactgcggccttcaagcgactgatccatggggcccactcatgtgaatgggatgaggggcccttataaaagggcctgatggagggaggccacggcttttccgctccttgcaacccctctgccgtgtaggaagcagcacagggcctctctggagggttgctgaccaggcaacctcgtgggaacagagagcagccctccccgacacagccctgccttggccttggacctcccagcctccagaactgtgagagattttcgttctttataaatccccaggctgtggggttttgttccagcagtgcaaaggggccgagatgatcgccatcaccaccgtcgtcatcaccagtgtcagcacaacttgtctctgtccctgcagggcgcagcccagagctgagcagcaaagcatacatccccttttgttctaaaagggcgcctcattgagcctgcgtcaccccagccagaagtgcccttctgcgggtggtattccagagccgctcccatgccctgcacccacacggcccagggctcccttcccgagacccaaaggacccagagcaacagggaggagttgttaccatttggtttttcagggccccttcgaaccgaagccctcgctgacaggagcccctgccgtcaatcacaaccacggcgtagcccagggaggccagtgtgttgagccgcaagtacttgatgcctttgaaggagttattcaccagctgcacctgtggggaggtgagggccagcagtccagcacgagatgccgggcaggacgggcctggcaggggagatgccggtgggctggggaccgggccgggctggggcctcagagcctaatgaaagcacctgtgccccggaggctctggatggacacctgggagtggcaaggcgggaggggcccatactcgggaccctgctagggagggggaagggccactgtcaggctctttctcagctgggccactgccccagtcctgcctggaacaactactctggcatgatggacattggggtggctccttctcgggtggggccatctgggcactgcggggtgctgagaagccactccaggccaggagaactcgcagtggtgatgaaccacaaagtacccagacatcgccccgtatcctctgtggggacagagctgctctgggtaagatgtgcgcctaagatggtccaactgccaatctgctgcctgcttttgacccctgctccaggaattgggcccagggcccatggccacctccataccaacctggagactaggggacttcctagaggaacaagggagagtcagcaggcggagggggaaggggaggccatccaggaagggcggggagcgtgcaaacgggcacagagaaaggagggtgaggggccccgaggaccctgtgtagtcagggcaggcggggtgggctggggcaccaggcaggtagccggggagcctcctctggttgactgttctacagctggcacttgagtggggatggggagtcctcgggtggatggtggggtgggggcctggggagcaggtgtgcactcacctgggggcctccatatacaaagaggacggtggggtgcttcttccctggctgcaaggcgtggggcttgtagatcatgccgtagagccgcacatccgagcgcgtgtggaaatggaagatctctggaggaacataatccggggggcagcctgcgggagacagggcggctatctggctgcccggggaagccacatccagctgacacccttgttctcctgcccaccccaagccttggagggtggaccaaagcaccccctcttttcctgggcttcccgagagttgataattgaaaaaaacgtttttttttcattaaataagatttgtacagtttttgtagagatggggtcttgtctccctgttgcccaggctggtctcgacttcctggcctcaagcgatcctcccacctcggcctcctgtgtagggtcactgctatttttgcaaagcaacagttgttgtccaattaggatggtgggggtttttctgttttttttctttttcttctttttttttttcaagacaaagtcttgtgatcttggctcactgcaacc

SEQ ID NO: 34245 - DNA, 900 bp, Artificial sequence
  DNA replication origin
ggaggaaaagcacgcccgggagcatgttgaaaaatggaagggacctaccttcccaggaggctgtggggcaccaccagtacccagtgaagcggtcgaactcttcctgtatgacgaaggtggccacacccgcagacttggggtcatccaggacattggataaacctagggggagggacggagagcatcaacaaggggtgagcagcctgctaacactggggacagccaggggctcaaggagagcatgagagagagggagagagaaggagggaaggaaagggaaggagagggggagggagagggagggagagggagggagagctcggagccgactgctttcaagcagggttgctccaccccacactgtggacactggggccctcttggtctctggggtggggccgtccagggcacagcagggtgctgagcagtgtccctggcctccactcaccccatggcaagccaggagcacccccgcccaagtgtgccgtctaaaaacgtctctggacatcgccgagtggccaggtttggaaagtggggcccgggcttatgggacggagaggcagcgatcagtgacttgaaaccaagacaaggaaggatggggtcacttctgatgagcaagggagtggagagaacacgcaggaagcaggtgagatgtggccttgacttgatggggctggacaggcagagtggaggggaaggtgtgcaggggcagaaatgcccaggggcacctggaagagggtccagagcaccgtggctgggctgacgcctgcagcagaaaaccacagagcggcagggtgcggtagctcatgcctgtaatctcaggaccttgggaggccgaggcaggtagatcatttgaggtcaggagctcaagagcagcctggccaacatggggaaacctcg

SEQ ID NO: 34246 - DNA, 997 bp, Artificial sequence
  DNA replication origin
aggggcagaaatgcccaggggcacctggaagagggtccagagcaccgtggctgggctgacgcctgcagcagaaaaccacagagcggcagggtgcggtagctcatgcctgtaatctcaggaccttgggaggccgaggcaggtagatcatttgaggtcaggagctcaagagcagcctggccaacatggggaaacctcgtcacaactaaaaatacaaaaaaaaaaaaaaaattagccaggcgtggtggcgggcacctgtaatcccagctactcgggaggctgaggcaggagaatcacttgaacccaagaggcggaagttgcagtgagccgagatcataccactgcagtccacctgggcactcccgcctgcgctcccgcctgggcaactgcactcccacatgggtgagactctctcaaaaaaaaaaaaaagaaagaaagaaagaaagaaaactacagagcggcagggacgccaggacctcccgggagacatggtaggctacagaaggtatgcacgggagggtggcttgtgaggggtgtgtgcaggaagaccctggctgtgggggcaatggggcctttctggaagctggccaggtggctatggtggccgtgcacaggaggggctggccccaccttggtggcagaaggtcagccgccgctcctcgcctgtctcgatgttggccacccacaggtcgctgttattgatgaaggagaagaaggcagggtcggcagggcagattttggggtccatccggggccctgagcactgggtcttgatttccagcggtttcataggggacacctgaggacagagacgcccagctcagggggaggggccctccacgccacccccgcacacagccagggccagggctcaccatgaagccgttcttgccgccgtcgcggcagtggaagaggctgttgctggcctggaagaggaagaggccactctcgctgtggaagtcgtaggaggtgatgccgaagacccccaggcgtttccgct

SEQ ID NO: 34247 - DNA, 1099 bp, Artificial sequence
  DNA replication origin
gcagaaagaccagcttcagcgtggatggtgtgaaaggtttctgacggcctgccaagtacttcagctgagatctgattagaagctggccaagcaggctgggtgcagtggctcatgcctgtaatcccagcactttgggaagctgagggaggcggatcacttgaggtcaggagttcgagagcagcctgaccaacatagtgaaaccctgtctctactaaaaatacaaaaaacattagttgggcatggtggcaggcacctgtaatctcagctacttgggaggctgaggcaggagaatcgcttgatcctaagaggcagaggctgcagtgatctgagatcacgccactgcactccagcctttggagactctgtctccaaaaaaaaaaaaaaaaaaaaaaaaaagtatatatatataaacatatatcaaagaagttaagcaaagtgaggaaaaatgcactccgagcaggagggccagcatgtgcaaaggccctgcggtggaaaggaatttggcctgtttgaggagctgagtgaaggctcatttggctgggtcacagggataagaaggatgagattcaagggcttggcaggggtcgacagcagccttgaggtggtggtgagaactggttgttatcccggggactgtggaaaaccaggaagggttttaagtgatggggtcttggcagtggatgtggaacatcctggtgggaggtggtttcagtcattcagccaaagccaagcatggtggctcacacctgcagtcctagcaacttgggaggctgacgcaggaggattgcttgtggccaggagtttgagaccagcctggggaacatagttgagacccccatctccaaaaagaagaatgtttttaaagatcattcatttgagaggtgatggtggcttgaatcttagcagcattagtgacatggagagaggtagaccaacccaagaagtgtttagggagtggggaaagcggcaggggtggggctcgtctggaagaacctgagtgcctcgcaaggggcagcattggggcagctcgtaggtaaaacagttctcctttctcatagtctttgcttcctccccgcagcttctcgctgaattccgaggg

SEQ ID NO: 34248 - DNA, 1269 bp, Artificial sequence
  DNA replication origin
taatgttttttgtatttttagtagagacagggtttcactatgttggtcaggctgctctcgaactcctgacctcaagtgatccgcctccctcagcttcccaaagtgctgggattacaggcatgagccactgcacccagcctgcttggccagcttctaatcagatctcagctgaagtacttggcaggccgtcagaaacctttcacaccatccacgctgaagctggtctttctgctcatctttcacacgccacctggctgtcccctccctccaccttcatcacagcggttatttgtgggacccctgtctcccccatgtctgtcccattcacagctgtgctcccagaaccttagctggtggctggcacgtggcaggcattccacggagcactgtggaatgattatctctcagtgggctcgcggggagacatgctgggtctcgggagaggcccgggcgtgaaggaatgaaaatccatcctggtcacctgtgctgttggcttgctgtccagccggggagatgcttggccttcactggaagttccagagcctcgggatgtgggaggtgcaggtgaaagggtgaatggcacgcccttccccaaagaatatcccactctctcctcccactcaggacactctgggtccgcaaagcagccaccgtgagtggccgccgcggtgtcacatctcccaccaccccactcccgccctcgtcacttagcacactccttgacctgactggactggccaggcaaatatttgttttacagaaatctaaacatggccgcagtgacccagttctgcgagagccagtggtctggaaagggtggcaccggggctggtctcgcttccctttgtgggctccgagtgactgccgaccttgccagaagccctgtcctccgggaccaacagcttggcttggggaagtcgctgcttgcttggaggaagtgggaaaacccgcgggagtggacagcagggactgggtgtgagagaagtaaagggcagagatgagtgggccgccttgactctgcagtgtgccagttcccagaagactctgcctcttgccaagaggagaccccacagggtaaccactgcaagagaaagggccccagcctgctttgagagggaaggggagaaagagctgcaaggatgtcaacgagcgcctttgaaagatcaggacttggccgggcacagtggctcatgcctgtaatctcagcacttcgggaggccaaggcaggaggatcatgagatcagcagatcgagaccatcctggctaaca

SEQ ID NO: 34249 - DNA, 1213 bp, Artificial sequence
  DNA replication origin
agaaaaccatttcctgcccatgtctatattctagagcaggcaaaggaatcccaccagcccacaccccagccttcctggctgccaaaccccagcacaactgaccttctaaagggtccagagagcctccattccagctgcaggcgtgggacacagacctttataggataaacatgtcatgaatgtggcaggttaatggaagcaccggccagccgttcagcctcccccactcaggagctgcagactgtcaggcccgattctacctggctagattctagctctgccttgaagccctgcagcactgtctgcatgccctggacagaatctgggagagaagccatcccacgggccccgattcccctgggacccagcagaggaatgcagggattggtgcctacggtccacaccccctgggctttagtcccagctcctcgaaagcaggttggttcttgcctgggaggcaagtgacttcctcctggggcccctggggaagaccagggggtgggggccaagggaatagaccacttttgatggctcagaggcagcgtgaacagggaagtgtcagggctggcctaaggctgtgtgggaagaaggtaggcggttggacaggcctgagaagggaggctgagagaagggggctgaaccctgtgggctggacccttggaagacagctatgctaaccactacaccaccaacgcctcggcaggaaaaagagtctctggatacccttaatagagggatcaagtagggttgaggatcaggactggattggggagaccaagcctcggggcgaaggttggaggaagtggtaaaggagtgaggacaggatgcaggtcgagggaggtggcctctgtgcatatacagcatttgcatggggagagggaggagatcgggacctccagagcctgcacgaaaggggagagggtgtcaaggtctgcagctacgaggacgttcttgggtgcggccacctccggaaggggtcagagcctggtggcctgggcagcaacgggatgggtggggaagcccatcagggaaggggagaaactgggaggtggcctggccagcgcaggaatcggggagggaaagaaggtggaggagggcctggggcggagaggaaacgaggcagggggccggagggacccacagacgggtgcatggaggctccggggtgcggggaggccaggcgatggcgagggcagggtcagggccgaggcgg

SEQ ID NO: 34250 - DNA, 1067 bp, Artificial sequence
  DNA replication origin
tcaggcgtggtggcgggtgcctgtaatccccgctacttgggaggctgaggcaggagaatcgcttgaatccgggaggcggaggttgtagtgagctgagattgcgctactacattctagcctgggcaacaggagcaaaactccatcggaaggtaaacacatacacacacagtttttcttttcagaaagctcttttacagtgtagttggggtcgggcgcggtggctcatgcctgtaatcccagtactttgggaggctgcaggcgggcgaatcacgttgaggtcaggagctggaaagcagcctgggcaacatagtgcaggccctctagtctctacaaaaaatacaaaagttagctgggagtggttgcacacgcctgtagtcccagctataaggcaccgtctctacaaacgcattttttaaaattcagccaggcgtggtggtccacacctgtggtccaagctacccaggaggctgaggtgggaggatcgcttgagcccaggaggtggaggctgcagggagggatgatcgtaccactgcactcgagcctaggcgacagaacgagactctctctaaaaaatacaaaaaacaaaacacacaaaaaagtagtttgatctaaagcaaaatggtgaatatctgcagaaactaatgtgatatcaagtatagattgatatctatgagatgaaaagcttcatttgaccccggatgggtttgtgggccgtttgacgtgcattgttttaatggaaggtggatttatgataaagtgataaacatgtgtgtgggtgggtgggtgtgttggaaagggtgtttattggatttctttttgtcttccttattttccttctttcggtctctactgtatcaaatacaataacagatattcaggaagagcggatattgctttagctgactgtagccagtgtttctttggtgggacaacgcaactatcactgcaacattatctctataggagaatttaaagaaccctgacgcctaccggtttccgtagtgtagcggttatcacattcgcctcacacgcgaaaggtccccggttcgatcccgggcggaaacagg

SEQ ID NO: 34251 - DNA, 803 bp, Artificial sequence
  DNA replication origin
ggtgactctgagtggcaggtacatgtgcatttagaagaagcccctggggcccagcctcccccagcccccagccagcctggtgcatgttctcaggacacacccaggcctgaagagctcataagtggagatgagtccccaccagccttgcagtcctccgttccctctcctcctctcctttcctccccctttctcccctcctctcccccttggtcccctctccctgccgagtacaaggggagaagcagcctctgccatcagctggaacacgcttaagtggcccatttcctgggaggctgggtggcctcaccagccattagggtaatgagccgcatgctgtcccccatccagcgccctggtaaccaaggaggggggcattgctcgctctgcagggctgcgttttcctcctcctggcagggatagggatggggagcagggagggagggccctgcagacacagaccaaggccagaggggagggacacagcagagattcacatacaggtcggttggaggcaggaagggaacaagagacagagaggagagggagagacagagccagagatagactgagagcgaaaatggggtggagacagagatagagagagactaacgaccaggcaaggaggaggaagacagggaaatgagagagaagatgtttggggggtgggagagagaaacaggcagagagacagacaggaaaagaaccagacaggtgcagactcacagatcaccagggagatggccagggacaaccgaggcaggaagagagacagggaggcagcaggggcaggcaggagggagaga

SEQ ID NO: 34252 - DNA, 812 bp, Artificial sequence
  DNA replication origin
ggtggctcacgcctgtaatcgtagcactttgggaggccaaggcgggtggattgtctgagctcaggagttcgagaccagcctgggcaacatagtgaaaccccatctctactaaaatacaaaaaattagccgggtatggtggcatgcacctgtagtcccagctacttgggagcctgaggcaggagaattgcttgaacctgggaggcagaggttgcagtgagccgagatcgtgccactgcactccagcctgggggatagagcgagactccatctcaaaaacaaaacaaaacaaaaattagctcagcatggtggtggcgcctgtaatcccagctacttgggaggctgaggcagagaattgattgaacctgggaggtggaagttgcagtgagctgagatggtgccaccgcactccagcctggacgacagagcaagactccatctcaaaataacaacaacaaaaaacaaacaaaaacaaaacaaaacaaaaaaacacagagttcagaggctcaggcctcctcagaccctttcccccacagcgtctccacctcctggttgggcctgactgctgtttctcctctccttgtcctcatgtctctgtctctggtggggttttggactcttgtttctttccgaggtggatttctgtggttctcttggtgccttctgtctgggggtcaggatcaagctctctctgggtctctccctgtctctgctctgtgtttctctgtgtctctgtttctgtttgctttggggtcttttgctctgtgtctctgatgctctctgtctctgtctctctctgtttctttgttgttgt

SEQ ID NO: 34253 - DNA, 1109 bp, Artificial sequence
  DNA replication origin
cgtacacatactcaggggtgtgtgcaagagggaagcttaatgtgaaaaatctggaaatggagctctgccaacgagggagcaggtgtggcgcccacagccgcttccggctttgagaattatttgagttatgtaagacgctattccagggggaagcggggtgaagggtacaggggctggctgtgctatttttgcaacttcctgtacagcctatcattatttttaaaatagaaagtttttaaaaagtctggagatgagaaaaagaaatacgaatttcacacatggtgtgtgtgtgtgtgttctcaaaacaagcaggagaaaacggaagaatctagacaaatcactgaaggctttttaaataagactttcactgagaactcaggttgatgcccccaagcgtcccaggtggagatgacgaccccagcgctgtgttggggaggggcggggctcaggtgggcaacccaggcaggtgcaggggtgcattgtgcaggcgggcatctggtgacccgggagtaggctgggaatgtggagtgcagcccaggattcaggctgcattaggaaaggtgtgggcttcaccggtggaggagaggaaatttaatcgaggtgcagcaaaaaagtcagtggcatcgaatctcctggggcagtctggggagttaggggcagagtagctcaagggtgtctggttgtctgaatatctgccactgtcgggggtcctcctcaaagcccgggggtcgagaatttgaaggggtgtggaggtggggagggagacagatgctcagagatgcagagagagagagagccaggtggggcagagggcaggcagaggcaagactgaacatacagacagttagagatacagggagagacacagagagacacccacagagagatagagagaaaaagagaaatgaaaacacagagagacagaggcaagactaaacacacagaaagacagaaacagagatagacagagacagagattaagagaaaaatgtagagagatggagacagagacatagagatgcagagagacagagagatggagagagacagggacagagatggagagatctagagagagagatgcaaacagagatacgaagatacaggga

SEQ ID NO: 34254 - DNA, 988 bp, Artificial sequence
  DNA replication origin
tgtctgtcagcgtgccctaccctctgtgctcgctggcctggttcgtgatcctcgccgtgtcctgtccacccacttggatgtcctgtcatgtccgtggggggctcggagcgactgagctgtgggggccggagactgggagcgggagctgagggagggagggaggagggagggagggaggcagcgcttgcctggccctcatgatcccccctcctcgtctcttgccgaggaccctcagcgcagccacttctccaggcactcggcagagagaacgcgcgtaggcgttgccctggcaacgccgggatgcccagcaacaagtccgcggcgtgtatcacgtgctcggcgcggaccaatccgagggcccgccgggaagcaggtcagcctgggccaaagtccgcctcctccctcgcggcgagaggctcccagctaattaccgtaattgcggtgggagagctgccggatgcgcgggggctggggctgggggctgggcaggccctgaggagctgagcggggagggctggaaaacaggactctcctccaacagccctgccgctgcctccaaccccaccatcgaagcgttcattaggcgcctacagtgtgcacctgctgttggaaggggtgggtttggagtgtttccagtggtggtggggaaccctagcctccagcctgggtaaacctagatttgggggcgcggggaacagatttgactcttaagactcggggtctcatggaaactgtccaatcgccgttggctgtattgaaccaatccccccctcccccatcccgatgggtcacggtttcctcctgcacaaaaatacaaaaagtttaactcttgaagagggtgtattaaaagatttgcctctgggtggacagaattcacatcccgtctctgccatttgcggctgtgtgactctaggtgagtcccttaacctctctgagccctcgactcctcatcagttaaaagaacaaataggaccaggcacagtggctc

SEQ ID NO: 34255 - DNA, 1395 bp, Artificial sequence
  DNA replication origin
taaatttgttaattatacagcagggtaggttggaaagtgatgtatgctacggggggaaaaataggctgaaaggatcgtcgttccacctcggcctcccaaaatagtgggattataggtgtgagccacagtgctcagtcttaattttcaatattggccatgattaacaactggtaggaaaaaaaaatcctgaaaatataacgatcagctcttgtgagtcagtatacaccaacatctgcacactctggaggggtaaattctgttttgtttgtttgttttgttttgttttgttttgttgagacggagtctctctgtcgcccaggctggagttcagtggcatgatcttggctcactgcaacttcccagggagttggaaggagggaggaggttggagggaggaggttagagggaggaggttggagggagagaggaggttggagggaggaggttggagggaggaggttggagggagggagtaggttggagggagggaggaggttggagggagggaggaggttggagggaggaggttggagggaggaggttggagggagggaggaggttggagggagggacgaggttggagggagggaggaggttggagggaggaggttggagggagggaggagattggaggcaggaggttggagggaggagcttggagggagggaggaggttggagggaggaggttggaggcaggaggtttgctgatttttagcatttgcccatttcctgtggtgtaaatattcaagccaagaatgatttccagctaccaccaaggagccatagaacagggtatgggggctgggcgcggtggctcacacctgtaatcccagcacttcgggaggctgaggcgggtggatcacaaggtcaagagataaagaccatcctggccaacatgatgaaatcccacgtctactaaaaatacaaaaattaactgggcgtggtggtgtgcgcctgtagtcccagttacttgagaggctgaggcaggagaatcatttgaacccgggaggcggaggttgcagtgagccgagatcacatccccgcactccagcctggtaacacagcaagaccccgtctcaaagaacaaacaaataaaaaagaacaggatagtcggaaggaacgtgcagggggaccccagcacacagtatcccggtaccactgggcaggtgcagtggacttgaataacccaggaaacatagaacatagtgggacatagtaacaaaaatagtgaatttgtgagcatttgttatttgttatctttgtttttgttgttgttgttgtgttttgggagtttttttgttttgttttgtttttttgagacggagtctcgctctgtcgcccaggctggagtgcagtggcgccatctcggctcaccacaacctccgcctccctgg

SEQ ID NO: 34256 - DNA, 1589 bp, Artificial sequence
  DNA replication origin
cacgtgtggccgtgccggttggccacctccaggtcggcctggtgctcgccgaccaggtagcgcaccacctccaggtggccgtcgaagcaggcggcgcggagaggcgtggagttggtgcgcgtggtgcggttcaccgaggccccgcggcgcagcaggctccgcaccacgtccaggtggccggctgcggaggcggcccacagcggcggcgcgccctcgatggtctcgccatcgaagtgcaccgagccaccggcctccacgctcgcgccgcaccggtccaccaggtactccaccacgtccaggtggccgtagcgggcggcgatgagtagcggcgttcccccgccggccacctcgcccgtcagctcgtccagttcctcccggctccggccgctgagcagcttctggagcagctgcagcttgccatcacgggcggcgttgtacacggcggtgcggaggtccatggttcgggcctccgccaggccatgggccggccgccgggggacggggagacggaggatcagagcccggacgggcgggaggcaaccttcaccgtccccctcgccgccatcttagggtctcctcgggcggaacaaaatggctgccgcgacccgacggatggcagcacgccgggaaatggagtcctttgcgcgggcccactccatagaacagaaaaggaatcttgggggctcaagactacacttccccaaaggccacaggacagcccctgagagctgtgagcgcgcggcatggtgggaattggcgttccagtcgcagcgcatggcatcggaagctagcaatttgaggactacaattcccgtcatgcagcgtcacacgacctagcttgtgggaaccggcgaaatttggtgacgtacttcccgtggctatctctgcgtcagagcgtatagaaaaagcaggcgcgatacccttaaggactacatttcccaaaagggatcacgagcgactctgagccaatcaggaccgagaccgaaggctaaaagcgactagaggggacgcgtctgttttgggcttggagcacgggcaagcggcccaccggcagggggcgcccggaggaggccgaaaagctggacggggcgaaaacgttttgagctgggagaacggtaaaaaatgacgcgctcacttcttattctcacattcatatattcatttattcatttacatacatttatgtatattctagtatgtgtcagaatttccttcttttatttacgtatttatttttatttatttctttcaataactttgtggggttttttggttttggtttttgtttttgagacagcgtctcgctcttgttgcctaggctggagggcaatgccgcaatctcggctcactgcaacctctgcctcccgggttcaagtgattctcgtgcctcagcctcccgagtagctgggactacagacatccaccaccacgcccggctaatttttgtatttttggtagagacgggtttcgccatgttggccaggatggtctcgaactcctgaccttgggagatccgcccgcctcagcctcccaaagtgctagaattacaggcgtgagccactatgcccggcctgacgtgctgacttcaa

SEQ ID NO: 34257 - DNA, 2421 bp, Artificial sequence
  DNA replication origin
gggggaacgccgctactcatcgccgcccgctacggccacctggacgtggtggagtacctggtggaccggtgcggcgcgagcgtggaggccggtggctcggtgcacttcgatggcgagaccatcgagggcgcgccgccgctgtgggccgcctccgcagccggccacctggacgtggtgcggagcctgctgcgccgcggggcctcggtgaaccgcaccacgcgcaccaactccacgcctctccgcgccgcctgcttcgacggccacctggaggtggtgcgctacctggtcggcgagcaccaggccgacctggaggtggccaaccggcacggccacacgtgcctcatgatctcgtgctacaagggccaccgtgagatcgcccgctacctgctggagcagggcgcccaggtgaaccggcgcagcgccaagggcaacacggccctgcatgactgcgccgagtccggcagcctggagatcctgcagctgctgctggggtgcaaggcccgcatggaacgtgacggctacggcatgaccccgctgctcgcggccagcgtgacgggccacaccaacatcgtggagtacctcatccaggagcagcccggccaggagcaggtcgcagggggagaggctcagcctgggctgccccaagaagacccctccaccagccaggggtgtgcgcagcctcagggggctccgtgctgcagctcctccccagaggaaccactgaacggggaatcttacgaaagctgctgtcccaccagccgggaagctgccgtggaagccttggaattgctgggagctacgtatgtggataagaaacgagatctgcttggggcccttaaacactggaggcgggccatggagctgcgtcaccaggggggcgagtacctgcccaaaccggagcccccacagctggtcctggcctatgactattccagggaggtcaacaccaccgaggagctggaggcgctgatcaccgacccggatgagatgcgcatgcaggccctgttgatccgggagcgcatcctcggtccctcgcacccggacacttcctattacatccgttacaggggtgccgtgtacgccgactcgggcaatttcgagcgctgcatccgcttgtggaagtacgccctggacatgcaacagagcaacctggagcctctgagccccatgaccgccagcagcttcctctccttcgcggaactcttctcctacgtgcttcaggaccgggccgccaaaggcagcctgggcacccagatcggctttgcagacctcatgggggttctcaccaaaggggtccgggaagtggaacgggccctgcagctgcccagggagcccggagactcagcccagttcaccaaggcgctggccatcatcctccacctgctctacctgctggagaaagtggagtgcacccccagccaggagcacctgaagcaccagaccgtctaccgcctgctcaagtgcgcgcccaggggcaagaacggcttcacccctctgcacatggctgtggacaaggacaccacaaacgtgggccgctatcccgtgggcagattcccctccctgcacgtggtcaaagtgctgctcgactgcggggccgacccggacagcagggattttgacaacaacaccccgctacacatagcagcccagaacaactgcccggccatcatgaatgccctgatcgaagcaggggcccacatggacgccaccaatgccttcaagaagacggcctacgagctgctggacgagaagctgctggccaggggtaccatgcagcccttcaactacgtgaccctgcagtgccttgcggcccgggccctggataagaacaagatcccttacaagggcttcatcccggaagatctggaggcgttcatcgaactgcactgacctgcccagaacgcctgcaccctcacctctcccctctcctgctgagatgggggaaatccggctgcggcatagcagatgctcgttcttgcctccttcaggcaccaatcaggagaagggttctgcctcccatcccctctacctgcagacagggtcggaggtgttagcgagcctttggtgctagaagcctgcggggtcatgtgctaagaggacagtctttctccgggagcccgctcactcattctgagttaggaaaagacacaagaccttccccacatcctgtctgcctgggttagggaggcctttgccttgttacctagaggcggagggactgaagccattgcgttccttccctgctagaaacacaggaagaagttgaggactgtctgccttccctcgtccctttacctggccagataactccagccgctgaatacagtgttaggactgggggctcctgagatgagagtttgagattcagggaatgagaccacctctcatttcttccagcatgatcgcgccctgctcccgtgc

SEQ ID NO: 34258 - DNA, 1179 bp, Artificial sequence
  DNA replication origin
gcgggcggatcatgaggtcaggagatcgagatcatcctggctaacagggtgaaacctcgtctctactaaaaatacaaaaaattagccaggcgtggtggcacgcgcctgtaattccagatacttgggaggctgaggcagaagaatcatttgaacccaggaggtagaggttgctgtgagctgagatggggctattgcactccagcctggacaacaagagcaaaactctgtctcaaaaacaaaaaacaggccgggcgcggtggctcacgcctgtaatcccagcacttcgggagaccgaggcgggcggatcatgaggtcaggagatcgagaccatcctggctaacacggtgaaaccccgtctctactaaaactacaaaaaattagccgggcgtggtggcgggcacttgtagtcccagctactcgggaggctgaggcaggagaatggcgtgaacccgggaggcggagcttgcagtgagccgagatcgcaccactgcactccagcctgggcgacagagcgagactccgtctcaaaaaaaaaaaaagaagtggtggtgggagtgtctcaggagaaagaatttcagcaggggtggccgaaggggctctctaggagggggtgttggagttgagacctggggggaagaaaaggagtcagtcatgggaagagctggaggtgaaagtgggaatgaccttctaggcagagggcacagcccatgcaaaggccctgggggcagatggcacctggtgtgttggaggaacagcgaggaggctggagcagagtgagcgacgggcagagagggaggaggggagggcgaaaaggggatggggcaggttaagcagggcctggtgggtcatggggaggtcttgggctttgacccccaggcgggtgggagccatgcagggctgtgggcagaggagggacaggacctgactccagtgctcacaggtgccctctggtggccgctgcagggaggacagaccttggtgggccagggctgatgctggggcaccagggtggaggcgactgcactggtctgggtgagtgatgttggctggggctggaccaggtagagacaagagcagaggagatgtgggcacattcagggcctgcccagttcagaggaccctttcctgttccttaaagtgactgaaaaagaattcggcccaggaaccttcacttgtccc

SEQ ID NO: 34259 - DNA, 1223 bp, Artificial sequence
  DNA replication origin
catggcctttcgggcctgaagcctgtggggcttgaaggtgttggccaccttcctggcgaagatctgggagtgttcgtccagccgcaccagcccggagagcaggctggccgtgtcggagctgagctgggccggggagctctccaggggcaggaaggggatgacacagtctggcgacccctgtcgcgtgaggttgctcatcatggcttggttcacctggtgcaggctcaggcgacagtcgaagttggaggtgagaagtaggatgatgaaagctgagtggtctatggcgtcctgcaggcagctcagctccccgcgccccggcacctggaaatcctcgcagaaggtggccccgtcgggcacgccaagggcctccagcttctcccgaacccgcagggcgatgtgttcgtctgccctggcgtggaggatcacaaagttatagaatttctgttccgatgatgattccagggaggaagggaacagggaggagggggtcaggtgagctgaacaaggagtagatgaaggaggaggaggaggaggaggaggggatgtttctggggtggtgggagtaggtgggcacggcttggtatttggagaggtggtatcttctacagaaagttggagtggcgtctggtctttgacagagcaggggtttttgaccggctccagaataggcaaggggagagactgggggcctgcagacccctcggtgcactccactgggtagttggtgctggtttctggagctgcgggggtatcagggaggccagtggaggttgcatctggggccacttcgggaagcccaggaggtgggctgcttggcagctctggtgggctggcaatctcccccgatggcggccagctcatctcctcaggctcctggcagccaccggggacaggctcgggcaccaagctggcctgggggtcgtcacagagcttgctgggcccatgtgggctgcggtgcaggctgaggaagggcatggtaggggactggctgatttccaagttgctggccagggaggcagggctgccagtggatcgcagggagcacccttggctccagtccgaaacaccgtcaatggggcgtgggaggctcctggtcccagagggcaaagccgaggatggtgggaggcagcccagattggactggagcgtccggatgctccctggatccccagcaatgtcccacccacaccggtttcgggcctcatcctgaagttcccccagcc

SEQ ID NO: 34260 - DNA, 1452 bp, Artificial sequence
  DNA replication origin
actgcaacctccgcctcttgggttcaagtgattctcctgcctcatcctcctgagtggctgggattacaggcatgcaccaccacgccccgctaatttttgtatttttagtagagacagggtttcgccatgttggtcaggctggtctcaaactcctgacctcaggtgatctgcctgggattacaggcgtgagccacctgcccagccccatttcattttttttagagacagggtctcactctgtcacccaggctggagtgcagtagtgggatcacggctcactgcagccttgaactcccgggttcaagtgatcctcccacctcagcctcccgagtagctgggactacaggtgtgcggcaccacacctggctaatttttgtatttttggtagagacagagtctcacccatgttacccaggatcctgggctcaagcaatccacctgcctcagcctcccaaagtgttgggattacaggcataaaccactgcacccggctaactttctttttgaatttttttgtagaggtggagtctcgctatgctgcccaggcttgtcttgaactcctgggctcaagtgatcctcccaccttgtcctttttaaatgttttaaccacctctcccactctccttcccacactctcatgcagcctttcatgcatcgaatatgcatttattgagcacctactaggtccaggaactgttcaaagtgccactgcatatcaaggcaggcacatctaccctcacagagctcccagtctggttcagggagaccaacagtaagcgagaaaataacccaagatcatttcagagaatgaaaagtaacgtgaaagccatgagccgggggctgtgtggctctgagagactggctgggaaggggctacaggggaccacggtggtcaagggaggcctttggggacaggaggtaacattgagctgagacctaaaggagctgagggaggaggctgggtggagatcagggaggaaagcttctggaaggtgaagccacctgcccaaaggccctggggcaggactgcgcctggtgagctggaggaacagtaaggaagcccatgtggctggataaccgttaggagggggagaaaggaagaaggtgtgtggtggtacagggtgtgaggttgggatcctgggtgtcagggaagagtttggggtgtcagggaggaatttggggtgtctgggaggaatctggggtattcgggagggatcctgggtgttggggaagaatccagggtgtcagagaggggtcctgggtgtcacggaggaatttggggtatcagggagggaccttgggtgtcagggagaaattcagggcgttgagagaaatatggggtgtgaggtaggaagcttgggtgtcaggaatttggggtgagaaggaatatggggtttcaggtaggaatcctgggtgttggggaggaatctggggtgtccgggaggaatctgg

SEQ ID NO: 34261 - DNA, 887 bp, Artificial sequence
  DNA replication origin
gaaaaattagttgggcgtgatggtgtgtgcttgtagtcccagctactcggaggctgagatgggaggctcgcctcaacccaggagttggaggctgcattgagctatgatcgcaccactgcacttcagcctgggcaagagagtgagactctatctctaaaacaaataaataaaaaagggccgggcatggtggctcacacctgtaatcccagtacttggggaggccgaggtgggcagatcacaaggtcaggagttcgagaccagcctggccaacatagtgaaaccccgtttctactaaaaatacaaaaaattagctgtgtggtggcaggtgcctgtaatcccagctactcaggaggatgaggcaggagactcgcttgaacccaggaggcagaggttgcagtgagctgagatcacgccattgcactccagcctaggtgacagggcgagactctgtctctaaataaataaataaattaattaaagaagaatatcaaataaacagtgcagggagtgcgaatatgtgaccgagatgactggagtgggatgtctggcctggcgggaacaccagcattgttgtcacagttcagtgagatctcaagtttagtcacgtatttatgcaggagcggagtggcgaagggggaagaggaggagggcggggagaggacaggggaggttgtgcaggaccttgtgggctgtgacgaggacttgggctttgaccccaggggaggtggggtccatggagggctgtgggcagagggacgggttctgactcaggtggtcacaggcgccctctggtggctgctgtggggaggagactgtggtggatgagggcgggagctggtgagcaggacagaggggactgcgttagtgatgagattccaagatgcccg

SEQ ID NO: 34262 - DNA, 1178 bp, Artificial sequence
  DNA replication origin
ctttaggaggccgaggcaggtggatcacttgaggccaggagttcgagaccagcctggccaatatggttagtcctcgtctctactaaaaatacaaaaattagctgggtgtggtggcgcgcgcctgtaatcccagctacttgggaggctgaggcaggagaaccgcttgaacccgggaggtggaggttgtagtgagtcgagatcgcgccattgcactccagcctgggagacagagcgagactctgcctcaaaaaaaaaaaaaaaatttaaacattcagcttctcactgtgcattagccacgtggtgcttttggctacaatgttggatggcacacaattctagaattgcagaaagttctattggacagtgctagcatagaccctgtccccactcacccccccaaaaaaatgcagtcacagacacccaatttttcccatgttctttctaaagctaccagaagcttcattctattcaaataatttggcagaggtggcaaactggtggcccctgggctggacaaagccccagttgggtttcatttggtccaattgttccctaacaggcaggacatgtctacagcttgaacttcctgtggatctgtgactctccaggtgggtctcccatagggcactgctctcccctgcccctctaagcagggcatcactgccacctcctcagcagaaatattcacctcctccctggaccatctgagattgagaccttggtttatagaccaagaggataaataatttgggaggtggagaggggcggggtaaaatccaagtgggggcagcttcaggaaaaggttgatccagcagtcacagagcctggagcctgacccctccattgcccctggctgaccctctccaggcctcagtttccttctctgcaaaatagggatgattaaaaagacaatacagtgctgggaggatgaagtggtctgatgttgggcagatcaggccggaggctggacaagttcccgtggtggttcaagtcactcatatagctgggttgggccgggtgcggtggctcatacctgtgatcccagcaatttgggaggcccaagcgggcagatcacttgaggtcaggagttcaagaccaacatggtgaaaccccgtctctgctaaaaatacaaaaaattagccgggcgtggtggcacgtgtctgtaatcccagctactc

SEQ ID NO: 34263 - DNA, 1455 bp, Artificial sequence
  DNA replication origin
ttgggattacaggtgtgagccactgcgcccggcctttgtttttcttttgagacagggtcttgctctgctgctcaggctggagtgcagtggtacaatcagggctcactgcagcctcgacatcctggacctaagcgatcctcttacctcagcctcccaagtagctgggagtacaggtgcatgccaccacatcgggctaatttttgtatttttcatacaggtgggggtcccaccatgttgcccaggctggtcttaaactcctgggctcaagtaatcctcccaccttggcctcccaaagtgctgggattactagtgtgagccaccacgcctggccatgtgaataatttttagcgtaagtatgttccaaattattttgagacatacttatgctaaacatttttcatttaatggagttcagtggctcacgcctataatcccggtgctttcggagacagaggcaggaagattgcttgagcccaggaggtcagggctgccgtgaactatgatggcaccactgtactccagcctgggtgacagagcaagaccttgtctcaaaataataataataataataataattcattttggccgggcacagtggctcacacctgtaatctcagcattttgggaggctgaggtgggcagatcacttgaggtcaggagttggagaccagccttgccaacatggtgaaaccccgtctctactaaaaatacaaaaatcagctgggtgtggtggcgtacgtttgtaatcccggctacttcggaggctgaggcaggagaatcccttgaacctgggaggcagaggttcctgtcagccaagatcgcaccaccgcactccagcctgggtgacagagggagaatctgtctcaaaaaataataataatggccgggtgcgacggctcacacctgtcatcccagtactttgggaggccgagggggtggagtggatcacctgaggtcaggagtttgagaccagcctggccaacatggtgaaaccccgtctctactaaaaatacaaaaaattagccggatgtggtgacatgtgcctgtaatctctgctgctcaggaaactgaggcaggagactcacttgaacccaggaggcggaggttgcagtgagccaagatcacgccattgcactccatcctgggcaacaaaagcaaaactccgtctcaaaataaaaacaaaaacaaatactaataataacaacaacaataattcgtttaactgcctgtcttgtaattaacctggcaactcagccagacgttgtccacgttgccccccgccacattgtggctccagcgaccgggtggacacctgaccagctgtggcccaacggtgagaaggcagaggattttgtctggcaattatttgggctcgctgcaggaagccaggggtcttttaacatgcaggccctggcctgtccccacccccaggccctcatggcgccagctgcccgc

SEQ ID NO: 34264 - DNA, 1233 bp, Artificial sequence
  DNA replication origin
ggcctcccacaagtcctgcaggcaggcagattccttgtccatgtccgggaaggatggaggcctggggcagctgcctgggaatccgatcccacgggcccctgcaactccattccttggggccgcagccacccccacagccaatccctccctggagaaccgtgtccaggatggccaggcctggcggctctgggcacggccctcccagtgccagctgccaggatgtgccagccgcattggcggggagagaacaggccgttcttggctctcccggctgcctctttgttccctgggcggaggtggggggctgttgtcctggcaaccacccccttttccccaacacagtcacacgaggtgaaaactgggggcgcctcaggcctgggggttcaggtcagggagggtccccggtcacctaaggtggccgaggatctccctcctccccgccagcccggcttccttggagttcatatttcccggacgacgagggaggccgggtcaccccccgcacttttggggattggaatgtcggaggtggtggcaacagggggtggacgttcccagcggggcaggcaccgtggtggtggcagctgctagtcccctgcctgtcccacgtcccccaagtgggaggccgcagctggtgtgggtgactttggttcccggggcgggggagggttattttgggagtagggaccagggagaatgagaggcccctccacgggggcaggaagtggggcggccccagctgcattctcccgttggcccacctggcgtggcgggtactgctgccgctgcacaggaagtgtccccaacgcccgcctgtgtggtccactgagtctagggcctggaaatgggaggcagctggcaaggagggggcagggacccgctgggggtgctgtacagcagatcagaatcttccagaagagtcccgctggggtaatggtggtgcctatggagtgagtggtgactttggttcaggccatttatatgcattggctggtttaatccagtgtgttccggaggaagatgctaggaataaatcccccttttacacatggggaaactgaggctcagaaacagaagcgactggcccaaagtcattcagcaaataaacagccgaggccaggcgcggtggctcagacgcctgtaatcccagcacttcaggaggccaaggcgggtgaatcacctgaggtcaggagtgtgagaccagcctggaccacacggtgaaaccctgtctct

SEQ ID NO: 34265 - DNA, 1283 bp, Artificial sequence
  DNA replication origin
caacgcccgcctgtgtggtccactgagtctagggcctggaaatgggaggcagctggcaaggagggggcagggacccgctgggggtgctgtacagcagatcagaatcttccagaagagtcccgctggggtaatggtggtgcctatggagtgagtggtgactttggttcaggccatttatatgcattggctggtttaatccagtgtgttccggaggaagatgctaggaataaatcccccttttacacatggggaaactgaggctcagaaacagaagcgactggcccaaagtcattcagcaaataaacagccgaggccaggcgcggtggctcagacgcctgtaatcccagcacttcaggaggccaaggcgggtgaatcacctgaggtcaggagtgtgagaccagcctggaccacacggtgaaaccctgtctctactaaaaatataaaaatcagccaggtgtggtggcgggtgcctgtaatcccagcacttcaggaggctgaggccggtgaatcacctgaggtcaggggtgtgagaccagcctggacaacacggtgaaaccatgtatctactaaaaatacaaaaatcagccaggtgtggtggcgggtgcctgtaatcccagctacttgggaggccgaggcatgagaattgcttgaacccagggcaggggtggaggttgcggtgagccaagatggcgccactgcattccagccttggcaagacagcaagactctgtcccaaaacaacaacaataacaacaacaacaccaacaacaaaacagcagaggccgggcgccatggctcatgcttataatcccagcactttgggaagctgaggtgggcagatcgtttgagcccaggagcttgaggttgcagtgagctatgatcgcgccactgcactccagcctgagactggagcgtgactccaactcaaaacaaaataataataataataataattaataaacatcagaagtgggattctcatgcatagcatttactatcagatatattaactccacagaggcctccaagtatatactgtacagtgtagctctcaaccaggggtgagtctgtccttcagggcccatggggtgatgtctggggacatttgtggttgtcatgactgggggttgctcctgatatggagggggtgggggccggggatgctgctcagcactcttcagtacccaggatggccttgccgcagagaaggaacccacccctcatgtacagttatgcgcggtggctcacgcctgtaatcccagcactttgggaggccgaggcag

SEQ ID NO: 34266 - DNA, 1893 bp, Artificial sequence
  DNA replication origin
tgcgggacatgcgtgcgcccgggctggccgcgcgggaaagttttgcaaagttcccgagccccgtgcgcccggcccgggctggcaccccgacccggcccgcccgctcacctctccggtcgccgcgaacagcttgtctgcctgcgcgcgtggcccggctggggatggcgatgaaaccgcgtgcgtggcccggaccccgcgcggacttgcgtgcgacccggagcgcccgctcggcaaacgctgcccgccgcgctgccagctgctctgatttttttcccgcgaaaactcggcatttgggagttgcggggccgcaggaggccgtgccgggggcgggcgcctgcctcctgattggccgacgcagtggcgggaagcgagaaagagggtggggggcgcccccgcctctgtccacggcgcctccgcctagtgggccacggctccgcccagccctgcgcgctctgctgggcgcgcccagcgtgcaaaggggctgcgtggcagggcctggtcaccccccgcacgtggacaccccaggagccttggggacccccagggtacagaccccctgaactcttaagtccaagtccgttcgcagccccccactcgcacgcattgaccagtaggtctaagaaggccggaatcaatgtgtaaatactgcgagggaatgtggggggcccctaggagaccacctgcaccctgatggctcgcccgatcgccccaagccccactgcctggcgtcagggcctgccagggctccccactctacccacccgcagggcttgtttgctgtcttttcccgcctcgttttcccgccttctccaggctgtccaggcgggcagggctgccctgccccctccgccctgtctgttccactctgaccagtcctggcgggcacaggagtgacctgtgctgggcacctacaaagcagccggacaggttgctcagagctgcagaacccagcggtgtacatggcagacccagttggtggtctcagggagggaaaattcctatctgggggagacaggcaagaaatgaataactaaagcagataatttcagatgattccttataggagagtgaccagcagccatgtggtgggaggcggggagagaggatactctctcactggggccactgcggtgggcctctcagagaagatgacatttgagctggaatcggagatgagactccaaggacagatgggtctaggagggaaagtcaaacccagaggccggaaaaggcttagaggtgtccagggagcaggaaggggctggtgtggttggggcccactgagcaaaggggagggggagttgaggtcagaggggtgatatataataccttgaaggccaccggggaggactttggtctttcccttgagagctgtgagcagaaaaatgttgagttcccacttagctttttacagtttcttcgtcactctattaagtctcctctatctggtcagtgggacttctgctatgtccctaatataggagacagatcatggcccccgaagatatgcgtctctagacccccacgtcctcgcccccaggatctgtgaatacagtgccttacacagctaaaaggactttgcaactttgcaggtgtgattcagttaatgattttgagttggggagcgtctcctgggtgatccaggtgggcacaatgtccttaaaaggtcctaataagtgaaaaagggatacaaaaggtcaaagtcaaaggagatgggaaagtggaagcaggctttacaatgatcaggccaagggccgggcgcgttggctcacacctgtaatcccagcactttgggaggccgaggcaggcagatcacctgaggtcaggagttcgagaccagcctgactaacatggagaaaccccgtttctactaaaaacacaaaattagcctgg

SEQ ID NO: 34267 - DNA, 1767 bp, Artificial sequence
  DNA replication origin
agggcctggcgagccgccggggaggatgtcaggctccgcgcctgcgcgcggggcgccccgcgattcaattgtcgcgcccgagcccgatttcgcgcgccctgagttccccgggagcatctgggccaatggggagcgagcggggcggggcggccgggtgctgcggagccaataagaggcggctcaagtgaaggggggcgggacttgacgagcgggggccccctctgtagtcccggcggcgggggtgggcgtgggctcgctggcgcgacccgcgcgggccagtgggagtgcgggagggacgccgagggtccagggtttggaggggcgcgagctgccgggggttggaggtcgaggtgagtcgcggggcgcgcgcgctcgcgggtggccgggacggggcggccggttaccatggccaccgcggggcgggcccggtcgcgcacgcgcgcggggggggccggcaaggagggggggcgtgggcaccgaggggtcccggggtccgcggatctcgggtggggtttttccctctcagtggcacttggttgagttcccccgggacttctgaagttccggcccgcgctggacttctgggattccctcttccgtaaataggaatccgaggaatgaatgaatcaatgaatgaatgaataaacgaaccaactcggccacttggcccgggcctcctttctcctctggtcgtggggaaggagggatgggttggaccttctgcttttctttcaattccctcttttcattctccttcctcctcaatcttcaacacttggctagtcgttaatgccttaagtgcttaatttgttgtgtctggtcctggccagggtctggctgtacaggaggactggaagggcatcctgggagtttcctggtgtccacaggccggacaaaagcaaccccgactccttagagcatggcatggctcagaggtgctggtaaaactgatgggggtttttgctgtccctcccctcagcgccgacaccatgtggatccaggttcggaccatggacgggaggcagacccacacggtggactcgctgtccaggctgaccaaggtggaggagctgaggcggaagatccaggagctgttccacgtggagccaggcctgcagaggctgttctacaggggcaaacaggtacacccgccgccagcacctttgttctatgcctggtccaggcctcgcgcctctgcagccaccagccgatactttctccctcccacctccccccccaacaacctcgtccggtcccacttcatctctcccggaaggagaagtccacagaaacctcaaatgcctgcgagaggaaggaacaaagggaggactcacagattgacacgctgggctggcggctggccctcgaatctatagggtctgggcttttaaacttcttttttcaaagctccgcctcaaaataatggctagagaaagaagttttggaggtggccgatggaaggctgaggaattttcgagaaagggcccaggaccatctggtagctaggacggaggggaccaggttttcttttttaaacatccaccaccaattgctctcagcctgtaccggttaagcatcagaccctgcgagtgtttgtttctaaaaatttggattagcttattcagagtctggagatggcgcttgctaatcaggaatttccgccaccctgagcctgctgtgctgcggctgctgctgacctggggcgtgtggtccccgaggggtccaccgaccctcgtctctttctctgttctgtctccagcccctcgt

SEQ ID NO: 34268 - DNA, 962 bp, Artificial sequence
  DNA replication origin
tcaaaaaaacaaacaaaaaaagaaacagagtctctacgtcccccaggctggtcttgtgttgcccaggctgctcttgaactcctgagctcaagtgatcctcccgcctcggcctcccaaagcactgggattgcaggcgtgagcccccgcgcctgcccctctcctgtatctcctcagtgcccctctggggatttgtagggggcgctctggtctccccgcggcgggcagggccgcactcaccactcgtcctcgctgggaacactgctgaggggcgggtccaggcagtagatgtggaaggccatgtcgcactcatcgcacatgagctgcttgtcggggtcctgccggcccccgcacaggtggcaggcgcagacccggcagagtctgttcacgtcgtccttgcagtgcttgcaggacggcccgctcttccctgggcacggggcggcagggtcagctccggcggggcccggccaagccagagacgggacaagagcccccgccccgtgcccaccgcggaagatggggaaaggctggctcagaactcacgtctcatggggttgtcaaccatggggctcccttcacccggccgctcaatcttgaagacttcgtccacgaagatgatccgacagtcgttcagagaatcatccctgcaaggaacgaggacgctggaacattctggcctgccgaggcccctaaatctactcacagcacttgaacaccacgggttctcgggatgcctggggcaacagctcagctacgccccctagcaatcaaagctgcactcacagaagcaacatgaaacggaacagggcgcagtggctcacgcctgtaataccaacactgggaggccgaggtcaggagttcgagaccagcctggccaacatggtgaacccccgcctccactgaaaatacaaaaattagctgagcttggagaagcgcgcatgtaatcccagctactcgggaggctg

SEQ ID NO: 34269 - DNA, 1500 bp, Artificial sequence
  DNA replication origin
cggccatggcggcggggtccgcgctcggacacggccgggcggcctccccgtgggctcacctgaggcggcgtgcgcggcccggtccgggagcagcggcgcgctctcccccgccctcggcgtcgcacccccaggccccgctcgggccgggccccgctcggttgctggcgaccgagccctccgcaagcgctcgcgggggggcttataaggccgcgcgccagctccgccccgactgccattggctgccggatccacgcccgagcgcccattggccggagctgacagctccgcccctcccctccgccgggcccatcaacaccgcacggcccgcccaccgcgcgccgcgattgggcggggacaaacgccggcctcgcctcttcattggcagaccggcggggacacgccggcgcccacccacgtgcccgctgaccggctctgttctcattggagggggcgcacgccagccaaggctgccgcgaccaacccgacggcagctgggccttggattgacaagggagcctcagggcccgcccgacgaccgcacagagaggagccagtattggcttgaggggccagcccgaggcgcggacaggctggggcaggtgccaatcactgcccgcaagctccgggccccgccctggttatcaggcggcggctgagtacgtgagacccagcacagcatcagcaccggccgggaacgtgcaggctggaggttcgaaacccgtggccggaatgtgggcttagcgttccccaatttgcaaagtgccaagcaaggagacatagcgatccgttttgcaaaggaggagaaccgagaacatagggtaaagcagcaagagcctccaccccgccaccgtaggtctattcccatcacaatcaacaaacctttgccaaggggcaaggccttcggaatagttagggtccctctccccgagttccctaaaatgtatgggagagaatgagctttggtgctttctgacctggattcaaagctaagccgggccccatgcctcactgtggttgacctccagcaaagtaacctcgctgagtctgtttccaactgtgcaatggatatgatggtagtggccacaccccgtctacccgcctcttgagaatgttgcaaggattaagtgggatgaggcacggagaaagatttgaccctgtgacttcacaaaatgagcattcattgtgtactggaccacgcaggggtgtgaggcatgcccccatttggagtggcaggagtgtaaattgggcaatttgacattttctaataacattctaagtgcatccaccacccgataacccagccagcagttcttcctggaggtgatgtacccagaaaaaaggtctggagcttacacaattcaagaatgccggcggcagggctgtctgcaactgtttccaatgttttgcactaactatccatcagtgggggattagagaagtaacttaatagcaatcagtactctggaatacttactatgtagcaattgaaaaggaggccag

SEQ ID NO: 34270 - DNA, 1681 bp, Artificial sequence
  DNA replication origin
ggcggagctggcgcgcggccttataagcccccccgcgagcgcttgcggagggctcggtcgccagcaaccgagcggggcccggcccgagcggggcctgggggtgcgacgccgagggcgggggagagcgcgccgctgctcccggaccgggccgcgcacgccgcctcaggtgagcccacggggaggccgcccggccgtgtccgagcgcggaccccgccgccatggccgcccccgcgtcgcggctcggggctgcgggcgcgcccgggactcgaggcccaggcctcgggcgcggcctgctcgggccgggcctcgcgctttgtccgggccggcggggcggttggggcgttaaccgcccggcccgggggcgcccgctggttttcgggcgggggcggcggggccggacaatggcggggcgcgcccaggggcgggagcgggggccccttcccgggccgggggcgcgcgggggctgggcacagacggccccggcgccccgcacaaaagatgacagcgtgggtggccccggccgggcccttttatcacccgggacaagcctcggcctattattattattatttttgaaagaaagcaagaaaaaggaaaaagaccccagcccctgggtaacccccgcctgcgtttctggccctttgggcgccaggggggctaaggggaagccccccagctggacacccagggatgccccctaaatgcctatcattgctcctgcactgcccccacctccggtcaacctgctatgccttggtagcttccaaacttgcccccctgtacgtacccgaaacccccaccccgccataagcatatgcaatctggattttagaaaaaaatcatcttgctatgcaacggcagcctccacgagtctctccgtccctcccccttccagcctgatcgccatctcgaacgaagcccctgctctagagaaatgaattgaggagttgcttccgccgagaccccttttctgtgtcccccgtggacatccccctgggagctggggacggactcgctctgaaatctgcttgacctggggtctgccagggcccaggtctgcgctcagtggtggccatgacaatcaggcaggacgggggactctgtccacctgggcacggtggaaggttttaaggggcatgttttccgcccctgggggcagtggaggcatggactgcttttgggtgcatcccatctgtttgcttgggggaggatgcttctgttttaataatttaccagcaccctgtgaggaagtgttccccgagttgtgaaactagtgagaaggtggttcagctccgtggagcctagtgatcctgtcatatgtgaagagcgtctttttccatgtgtttctggctggggcgtgtattcagcaagttcctttgggtcccaccgggtgcctgcactgtcttgggatctctggatactggactgaattcaagggatcggtgccctgccccagtcctctgcctcaatggccatttatcagaatgtccccgggctggagaatgctcctaaaaacagcaccagtcctaaagcaggctcattagacgactcctatgggcttttatcactgccgttatgggagctaatgactcccctaattctccaataatagcttccttatgagccaccaggagggtttgtcaacacacggggtcagccttctcctgcagcccctgctgaa

SEQ ID NO: 34271 - DNA, 1427 bp, Artificial sequence
  DNA replication origin
ctggactgaattcaagggatcggtgccctgccccagtcctctgcctcaatggccatttatcagaatgtccccgggctggagaatgctcctaaaaacagcaccagtcctaaagcaggctcattagacgactcctatgggcttttatcactgccgttatgggagctaatgactcccctaattctccaataatagcttccttatgagccaccaggagggtttgtcaacacacggggtcagccttctcctgcagcccctgctgaagcagtgggcatcctctctccgctttgcagtttatgttttgaaaccctgaaggtcggagcgtaaagccgtggtagagtcaacttctgtctgagccgaggatttctgggacttgccagcctcgtctccgtgtgtctgattggacacctggcaggtccgggcgctccccctccttgagccggcgacaccaggacgggtcagactgtcctggcctagaggaggtcaccgctggggaggaaaagggggtaacggagattctgccgcacagacgggtgtctgtgtacaggctgttttggtggaagcgtctactgtgtcaggagctgcgggtgcctgcgtgtgcacgtgtgtgtttagttgctgagacctgaaatatatatgtcttagtaacaatccgtttgctcgcattttctaaccctttcctctttggggagggggctgctaacaagatgttaactgctggcgcttaaaggtatagctgatcagccaccgcacagcaccccgcctggcctttgttgtacttttctgtctcgtggaagagacccttcctcagcctcctgccctgtcttcagtccctgtcccgtcctgcaggagccctctggggtggccaggggccgtcctctgtgtccttctctcccacctgaccactctgcctgtactttaattcctaatttctctgtctcctctgctggtttcctgcccgtttgtcctatgccccacccactccctgatgagccggggaggagcctcagctctggggaagccatctgtcctcggttccatctgacacctgtggggacgtgccttggggtcatgcgttcacctggtctggggctgctaggtttccagtgccgagtgccatgccgggacaggttgggaggagtccctggctcctgtgggtttagagtgtagtgggggaaagggtgagctggctgcccagggcctggtcacagctggaatggtggtgtgcagtccgctgccctcgggcccagctcagggagcaggcaggaggaggcgaggctgttgagggcctgaggtgcatttgtaggtggctttgttccctggatcggggagcggaattgggggttcagagctgggtgaccttgacccagtcacttgctcagtgacaaagcagatcgggggcactaaatctttcggagcccactgggcag

SEQ ID NO: 34272 - DNA, 1106 bp, Artificial sequence
  DNA replication origin
gaataacatcctatagccacaggcggcttcaaagggcttgagctatcagggcaggattgcgggaggattcgcagcagggaggatggacacccggagacctgctacccatgcacgtagcctgctgggctcagatccacctctcctgggtctgtgtctttatttccaaagtgggggtggctctgcaggtcccgcttcaaggctgggtgaggttaactgaattaccacgcgaaaagcccttggtgaagtagttctcaccccaggggcaattctgtctcttaagggacacctggccacagctggggacatttgtgatggtcaggatttaggagtgctcctggcgtggggtgggtggagggcaaggacactgctcagcaccctgcagtgccccgggcggcctcatcccagggaaggctccaggccagcatccaccgagcggaggctgaggccccaatccagagtggcgctggccaggttgggccccgggaggtcacaggaatgatttttctctgggcttgtttctgctcttgactgtgaatagaggtgctgcactagaagtttctaaaatctttttccattccaagacagcttagggtttatgctgctcttcgtgtttgtgctggaaaggaagttaaggagccgtggaagtgatcataaagcaacttgaaaataatagtttttgcggcctctttattataatggggcagccaggtgggttggccggggttttatgggccaggaagcaggcgtgggggtttctgggggaagctggacccgaggcagcgttgaccccaagaccaggactccgcgtctctcctgttccggcctgttccgtacgcctcgtcaggttttctgctccggtgaacttggagtgtgttggggactgacagatccagagaacatgcccctctgctgcatgatgccgctggggccctcgggagggcttggggtgtgtctgtgggtcttgcaaacactctcctcttggtgagaaggatctggttgcattttgtgcccttgggctgtcccctggctcggacagaggtgtccctgctgtaacccccacttcgcagggtaccagatgccactgcccaggagttactaatgtacct

SEQ ID NO: 34273 - DNA, 1009 bp, Artificial sequence
  DNA replication origin
cagtgggtgttaccctaacaagtttcctagagggatgttcattagaaaaataatttattttatggtataaaaattagcaatgacaggctgggcacggtggctcccgcctgtaatcctagcactttgggaggccaaggcgggcagatcaccttgaggtcaggagtttgagaccagcctggccaacatggtgaaaccccttctctactaaaaatccaaaaattagcccagcatggtggtgcacgcccgcagtcccagctactcgggaggctgaggcaggagaatctcttgagcctgtgaagtggaggttgcagtgagccgagatcgcgccattgcgctccagcctgggcaacagagcgagactccgtctcttaaaaaaaaaaatcagcaatgacagtgaagtggaaacaaaacaatacaagctgccgtcatctccagtgagcttccgaggtctctgctccatccatgtggatgtttgggaggggccctccgtgggctccaggcggctggtttagaggtggtagaatgttctagctctgtgaggctgggattcccaagtggagacctgtgatgctgctgggtgacaggcagaggatcctgctgtgcaggctggggctgccatgggaggcttggagcccgagggtggtgaggatggaattaagggatctggccccgcgtgctgtgccgggtgagaggcgggtgtgagcatggcaggaggctttgggggccgaatgtgcagtggaagcctggatggtgagcggatgagctggtgctggaacccagacccgccttcactgcccccagcgttgggccaggaccgctcatcctgtgggcggatggttttgctctgagcctcagcaccggttccaggagcgcagcctgggagcgcggattgggactgtctgtctctggccaaggctgtgtgtgtctcaggaagcctccccggcgcccagccctccacctctgtgtgttctgcaccggccgtctcccggtttttccctcgctgtctggg

SEQ ID NO: 34274 - DNA, 1918 bp, Artificial sequence
  DNA replication origin
cgggggagtagtgatggattcaggacttggtcctggtctgacctgccgtgggggctgtgatggggtcctgatgtgccccgtgtgccatggcgctcgccaagggccagcatgtctgcggcctcacaggggcttcacgagccacattcggggcagcgcttggtttggagtctagagccagagcctggcgtgggacccgagctcgtgaactctgtcagtgccactgacttggggcagtgtctccgtgtgcctccctgtggggcgatggcggagtaaacgggtgatggccactgagcgctggccgtggggactcttggtcctggctgccaagtagaagcttcaggggtgctcttcacagtcagctgactctgctgtccctgatagcagaagacagcgaaggcacctgccccctgccatggcaggtcggcgggcacagaggagggctcgggaggctgtgtcctccagcgtctccatgtttactgtgccaggccaggtgctgaggggccggcgaggaagacgtgaggactggagagagcctggattagggccctcgaggggcggcgctgctttagccgggggaacagggagggcctctcccagcaggtgacattcagtcagagacctctgagcgactcacacctgcccacctttgcaggatttgggacaagagtgctccaaagaagtgcaggcagcacgtgcggaggccccaaggcggaacgaggcgcagctcactgagctggcaggagcagagaggactgcaggggcacagaggccggagcagcagtgcctgctgcctagtcagccgtgagggcaaaggctggaggcactgctgtcagaggtttatgcctttttttatttttattttattttatttttttttttgtgagacggagtcttgctctgtcgcctaggctggagcgtagtggcacaatctctcggctcactgcaacctctgcctactgggttcaagcgattctcctgcctcagcctcctgagtagctgggatcacaggcgcccgccactacgcctggctaatttttatatttttagtagagatggggtttcgccatgttgcccagtctggtctcaaactcctgacctcaggtgatctgctctcctcggccttgtaagagttaaagaaagaggaaagaaacacaaaatgcagctggcagttaaaggcaagttttctttagttaaaacctgagaggcgctcttggccgattgcggtcaggagcgctttctcttatagactaagagtatatattggttttagggtgaaggggcttatcacaagcttggaacgtttctgtgtgtggagaagtttatggcagggctggaatctgtctgggaggaggggaggttatcttggggcagacatcttcccggccggaggggggttatctcggggctggcatgtctctggttggggaggagtttgcgatgtttctggctggagatgctatttgtggtttatggtcatgctgatcttagctgttaggctgataccctttggatttagcggtcttttattaaggtgaacttttagaatgaggggcttgtccgggatggcaatgcttctgctgtcaggcctcccaaagtgctgggatgatgggcgtgagccactgcgcccggccagtatatgtgttttaaagacctctctggtggctgtcaggagtgaaagcaggggacctgtcgggaaactccaggcgtcgcccaggtgattcatggcaatggctcaggagaagggggtctgggctggggctgcggcctggactgggggtggcttttggaggtagacaggataggcctggctggtgggttgaatgtggagtggggagatcactgctactcccagggtgcagcagctggtttcacgcccccagctcggccacttcctgcacagcgatgtggtcttgggcct

SEQ ID NO: 34275 - DNA, 819 bp, Artificial sequence
  DNA replication origin
gagtgtattccggaggggagcaggggtggcctctgcccaacacccaggggtactgcccacctgtgaccattaaaatataaccgccttcctgcccctctgtgggtgacttctcacgctcaccgcacgggggtacggggactcccagggagcacagagccgtggtgcatctcacagtcaagcgttctcaactacatgaaactggggagctgaaacgtgcacggcagcacacatgcacaccgggtcacagggactggctgtgtctagacactgccgagcgtccccagacaacatgcctggctgagggcattgctctaggaagctgccgggctggggtgggcctgacgatccgtctctggatcgtgggtagaggtgtatgagcccggggggcagcaagggctgagaagggccaaggagctggcgggatgcgcggtgagaacaggcccactgtgggccatgcactccaggccgggtgaggagggagcgagggcctgtggcagggcaagagctgggagccgagcacacgaatggtggaaagtgccaggggccggcgtgtggaaatggcgaggccattgcactggaggggttcccacgagtctccttcccccagaagaaaaggacttaggagaatccttaacctcatccttaagtctctgccagcacacccgccctccaggacacacgccatccaccgccctagccgtccccagtgccagctttactgccacgtattaacttcaaagaagcatttgtgtaccaaagtacacagagaaatgcacaaactctaaaaaataacacgaaacaggacgcgcagaggggagc

SEQ ID NO: 34276 - DNA, 1917 bp, Artificial sequence
  DNA replication origin
cctggagctgaaggagaggaggagctcagggcaaaccatgtgggcttgctgtggtttggcaggtccccagataggctgccttcactttgtaaaagttaacttttactgagaggaaattcacatacatcatattcactctttaaaggatacagtttggaggtcgttggtgcactcacagggctgggcagcatcaccactcattccggagcatctcattgtcccagaggaagctctgtccccctcagcagttgctcttcatcctgtcccccacaccccaaaaccaggcatctccttcctgcctctgtggactggcctgtcctggacatctcatagaaatgggatcgcgcactgtgtggccttttgtgcctggagtctctcactgagtggcccatcctcagagttcatccactccgtggcctgcgtcagagccttgctccatttcatggctgagtcgcgttctgctgtgtgtggtgccgggcgacctgctcccctgctgatgggcgctcatgtggcctcctctctggctattgggagtcgtgctgctgtggacattggtgtgcaggtgttggtgtggacgttggtgtgcaggtgttggtgtggacgttggtgtgcaggtgctggtgtggacgttggtgtgcaggtgttggtgtgggtgttggtgtggatgttggtgtgcaggtgttggtgtgggtgttggtgtgcaggtgctggtgtgggtgttggtgtgggtgttggtgtgcaggtgctggtgtggatgttggtgtgggtgttggtgtgcacgtattggtgtgcaggtgttggtgtggatgttggtgtggacattggtgtgcaggtgttggtgtgggtgttggtgtggacgttggcgtgcaggtgttggtgtgggtgttggtgtgcaggtgttggtgtggacattggtgtgcaggtgctggtgtggatgttggtgtgcaggtgctggtgtggacgttggtgtgcgggtgttggtgtgcgtgttggtgtgcaggtgtgggtgttggtgttggtgtgcaggtgttggtgtggatgttggtgtgggtgttggtgtgcacgtattggtgtgcaggtgttggtgtgcaggtattggtgtggatgttggtgtgcaggtgttggtgtgcgggtgttggtgtgggtgttcgtgtgggggtgttggtgtacaggtgtttgtgtggacgttggtgtgcaggtgttggcgtggatgttggtgtgcaggtgttggtgtgggtgttggtgtgcaggtggtgtgcaggtgtgggtgttggtgtgggtgttggtgtgcaggtattggtgtggacagtggtgtgcaggtgctggtgtggacgttggtgtgcaggtgctgctgtggacggtgtgcagatgttggtgtggacgttggtgtgcaggtgtcggtgtgggtgtgcaggtgttggtgtgcaggtgttagtgtgcaggtgttggtgtggatgttggtgtgggtgttggtgtgcaggtgttagtgtgcaggtgttagtgtgcaggtgttggtgtggatgttggtgtgcaggtgctgctgtggacggtgtgcaggtgttggtgtggacgttggtgtgcaggtgtcggtgtgggtgttggtgtgcaggtgttggtgtggatgttggtgtgcaggtgttagtgtgcaggtgttagtgtgcaggtgttggtgtggatgttggtgtgcaggtgttggtgtggatgttggtgtgggtgttggtgtgcaggtgttggtgtggatattggtgtgcaggtgttagtgtgcaggtgttgttgatgttggtgtgggtgttggtgtacaggtgttggtatgcagatggtgtagatgttggtgtgcaggtgttggtgtgggtgttggtgtgcaggtgttggtgtgtaggtgttggtgtgcaggtgctgctgtggacatgcgttttt

SEQ ID NO: 34277 - DNA, 1612 bp, Artificial sequence
  DNA replication origin
catatccagccagatttttaatttaagagacttggcacgcattttttgtttgcctctgtctgctttccgtaggcccccaagcaggggcaatgtgtgatcgtccgtttgttttctcctctgcagtttgggggtccttgggtagaaggactgagcattgagcttggatcaaactgttggttttatggacagagtcaagtggcccggaggtggtgacttgggccatgttccttgtgagggttttgtctgtggctcattcattcagcacaggcgggccctgtggccaggtgctgatagtcctatgttccctctgagagtgtggccctggtccctcatctcctggggatcagtggtagggccaggcctggccccaggtgctctgggtcttgtgcctgtccttcctcacaccacctctcttgggtacgtagggcacagggcacaggacctccgcccgagggccaccgtgctgaggtgtggctcacatctcgtggcttcatcttgaggctggtccgtctgcttgtctcaccacacttaggcctgagtgtctgaagaagtaatgagctgcaaacctcatgacctggaaatcccacctgtcagagcccaggcctcaggaggaggcaactgaggacattgggagtgccagcaactggagcccacttccacctgcctcacttaggccactggccacccccacggatggtcccgggagttagctctgtgaccatgcgcggctgttcctgctccacctcttggagtgccgcctctgtctgttggtgttgcaggggagctgggttgggagagctcactcccttgtctgattttctggaaactgtgctcctgtctgagtgagcgcaggcagaggtgctcagtttacccgaggtgtgccgggcaggagtgctctccaggtgggggggcttggagggatgtgggggttggtactttttttttttgaagttttaatttgtagtttttatgggtacaaggtatgcttatttctttgcatggtacatttcccacatggcagtcgtggtggactgaatgatggtccccatggatgtccacatcttaatccctggaacccatgaatatattaccttaaatgacaaaagggacttttcgcgggtgggactgagtgaaggaccctgagctgggagatgaccctggatgatctggggagcccgatgtcctcaccgggtcctcatgagaggaggcaggagggtgagagtcagagagaggctggaagaggctgtgctgtggctgcggaggtggaggaagggccttgagctgagggaacctggcacgcgctggtgctctctggagtaggacgaagcagagaacgttctcgtgccaaggttttctctttcctgcctgagggccctttatgtagatcagaccagagacaagtgaatcccggtcttgccaggggaggcatttggagctgctcgtgggacgtggtgatgcggtgccaggccacatgcccggggctggggccgagtggcgttctcgtgctgcctctgtggccaggtttcacttgggaacctggctgcatcgcgggttcctcctgggccttctggtggcttggggctcctctgtcctcggtccctgctgggaaccg

SEQ ID NO: 34278 - DNA, 1361 bp, Artificial sequence
  DNA replication origin
acagtggtccagctgcggcctctgctccctctgagccggtggctccctggggacagtgcgcaggccctgggtgaacactacatggccacatctgggtgagagcgggagggcaggtgcagcgttggggggatcctggggcctgtggggttggcggggtcgcaggtgaggattgggtactgggacctggctgtgggcgaggggcccgctgggacagtgtggtggcctgggaggccccgcgcagtcagaggctggtctctgggcacaggcagctctggtgactgtgacaggtgccttgccttgacacacactgtgaccgtctagtctacatttctaggctgcacgtggtcacgtgccgtgcacggtgcacttggggcctcctgtgcagacactggctttgcggctgccccatgggagaagctgcgaggactctgcacagagcaagggtggcgggcagggcctcagcccacgtgggcttggagctgtgcggttttgtcaaacccagtgggggtctctcagcagcagcccagcgcggggtgtgacgtcagggctggggctcagcgctgggtatcagccctgtgtgctgcaggcagggtatggggtggacccaaggcagtaggtggaggccagggggcgacctcggctttgcttttgtcaggatggagggttctggacaccagtgcaagcctagctggggcctccctgccgtcctgctcagattcctgggtgcatgctgccctctagtgcccgcagtggggagtgccttcaggagcgggtggctgcaccttggtggctgggaaccccactcccgggactgtctgggcggctccctgccttgtttccttcacactctagatcactttgggggtcacagcgtggggaggtggattttgttaagttttttctaagtttttgggtttgtgtggacttgggtccttgtttccgaatcctagagggattctgtcgtctttctgcctttggagattgaacctgccaaggaggacccttccccagagtctgtgatcaaagtcccttcctggtcggggtgggctaccagttcccaccctgcaacacctgggacaggagggagccgctcccgcccgcagcctccgtggagaggacagtctgactccgatgtttccaggcgggtgccgtcagtgaatcacttggcctggtgcaatcccccattctgtacagggctggtgggctggtttatgacccgcgtgactctgggcagctatgatggcaggaaatgagccgtcttgggcgggcctgctgctctcctgggtcaaggttcctgctagggcctgagttctgctggcagcagccagccagccccccgtgacccacaggcctgctccgag

SEQ ID NO: 34279 - DNA, 934 bp, Artificial sequence
  DNA replication origin
gggctgtgtgagagctgcctccccacctcagtctcctgtgcgcgcaggcgcgcgcgcgcgcgcacacacacacacacacagagacacgtgcacacacagcccctccacagcatgggacccggacggccccctactgcccagccccctccacgggtttgagaaaggattctctgcactggtgcaaggagaagcagcatgggagctgccgctgcagaggcatgggaaggaacacgcagaacgcaaggcagggaaaccatactccccacactggcttaagacgccggtgccaagaatctcgggggaactggcctggggggagtgcagaaacctgaagcagcgacatgagggctcaaagaggcggcagccaaggaggcagagggagggagggacgaagcggaggtgccagcgcgggggaggacaggccacccgggaacccaggctgcacccaaggccgccacgtggagggcagagagagccggaaacaccggggcatggagcccggtgggaggtgagggatgaggaagaagtgacggggcgggcatttaaaggcacctcggaagagcgcagggcggtctgagatgctgattcccctcaacgtcctgacatcaggacgccttggatcccaagccagaaagggctgctgcatcctgggaaatgtggaagtaggtcaagggcaggagacagaggcagatgcggtgccaggataaagggaggcgacgcctgtcccacctgccctatgtgcaccagggagaggaggaagaggaggacctgggcctttcctgggatagcagcctgtggcctagagggccagagaagacggtctgagatgagataggaggaccaaagccttttaaagacagaactgaagccgggacggcagcagcccccaccgttctgacccggacacagatgtgccatcattcccacatcgtca

SEQ ID NO: 34280 - DNA, 1294 bp, Artificial sequence
  DNA replication origin
cagcgatcacatcagtgaagaaactgttttgcttggcaatgaaaacacttatcctccaggtgcctgttaacgacaggaaggtgctgcctccgtggccggcatgcacaggtttctttagcaaaagcagtaacagcagcagcagccgcagcgagcaggtggctctcaactgagggggggtcttgtcccccaggggacacctggccatgtctggggatgtctgtggctttcacgactgagggtgctcctggcatgaggtagatggaggccagggaagctgctcagcaccctgcaatgcccaggatggcgccaccccagagaacgatgcggccccaagtccacagtgccaagcgaagagaaacactaatttagagttaaaccaagatgaggccggtcccaaggaaaggacagtccagcttagcgccggctctttctggagactctccatgtccactatggccacagtgcaaaaggcgcctggggcacctgtccctggcacaggctgtgtgatggcagggtgctggggcagctgcggggctgccgttctcttagatttcaggggagcagctgaagagtcagtgagacacgaagacattgaggagtggaaaggcgagaaacagaaacaaaagggcctgtgtcccagacacgagatgttactacagagaactgagtggtatggtcagagacccacaggccagcactgctctgaatcacacagacactgtcccccctctccaggaagccccagtctgcttctgcaggagggttccatgaacctggcccggctccaaatccacgccaaagccgctggccgaggggaagccgtgaattcgcctcttcagtgctattagaggaaactcgcccatgatcctagtctgctaaatgaacaaaaacacttcgctcccgattcctctgctcttgaaagaacgcctcgggctacattgctcatctgtcccttccacggcgggcactgtgtagtaaagacatctgggagccacgcaggaagctccaaacacccccacggtgtctgcgccgcacacacggagccacactctaggtgacacagcccaggcaggtgctgacaggcagcgtgaacgagggccacttccagctgggctcaaacccgaaggctctgggaaaatcccgcagggcggaagaggacagaagtgacatcccacaatctgccgagacgcaaatccagaaggagggctccaggcggggagggttgaaaaggaggcactgaaagccgctcgggacattcctactgccacactcgggtcttccaggcctccggcgg

SEQ ID NO: 34281 - DNA, 1115 bp, Artificial sequence
  DNA replication origin
gcccctgtcccatgtggtgctgtcaccctccctgcgcctgcacttcctgttggctcactccaggcggggcggaggcccatgggggctggatctgtttcccagtgtttcctagctcctagaacttgggttgccccatagtgggtctcagccaagtggagccactggggatagtgtctgggctccaacccctgttctccaggtgcatgtggcccctggtgggctcttggtagccagtgggtgcagttctcacttcctgctgccagagggcattgtgagctgcagcgcttatgaccaagcatgaagattcccgttttgaaaaatgccttaccagggcgcagtggctcacatctgtgatcccagcactttgggaggctgagacaggagaatcacttgaggccaggagtttgagaccagcctgtgcaacaaaatgagactccatctctagagaaaattaaaattttttaaaaaaattagctgggcatggtggtgcaagtctgtggtccccactactcgggaggctgaggtgggaggatcacgtgagtccaggagttggaggctgcagtgagctatgattgtgccactgcagtccagcctgagtgacagcaagaccctgtctcaacaacaacaacaacaaatgcctcaaaatacgagtctctgagcctcaagatgccagaacacacacacgcccagtgccacctatgtttgctgagtctaatcctgcacacacgtgtcagggttggccctggtgctgggggggtgctgtacccagcttcccaggcctggaggatggctctgccctagcaggtgaggcccttgttggctgcagagtcttctggggagtttgataaggcaaatgggggggttcctcgtgcccctggggggtgtcccgaggtgcagatcttggggggtgctggtctctggggagccggtggcacagtctgctctctggccctgccctgagggtctgagggtgccactgactcccatcttggtcttgcagatcatccccccgaaggagtggaagccgcggcagacgtatgatgacatcgacgacgtggtgatcccggcgcccatccagcaggtggtgacgggccagtcgggcctcttcacgcagt

SEQ ID NO: 34282 - DNA, 1147 bp, Artificial sequence
  DNA replication origin
agagtcccgttcagggccctcccaccaccacccaccaggaagctggtccctgttcttccccggagcctcatacttacgtcatcatacaaagagccgctgatgtcagccccgtagatcggggagacaaaggtgaggttcttccagtatttgcgttcaaggtcatcaaagtcctggtgccgcggggtacagtacctggtgaacaaacaccccaaaaccagctcagggtgaggcctgggtgctacgcagcccaccctcagccacctggaacccagggcacccatgaaagaggcgggaggggctctgctccgactgcccgctgccccgcctagggtaccacgcaacctgcttccgggtgggacagcgcacttccacgggcgagcagtggcccaaacccacgtacccctcctcagttatcctggcccggggcacccacatcagaacacacgccagggggagtgggcaggggacagaggccctgggaggctcttgtcatccctgtgtggcaaagactgagctcagacgacagactagggggctgggaaggccgggtgagcaggacagaccaggctctgctctggtgccagagccacaaggcacgtgaacctcagagagcaacagggtggaggccacagacagggtggaggccacagacagagaggagggcacggcgacgggacaggcctgcgcagcacggaggctacgtggctgtgcctgctgaaccagggagctgtactcggaacactgccggtacacgcaggtgccatgtgtacctgggtaggcgcccataggtgtgcccacatggatgtgcctgtgtacctgtgcatgagcctgtgtgtccctgtgtagaaacgtgcgtgtgccatgtgtacccgtgtgtgcctgtgtatggacgtgcgtgtgccctgtgtacccatgtgtgttacatgtgccctcgtgtgttctgtgtctgtgccctcctgtgtgcctgtgcatgtacccgtgtggagccagggagccctctctgaggaggggccacaagcccaggtgtcacaggagggtgtggaggacgtgctcccaggccggggaccaggacaccgcccgacatgcactgggaagccctgggaaactgagatgagggcggtgtgggtcagcccaggccgggagaggg

SEQ ID NO: 34283 - DNA, 1297 bp, Artificial sequence
  DNA replication origin
tgcaagaacagactaatccagacttagggcccatctccaagatatctcaggatgtatatgcaaatattcaaaaaaagaaaatctcaaattcgaaatactctggtctcatgtttgcttctggtggggccggaagcaaggctggcttatgcctggctccatgtcgggggcgtctccctcaggttctccagggcgggctcacttccagcctgaacagaatcctccgtgtcataaaccggcgccctcggctcagagagcaaacccagtcccctgcgggccacagcgcagacaaggtccactaagcagggcagagccaaggctggccgtggcctcagggcagtcacagcttcctgctgctgttccacacacacccgccacgcaggcccacttctggcgtccagcggggcctgggggaccttatgcctgaggctgggactctggggatgccggccagctgccctcatggagagcccaggctgtgtggacaagaggacgctccagcagaccaggctcgggatgggagatcccctcaccccagtgtctccgggccctgagcccaagtcaggaccgggttggagccgaatccagcaggtggcctggcgggctgaggactcgaggctccacagtgccaggaagacgagcggcagggactgggaaagtacacgtgtttgtaacacgctgtgggccggctgctgaggccagaggtggggccagggtgagctcagggtgggggctgcagggtgaggcaggaggggccctgcaaaaatcagagaaagcctggcttcctctttcgtcaccacagggcgaggcccgcatccagagcctgggcgagggggttaaccttgcctgcctggaagcttcatctgccaaggcagagtcccgttcagggccctcccaccaccacccaccaggaagctggtccctgttcttccccggagcctcatacttacgtcatcatacaaagagccgctgatgtcagccccgtagatcggggagacaaaggtgaggttcttccagtatttgcgttcaaggtcatcaaagtcctggtgccgcggggtacagtacctggtgaacaaacaccccaaaaccagctcagggtgaggcctgggtgctacgcagcccaccctcagccacctggaacccagggcacccatgaaagaggcgggaggggctctgctccgactgcccgctgccccgcctagggtaccacgcaacctgcttccgggtgggacagcgcacttccacgggcgagcagtggcccaaacccacgtacccctcctcagttatcctggcccggggc

SEQ ID NO: 34284 - DNA, 1590 bp, Artificial sequence
  DNA replication origin
gcggcctggcaaaggggagaggcaagggcgccgccagcagagccgggaggaagccaccaccacagtgtgcagagggggctgggaaaaggaggcacaggtgggggccgtgtcctgacatcgaggtacacaggggacagccggagagtcatttgctaacatacgcgcgcgcgcgcacacacacacacacacacacacacacacacacacacgcatatatatctggtacttacatgctttatgtccgtttctgtaccaaatcatgtttcacagcaagaaatgcctacaaaagggaagccccgggacaggcagggctctagacaccccaggactccccgccccaggactccccgccccagcgtccccgccccaggactccccgccccagggtccccaccccagggctctagacaccccaggactccccgccccagggctcccacactcctcgagtgacacatgccccgtgctgctgccgtgagggtctcgaagatgtgataaaggtcccaaatcagttaaccttaagaaagggaggtggctgggcacagtgacacacgtctgtaacgccagcactttgggaggccaaggcaggcagatcacctgaggtcaggaattcgagaccagcctagccaacatggtgaaaccccatctctcctaaaaatacaaaaatcagccaaatgtggcagcacgcacctgtaatctcagctactcgtgaggctgaggcaggagaatcgcttgaacctgggaggtggaggttgcagtgagccgagattacaccacagcactccagcctaggcaacagagcaagactccatctcaaaaaaaaaaaaaaaaaagaaagaaagggagatgatcctggtgggcctgacattcacagatgacagcatggaaagcgggggagtgccactctgcagtggagacactggacatccacacccaagccgggtgaccagggccaacatcagcagtgacatcacgctgatggctgcgcctttgacccttggtaggatgtgatgggagggcccttcgcccctgtggtcttcctccctaaaacccatcaccccaatctaaccacaagaaaaacatcagacatgctgattaggggacatacagattaggggacgttctataaactccctggccagccctcctcaacactgtccagggcatcaaacacaccgtaatagcccagggccctacggagacgggacaacatcacgtgggacccggatgggttcaggggacagaaaagacaacgggggaagacagaggaaatctggagaatggatcttagttcataacgcatcagtgttggcccatcaatgatcacaagtgtaccacattgatatagaatgctcataacagggaacccggtggggaactctctgtggttactaccttcccactttttcagtgaatctaaaacaggtctaataaagacctatttaaagagagagaaagggggagaagacttcaccaaaaagtggatgaaaaacacaagcacaagcctgggacaagaatgagaagagggacctgcaggacactcacctgctgtggggtgtcctcccagtccccatcacggccaccacccga

SEQ ID NO: 34285 - DNA, 808 bp, Artificial sequence
  DNA replication origin
cacggcagcagcacggggcatgtgtcactcgaggagtgtgggagccctggggcggggagtcctggggtgtctagagccctggggtggggaccctggggcggggagtcctggggcggggacgctggggcggggagtcctggggcggggagtcctggggtgtctagagccctgcctgtcccggggcttcccttttgtaggcatttcttgctgtgaaacatgatttggtacagaaacggacataaagcatgtaagtaccagatatatatgcgtgtgtgtgtgtgtgtgtgtgtgtgtgtgtgtgtgtgcgcgcgcgcgcgtatgttagcaaatgactctccggctgtcccctgtgtacctcgatgtcaggacacggcccccacctgtgcctccttttcccagccccctctgcacactgtggtggtggcttcctcccggctctgctggcggcgcccttgcctctcccctttgccaggccgcgtgtgcctgtggcccgggcagtgaggctgtgtgttggctgcattggaaggtcttacaaatgggctgatttccttgcgtttctgctcaatggtgtgtgtgtaagattcatccggttgtgtgtggtggcagtgcactcattgtcatggctgtgaaattccccactgtatggctggactttagtcgactttttccattctgccgtggacggacatttgggctgtttccagcatgaggcttctgcgaaagacctatcatctcttcacctgctgctcatgtaagaaattcattttgatcgtaagccttgctatcagtaactgtgactggggctgca

SEQ ID NO: 34286 - DNA, 1153 bp, Artificial sequence
  DNA replication origin
aacccgaaggtgtgggtgaggaaggagccatttctaatggagtcaccatattaagccctgcttagccaaacttgaaggtgacagtttgttgtgggacatggagatgatgcagggatgcggggaccgaggccagcatgtgtggtgtccaaggtcgccctgggtgctgctgtgtaggtgagggaagagggactgatgggctgcttagggggccatgtctgagggcagggcccaccacttctgcccacacctcattggccagcacccagtcacgtggccacaccttgcatcaagggaggctgggaaatgtagtctgaccacatgtccagctgggaaggggcaggtgagacttctctttcctgccatgtgggtgctgggtgccctgcaggggctcagccaacagggtcttgaggttgaagagatggatctgcccaagccctgacggagtgctcatgcctgctcagggcccagcatgagctgcgtcaggagcagaagccattgggaagggcttttggtgtggccgggcagccagacactccacgcgcaacccccagagcagtgccaggcccgggagcccttgggatggaggcagggagaatggggggctctgaggactgagggaggaggggagcccggtgaggggaggatgggtgaccagctcaggagcaggggcgggaagggggcatagaagcttcctaagcaggggagctactactcttggccatgttccaggaggatggagtggctgtaggagcaggctttcgggccagggcctgggtgtggtgggagccggggctggctctggaccctgcaggggctgccttagcctcacgctgtctgaccagcccctgcctcacgtcgtgtgctgagtcctgtctgcggcccctcgctcacccgctggcttggtctggcaggagcagatggccttcattttggagtcttttgttcaaagcgggcgcttcgggttggagtggcagtgcacacgctggctcgtgtcgcttgtgaggctgcaggatttttgttttagggaggtaggagccaaacaaacctggcgcccgcttccaggctgtggcatgccaggcgagtcaccggcatcctgtccctgcccaccgctttaagaaactgttagttctgtttgaaatgtcatcactgggcg

SEQ ID NO: 34287 - DNA, 839 bp, Artificial sequence
  DNA replication origin
cccaggctggatgggacaatcttggctcactgcaacctccacctcccgggttcacgccattctcctgtctcagcctcccgagtagctgggactacaggcacccaccacaacacccggctaatttttgtatttttaatagagacggggtttcaccacattagccaggctggtctcaaactccgacctcaggtgatccgcccaccttggcctcccaaagtgctgggattacaggcgtgagccaccatgcccggcccatggctcccttttgtccagagcagtgagggatcacccggccaagatcagctcccacatgagcccagccccgtggggcctcaacacgggcccaaggaggtgctggcctggcagcagctctgaggccctggaaggctgtggggaggaggcagcagagaattcgagaagctgctccagcaccaggctctgcagaaggccagctgggcaccagggctgatgtgcccgtggtgggagtgagccacacgcaggcatcccggagaggcagtggggcgtgaggccctggtgggagtctgagtctctgtgtgcagaacgtcgtctggatacctgcaggctgtggaggctcccatctattaaaatgctctgatgcctctatgcttacatttatttcatcaccggcacccacagacacacagcacccactgagcctcatgaggaaacacggtgaccgccaggcccctggtgaccgagatggcctggagcgtcctaaatggcgcgtgtaatgatgggactagctttggagagcacgggagttgaactgtctcacacacaggccgatggccatgaggctacgcgctcctgttcctatg

SEQ ID NO: 34288 - DNA, 1563 bp, Artificial sequence
  DNA replication origin
atgtctgctcccccgcaggtaagcggactgctggctgaattgtctcctttcctaggctttctcagaattagcaagggcacagtgtggggtcaggtgatgggaggaaaatgaacacaggctgccctccctgggccctggcagcctttgaccaggcccaagaagtttgcgctaagaaaactggaaaacaggagcgtctgggcattctgtgcgaatttcacaagagacaaactgcgcggcagaagggcgtgaatctgaccacgagggtgggaggaaatggaaaaaatcacacagtaatggctcaaagaatgtcaccactccccaaaacccaaacccagaccgcagcagagcccgggggacgccagctgcccttccccacccacaggcccctcccacctggtcccaggtccctggggccctcagggcaggcacctaccgatggccagccgctccaggcgcttgccgtgctctggtgggatggcgtacctgcgagagaagggaggcacgtcagaggcaagatcggtggcagccacgcaagggggtgtccctggtgggaccagccttggggagacgcagacagtgcccagggcagaagcaaagtggagtcatggtcaggactgtgtggaggggatggccgggggtgggggctttcaggacggaatccgtaaggaagcgaggtggggcaggtggaggagcggggagtgaggaccatggctcggtggcttgtgacacactcagaaagccaggagtggggatgctcccggttaagcggcactccacctcgaggaggctgaaaaggcaaaaaacaaaagtattggattggaactgcgggtggcgaggggaccctgggagggccgagtctggaacagcaagcatctggggcccccggagctgccagcccgctctccaggcccacgtcacggtctccaggcccacgtcaccctttcccggcactgggagccaacagggaaaaagcagctttggaaatgagaaaagctgcatttgtcaccgactttgtaagttttatttttacacattttacatttgaaagatcaccaaggctccatcatgaataagaaagacataagatgaaagtgtgcaaacacacgaagcgaagtgggggtggcatcccgctcatgccgtaccagaagctggagacctgcgatgttgggactctcttcccatcagggagggtgggcaccaggagccgcagccttgagggggagcgagaagccccagtgccaacggggacaccacccagcccactcccaaggcctccggcaaaacaaaaacctcaatttccaagcgaaggggacgaggacagggcctcagggacttgagggcacacagctgagtgccagctgaggatggtcaagtcccatcctcgaccccaactctagagtaacaaggccaacagctcccgttctagaacagtcacacagatgagaggacacatgatatggtctctccccgagaccctcccagggcagaagcaagacaaggaaaagctcagagggtgggagacggcccctgctccactacagccccttccagctgaaaggccac

SEQ ID NO: 34289 - DNA, 797 bp, Artificial sequence
  DNA replication origin
gctctgcagaagacgggaggggagagccccaggctgcctcctgtgtgtgcgcgcagggccctggaagctccacccggaggctctggtccaaggctgtgtaagtaggtaagccacctgctgcagggagatcgtatttctctgggattttacagccgggggaaccttggagagctctgccctgtgggggcagacctgggctgagggctgggcctcctgcctgccatggggcagccagggatgctccgcaggcaggtggcagcacatctgtggcagtggtctggcctgctcacggctgtagctgctgcaggcccatccggaactccagagggagctgcactggctcgaggtgtggtgaggcggtgggggccaacctgctttcggagcagcccctctgcccacagaggccctgggggctgggggggggaggaggtggctgtcctgcgagctgtgcaaccccgctggcatctgtagacggggagacaggcttcccctgcaagggccaggcagcacacgcctcttggcttttcggaactactcaactccgcggggcgaagcagacgcagacgccacctccatgccagagtgtggctctgtgcacaggctgctcatttgtgggtgagatttcagtttcgtccggctgtcacaggtcacacatccttttaattgccctcctcccacaaccctgtgaagacgtaaaccccctgctcagtttgcagacggcacagcgtcggcctaccagatccgagccctagcttgccaacccgtgaacacagacacccaaaattcacagggcccgg

SEQ ID NO: 34290 - DNA, 1008 bp, Artificial sequence
  DNA replication origin
tccgaaagcaggttggcccccaccgcctcaccacacctcgagccagtgcagctccctctggagttccggatgggcctgcagcagctacagccgtgagcaggccagaccactgccacagatgtgctgccacctgcctgcggagcatccctggctgccccatggcaggcaggaggcccagccctcagcccaggtctgcccccacagggcagagctctccaaggttcccccggctgtaaaatcccagagaaatacgatctccctgcagcaggtggcttacctacttacacagccttggaccagagcctccgggtggagcttccagggccctgcgcgcacacacaggaggcagcctggggctctcccctcccgtcttctgcagagcagggctggcgcctgcctgagctcacaggtgggatggagcagcccaggccggcacttgtggcctaaacacggcctcattcactccccatcagcagaatgccgtgggcacacggaggccattgtcaaggagggggtgggatttattcccgtgggtgtctttcctttctagctggtctgtgggcattcacccttgccacctgtctgtgcagccagtgacatagtcattgcccctcggggcaggaggaggcctggtggccctgtgtgtctgtgtgggggaggtacggctgtgtccccacccccggctctccactcctgctcatcccctatgaaacctggtgtcatggacctgctcccctcggggctggtgacctttggaccccagtggtgacaaccacagaggtccccagacatcacctgcagcgtcccttggaggcaggattggccccagtgagagctgctgcccagggccacttccgaggtcagtcatctctttctggggggtggggtaggtagtgccagtgtcatttttgactcccctgctggtgtggccttctaggcccaggtttcccagcatctcccctctcctgctgagggcccccatctctgagtattccatttgagctgctc

SEQ ID NO: 34291 - DNA, 806 bp, Artificial sequence
  DNA replication origin
cagatgaacggcctaggttttgattaattatggaaaagcctgcctacttatcacgggtggagctgtgggcaggggcaacctcccccccatcgacctctgctctagatggaagtcgaacccagcgctctgctcagctctaggggccaggggagtgagggtttgtatccgtggtgtccgagtgatatggcctgcgtggtccaggaatcacggggggagttggagacaaagcccgggccgcatttttacactcacctccctttgatcagagcgagtttttgcaggagccgctaagagctggatgtgagcgcatctggctgatggaaccgtgctccagaggaagctaagccgccgactccctgcccctgcaggtgtggacggtcaccctgaaaacgatgggcccttgggggccctcagatgctcgggcctacccgagtcggggggcacatcccgcccacgaggaaacaggctccctcctgctctccggcaggcagtgaacacaaggaatgggcttctctccccacaggtgggcgtgaagagcaggttggataagaacttctagtttctgaggggaaagcaacctcctgcctggcatttagctcccgaaagacgtgagattcctacacaggagacttaaacctgtgctgcccggtgccctcactccccaaaccctccgaacagcccagcccccgtccagagactcgagtgcagtgaatgaaatcccagccccaaagccagggtccatcctcaaggtgggagtctgtcaggcaaggcagagagtttcatggctctgagatacttaacacctg

SEQ ID NO: 34292 - DNA, 909 bp, Artificial sequence
  DNA replication origin
ctcccaaggtgacaaggcccagagtcggcacttgatggagggtggtactgtcggcggtggggggaagggggggccggaggggggcgcacgcgcgcagcggggagacagagagagagagagaaagagagggaggggggagagggggagagagcaagggggaaagagaaggggagagagagagggggagcggggaaagagggggagagggagagagagggggcgagagggggagagaaagagagggggggagagaaagaggcggagagagagggggaagagagatgggggagagagagacagagggggagagggggagagagagagagagggggagagatatggggggagagagagatgaggagagagagagagagaacgttaccactgagacagctctagctgagaaagagacttctcaaaacgaaccgggtactgcaccctaagcctcagcctggcgaggccagggcatgcagcgaggtgtgtggctagggaggcaagcctgctgtcctctgcactctcacctctccctggcagacccaggggctaggacccctcccctgcacacggcaggcgctcagcaatgctgggctgggcttccaggaccttccactctgtcctctttccagcactgcctcacctgctcagcagggaggaagggggccaggctttgggggtcttcacagtttttgtgtttttgtcttgtttccccctttttgtggagaatggggtctcactatgttgcccaggccggtcttgaacctctggaatcatgcaaccctacctcggcctccctaaatgctgggattagaggcatgagtcactgcgcttggccttttgtttggtttttaactcccattctgaaaacaaaccaacgaagcaacaacaacaaaaaccttttccacttgggaa

SEQ ID NO: 34293 - DNA, 1031 bp, Artificial sequence
  DNA replication origin
tctcgccccctctctctccctctccccctctttccccgctccccctctctctctccccttctctttcccccttgctctctccccctctcccccctccctctctttctctctctctctctgtctccccgctgcgcgcgtgcgcccccctccggcccccccttccccccaccgccgacagtaccaccctccatcaagtgccgactctgggccttgtcaccttgggaggaccagagtagtgcagtgactttgccaaggtcacacagcaggaggctgggcccagcacaccctagaccttcctctgcttcccttgccccacttggaggcacaggccgatggggcatctgggagcccacaccctccctgcccaccaggtgtctcctgggccagtggcttcgtgtcctgggcacgtgtcctgtgcacagcccggtgggggcagctggaggggtctccaaggcggcggcttcctgtctcagagcaggatcccccggcatgtgctccagcaggcaggctttgtagtgggattactaatggggcagatcaaaaggatgttcctatttcactcaaggaaataaaatgtgcacgcagccgcctttctcacgctgaactcaagttagtcctacaagcctgcacgccatgttagattagctcagcacgcggccgggctggccccgaggtgggtggtgcctggtgctggtagataagggtctctcctccagagcccaggactcagcggcatcccgaaacaccctgccacggggagagttgactgaggattaaacagagcgcgagagatgtgaagcctggctggaaggctggggagccactcacgctctcttaactggttccctgccagctgtctgtgggtgaggcctgctgtgtgccagcctccccggggacatctcgggctctctggaggtgtctggcagggagagcttctgctgagcttgggaaggggacgatgacttggattccccagaggcgccattccaggaaacggcccactcggcaccacccatctcctcccacctccc

SEQ ID NO: 34294 - DNA, 1107 bp, Artificial sequence
  DNA replication origin
ttccctgccagctgtctgtgggtgaggcctgctgtgtgccagcctccccggggacatctcgggctctctggaggtgtctggcagggagagcttctgctgagcttgggaaggggacgatgacttggattccccagaggcgccattccaggaaacggcccactcggcaccacccatctcctcccacctccccgcatccaggctggatgggggctccggcaggaaccaggcctctcctaaaaccccagccctggggtgtactgaacttaattactgtaaaattcaaaccaaattgtttctgctgcctgggagaactgtgtgttccttctgtttggtaatgaggctgcctgctccaggtgattaacccggagcccagggggagggagcccagggggaggcggcagaaggcaggggctggggaagggtgggagggaggagggcccacggaggtgcgggaaactccagccactcctctgacccgctggagcccacggctggcctgtgccctgcctttggcttcctgcctcagtgagcctctgatttatggcgttgtggggctggacgcatcgtgtgtgccgcaaactgctgtgtgaaatatgtctcccttgctcttcccagatcttccctgtcactctgaccctggtgaggcctttggggccccttcccatgtgtgggcttagggggtgtcacagtcacgcagaagcgtggggagaatctgcagctaagaccaggcggagcggatcccgggccgggccagaatgagtgggtcccatgctggctcttggcctagtgtttatgctgcatgtctggagggtgatctaggagaggagtggtctggaaagaaggcctcgtttagtctctccctcggcactgcggacattggggccgtatccttctctgggctggggccgtcctgggcactgcacggtgctgagcagtgcccctggcctccacccactccatgccaggcacaccccaacccagctgtttcaaccacaacatcggcaggcacatccactcccatgggggcagggccacccattgaagacacctgggtctccaggctccctgcgggcccttccttcctttctcccactgctctcggctttc

SEQ ID NO: 34295 - DNA, 1809 bp, Artificial sequence
  DNA replication origin
actcgtccttcccacgcgttctgtgagccatcagcgcagatgcgggcgcctctgccccttcctcggtgtttaacgctttgtgtgccaaggcacctgccacccacacccaccccagacagatggtcgagatggctgtgagaggagtgtgaccgccactcgccccggttggtgtctgcttggcagtggtcaccgcgcaggtcactgttcagctgctgggaaggcagtggatgaggccatcgaggtccagggaggagacaggacacgaacaagggtggaaggaggaatttctgctcctagagagggtgcagggacgctgcagctgcggcctggtgtgtctgccacctgggtagcccagtccacagcccaggcagctgaaagcaccagacatgtatcctctctcagttctggaggcagaggctgagatgggtgtgtggcgggccgagccccctcagggcgccagggagaccaccctgcctctcctggcttcagggctggccgagatctcagggctgcttggcttgcaggggtgtcgccctctcctctgccccatggtcacgcggcccctcctccctgtctttgtgtcctcttgtctgcttctaagggcaccaggtgctgacccccggcaggccctgatcccatatgtgaatcatgcactgatgacagctgctaccaccctgcttcagaaaagctcctctgtgaggccccgggtgcaggatgctgagtagcgcggggaacagcactgctggggaggaacgaaaattgcgaggtccctgagcgggggacctggcagaggccaaacgtcagaggtcgggggctgcagtaagggcctttgaagttagatttcatcaccatgtgcgggggggaggcactgggcatttcagcaagggagaggggccactggctggagaagggactatgggagagatggggcagggagcccggcgtggatggccgccgtctagacgggcatggggtctgtgggcgtgggaagaaggggacagcgtgtgcctgtgttttaggggtggtgcctgtaggacctggtgataggacagaggtgggggcacaggggaggggtggggacttgggcatgtaggtgtgcggtggtgctgggagcgcacagagggacatggaggagccaggactgggtgtgctgttgagatgcgtcagagcctgccttccagtgtgggagccacgggccacacgtagcaccgtatccattaaccaaaatgaaataggatgaaccctccactcctcagtcaggccagccgcgggtcaagccctttgctaatagccgggtgggctggtggccgtgtcctgggcagcgcaggtgcaggtcatcgccgtcaccacagacagtcctgtcaccgtgcagctgatgcgtcctgtggaggggtctgcagctcgggggcggcgccgggggcggggcaggggcagtgtgagggatgggacgtgttgagccatagatgtcctgtcggcagctatgagatgctgtgccctccccacgccaggatcgctgtttctaaggcccctgcccgtccccatccctgtccacagcagggcaagcaccagccatgcaatgtctgtcaccgtcggctgtagaaccgcccgctggtggctggcattgtcctcaatgttccgccctggttcctggatcagggggctgggagttggcgctgcagctgacgagagcattcatgatccccgtggtcagatgctatttgggttgatgattttatcggaccacatataatcattttctcattaggccggtggctgtgtcttctctctgccactctactgttttacatg

SEQ ID NO: 34296 - DNA, 929 bp, Artificial sequence
  DNA replication origin
gatccacccgccttggcctcccagagtactgggattacaagcgtgagccaccgcgcctggccatggcgtggggaatattcacaaccctaccccatccggactcctggcagcatggagtggtgtcaccttggatggggagcacggtcccaggtctccacgggcttgggcaacccctggggttcctgctgacctcagtgcccctgcccagaccccagtttctcacttccgtgcgatgtggcatttctacactggagtcgctggtgacatcagtggcgcctgttgccgcggtgcccccggcggtgtcggtggtgcgtgttgccatggcgcctgcctggtggaggaagtgtcccgcggtgcccccggcggtgtcggtggcgcgtgttgccatggcgcctgcctggtggaggaagtgtcccgcggtgcccccggcggtgtcggtggcgcgtgttgccgtggcgcctgcctggtggaggaggtgtcccgcggtgcccccggcggtgtcggtggtgcgtgttgccgtggcgcctgcctggtggaggaagtgtccctccgtttctggatttgccttaatagctcagagaaggctgagggaaacctgtgagtgattgtaaacatcccatgctagggaagggcttgtgaggccacacagggtggcttccaccagaatcgacactttaaagagcacgggctggcagcatgtgtggtgtggagtcagcagggcggggagaaaagaacaaggcacgtgccccatggccatcgggtgatggggatggtgcctgttcacgaagaagagtcaccaagggaaggaggtgaatggtaaccaaagccaccaagatgtcaatctcaccgtacacaggattcttaaatatgtagtaaaaggctgtaaagccccacgtggcgcatcagtcggccatccaggcttcgtggtt

SEQ ID NO: 34297 - DNA, 1198 bp, Artificial sequence
  DNA replication origin
gctgacccttcaagggaggacccctagaaggcctcactgtctccactccctgccaggcaacaccacatccctcctgggcagccagaggcaactgcaggaaggaggccacgctcatggctcctggctctaagtgatgccttggtaggctggcaagcccacgccacccatctctctcctgaagccacgagaaagtgcctttagggaggacacacctgcaaggacagggaggatggaaaaggagacgacagcaggctgggggtgggacgtggcgagcagacggacggccaccagggagccattcccagcagagacacggatggtggtggcgggcacgcaccccacgcctcatggcccagggtcccctggaaacaagggtgggggtgctcaaaacggaggtctgcgcgaggactgccgcagcacccgacccctcctggcaccctggcggccgcctgcccctcctcgctggactccctaggatcatttactggggaggccagagaaggtgggtgtctgggctggggacactgggcacagtggaggatgtgggtgacacccttaggagcccaggcaggaggctggagggctactccctgtgcaatccggctggcccaaggggagagacccaaagggcctgatgtgggctcccccataacagcccacccaggtatccccgggaaaagcaccgagtgaggccctccccgcccttcccctgcatccacagcccacccggatctccccaggaaaagcaacaagtgaggccctccccgcccttcccctgcatccacagcccacccagacctccccgggtaaagcaccgagtgaggccctccccgctatccccttgcatcccaacccatcaccagcatccattgcccacttgggttttttgggttttggggttttgtttttttttttcagacagtcttactctattgctcaggctggagctggaatgtggtggcgtgatcacagcagctcactgccgaccccgaagtcctgggctcaagcaatcctcctgcctcagcctcccaaagtgctgcactacaggcatgagccactgcacctagtccctcacttgtaatcattacactagatcgttacccccaagcatcagagagatgggcctgcactatgatccccagagatcaaaataaactatcaaaaaaaaaacaaaaacctggtaagaaacagaggacag

SEQ ID NO: 34298 - DNA, 1132 bp, Artificial sequence
  DNA replication origin
ttgcccaggctggtctcaaacccctggactcaagcaatcctccttccttggcctccaaagtgcagagattacaggtgtgagcgatcgtgcctggccaatgttcacatttttaagtggctcaaaacagaaaaattatcgtatttggtagcatgtaaaaatcatgagatctggatttcagggtctgtaaacaaagcttcacggacacagccacgcgcatttcttcgctgtctatcatctgcaagggtcttgagttgccatgcggagtcgagacgtcgagacacaggaggcctggcctgcaaagtcgccaagtcacaaatgtttgctctctggcccttccccggaggagttggctgagcccactctgtgccgtccctcccggctccagctcatgctcaggggctccctgaatgttccttgggcaccaaacaggagtgagatctgtcgacaactgtgccaagggcagctcagagccctggaagcctggacacttcccagaggaggggctggggaggccggtgctcgccttcactctgggcatgaagtggatctcctcctaggccgggacctgcctccgtgtccccatggcctcttgtggtcagaagccaagaggctgcagatgctttggcctctcctccaggcggacaccagatacctggctgggagggtctgtgcggcgatacgcagggaggggttctgagtgggaggagggcatccagggtcacgccccggggccggccttctgaaatcctctccacgatctcaaatccaagcagccccacctgatgccccgttgagtccttgcagggaacccgactgctctcagcgccagggaggggcccgagtagccggacagcagaaatgcggtgagtgagagggacagggagccatgtggctggtggctctgctgaggcaatggcacggggcctggggccacccagggtcagcctcctggcggggacatgacagggagtatggggagcccgcgggtgtgaacggcacagacgctgcccgccagagcagagcccacccaccccagcaaagcgaggcctcgagaaaacactgtgcctcagactggaggagaaacagaacaggaggaggaggacgaaagaggaggcggggtgggaataggaag

SEQ ID NO: 34299 - DNA, 1078 bp, Artificial sequence
  DNA replication origin
tccacaagccccttgtctgggagacagagccagtccactgtgtctcccgatccagcctgagccacagatgctcagacagggctgccctggccccaagatatgccctcagggagggagcctggctcaggggaaaaggcaggccacgtggagagggcactgctcaggggggaaccgaccacctccctggtggagggaggggcagcttgggctttggaacgtgagtcacccatctgcctctccagagaaaagcacccccaatgactttaaaaaaaaaaaaaaaaagtgaatcagccttgttttacatactgaaggctttcaagaaaattatatccttgggaagctgacttcatttgttattcaggcttgctgctgggtgaaggcagcccccaggatggcggcgcgggagagggcgggagggggctcctgggaggagcaggtcgtgactagaagtgagggggtggccggggcagggaggccaggccaggccacgcaagggctggttctggggggtccacttcctgcgtgcaaagaaggttccaagcagcggtgagcgcagcggcttccgcatctcctcctggcaggcaatttagacggcctctagtcccattccactcctggaacgtggtgccggtttattggcaatccactctgttgaccaattagcctgagccacaatcaattaaccattatgcaaatagcacgtctggctgggcctgggagctggggtgcacgagctctgtgctgcgggggccgcctggagtagcctcaccaggaggcagctcttcatgaggagcacacaggaggcaggaaatcaaaaggacagaacaagagcagaagagacagattcaccttggcagggctgtcaggaggggctgtgaaaacactcggggcagagggaacattctccgagagaggccgcgaggtggggaagacagaggaggccgagacagatgcccagaccgcccaggagtcccagactcacagacagatggacgtgttgaaaaagaaggcgcccatttagaggagaaggttctggaccagaagtgacttttcagaaaccagttccaaggcctgtttc

SEQ ID NO: 34300 - DNA, 1065 bp, Artificial sequence
  DNA replication origin
aagggcagctctaggaaagagacaggagacagcaagtgagtccctgaggctgcgcactccctgcaggggctggcaggtccctgtgctcgtgaggttctgtccctgagggctgaggtccctgttggtggggagggctcaggaatgcagctggggtgtggcagccgtggcagccctggcaggagtcggggccagaggcgtggcggtgtcctgcactggcgcaggggcgacaggccaaggcagagcaggaggggacaggcagcaccgagctcggaggggtaggggagacgaggcctgggcccagccgggctcacagagcagcagtgggccagggaggctgtggtgaggcgggtgcacagatgtcctgcagggagcgcgtacctgctggagcacgtgcacatggcgcttctcgcgtggaaagagtttgcatggaggagcgtcgcgtgggtgccagagagcactgtgagggctccggctcaggcagggcaccagaacgcacagcgccaccgggagtggggaggctgagggcacccgccaggagccaggctgcagttttaggcgacccatccatcagggggaagaatacaaacagcccccaacgctcgctcaacgagatttagttctggaagagacccatgtaaggtggcgagcagggagtaggccgtgtcctctgagctcaggcagctgtgccgaaccatccgcaccccatggggcacctggtaaacacatgagggccatcccacagccacgccgagggcagggaaggctggactgcacgggggtgagggcatggcgcccaccctgatgccatcccttggtctagggcaggggttcccacgcgggggactgggcgatgtctagggacatctgtggttgtcacgacttggggcactcctggcatggagtgggtggaggccagggatactgctcattaccctgcagggcccaggatgctcccccaaccagagaaggatcccgcctgtgtccacaagccccttgtctgggagacagagccagtccactgtgtctcccgatccagcctgagccacagatgctcagacagggctg

SEQ ID NO: 34301 - DNA, 1423 bp, Artificial sequence
  DNA replication origin
tggggagcactgggccactttgggtcgggggtgggcggctctgagggctcagcctggggccagcctcccagtcctccccaccttgtgagaagccctgagccagcgcggcactgaatgctgatggtcccactctgggtgctgcaggtgccctgtgttactgggtgacagggccagaggccgtccaccccgcctcctgccatacaagctgcaaaggacacctgcttccaccttggaaatattagtgcagttatctggactatgtcccgacatttggctcataggaatgagcccagcggcgtccagttaagcctggcaggctaagtgcttatttatctccactctctcctgaaacgccactgaaacaccagagagtgaagtgcagagaacgggagagggggcagtggcagctgagcacgtctccaggctttgaaaagcagggaagggtgggcaggagaccccatgggccggcaaccaggaggacagccagcagggagcagctgggctgcaccatggggccacagaaagacacagtgggcagacatgggcagctcctggagggctgcagggggaatgtaccacggggcctcagaaagacacagcgggcaaacatgggcagcccctgggggtgctggggggatgtgggggcaaccagcagaagacagtgggtggctctgggcagaagggaggcgccttcctggggtcagcagtggggcccagctgccagcctcacatccccccaacccccaaggccaggagagacaatagagggggtgggggtcctctgccagagaacaaaggggcccagtggagcaaagccacatatgctgatactggggctctcctaaagtcacaggctcctgccctcagcagcccctgccactgccttcaccaggcccagctcacacacggcttggcaccgtgcacagagggatcaacggccaggggacccgacacattggaggctgcgctcccatgacaaaggcagggcctgcacagcaaagaagggcagagctccgaggaaagaggatgcagtgagtgcagggccctggagtgggccgggactttgcattatggaaaaagagccattgctgtgaagaagaaacattccaggaacgagtggctctcggatgttaccatctagagaagagacaagcccacagtggattgggaggcccttgaagaatcccctcccacagcactgacagacagagctggaagataggaaggatcaggaagtcagaggcgtagtctaggaaatctagcccctgataggagtttcagaaaaagaaaagtgtcccgggacccaaaggctttgcatttccaggttaaaaagtccaccagaaagtccgcccaagaatggaaattacccaaaccacaatgcatcgctgtgaaatttcacaattcctggattaaacaaaggccc

SEQ ID NO: 34302 - DNA, 956 bp, Artificial sequence
  DNA replication origin
ctgtgatcccagcactatgggaggccaaggcaggaggatcacttgaggcccagagttcgaggtcagcctgggcaacatagcaagaccacatctctaaaaaaaaaaaaaaaaaaaaaaaaaaaattataaagaataggagactctgttagcattggatttacagtcataatgccacaagctaaaagacaaaggaaaaaggccttcaaaagtcagaagaggaataattctccccaaatcttttacctagccaaattgtcaagaaatgtgtgaggggaataaggatctttttagacacacagagtctcgtattccacctcctttctcaggaagctgctgcaggatgtgctccagctaaacaaggatgtaaatcgagaaagccatggggttgaggaaacaagatctaacccaggagagtcaaggggagtctcaagatcatgggagaaggaaccaagacccccaggggtgtcatggagagaaggggacaccctgcataggagaccacagcaggagtttaagagcaatggcagggagctcagagataccaaggaagctaggcgtccaaagcaggaggccagttccagaccccagggtgggggcagggaatgcggcccgagttgctctgtggctcatggatgcacaatgtttatggggcataaaagcgtaaacgtggaatttggctgcaatggaagacggtggcaggtgcagggagagaaggggacggtcatggaggcgagcaaggatggccacaccctcaacacctgtgccgggagccagacccagaaacaagcattgggtgcagaaacacgcgaagggggatgaagatgtcagggtcaggaagaggcgtgctcttaggaccccacagatgccccaagtgatggctgcccctctgccgtgggctgtgccccccttgctgtgtctgtgccgcccttgctgtgtctgtgcattgagccctaccc

SEQ ID NO: 34303 - DNA, 1220 bp, Artificial sequence
  DNA replication origin
ttgggtgcagaaacacgcgaagggggatgaagatgtcagggtcaggaagaggcgtgctcttaggaccccacagatgccccaagtgatggctgcccctctgccgtgggctgtgccccccttgctgtgtctgtgccgcccttgctgtgtctgtgcattgagccctacccagttccatgtagtgtgggacccaggggtctcagcctggcactactgcaggtaggaaagggctgggctgcaaggatgaggccccagagctctggttgggcaccaggacagttctggggccctctggggcagacacagtaaggcttgaaggccgtgggggtgcccctggaaggctgcagcaggggagggccatggtcggaagcgacctctagggtgagttttcagggtgggggtggagggagggactgcagtgggtgggagaaggggctgtggagctgggggcagctgaggccaggtgagcggcatgggagggcgcccttctgctggtgctgtctgggaccagggcgggtccactgtgggatcccggccctacagccctggggcattcccagaccaggagggcagcccaccttgggatgacagtggtgacaagagccagttgcaccccagcgccggtctgaagcttcctcctcctgagcctgctgtctccatctggggcaggcacccagcatttgcctagccccctagtggagcctgaggctgccttcccagagccgtccttgggctgctgttgtggagaacgttctctggagggcaggggccactcccgtgtcccccatccacctcctgctccctgtgttagtgactctggccccacgcccgcccctgcctgcctcccacccctgcccggccaccccgcagcgaccttgtgtgcaccatgctgtgtgatgccatgcctctggtccacccgctttctgccttgagtcattgtggtgggccatgctgcagacatcggggagcactgattctagcgagttaggcagctgaggagcaaggagggccggcagtgactagtgttctaggaaggcttcctggaggaggcgccccagaagccagcatggagcacagggcgggcagagtggctgggagcagcggtgggcaggggtcaggtccaagtgtcccgagggagcatgggctgctgctggcccatgtgacagcctggctcaggcagaggtgaggaggtcctggtaacagaagccccggcagcgggccca

SEQ ID NO: 34304 - DNA, 883 bp, Artificial sequence
  DNA replication origin
taggagatgcccacgggggtgggaaaacagcggtgccaggcctggcccggcagggactgaccttctgcgccctcggcctcccggccgtgtggcagtggctgcggctcctcctcctcctcctcggggtcaacctccggcccagcctcctccttcacgctgcccccagcctcctctaggagcgctgccccagccgtaccctccccagggaacttggggtcttcgggcttcggcttcttgggctggctccgtttccggtgagacctggagagggaggtttatcaggcaggaggggagaccagggagggaagagccctaggtctgtgcactctgtccggcagcacgcagcccccgcccacccccagaagagcgctccatgagcagggggcctcctggctggaggccgggggtaaagggaaccctgggtggggttctgctcttgcggggcaggagccgtgttgggaggagagaccaaagggagacggggcaatggacacggcggggacggtgtcaagcgggggacgctgatgacagctggagatgggaagccgactgacaccaggtgggatgacgggcgggacggggcggcaggagccgcgtgtgccacgggacagagacacagggagtgtgagctccgagggaaacagcagctcatggaaaatgcctagacgacaaacggaacgaaaaagacacttacgacagccccggccttttggtctgctctttcttcctttctagacttggtttcctctcctcctcagtctttctccagtgtctgttttctttcagactaatttgtctagaatgtaaatttcacgggttttttctctaggacttctgctcaactccccaggacgcctggtcctggccacctggctctgtcccc

SEQ ID NO: 34305 - DNA, 1165 bp, Artificial sequence
  DNA replication origin
ttaggggaacaaagctgtttgtcctcaagtgccttttacacacgcaggacagtggctttcctgacaggcgctcggggtgaggcgtgcggcctctgcagcctccccgggctgctccagcttccagccctggtgaagcttccggcccctcccctctgcatctccacgcctctgctcccagcctcccagggagggggtgcctcccctctggcatcggcagggaaaaagtatttcttcccacgccagcctgtctgctgtgtccagtgtttacctcccctggccagataacagctgaggggccagataacagtggaggcggggggcgggggggggggtcatataacagcggggggcccggataccagcggaggggaagactgcgctccctgcaaggccagacaggacctgggggtgttccaggctcccctgccggggtggaggtcagggaggagcccggccagtgcccccagtgccccagaatgctcaggactagcaggggtgggggccagggcagtggcgggggctgccttcaccttatggctgctcgcctgtccttcttgagaaacaggtgggcgtgtgcctgccaaggacaccgtgggcggtcccccaagcctgcagatggagctgggtagggtgtggggaggagagctggagcagggagggcagggccgcctccactcctgggggaggctgtgggctgggggccccttgtgggagtgtgtggggcagtgtggcttcctcctggctgcagggtctgttgggggagggtcctcacttgacccttactggggtcagtgtgggtcaagggttaagtgtcaccctcggcccttgggagcctcattgctgagggtctcagcgcttaccactggtcctggcatcacggactgtggagctgggggcagcccgtggtgggttttatagcaagtggtgagatgtgggcgctgtgctccaaaccagaccccgttaagtgccacatggtcaacagtttagtgtgcagaaatgaatttccttctcttaatttttccttatttttccagcctgttgggggaggtggaggtggtgaaatgttagcagtgaccagttcatcctgatctgcttgggaccttccagttttagcactgaaagccccacagcccaagaatcccttggatatcaaccacggttcctc

SEQ ID NO: 34306 - DNA, 817 bp, Artificial sequence
  DNA replication origin
tagcggtgaccacctgcttcctccaggccgtggtgctctgcagacctctgaagcccacccgcgtcgtcctcacagccctgtggcctccgaggaaggacaccgagccgggaacttcgaaccaaacaccagtgcctgggcccttccaggccccccacgggccgtagaccctgactccccggcacacactggcctgggccaggccagcactggatgtgggtcttcaaactgcggctcccaggaagggaggtgacggccaagaacgcctgcccgacctcctgtggccacagcgcgtggcgtgactggacctcgccttagtaggggtggctctgggcaacctcggccccaggcacagctcctgacaaatggtcccatgggtccgggggcacgcttttcacaacgtggagatgcagggtcatgggctgcctgctaccacgaggcggaaggggatggtgctgggcaccagcctgccccggggctgggtttctcctgggcctgggccgaggggtggaggcctgtgggtgacgtgttcaagacggctcagcaaccccacctgacagtgtccaggtggggcctctcccccacccccaggctccccagggagcacagcctccactcctacacactggctactctgccggagggggaggccgtgctggagtgatgcctggcgcgtgttgtgtgatgggagaattgggtatttacagtttaataacgagatctcgatgccgtcgatcggccctgctccaggcccttggcttatctggcttttgaacgtggtttatagagtggtgacggtgccgcttattaaatgcttagc

SEQ ID NO: 34307 - DNA, 1277 bp, Artificial sequence
  DNA replication origin
ttctaaagtgtgccactctatgttttttagtacattctgagttgtgccaactatcacaccgtctaattccagaacagttcatcaccccatgaagaatgggccccattaccagtcgctcccatcccctaccctgtgcccacgagcccacttcctgtgtctgggggtggcctgccctgggggttgcagaacacggggtcacatggtctgcactcacctctgtgtccccagggcacatctctgtcgccacgtggttcctctggctgagcgacaccacgtggggctcttcagtgtctgtcccagcagtcagtgacacgcagggggacgggagaggactccccgggggctgatctgtcccagcagccagtgacatgcaggggggatgggagaggactccccagaggctgagcagcaggaggctgggtcagtgggtctggagggcttggccagggaggctgcgggctctgggctgtggaggggaaccctcactgggcagagcgcagggccactcccgcgatgcctcccttgaaggctgtgccgggaggggccggggactccgttccagggtccctagggaagctcgagccccatgcccctgcctgtgtccccatccccagaaatgcgtgtactgccggaagcggatgaagaaggtgtcaggtgcctgtatccagtgctcctacgagcactgctccacgtccttccacgtgacctgcgcccacgccgcaggcgtgctcatggagccggacgactggccctatgtggtctccatcacctgcctcaagcacaagtcggggggtcacgctgtgagtgcctgcccgcctccttgcccccagcccctggctcccgcccccaccgacacccgcgctgaccgccccccacaccctccgcaccctcccaggtccaactcctgagggccgtgtccctaggccaggtggtcatcaccaagaaccgcaacgggctgtactaccgctgtcgcgtcatcggtgccgcctcgcagacctgctacgaagtgaacttcgacgatggctcctacagcgacaacctgtaccctgagagcatcacggtgagctgtggggtggggcagggggcggggggaggctgggagcacagcgacaacctgtaccctgagagcatcacggtgagctgtgggggtgggcggggggaagctaggagtggcctgactccagatcccttcatggggtccccttgtcctcagggccccaggccccttcaggaaaagcaccgctcactgttcagcagaaagcgacccgcagccaggg

SEQ ID NO: 34308 - DNA, 1067 bp, Artificial sequence
  DNA replication origin
ctcttggccggcgcaggcggcgggagaagcagggctgggagtgcccagtgtggactctcagatggccggttgcctctgggccgtgtcctgggacgacagcacacatctctcggggatgtgtggaggagcctgctgggaaccaaggacatgggtgccaccctctgccccgtcctacccatctcatttgtagaggaaagccaccgggagaaggccccttcccagcgtctgtccggtgaggagagtctgggtgaaggagtcctagtgtcggagccccagcaccccggaaagcgatttccacccccggcgtggccaggctccgctttgccacgggcagcagcgggttttggaggctccgctttgccaagggcagcagcgggttttggaggctccgctttgccacgggcagcagcgggttttagagctcccactgcaggagtcccagggcccacctgctgcctttccccagctccccggccccgactcggcctctcggcttctggcaggcgtggcacacagtgattcagtcaggcacagaagcagccttgccaggaggggaaggcgcgttctagaaactcagtggaaactggctcaggtttctgggtcaggaagactgcagagatccgccccagattctcaggagcacagaaccgcctaggaggatggcgctcacactgccgggtccaagtgggctccagggaaacttctgtgcctgggtcatttgggaactgggggctgactggagactcaggctgatttcctcccagtggcctccctggaacgtgctttcactatgagtctccacagggcgagttctgaaggcggcgtttgctttttaacattttgagaaaactggatatacttgcagctacaggaaatcagaggcgtgcgcctcggcccgggctccctgtggtgacgtcttgcccggcacgtctcagaagcatctcgaggggtcacgtgcgagggaaacatgttccaagtgttccggacaggcggggaggctcttggggccttggcatgtgggggtctcagccactcggcctcgctgtcacctgggcccaccccagcca

SEQ ID NO: 34309 - DNA, 1588 bp, Artificial sequence
  DNA replication origin
gcagcgcgggtcctgcagggcacagggggctgggagggtctgttctgcattcgtgataaggggaggggcggggcttctccaaccctccctccccacattaacggcatcgcccaggagctgcggcaccaggagtcaaggcaaaggaagggtctcctgccaggagcccatggaccagctgtgctggggcggccgggacccccttccagcagaggtgcaagaggagggggtggtccacgccattggaagacgcagtctgtgccctgcctcgtcccagacgggctccctgagtcacccggagccaccaggccagcctcgcgcactcaccagccgagagcggaccctcttgggcagctcctcctccagggtgaagatgtccccacgcttcaccgtcagctgggacccgtcctcaaactccacctgcagggggatgtggctctcaggggcctggcactgccaggatggcaggtgctccaggcaggccacggcctcaagagctgggaggccagcccccttgggtgcatggggcccgctagaggccacatgcagccaagctgaagctcatgtccacctctgacaccgcctgcagcaaacaaggatcaggctgagggtcccgtaccacggggcaaggatgacggaggacgggacagcctggggcagaggcagggccccgcagcttccacatggagacagaacactcacccctcacctcctcccagctcaaaagacatctgtctccatgaagacacagccccaggacaaggtgacagagtcactggtggacacagagccaggcaggaggcgcagtgccctaacagggcctgggaggcaggggaggccggacaggcggactcaggggcctgagctcaggagcccccaaccagaaggtgaaggacagggtccctggcttatgtgtggccctctgaaaacagctcagtcacctcttcccttcaactcagagaaaaatcacccccttccagcctccccagctggtgccttgttccaggtggcagatgcctgactggtgaggggcactgggagcaccccgcttcctcctcgttaagcttggtgccagctcaggctcgcggagactctctcaggggccctctggcaacacaacactgtcccatgaagggcgtgccagggaggggcgtgtctccaggcccacctcataactgcgatgggcgccgtgttcccaagccaggaaaggtgctggggtcactccctgggcctgactgccgttctgctccagggggagaaggttcccatatcagagggctcgcttttcacatttaaaaactcaaaacaagccaggcatggtggcatgtgcctgtggtcccagctacccaggaggctgaggtggaggctgtagtgagctctaattatgtcactgcactccaggctgggtgacagatcaagaccccgtctcaaaatgaacaaaatgcacacataagactgtcacagaagcgtacaaaagtcacacactaagaccatgacggaagtgtataaaagtcacacagtaagaccatcgcggaagtgtgtctggggctagacgccccacgtagtgtgcagcgggggggcccgggatcgc

SEQ ID NO: 34310 - DNA, 1008 bp, Artificial sequence
  DNA replication origin
caagtgtcttcatttctgagcctgtgctagggggactgatgttggggcctccctggggtggggctgcctgcgccccgttctcccgggagaaggtttgcttccagagctggatgtccctcccctcccactctccagggtccccaacacacccccacacacccaggggcagctgtcatgcccctcatgctgtggccaggctgggtggctggggcagcggaccccatgattccccctcagttctctggaggcctggccctggcctcactcgtcccagccagcagctgccctgtccctgtcccccatccggttctggttacatctgagccccgagagcattgcttgtggtggtggtggctggcagacgtgctaggcgctggggctcacggccctggatggccactgggacccagcagtcctggcctgggtcactcagtgcccagccccaccaggcctggagtcggcagaggggacacgggagacctgagcctccctcagggaggtgaccctcctgtgcctggtgtgcggcaagaacatgaagaggcccctgtggctggagcagagggaggcaggggagagggggaggaggggaggcagggtgtgcaggcccttgtgggtctcgggaaggacttgggctttgaccctgagggaggtgggagccatggaggggtgtgggcaggggagggatgggccctgactcaggtgctcacaggcgccctctggtgattgctgtggggaggagacggggtaagggcagaagctagggaccagggcaggggtcaggtgtagtgagaagtgggtggattctggatgcattttcagtgcagagccaataggattcgcagatcacccgagcccctggaaggaggcgttgagctgggagggggttggatttgaacaccagacgtccaggtgaaggtgctgggtctggggaggccgccccaaggcaggtggtcaggggccgtcagctggcaggtgttggaactagaggatgaagtcacctgcagggag

SEQ ID NO: 34311 - DNA, 844 bp, Artificial sequence
  DNA replication origin
ggaggggtgtgggcaggggagggatgggccctgactcaggtgctcacaggcgccctctggtgattgctgtggggaggagacggggtaagggcagaagctagggaccagggcaggggtcaggtgtagtgagaagtgggtggattctggatgcattttcagtgcagagccaataggattcgcagatcacccgagcccctggaaggaggcgttgagctgggagggggttggatttgaacaccagacgtccaggtgaaggtgctgggtctggggaggccgccccaaggcaggtggtcaggggccgtcagctggcaggtgttggaactagaggatgaagtcacctgcagggagtgggtggaggtggggtgggacccaggactgggccctgggtgtctgtggtgggacgggggctgggacacccggagaaacccaggcccagcagccagggctcggggggacgcggccaggccatccctccctgggccccggcgttccctctgcagaaggagtgtccacctgcctgctgtgccgagggcttgtgtcctgaacagagggtgcccttgacaaaaaagcttcatccacctactgcccccagcaccgactctcctttctggggccctctcgcctccagcatcctctcaacaccaccaggactcagttcccctgtgtgctgcaggtggggaggagggatccagggtggggtgaagcccgtggccacaggaggcttggatgctccacctgctgcgatttcccgacaaagactgtgtccctcttttctccatctcgaaagccttccctgtgtgcggggacagacacagcctgaaaccaaagcctctggggtgccccc

SEQ ID NO: 34312 - DNA, 1247 bp, Artificial sequence
  DNA replication origin
atccctccctgggccccggcgttccctctgcagaaggagtgtccacctgcctgctgtgccgagggcttgtgtcctgaacagagggtgcccttgacaaaaaagcttcatccacctactgcccccagcaccgactctcctttctggggccctctcgcctccagcatcctctcaacaccaccaggactcagttcccctgtgtgctgcaggtggggaggagggatccagggtggggtgaagcccgtggccacaggaggcttggatgctccacctgctgcgatttcccgacaaagactgtgtccctcttttctccatctcgaaagccttccctgtgtgcggggacagacacagcctgaaaccaaagcctctggggtgcccccccgcccgccctaggccctgtgaggtcagcgtccctgggcctccccaagctggcagaggggccgtggcaggagcaggtggtgcctgcagcgtcctttccattgttctccaaaacgctctaaaacgggaaggctatttgggacaggctgttgctgtctgccgagcagagtaaagatgagtggataggtccccaaaagtgtcaccgtgcggagccgatgaggtctgcactcgggccggggtgggtgccccgatgccgaggtctcgtatctcggggcagtgtgtgagactccgtaatcagcacctgagtttggttcatttattccagctgcaatatttttatgcaacctctgtgccaggctctggggacactgctgaggaaaagggagaaaaaaacaaaaatacatctttaatgcatgctctgaaagacaagaacggggtcagagatggagggtaagtggtggtcggtcacagaccaccagaagggtgtcagtggacaccctttttattaaagagggactcttaaacagatatgaccccccgatgggacggcagatcagagaatcaggctgtgggtacattgtgttgagagcaggcaccttctagggcaaggcctggcaacctacagccctccgaccaaatgcagcccgccacctgtttttgtcaataaagttttgttggcacatggacatgcccattcatttacatatgacagctggcgccccgacaacagcagacctgaagagtcactgcagagcccacctggcctgcaaagcccaatgtatttagaatctggccctttatgggaaagaatgtgctcagccctgacttagaagaagtgggtggtggcagcctccaccctttctctatgcctg

SEQ ID NO: 34313 - DNA, 2059 bp, Artificial sequence
  DNA replication origin
cgggtgagctaggggccacagcagggaagggcgagggccagactgtggctcagacagcgctgaccacggccgccatctcctccacaggagaagtgtcaccagtactggccggccgagcgctctgcccgctaccagtactttgtggtagatccgatggcagaatacaacatgcctcagtatatcctgcgagagttcaaggtcacagatgcccgggtgagtgaagagacagactggcgggaggggctggagccttagtgatctggaaagggctgccctggttggtgatggatacaaaggccaagggttaggcataagcattgggaatcaggagaagtgtcagctgaccagttggccacttgcttctactgccacataggtggaagagagggtcttatctctgtgctgaccctgcagtgtctccactcactagggaacatggccccaggggatgatattcaaggaagtgaatggggctttcctctggaagcagccacctgtggaggatgatgttaaagggctgaaagggacttgagggattgagggtgaggggtggtagacggtggacaaggagagtcagatggtggggactggcaccgttgggtgaggagagatgagtatggatggtgttggctcaatgaaggactgcagtgtcaggtggagggagaaaggccaggtattaggtggcaacagatgaagactcatagtggaaggtggccctgttgggtgacaaaggatcaaagttagtggtggaagatcgacgatggtagagaacgcagtgaggggatgatagaggatggggaatgttggccaagatgatgccaaaggatggtgaaggctgctgaatgaacagcaatcaccgggcattgtgctgtgagcagtgcaagatggtgcccttggaggggtggaatctggaattggagagaagaacattcgcataacaggatggagaatgtcagtggaatgtggtagtttgggtcagtgaagggtgatgctttatcagtgatggatggaggaagacagaattggagaagggcaaatgtttggccagcagggggtggagaaaatcaatgggaaatactaggactaagaaaggacagtaaacaatagtcaatggtataaaccaatgggtggtacaagattgaggaagatggggttgggaaaggagattttagaaaatgtaaaacatcagggaaagatggtacattggatggcaaatggtggcagaggataacaattttggatggcaccattttgatggtggaggatgggattagaacaaggcagatgatggggaatggagaatgtcagtggaagatggtacccttggatggtggagagtgatgaattgttagtgatggatggtggaaaatggcaccattgagttgtgaaggatggaagatggcagagaatgatgtggttggatggcaccactgggtggtaggaaaggagactgcaaagaggaatggttgagtagtggggaatgaagacagtcagtggaagatgccatcactgaatggttaaggatgagttaccaagaggggatggtggtggatgatggaagatgatggtgttgggtggaactcgggacggcagaaggtagtgagttaccagcagtgggtggtagcagtggcactgttattggatggtggaagatgatggtgttggatggtggacgatgaaagatgatggcaccattgggttgtagaagatgagtcatcattgatgagctatggacagtgatggagttgagttgtgctgtagggccccgaaatggcacagagtggaagatgacagaggatcatggtgaataggagctgggaagggcagagctggttgcactatgggatggcaaaggatggaggatggaggtgctggatgtcatacaggaaatgtggggagaggaacagctgggtggcaagaagtggtgaggatgaggttggagcatctcttatggaaagcagtaccattggattgtgaaggacggtaagttgtcagggtaaatgaatggcagagagtgtacaaaatgggggtgagggccgggcctggtggctcatgcctg

SEQ ID NO: 34314 - DNA, 1491 bp, Artificial sequence
  DNA replication origin
aggtggggcccaggctggggctgggggctgagggtggaggaatgtgttggaagggaggcagagggccccagcttctacccagggagctccccatgggacagagagaaagcggagcgtgtctacccaggctgactacattctcatggaacccacttccgtggagggggaaactgaggctcagagaggacactgcttgtttccacccacggcaggagaacaaagccggcagagcccaactcagcaatgagcctgatttcttcttgcctttactcatgccccaggtcctctttgcccacttgtcctctggcctcacccagcttgagcctatgatgggggcctcagcagggccccagccctgccttcaaggagtctccagacagagatggacagatattggcagccctgcaaagtcaggactgggatggagaagatcttttagatatgtatttaactgatggctgctgtccatagtgcggttccatctgtttttctccatctgtggttctgaattaggacaattctgccatccaggagacatttgttattgtcatgatggggaggggaggtgctactggcaccgtgatgtatccccaacacccagccaggtcatctcaccgtcaggcacctgcttgacctaagtgccagaaaactgagtacatggacaagagtgagaattcttggttcaatcacacacattaagcatatgttatacattaagcatatgttatatctcactccctaacctggacacaagcacacaacagggacctaaacagacaaaacgttctgcccttgggggatttaacagtctagtagacaagacacagaccacaactatgaaatgtcaagaaagcttacatgtcaaaggagaaaaataaagtggaggagaaaaacagtgttagggacctggaagagggtatgatggggagatttggggggacagcatttcaggtaagagggtgcagcctgggcagaggccctggggcaggaccgtgcctggtcatgcaggatcctgtgggccttggggaagactttggctttgaccctgtgggaggcaggagccatggagggctgtgggcagaggaggtaccagatctgactcaggtgccctctggctgctgcagggaggacagactggggggcttgggtgggagccaaggtctgcggcaaagagggtggtgataggtctagaccagattggcctgcatggagaacatggagcaggtggattgggatagactttgaaggcagagccgacagtcccgggtgaggtgttggatgtgagaggggaagagttaagggtgactcccaagctgtggccagagtgcccagaaggttggagccaccttcagctaagacgggggagcaggtttggggagaaggccagatacagttggccacgttgtgtgtgaggcgtccgcaagactctacttggaaaccgtccagggccagctagagcccaagtcaggcacttggggacatggtgactgg

SEQ ID NO: 34315 - DNA, 1123 bp, Artificial sequence
  DNA replication origin
catatctaaagatgcccagtggcctccagttggagctggaccaggtctatgaccagaatcaggcctcagtggcccaaggggagacatgggatctagcactttccatgcagtggggaagggcaggttaagacccgggatctccgaactaccttcaatgggctggaggatgacacgggagtggtcataggcgatgacgttggcatagcggttcttcggcttgttcacttccaggttggaatgttcccatgtgaactgctgtccagggtcgatggactacagaggaaggggagagcgcgggtgtcagggtaggtgcctgtgaggccgaggtgatgagggtgggaggcgggggtgggctcacctcatactcctgggagagcttgaggctgtcgttggccttgagccgctccgtgtgctccgccatgtctgcgatgggaattggcgggtggctaagcatgcctacagggtggagcagaccccgccggggttggtcacttggggggccagccggggactcgggggaggggggtgatctacgtgtgagtctgcgatgggtgagctgtggttagaagggcatggccggggtggggcttggcaggaggggaagactcagggtggctcatgaaggggctgggaccccaggcctaggggactctaaaggcagcaggtttgaggccctctgctccgtgcagaggctgacacccctggaggggcctggatcacagcattggcccatcctgtttccttccaaccaagctgggggtgcaggggctggcagaagggtcaccccagaggatgtcaagctcccagtgcctcgagccaagaagcaagtgtgtggcacagaaattaaattgcagacgcagccggctgtgctttggaaatactgtccttgggtgggcgactgacacccctttctgtccctctgggatcagaggcacgaaatccgcttccaggtagaggcgacagactagggaggggaaacagtatgtgtgtgtgtacgtgagaggagtgaggggtccccatctgtccctgcgcttgcttggggcaggagcaggtgcaagaaggccctggcctgagagctcttatcctttcaagccccctaggatggctgccgaaggtgctgggt

SEQ ID NO: 34316 - DNA, 1667 bp, Artificial sequence
  DNA replication origin
ctgccggcagcggctgagccgggcgcggagaacgcgctcacgctgcagggcctgaagcccgacacggcctatgacctccaagtgcgagcccacacgcgccggggccctggccccttcagcccccccgtccgctaccggacgttcctgcgggaccaaggtaggcgcgcggcgacccctgcaccagagccggaccgggccttgcgcccacccccaccccagccccctccctctcccctgcccaggtaagtgctcacttttctgcttcctcgtggtcactcaaggcaagtccggaccccgaggctccggcgttggcaaaggtgggacgtgcctcggtggcaccaccgccccccaccactgccccctccccttgctcccctcccccctcttcctcctcctccaccttctttctgcagcctctgcacccgtgccgtctcccgaagcagggacttgggacaggacagggcagggccgggccagggccaggcaggaaggccgtgggcatgggcacagcggacgacagggagcgcctgggccgccccaccccaccccgcttcacgccacccagtgccaggcactcatggggcctctcttctgctctctccctgctcggccgcctccccggcagtctcgcccaagaacttcaaggtgaaaatgatcatgaagacatcagttctgctcagctgggagttccctgacaactacaactcacccacaccctacaaggtgcgactgcccagccagcaggcaggcaggcaggcagggtcaggggttgtagttcagcagggcttaaggctcagtttggagttggtgtgaagtgagggatcagggctcagtcagagatgggtctcagctaggattgaggcttagtcaatactgggaatcagacttggggcccagcctaggattggagatcagctggaactgaggttcagtcaatattggggatcaatgttgggctcagccttggattgtggcttagctgggattgaggttcagtctgggattaagatttagtccatattggaaatcagagttggggctcagccttagatcatggcttagctgggactgaggcataatcaggattgggactcagagttggtacttagcctgaggtcagagtttagtctggagttggtgccaagtctgggatcgggggtcagcctgggattgaggttcagtctgagatcaggaatcagtctaggatcaggtctcagaggtgggtttccacctagggtcagcgctcagctggaattcaggatcagtctgggttcagggttcagtgggattggggctcagtcgggactgggaattcagcatgggatcagggctcagtcaaagtgggcttctacctaggatcaggactcagctggaatttaggcacagtctggggtcagggttcagtgaggttggggctcagtcagagttggggactcagcctgggatcagggatcagtcagtgttagatttctgcctagggcaggattcagtgggatcagggctcagtcagggtgggggactcatcctggagctggggctcagtccatgggcatgagcccaccaggccctgctgagctagccctggtccgcagatccagtacaatgggctcacactggatgtggatggccgtaccaccaagaagctcatcacgcacctcaagccccac

SEQ ID NO: 34317 - DNA, 966 bp, Artificial sequence
  DNA replication origin
tggtgcacgcctgtaatcccagctactcaggaggctgtggcaggaaaatcacttgaacccaggaggcagaggttgcagggagccaagatcgtgccactgcactccagcccgggcaacagagcaagactccgtcttaaaaataaaagtaggtctcaagaaagcctcacttaagaagcaaagacttgaaagaagaaagagagggaaccacgagaagatctgggggaatcgtgctccaggaagagggaacggcccatgcaaaggtgtagagccggcactgggctaggggcgcataaagcacagcaaggaagtgaggactcagagaacccctcctccttccattaataaggcaaccatctcctgccttgttgatttggcccttgctcaatgcaggcacctgaccaatacccatgggacataaagaaatccaaaatccgcccctgctctttgtttcgcacagcctgggtagtaatcaatgtgccgagagaggttctgggatcaggcaaagaagggggaaagctgggctgtatacatgaaaatggacttctctactgcaggacttatcagggccttgaatggactgctatgaatacccagggtggtggggagagcagcgtatgcagtggtttctgcttagcaaacacagctctaatacaatgtccctgagagaggagggaagtgccctgctggctagaagaagggagggagagatcacaggaggctgcttggaggaggtggcgttagagctggatgctggaggacgcagacaaggtgcgtgaagggaatagtgtggacaagggcaggggctgtgtccagctgggaggcctgaaaggtggggtacacagtggtgtggctacaagggtccccgaggagagggtgggtgtggggactgggatgaaggccacagaagtcagtcgattgttcctgaaacacccgagcttgttccgcccaccaccaccaccaccacgc

SEQ ID NO: 34318 - DNA, 796 bp, Artificial sequence
  DNA replication origin
acgcagacaaggtgcgtgaagggaatagtgtggacaagggcaggggctgtgtccagctgggaggcctgaaaggtggggtacacagtggtgtggctacaagggtccccgaggagagggtgggtgtggggactgggatgaaggccacagaagtcagtcgattgttcctgaaacacccgagcttgttccgcccaccaccaccaccaccacgccccaccccccaagtctttttctgggctgtgccctccgcccggtgtaccctccccttacatcttcacggcagcctctttttcttaattcagctccattttggctggaaaaaaaagccagccccttggggacgatggaagggacaatggaggggctagaaggggaaactgaggcagggccaccaagagaaaggtggcttcctggtgcagtaggggaagacaggtgcaccaccctgaaataacaacctagccggggcgaccagagcctggatgggggaagcacaggagactagggggcccagaaggatcaagattatgggatgaggcaatcagggaaggctttccagggccaggtgtaccttgagctgagacctaaaggcagaagaggagccagccagcaggggaaggggtatcctggcagagggaacagcccaagtaaaggttgagagggcaaaggggtcagaggtggctgttaactgtttctgtctggtgggagccggggggacaggaagtgagtgacaaaggaggaggcaggggcggggggggccaagctgggccctggacacccacctgagcagccctcacacctt

SEQ ID NO: 34319 - DNA, 893 bp, Artificial sequence
  DNA replication origin
tgtatttattgcctttgctttcaatataacttagttgattgtaagtttatacagtttatttatttatttttgagacagtcttgctctgtcacccaggctggagtacagtgccacgatgttggctcactgcaacctccgcctcctgggttcaagtgatcctcctgcctcagccaccccagtagctgggactacaggcatgtgccaccacgcctggcttttttgctttttttttttttttttggtatttttagtagagacgaagtttcaccatgttggccaggctggtctggaactcctgaccttaagtgatcctcctgccttggcctcccaaagtgctgggattacaggcgtcagccactgcgcccagcctcgtacagtttaatttttaataacagctctgtttcataagtggctcacaaaattcctgaaaatttaaccagcggctctcatgagttggtaccgggcacctccagcacaccagtgggtgtagacaggggggaaggccagtgccaaagggcctgaggcaggctgtgcctggtgcattggaggaacagcaaggagagccctttgtgagccacagggaagacttgggctttgaccccaagagaggtgggagccatggagggctgtggggagagcggggacggaccctgactccagtgctcacaggcgccctctggctgctgtggggaggacagactgtcgggggtgatggcaaggagtgaggggagcggagcagagaggaccgagttggtcctggcaagcgacaatgggctcgtccggctgggttgttgcatgtaccctctgagcatggccatgccacgtgtcgtggtctctgcatgagctcatgtgcacgtctccacccctgatccgggccctgcatcctccttgct

SEQ ID NO: 34320 - DNA, 1404 bp, Artificial sequence
  DNA replication origin
tggatccatggggcgcaccttcaggggcccctcccagggctgtggggggtgtgcaggaggccatgtcctcccgcccggtggtgagcgctaagagcgcccagttattcaccggcagccactcggcatcctggaatcggacagtggcactgcccggggcagggccgggcgccctggtaacggctccgcccgcccctcccctcccctcccgcccgccagtgcccagcgcgccgccgcggaaggtggaggcggaggcgctcaacgccacggccatccgcgtgctgtggcgctcgcccgcgcccggccggcagcacggccagatccgcggctaccaggtccactacgtgcgcatggagggcgccgaggcccgcgggccgccgcgcatcaaggacgtcatgctggccgatgcccaggtgggcggggggccggggcggggccggggacgggctccgggcggggacgggcccttgcgctccccccacctctgcttctctttctccatctctggcctcccccgctcaccttcctcctctctcccctgccgcctcctcccgcgctcagtgggagacggatgacacggccgaatatgtaagtagcgcccctggccacccacctactgctgtgcgcttcccgcgggccgtgctgtgctgtgactcctgcacgccccttatcatcagtagtaaaacggtctcctcctctgggccctcccatgcgcccctcgctctcccattacctcttggagcgcccagcctcgatgtttgcaccagggaaatgggatactcggaccactgtgcgccccagggggcagacccgagggtggcttgagcaacaggacctgagggtcgtccctgaatcctctcaccctgatggctcctgccattggtggggcttaagcctcctgggtccttctcctgcccgtagtcatttctcctgtgagtatgtctcctctcctgttgacccagccccaccctttactgtcactcaattcagccctgtctggcctagaaatgcctctctctggatatgctgtcgtcttcattctggcccccgggtgatgagaggtgtcagcggggccagagtggggaaggatgtctgtgatagcctggttacaaccccacaatgctttaaaccagagaggaattgctgtgtgacttggggcaagttgctacctctctctggactacctctctgcccctaaaacgggagtaccagtctctgctgagaaccccaggtctgacattaaattggcactggtcccttggctgggcgtggtggctcatgcctgtagtcccagcactttgggaggttgaggcaggtggctcacctgaggtcaggagttcaagaccagcctggccaacagggcaaaaccccttctctactaataatacgaaacagcctggtgtggtg

SEQ ID NO: 34321 - DNA, 1843 bp, Artificial sequence
  DNA replication origin
ccccacgttctccccccctccaatagaaccgtcagccccccctcaagacgttaaatgtgtcagcgtgcgctccacggccattttggtaagttggcgcccgccgccgccggaaacgcacaacggggccctggtgggctacagcgtccgctaccgaccgctgggctcagaggacccggaacccaaggaggtgaacggcatccccccgaccaccactcagatcctgctggaggccttggagaagtggacccagtaccgcatcacgactgtcgctcacacagaggtgggaccagggcccgagagctcgcccgtggtcgtccgcaccgacgaggatggtaagtacctgccccaggcccgggaccccccgcaggccccagcccggcccccgcctcgaagccttccatctggaaacctgggctggtggtcaaagggcggaagcctcactcggaggaagtcgggaagcaagcagcctccccgagaaatccggggctccttgactttggaattggcgattctagacatgggcaggcttagctctgcagcatctgctcccagagcctcgtgcctggacagtttcgctggctgccctctattttggtggaacagtggaaacctttggaaatggggtggaggaagtggcaaatagcacctgcaacaacaatgtgctgatcatggttaaccagctccccgggtggatggagaccagtttgtgtagcattggccaatttccatggtgtaaatgttcccgtcctcacccatttcaagttagcagcaagtttgaagctggaaagcaaggcagtggtcctagcttggagtcacgtggtcgaagcctagatcatggagagaaatgacagacacctttcccaataaaattgcaacttcttggccaagcacagtggctcatgcctgtaatcccagcactctgagaggccaaggcaggaggatcatatgagtctcggagtttgagaccagcctaggcaacatagtgagaccccattcctccaaaaacatttttaaaacatagccaagcatggtggcatgcacatgtagtctcagctactcaagacgctgaggtgcggggattgctgggcatagcagtttgaggctgcaatgagctgtgatcatacccctgcactccagcctgggtgacagagtgagaccccatctctacaaaaacgtattagctgagcatggtggcacaggcctgtagttgcagctacttgggaggctgaggtgggaggatcgcttaagcccaggagttcaaagctgcagtgagccgtgatcctgccactgcatgccagcctaggtgacagagtaagagaacctgtctcaaaaatatttcagcctcttggtcctgggaacctgattcgttttctgagccatttgcctttgtttcgttggacagccccattatgtcctaagcccagagaagaaatgaagcagctcttctttatgccaaaccctggggtgggtgaaaaagatcctgagtgccaagtgggccacctgcctgcttgggtatttaggaacatacagctggactgcctggtgcaaatcctggctttgcctcttgctaaggctgtgatcacagaatcaactctctaggattcaatttccccaaatgtaaaatgagaatgacaggagaccctatcttgcagggttatgatgaggatggaagcagtgtagggtgaagaagagggtgtctggaggccctgggaaggtggtttagactcgggggggggcagcctggatccatggggcgcaccttcaggggcccctcccagggctgtggggggtgtgcaggaggccatgtcctcccgcccggtggtgagcgctaagagcgcccagt

SEQ ID NO: 34322 - DNA, 2195 bp, Artificial sequence
  DNA replication origin
tccgccctttgaccaccagcccaggtttccagatggaaggcttcgaggcgggggccgggctggggcctgcggggggtcccgggcctggggcaggtacttaccatcctcgtcggtgcggacgaccacgggcgagctctcgggccctggtcccacctctgtgtgagcgacagtcgtgatgcggtactgggtccacttctccaaggcctccagcaggatctgagtggtggtcggggggatgccgttcacctccttgggttccgggtcctctgagcccagcggtcggtagcggacgctgtagcccaccagggccccgttgtgcgtttccggcggcggcgggcgccaacttaccaaaatggccgtggagcgcacgctgacacatttaacgtcttgagggggggctgacggttctattggagggggggagaacgtgggggggtggggaagggaggtgggatgggtggggaggggggcggggaaacaaaagatgggaaagagaaaataaaaaagaagatgataacaaacaaaacagaaccaaaccaaagagaagtcgaacccaaaagaagtgggtgtcaaccaaaggtgggatgggcgggtggatgggcgggcaggtgggatggggctgggagggctggccaagaaccctgtgctcaccaggctgcacctacgtggtgcacagtaggtcttaggcattggacagctatggtccccatgccagaaactgggtgggggaatagcaagggaagcccttcttactaggcacctactatgtgcttggcatcgtgccaaggggaatagcaacaggagctccatttattaggcacctactatgtgccagcaccaagggcttcacaaaatagtaaaagcatctatttgttgaacatctactatgtgccaggcaccatgccaaagggaacggcaacagaagctccacttattaggtacctactatgtgccagcaccaagggcttcacaaaataatagtaaaatatctatttactgaacacctactatgtgccaggcaccatgccaaggggaacagcaatagaagctccatttattaaaggcttattatgtgccaggtactgtgccaagggaaacagcaacagaagctccatttattaggcacctattatgtgccaggcaccataccaaggggaatggcagcagaagctctgtttattaggcacctcctatgtgccagcaacaagggcttcacaaatagtaaagcatctatttactcaacacctactatgtaccaggcaccatgccaaggggaacagcaatagaagctccatttattaagcacttattatgcgccaggtaccgtgccaaggggaacagcaacagaagctccatttattaggcacctactatgtgccaccataccaaggggaatggcaacagaagctccattcattaagcacctactatgtgccaggcatcatgccaaggggaatggcaacagaagccccattaggcacctactgtgtgccaggcaccatgccaaggggaatagccatagaagctccaattattaggcacctactaataattgtggtaaggcattgtgctgaggactccatagaatgatagcaaaataatctatatgtcaaacacttactatgtgccaggcaccgtggcaaggggaacagcaacagagctctattaagcacctacgatgtgccagcgccaagggcttcacaaaataacagtaaaagcatccatttattgaacacctagtatgtgcctggcgccatgccaaggggagcggcaacagaagctccatttattaagcacctactatatgccaggcaccacgccaagggaagcagcaacaaaagctccaattattgggtacctagtatgtgccaggaaccatgccaaggggaatggcaacagaagctccaattatcaggcacctactacgtgtcaagcattgtgctaaggcttcatagaatggtaacaaaataatctatgtcgaacacctatgtgccaggcaccgtggcaaggggaacagcaacagagctctattagacacctactatgtgccagcgccaagcacttcacgaaataatagtaaaagcatctatttattgaacacctactatgtgccaggtaccatgccaaggggaatggcaatagaagctccattaagcacctactacgtgccaggtaccatgccaaagggaacagca

SEQ ID NO: 34323 - DNA, 2150 bp, Artificial sequence
  DNA replication origin
tagagagaccctccggcctcacttaaagcaaaacattagaggcccctcctccaaaactagacaaagggaacccttccccatttcttgaccagccacaccaaccaaaggtgcccggggggtgcggggaatcaggcagggagcagggggaaaaaaaaaaaaaaaacaacaatcaaggaatgtgtcggaaggaatggatttgctgagaaagggggagaaaaaataaaaccgaaaccataataaaataagaaacaacagtgatggtgatgatgatgagaaaaacttaataaaagaaagaaagactccttccagaaaacgcccagtctggttacctaccttccactcttcaactgctaacttaaaagactttcttacgagagagggaacggccgagcgctgagctacaaggccagaccgaactcttggtgggtctcaggatgccagtggccccgcagccctgctccagcccccagcgtgcgcacgctgaggttccaggctggaggcaggaaggtggcacggtgtctggggagacccacggctgagtggtctgacctgcacctaccctgtgttcagcctaaggagcccgcagtccccggggggatggatacgcctggccctgagtctttgctgtcggttctcctgggccccacccgtctcggggcaagaagcggggagtcccttctccccaactccctgtcctgggccgccccggaggttcgcgtggctgggccgaagccgctttctaggtgaccgtgtaggtcacgtccttcacaatccggcccaacctgcatgacatctcgggaagggatgtgtgcaaagacgtggatgtgcgtgcgtgggcagcgtggcatggtggtggcacgtggtttgggagagtttctggggccgaattcgggccgtggactgtccgttcagcccagagtggctggggcaggcgggggggcacgcggggtgggccgtttttgtgaacctgcttgagaccagcgtgtactcaccttcaggacacctcagccagtctctcaggtggctgcccaagccacaggccaccctcactgactccacctcacacagacgcgcccagacgccttggagccgccaggtgctcagctcggcttggtttgtggggagcaggaaggagggaagggggccggcgggggcaggggggttgtgtctccgaggcgccccacccccccgatcccagcggctcagatgccccggctggagttgatgttaacccttcgactgatccgagatgcccctgtgtacacacacccagggcgggccttgaaggtttgaccatcatgactgattctggaagaaagcctggggtggctacgccgtgactgactgggtgaagggagggaagagggggaagcagggggaggccacgacagagagaccacgccggtggaggccacaccagggaaggccacgctgggctgagcggagccagggaggcaggtgaggtggggagacggcagaaggggcctgtccagctccgagtttagagaagtcagggagagagggtggcggtgacccacagccaactgccaggtgaagggtgactcgctccaaacagggaggccgggccggcacagcagagaactccagagatttgagccccgagtggggacctgcatgcccccacgaaacctggcctcggctccgattccaccccctccccaccctcgggaactgggacctcgtcctggggtcttgagagccaaggctccctgcccgggggaggaagaccgacggggaaggtgggttcgtctctgtgtcctttgctctgagaatgatggggtgcgagccgtgaccacagcctcacggtaccctcaaaatgcctgggaaatgggcacaacgtggcccttcaatcagcccccactccaggatggaaagaggagaaagaaggcgtggtcccagaacctctcctacaccagggccaagatcagccacttctccttgaccccaagtctcaacccgggtcaccaggcccaggggcacagacaaccccatgctgagaccctcgctgtgctgatggggatactgaggcacagcgcgggtagatggatccgaggtcggggaacaaagcggagacaggccgggaggcgccccccacccactgcagcaggccccgcctgggtccgtctgcc

SEQ ID NO: 34324 - DNA, 1652 bp, Artificial sequence
  DNA replication origin
gccgtgaccacagcctcacggtaccctcaaaatgcctgggaaatgggcacaacgtggcccttcaatcagcccccactccaggatggaaagaggagaaagaaggcgtggtcccagaacctctcctacaccagggccaagatcagccacttctccttgaccccaagtctcaacccgggtcaccaggcccaggggcacagacaaccccatgctgagaccctcgctgtgctgatggggatactgaggcacagcgcgggtagatggatccgaggtcggggaacaaagcggagacaggccgggaggcgccccccacccactgcagcaggccccgcctgggtccgtctgccgaggggctgtctgcggtcaggccgtggtccctcccgcagagaagggcggccccgcgagacacctactggactgcagcgtgcgctgccgcaccacgggggtgaaggcgcccaggccctgcggcgagcgggccgccaggcggaaggcgtactccgtgttgggcttcaggtcctccaccacgtaggaagtcgtcgggtcgaaggtccttcccacctgggggcagggcagagaaggacagagagggatgggggagagagagagagagacagaaacaaaggggagagagagagagacagaaacagaggggggagggggagagagagagagagagagagagacagagaaatagagacaggggtgcggcagagagggacagagagggatgagggagagaggtagaggggagagagaggtagagacagagatacagacagaaaaagagggtacggagagagacagagacggagagagacagagacagagagaaacaggggagagagtcagagacagagggacacagagacagagatagagacagagggacacagtgacagagatagagacagagaaacaaaggagagagacagacacagagacagagataaatgggagagacagagacagagagagatacagagacagacagaaacaggagagagatacagagacagaggaatagagaaattgagaaggagacagatacagagatagacacacagagacagagaaatagagacagagacagaaacacagagaaacaggggagagagacagacagaaacggaggagagagagattgagacagggacagagaaagagaggagagagagacagaaatagagatagagacagaaatagagagagaggagaaagaaacagatacagagacagagacagagagacagaaagagaggcagagggatagaaacacagagacagatggagacagaaaaaaaacacacagaaaacagagacagaaagagaaacagagacagagacataaacagacagaaacagacccggagggatggagagtgagcgtcagaggcaccggtgaagacaagacacagagagaagcacagatcaagagagatggggacgccgatacatacggaaccagagagaggccgccagcagcagaggagaaagacaaaggagatgagacagaggagaaaaaagtggaggaaaggcacaaagggacagagacgcaggagaagcagaaggggtgaggaagagcagaatccgcagcacacatagggacaaagagggggaagagacaaggcgggcagcgtcagagagcgccggggagg

SEQ ID NO: 34325 - DNA, 1189 bp, Artificial sequence
  DNA replication origin
tcaagacgcagcagggaggtgaggcgtggggtcggcaggactcggggccccggccgtgcggcttggttctttgcatgctccctggaagccgcagagcggtttgtgggttatgcacggtgctttaagatattttcatgctagcatttaggccgggtgtggtggtttacgcctgtaatctcagtactttgggaggccaaggcgggcgggtcaccggaggtcaggagttcgagaccagcatggccaacatggtgaaaccccatctctactaaaaattagccgggcgtggtggcctgtgcttgtaatcctagctactcgggaggctgaggcaggagaatcacttgaacccaggaggtggaggttgcagtgagctgagatcatgccactgcactccagcctgggcgagagagtgagactccacctcaaaaaaacaattaaaaaatatatgtatatattttcatgctagcatttaaaatcggggagctaggccggaggcggtggctcacacctgtaaccccagcattttgggagtcggaggcgagtggattacctgaggtcaggagtttgagaccagcctggccaacaccgtgaaaccccatttctgttaataatacaaaagaaaaatagccggccgtggtggcgggtgcctgtaatcccagctactctggaggctgaggcaggagaatcacttgaacctgggcagagtttgcaatgagccaagatcgcaccattgcatccagcctgggcgacaagtgaaacgccatctcaaaaaaattaaattaaaaaaaaaaaaaaagagagctagccaggcttggtggcatgtgcctgtagtcccagctactcaagaggcagacgcaggaggatggcttaagcccaggagtttcagtccagcctggacaatatagcaataccccatttcttaagaaacatatataggacccagtgtagtggctcatgtctgtaatctcagcactttgggaggccaagataggaggatttattgaggccagcctggacaatgtagctagaccccatctctacacacacaaaaaattaaaaattagctaggcgtgatggtgcacacctgtagtcccagctactcaaggctgagatgagaggatcactggagcccaggagttcaaagctgcagtgagctatgatagcaccactacactccagcctgggcaacaaa

SEQ ID NO: 34326 - DNA, 1025 bp, Artificial sequence
  DNA replication origin
gcccatgattactgctgggcaaatcaaggctcagagaaggcgactgaatggtgaaaagtcacacagccttcagggtcctcaaccaatgtgcccaatgcgtgacacagctgcctcctgcccacagctctccccaaagctcccgggactcccatggtgactgagaacacagccaccagcatcaccatcacgtgggactcgggcaacccagatcctgtgtcctattacgtcatcgaatataaatccaagagccaagacgggccgtatcagattaaagaggacatcaccaccacacgttacagcatcggcggcctgagccccaactcggagtacgagatctgggtgtcggccgtcaactccatcggccaggggccccccagcgagtccgtggtcacccgcacaggcgagcaggccccggccagcgcgccgcggaacgtgcaagcccggatgctcagcgcgaccaccatgattgtgcagtgggaggagccggtggagcccaacggcctgatccgcggctaccgcgtctactacaccatggaaccggagcaccccgtgggcaactggcagaagcacaacgtggacgacagcctgctgaccaccgtgggcagcctgctggaggacgagacctacaccgtgcgggtgctcgccttcacctccgtcggcgacgggcccctctcggaccccatccaggtcaagacgcagcagggaggtgaggcgtggggtcggcaggactcggggccccggccgtgcggcttggttctttgcatgctccctggaagccgcagagcggtttgtgggttatgcacggtgctttaagatattttcatgctagcatttaggccgggtgtggtggtttacgcctgtaatctcagtactttgggaggccaaggcgggcgggtcaccggaggtcaggagttcgagaccagcatggccaacatggtgaaaccccatctctactaaaaattagccgggcgtggtggcctgtgcttgtaatcctagctactcgggaggctgaggcaggagaatca

SEQ ID NO: 34327 - DNA, 983 bp, Artificial sequence
  DNA replication origin
agcatgaaaatatcttaaagcaccgtgcataacccacaaaccgctctgcggcttccagggagcatgcaaagaaccaagccgcacggccggggccccgagtcctgccgaccccacgcctcacctccctgctgcgtcttgacctggatggggtccgagaggggcccgtcgccgacggaggtgaaggcgagcacccgcacggtgtaggtctcgtcctccagcaggctgcccacggtggtcagcaggctgtcgtccacgttgtgcttctgccagttgcccacggggtgctccggttccatggtgtagtagacgcggtagccgcggatcaggccgttgggctccaccggctcctcccactgcacaatcatggtggtcgcgctgagcatccgggcttgcacgttccgcggcgcgctggccggggcctgctcgcctgtgcgggtgaccacggactcgctggggggcccctggccgatggagttgacggccgacacccagatctcgtactccgagttggggctcaggccgccgatgctgtaacgtgtggtggtgatgtcctctttaatctgatacggcccgtcttggctcttggatttatattcgatgacgtaataggacacaggatctgggttgcccgagtcccacgtgatggtgatgctggtggctgtgttctcagtcaccatgggagtcccgggagctttggggagagctgtgggcaggaggcagctgtgtcacgcattgggcacattggttgaggaccctgaaggctgtgtgacttttcaccattcagtcgccttctctgagccttgatttgcccagcagtaatcatgggcctcatgactcctgtcatcgtctacagcaaggggtaacaaactatggcccagggtccacccagtacccattttctttttttaatttttctttgagatggagtctcactctgtcacccacagtggcacgatctcggctcactgcaagctccgtctccc

SEQ ID NO: 34328 - DNA, 1039 bp, Artificial sequence
  DNA replication origin
tgggtatagaaacccttctaaaagcttctgtcagatctgacaagtttccatcaatagatgcagctctgagtcacaaacatcatgcaaaatagattgagagagagagagagagagaaagagagagcgagcgagagacagagagagaaaggagggaggaactgcagggggaagatctggattttggggatctctagtgcacacttacgtgacaccagagagaggagacgaatgaatggggagaaagagagaagaatagaaaatagggacagagagcgggaggggcagagaaagaaagaaagaagggggggcccacttcaatgctgcatattaattctagcagatgtgatccaatgtgacatgccacattgtcacatcacagccctggcagaataataaatagtatattaataataataataataataataattaataataataaacaagggaatgaacttgaacgttgagagaacagggacatgttctgtgcgtttcttagcggggaagtggatgcaaccttctctcaaagaccatgaaggcagcaggatgcatttcgggggctccgttttcggaagtcagatgggttccaggacagggggaaggggaggaggccagtgggcacctgaacttgcaaagagcactgctggcccacgggggctgtttaactgctgtgggaaggactcgggtgaacctaataaatccttctagcaggaaaaggggttgtccctgggtgacagtctcaggtcctaaagaagacacatgggtgcgtccccagctttggatgggtgaaggagtcttgtttcaactgcacagatgacggactggaggctcagttaggatccccatcaacacctgcctctgattttcatacgggattgggaggtgcagcctcagggggtggtctcagggggtctggtctacgatgctgaggaggaggttcaaggggataaagggaggtggccccaactccctcccttccagcctcggttcctagctggaaatcccaacccctgccttcctgaatccgggcgggaggcaa

SEQ ID NO: 34329 - DNA, 1456 bp, Artificial sequence
  DNA replication origin
gattgatacttggccgtaatcctcgttactcactatggtgagaaaagccttgttttctctgagaggcagcaaccaggctggcctggctttgagctctggctacactacttcctttctgtgagttccatctagtcttgtcacctctctgagtctctgttccctcatctgcaaaatgagcataaggacgtttgcctctcaaaattgttagaaggaagaaataagatgggaattcagtagaaattcttactgtttccatttcgtttgtttgtttgtttgtttatttatttatttatttggagatggagtctcgctctgtcacccaggctggagtgcggtggcacgatctcagttcactgcaacctctgcctcccgggttccggcagttctcctgcctcagcctccagagtaactgggattacaggcgcccgccgccacgcctggctaatttttgtatttttagtagagatgggattttgccatgttggccaggctggtctccaactcttgatctcaggtgatccacctgccacagcctcccaaagtgctgggatcacaggcatgagccactgcgcctgcctccatttcctttttataattcatccctgaactcccttaaggtagagaagctgtttgatcgtcccagcccctgggaggctgaaaggtaacttcaccagctccatgcctgagtttagcacctgctgtgccaggcactgcccgagtcaggttaatgcctttctcggcaggatacccaattccctccattttacagatgaggaaactgaggctccaggaggatgggggaccttcccaaggccactgggctcattcagccacatcagctcctccacgtctgcctggagaggtttactatgggattcagagaccttgaggagttcaccttgctttgtgatttcagctttgggacctccaacttgctcagccctaagagaggcagggtgtcgagaagtggactgagaggggctttagagagagagacttgagtcgggctgggttggtttgttccgaaggatttttgtccacgaggctcccacccctgtggccgccccaaacccgtggccaagactcttgggtgctggatggggaggccggatcctgtgttctgccagggggagggcgtctccctggggaagccacagtcctcctcctttcagaccccgattttcagccccacacccattccatgatttttttttttttcttcttgcttttgggtgttgtgttttgttttggagggagttttttcgtttgtttgttttttagattctctctttctttttttaaattgcttttgctttgttatttcatttgttcttcctggttttgttttggacgtcgataccgtttttctgtccttgaataattagctccccccacgctcatttccccattgtgttctgtttccatgacaactcagccttggcatcttacctgtgcc

SEQ ID NO: 34330 - DNA, 1246 bp, Artificial sequence
  DNA replication origin
cggaccagctggtggggggtgggaggggcagcctcgaagacccctcctcaacttctagattgagggccctggattagggggggcagtgaagcggggagctacgaggccacaaagttgggagaagcaaagccagcacacagcacgggaaggcacgacacaccacagaagccaactcgggtgggcaggcaggtggggtggggcggggcagaggcctgcaggctcccctggccctgtaggcccaagactgaccccctcaccctgccccacgccttcctaccccaccatcactgcctccccagagcctgctgcccacggggcatctctcgcaaggcacgaggaagggaatttaagctgcccccattctacaggcaaggaaactaaggcccagagagggacgccgcctcggccaaggtcccaccgcgaccggggaggggccttcctgcttgggtgtgcaggggacgggggagcccggaggcggtgagcccgaggagggagggggatgggacggggcgggtccctgcctttgacctggacgcggcgttccctacctcgcacgtagaggttggcaggtgaggagtagcgcacgccggcgctgttggtggccacacactcatatttgccctggtcggtttcctcactgctttcaatctgcagggctcctgtgggaagatgggaaaaagcttggtctgttagaggggggcccaggagtgaacagggaaagctcccccaccagagtgctctctggcctgtctcctgtgctggctgggccagagaggcagataagaggtgagaaaacctggaagccctagcttggccaggccttgtataacctccacccccacatctagccccaccagggcctggacacaccagattccccagcaaattctccactcacagtggaaaagcagctggtcatgagactgctgcctcatgactgccaagttgaattacaaagatggagaaaagtgtgtttgagaaagcactaagtgatgctctcctggccagaaggaaagagtgggttggcattcacaactcataaccatcatttgatagatccagggacctgagggggcccaccacaaatcatgtgaaaattcagggagctggtggttgctttgtttcattaggtgcccgtgagtaaatgaacatgggtctgggttcctcagttgtgtttggaatcctagtcctcaaagtcctcaacgcccctaagtaaatggagacggggttgtacttcttcaggtgt

SEQ ID NO: 34331 - DNA, 809 bp, Artificial sequence
  DNA replication origin
agagtgggtcacagttaccatcacggtggctgttagtttggtgaggagaaggggagcagaaggggcacaaaggggatggggcgttagttgttgacgtggtgatgaaatcagacttaccaaaggtttctgaacgtttacaacaggaggataagaaaagagaacaggaacgttaacgggtggttacaaagaatcctatgtcctcagcgaggaggggagggcgggggaggggagggggacgctcagaataataataacaacatttcttatgattcctaaagtggcttatgttcactgagcacctagcaggcgctagacattccatcctggagaggtcaccagaacacaaggaaaataggcatgttttatggggaaactgaggccaccgctccccctgcttgcagaggcctatgagctgcaaacatcctcagccaggctgggagataggaggcgatttgtccccccagtgtgaggtctgagtctctccaaggaagacattctgggctccacgtctgatctttttggggcttggttttcactaaggaggaggagcagaaagcggagaacaggtaggtaggctctttggtggggggcaacgatgggcagtgagtgaggggcgctggggatgattcggggaggtactgctgcaaagggggctccgtggcgggatcctcggaggaaggggagagagaaagcaaaaagaggggtgtgtggaggtgcagggtgatctcaacagtgacctgaacgaaggcagggcgtcaagcccggcacaactgaaaacagtaaatccgtgacacagacaaacacgcatg

SEQ ID NO: 34332 - DNA, 754 bp, Artificial sequence
  DNA replication origin
ctactcaggaggctgaggcaggaggatcacttgagcccaggttgttgagactgcggtgagctatgatcgagccactgtactccagcctgggcaacagagcaagaccctgtctcaaaaaaagagagagaactggctgtaaaggatggcacccatggctgaggtcacgcagccagggaggagctggacccgtggccaggcagtccctgagccccaggctcaggagtggctgtgcagtgctcagaaccatgcccatttctctcacgtctctgccctcagaggaccagctgccctctggcttccccaacatcgacatgggcccacagttgaaggtggtggagcggacacggacagccaccatgctctgtgcagccagcggcaaccctgaccctgagatcacctggttcaaggacttcctgcctgtggatcctagtgccagcaatggacgcatcaaacagctgcgatcaggtgagtgagggtggctgacaggacgtgggagccttggagggcagcagggggtggggagcatctccagggcccaagttctggggactactggaggacagacagagacagtgtgtggccgtggcaggcgttggctctgggggagtgggggcaaatgtcttcaaagccgcacactgaggatattagggggcacagatgggcatgagtactggagagctatagagggtggtagaagaatagtgcttcaacacctggccaatgaagatataatggatgcagacatgcacaagga

SEQ ID NO: 34333 - DNA, 951 bp, Artificial sequence
  DNA replication origin
cttttgcaagaggacatggtggagggttggcctggcaccaacctggccatttccctccctgcccagggccacgtagggctcctggctgctctgtgggtctagtctatgtgcacctctctgtcctcatctctccccctctccctcctaggacctctcagtgctgcccccttgctcttcctcatgctgtttgtagtgcagagacacccttgcccccaattcccattcaccttttggtcctcagccaatattaaatccaggaatggcccacgcaaaggcccgggggcaggactggactgcacttggggtgttggagaaatagcaaggaggcccatgcggctggagcagagggaggagggggagaaagggaggaggggagggcacggaggggacagggcaggtcgtgcaggacctggtgggcctcaggaaggacttgggctttgaccccgaggcaggtgggagccatggagggctgtgggcagaggaaggacgagccctgactcgggtgcttgcagatgctttctggtttctgtgagtggaacagatcaagggacaagggcgggagctgggagaccacgatggaggtgacgacatctgtccaggtcggtgacaatggggctggaagaagtggaggcagaagaatgagtaagaagtgggcaggttggggacagattctgaaggcagagctgatgggacctagggatcttctctcccaaatcctcgcagaggacctcacgcctggggttttcgtggaagcaggagtcggtgggaggattgtgggtgtgcagggtcctatccccatcatgggaggttctcctagggaggattggcacctaagggaccccgggatgttttgtctttggtagtgtctgaaccccactccctgggcccctcccaccaccctattcctgatacatcatccaatgccccaaatgctcctgttactgtagcccc

SEQ ID NO: 34334 - DNA, 922 bp, Artificial sequence
  DNA replication origin
ctgggagaggcaccgggagcctcctctggcccgaggagcccccgcctcgtgcgggtgacacagcctgtttgctgcccggcctgggtcataatcacccctttatgcttcctggaccgcgtgggcacacaaagccggctcccagatcgcgtgacccatgccccggcgcctggttggaatgagtgcccactcgccccccattagcaccgcgggggagcccccagaggcggccagcgggctctaccagtcccagagagagttgtccagagatctcgcagtggccagagaaagacacagtcacaagattaaacgtgggctctagacccaagtcccaccccagctgggggccttggctgagtccctgtttttctgtgagcctcagtttcctcatctgtaaaagtcaagcgcctgcctctgaccagctgccgtgagctagtggtgggcagtgcagcccctgagagccaggtggggcgggcagagaccctccctgagccccacatgggttcagcgtccagcggtcactccctctccttctccctagccctggctcagcctcgctggccaccatgggctgccatgcttttcctaacagccgtgtcatttactgggagcttgcagattactgcacctgacttaatttccctttcttggcagtggcaaggctggtggcccaggctgccttttgcaagaggacatggtggagggttggcctggcaccaacctggccatttccctccctgcccagggccacgtagggctcctggctgctctgtgggtctagtctatgtgcacctctctgtcctcatctctccccctctccctcctaggacctctcagtgctgcccccttgctcttcctcatgctgtttgtagtgcagagacacccttgcccccaattcccattcaccttttggtcctcagccaat

SEQ ID NO: 34335 - DNA, 1525 bp, Artificial sequence
  DNA replication origin
ggggtgcatggcaggaatccctgctcttagccacccccgaaaatcgcaggaagtttacctccatccatttgtttccgctcctctcgggcctgtggaccccacgttgcctctgtgctttgttggggggctttaagaaactggggggcttggcctcagggaggggcctgtggtgttgtcttctgagacggtcagggcagctcgtacctttcttttacccattcccgtccctgggctctaagccgttccaggacccaagtactgagctgacagagtttggtgaccctccccaaggggcttcctgcagaacccaggctggcctcagctgtctgttccttccagagcctcacccccaccctttaagtctctgccagaccccctagggtggatgcgaggctgtccccgtctcggtctccattgcctggggtggtctctgtctatggtctcagtttctacctctgaaacccaggtgacgccagggatgctgtggataaagtgccaggtggagctggttatgcagcaggcatccagtgcatgcaggggctttgccacgttcctggggtgggaaaagggcttccatccagggggttgacagacccacagtgggagcacagctgtgatggggtagctcagaatgggtcttgatccaccctggggcatccaggagggcttcttggaagaggtgacagctcagctgagccctgaggacaagtatgagggctgagatttgatgaggatgtgaaagggtatgctgggtggaaggaacagtgtgtgtaaatacccctgtgggagccaggggccacaagtgggggggatcaaggtgtcaagggaagcctggcatggggggttgtggcgtgatgaggtcagcagaggccgggctggcagctctggaggctgaggtagcagtctgagttttaatacgtgttgatgggagccatggagggttttagagcagaggaggaacggggctcagcttggagtggaggcatctcgtggctgcagcttacaggatgaactgaccatgggccagctggggaagggtgtgccaggtgggggacctgcatgcgaagaggctcagagacctgaggcagtgtattctgagaactgcaggacctttcgggaagagggggtagggaagacgatggatgcagtcacatcaagaagggcccagagcagcgagcacaggagctgggagcccccgtgggtgtgtgagcagaagcaggggtacccccagatcttggcgtctcaagttgttccatgaagccagcatgggggacacactgacgggcaattttggcagcctgggcgcccagaggatgtggactctgggctcgactgagagccgggctctggcctcaaatcctaacccagcccagccccctcctccatgcaggacccttggtgagcctcggtttcctaatccgttaaacagcagaaaacacagagaacatttaatggggctcagcaccccagaggcacccagtggactttaatgatttccctctccagggctgggcctggttccctg

SEQ ID NO: 34336 - DNA, 948 bp, Artificial sequence
  DNA replication origin
gagctccccaggccgaggcctctcccgagtcttcgctgcgcgccgcgctccgggcggaccgagggacgcggggagcggctgcggcgggccctgtggaggcctcgcggggcctgggcccgatctccgagccgcggggtgagtgcgcccgggacccccttccaccccgaggcccgggccgccccgggctttgtctctcttgtcgcgccccctccaggctccgaggctggggaccacgggggtccccacagcccagcgcgggcctgaccgtgccggccgccctccagggccagcttgggcctgctgctgcctggcgcccccccattcaggcccgtcgcttgcactttggaaaactccagaccgttatgctccgcagggtcccctcccccgcctggcccccagcccgacctcctccccccaccccctctcctcccccacctcccgggggcggagccaggcgcggggcagccttcgctgccagcccgggggagctgtgactggggacttcgcagaaggcggaggaggcaacaggaccgcagagggggcaggtagcggtggggggtgcatggcaggaatccctgctcttagccacccccgaaaatcgcaggaagtttacctccatccatttgtttccgctcctctcgggcctgtggaccccacgttgcctctgtgctttgttggggggctttaagaaactggggggcttggcctcagggaggggcctgtggtgttgtcttctgagacggtcagggcagctcgtacctttcttttacccattcccgtccctgggctctaagccgttccaggacccaagtactgagctgacagagtttggtgaccctccccaaggggcttcctgcagaacccaggctggcctcagctgtctgttccttccagagcctcacccccaccctttaagtctctgccagaccccctagggtggatgcgagg

SEQ ID NO: 34337 - DNA, 2356 bp, Artificial sequence
  DNA replication origin
ccaaagtgcaagcgacgggcctgaatgggggggcgccaggcagcagcaggcccaagctggccctggagggcggccggcacggtcaggcccgcgctgggctgtggggacccccgtggtccccagcctcggagcctggagggggcgcgacaagagagacaaagcccggggcggcccgggcctcggggtggaagggggtcccgggcgcactcaccccgcggctcggagatcgggcccaggccccgcgaggcctccacagggcccgccgcagccgctccccgcgtccctcggtccgcccggagcgcggcgcgcagcgaagactcgggagaggcctcggcctggggagctcggcctgggggcggggcaaggggcggggctgtagggggcggggttgcagtgggcggggctgcaggggacgggccccgaggagggggattggggggcagggcggggccccggccggaagtggggcggggggaccagaggggagccccatctggaggcgcggagagcctccgcaggagtccatgaaacactgagcgaaggggcgccccagggagggcacgacccaagacccctccctcccgaagacgtctcacggggagcctctacactgctcctcgcttccccagctctgatcgtagccatggcaacgcatgaggaggctggatgccggacagggcggcggagggctccccaaacacacccaactacaggaggtcggagaaggggcagagttcccctcccagtctgggtgggaccggaggcacggtgatgggggcggggggcgtcccctcttccccctcttagaccagagggtaggggagaggtgcgggcgcagaggcttccctcccgctgggggtccaggggaatgaatggggggacaccgtggcagaggcccccaccctcgccacaagcctgaggagggggcggagagcacagggccagattggaaacagatggggccgccgtgccaggcccgcgacaccggagcagagggagaggaggagggagagggaggggcagacctgtccgggcggccaatccgagccagcgttgcgcccggggtgcgggtttgaaaactccaccggaggggcccggaatgtagaagcccagcgggacctgggggtctggggacgggacaggggcagaggccgggatggagacccaagggctcccgcgtctgctcccatccctggaaaaaacgcctctcttcccagcattcgcgctgaggacgaagcccgaacgccaacgccaacgggatgtcctgggcgctcagctgccatcagctgtgcttcctcaggccaccggccacggctctaggaggcagaccccaccatcacccccattctgcaaagaacggagccgagaaagagagagaaacggctgcccacggccgggaagagcaggaattggaaccagggtttgggtccagaggaggagctctcaccacagcgctgctggaggcctggggcccccggaactgaggatatatcatgaataatttcaagccccttgggtttatctaggtacagggccatcctgaagacagacgccccactctctagaagccattactcagtggggcaaaggacgtgggctttgatgggagacacacaggcggctgtgagagcccagcagaaacaattccgctcccacggctcccgtccatgccctcccactgctacctcagtggctggctcccatctccttcaaacatcgaataaatgcctccctcactgggggataccacactgcccccttcccttaccatgcctcagtttccctcctctgcaaaatggagcatggaatcgccccgccccatctccaacaataggtggcctagtccacaaagcaccatgcacagtaggtggtctgtgagtgtctgcacacaggctccctgcctgcccctttgacacagagcacacaggaggtgctaaacacaggatgccgtgacgtcccccgtcccacgcagccccatcctcgacgaggtacacagtaggtgcttcatggaggaggctgcctggtgccccagcatcaccaaaggcacacaggaggttccctgtgtcaatgtaggcgtaggagcaaccagcgtgacctccccaacttggctgggcacacagtgggccctcaggagcagagtaggcaccttgcttgtatctgtggcaaggcacggggctcatacagactcgagtttgaatccagggatgccccgtgtgtcaagaaagcacccgtacctctcgggccgacagtttccccatctgccacataagccaagcactgaacaggtgctcaatgaatccacactgtcaggaggcttggggctgcatgacctgcagcatacaggcctggctctggg

SEQ ID NO: 34338 - DNA, 1032 bp, Artificial sequence
  DNA replication origin
ttttacatttttttagagatagagtctcgctctgtcgcccaggctggactgcagtggcaccatcctagctcactgcagcctcaacttcctggcctcaagcgatgcttccgccctcagcctcccaagtagctggaaccacagtcatgcgccaccaggcccagctaatttttaaaagtttttgtagagatgatgggctatattgcccaggctggtctcaaactcctggcctcaggcgatcctccctcctcatcctacaaccctgaacccaatcatcctcagggcccttaccaccatctgacccacagtggatttgatttcttttgtttctcatgtgtcaccctctttagagcatccacaccctgagggcagggatctttgtcagtcttggtcactgtgtgtctaggattgtgcctggcatcggggcttggaaatgtttgtttagaaaagggtaggctgggcttaaccttattacgggctcatgtctgtgatcccagcactttgggaggctgaggcaggaggttcacttgagtctaggagttcgagaccagtcggggcaacatggggagatcccatgtctacaaaaaaatccaaaaattagccagacgtggtggcatgtgcctgtagtccaagctactcaggaggctgaggtgggaggatcacttgagcccaggaggttgagcccaggaggttgaggctagagtgagccatgatggtgccactgcactccagcctgagcaacagagcgagaccctgtcttgaaaaaagggtaggtgaagatgcctgctttatgacaagggcacacacagtgtggcctttggaggagaataaggtcggaggggctctcctgggtgaggctgggcctgattgtgcaaatgtttgctgagaacctcctttgtactgtggacctgtgctaggtgctggggacactgggtgaccgagacaaatcctgctctgcctcctgaggtcacagtctggtgggagaggcagacccggggactaggcgcatgtagggctctgtgctgatggggccac

SEQ ID NO: 34339 - DNA, 914 bp, Artificial sequence
  DNA replication origin
cgatctcagctcactgcaacctccgcctcccaggttcaagcgattctcctgcctcagccccgagtagctgggattacaggtgcgcaccaccatgcccggctaatttttgtatttttagtagagatggggtttcaccgtgttggccaggttggtctcaaactcctgacctcagaagatccacccatcttggcctcccaaagtgctaggattacaggcgtgagccaccacacccagccactagtggttcttgtatttgataactcagacccagacagtgagtaaagacagagaatttcaggtgacagtaaaataatgggtaatgggtgatgggtgctgcttgagccaggtggtcagccagggcatttctgaggaggtgatccttgagggagaatggaagggtgagaagaaaagtgacaagaaaatgtagaggaacagtgttccaggcagaggcatagcctgtgcaaaggccctgaggcaggactgcacttggggtgctggaggaacagcgaggaggcccatgtagctggagcagagtgagggggagagagggaggaatggagggcagggaggagatggagcaggtcatgcagggccttgtgggccaccaggaggacttgggctttgaccctgagggaggtgggagccatggagggctgtgggcagaggagggacgggacctgactcaggtgcacaccggcaccatgtagtgggtgctgtggggaggacagactggagggcgagggtgggaggctggggaccagggcagaggtgactgtgctggtccgagcaggcaatgatcaggctggatgggttgggaagggaatatggagaaagatggacaaagtgagtagaaatttaggagacaaacgtgagagtatttccagaccaacaccatatggggtgagggaggaaaa

SEQ ID NO: 34340 - DNA, 983 bp, Artificial sequence
  DNA replication origin
ctttgggaggccgaggtgggcagatcacttgaggtcaggagtttgaaaccagcctggccaacatggtgaaaccctgtctctactaaaaatacaaaaattagctgggtatggtggtgggcgcctgtaatcccagctactcggtaggctgaggcaggagaattgcttgaacgggggaagcggaggttgtagtgagccgagattgcgccactgcagtccagcctgggtgatagagtaagactccatctcaaaaaaaaaaaaaaaaagaaaagaaaaaagctagaggaattggttggtggcagggaggggctgttttagctacagaatcaagacaggcctcacagaagaggtgacatttcagtaagaccaacaggaataagagaatgatgtttgctgacatctgaggggagggtgttccaggcagagggcacagcccgtgcaaaggccctgaggcaggaccgcacctggcatgttggaggaacagcgaggaggcctgtgtggctggagcagagtgaggagggggaggaggggaggggagagcagggagaggacagagcaggttgtgcaggcccttgtggggcaccaggaggacttgggcgtttactctgagggaggtgggagccagggagggctatgggcaaaggaggaaccagccctgaccgacgtgttcacaggcgacccctggctgttgcagaaaggacagactgtgggggatgagtgcagacgctgggggaccagagcagaggggacggcacagatccaggccagggatgatgggggtggaccaggcaggggcagaggaggggttgtattctagaaggattttgcagaagggttggctggcttctccaagtggttggctgcagggtagggttgagatgagtcaagaacgactcccaggcctctgtcctgaacatcggtaaagacggagaagatgagctgaggtggcgaagatggtgagagaggcaggcatggaaacgccccca

SEQ ID NO: 34341 - DNA, 1713 bp, Artificial sequence
  DNA replication origin
tctgtcgccacctcacgcagacttcagaggctctcaaggtttcctggagagggggaaatcgtccccggagctgacctgccaaccagtagcaccctccagcgcctcagccgggccacgccaaaatgacctgtcacccatctcccgcggggagtggggagcgggccagtccaccgcctcttgggacggcatctctggacggccactgacagtaccagtctctgtcaccccctggggggttaggggcaatgtcatcggccagggtggcagaaatagaaaagtgcgtgagctcaccaggcagcctgggtctcctgcgacgttttgtttgcctgagcccaattagaacaactctcaggatgatggagtatggcgggcggtggcccccagggggctgggaggcctagcccccatgcagaagtgcaccgtcatgatgagggtgtcccccgggcctggggaacagggcaggaccctgcttcccggagggaaataatgaagactccgccagcctgccagccagaaagagatgccccacggaaggctttgtggagggcagcgggggggtaggggagggatgcccaggtggggactcagtcaggcccaagctggggggctgtgggatttgagggcgggaagcagccgcccccagccccagctgcctgccttccaccgccaaaatatcagctggcaaagaaagaagagcagagggacagaaggcaggcgcgattggcagggggaggggggcacaaaggaagggaccctgggagggggaggggacttatgcaaatggcagattcgaccaagtccctgggccattaataaacgctccagcagctgccgctggtatcgcaggagcagaggagcgggatggcttccttctcccgggcgaaaggcggcagaaagagggaagaagggcgccccagacaaagaggcgccgtcaccctctgcaccccaaggacagcagcgatagggggccacccagaggaggccagaatcccagcagccaaagtccgggtggtggcggacgggagcccggagcgtgtgggtccctgtccttgggaccctaggggtctcttcctgcctcctccggcttctaggtatcatccctgctgctcagccgggactccgacacctcggacacccgcttcactagccgcggctgccgggatgtgtttttagggtctcggccagaggcaggaggaccccatgctcagaagggggctcccctagattgtgacggggggggacaggggaatcccagctgagcccagaagggggaggcaaggcacccccaatgaggctctgggaggtttgttaatttgggggaatgaggtcccaggaggtggctggatttgaggaagggttgcagaggaaggggcgttcttggaagctgcatatttagggagacgagaagacgatttgagactggggaaagagggtcaaccgaagaaggaggtcccagatttggggcggggggtgtggctgaaaaaaagattcccagtttgtgggaaaggttccctgatttgaggattctggagagaaagcggccgaaggggagttccccaatttgggaagggggggaattggtgggaaatgtccaggatttgtagggggaggtccgaaggggaggatcttaattttaggagagattcccataaagagaggtgaacttggccgcaacctggccgaaccctcgcacccacggcgcgggcactctaa

SEQ ID NO: 34342 - DNA, 1289 bp, Artificial sequence
  DNA replication origin
gggattacaggcatgagtcaccgggcccggcctcttttctcttattattccatcttcaggcaccaatggcagccaggctgccacattatagcaattcatcatcacaccctccttaggagcaggggctaccttgccccattttacagatgagagctgagatccagaggcaaatccattctacagatggggaaagtgaggctccgggcctcacacagcaaatcagtgttttagctgggttccaactgtggctcgtcctgactccagggaagcaggggatggtaattaggtgagacctgtgtaaagtgcttactctataagaagtgctccatcatccattcattcatgtgttcaacctacaatagggatctctggagccacactgtagtgtaactagaataaaaacgggataatgggaccaggcgcggtggctcacgcctgtaatcccagcactttgggaggccgaggtggacggatcactgaggtcaggagttcaagaccagcctggccaacatggtgaaacactgtctctaacaaaaatacaaaaattagccaggcgtggtgacagcacgcctgtaattccagctactccggaggctgagacaggagaatagcttgaatccaggaggcggaggttacagtgagccgcgatcacgccactgcattccagcctgggcgacagagtgagactccgactcaaaaccaaacaaacaacaacaacaacaacaaaccgggataatgggatagagtggagtggggcgtggctggtagctgttgtcagggagggcttctcccaggcgctgcttatttgagcagaaattggaaagatgagaaggggaagttcttggatgctcaagttagaggaactgtaagaagctggctgaggcgggaggatcacccgagcccaactactcaggaggctgaggcgggaggatcacctgagcccaggagtttgaagctgcagtgagctatgatcataccactgtactgaggcccaggtggcagaccccatctctgaaaaagcaaagaaggagcagctggtttttctggatcattgacatggtgggggggaggggacagggtagtgggcgctaatgtgaaacggcgagctgcagagaggaggcgggattttattccaagggtactggggagccgtggcacagtttagggcagcgcacagaaagtgccatgccctttgcacccaggacgctggggctcccgcacggacagtagccccaggggcccttcccgccgccgccgcagccgccaccaccaccaccaccccagccgcc

SEQ ID NO: 34343 - DNA, 1711 bp, Artificial sequence
  DNA replication origin
aggagggaggatcgctggagcccaggagtatgaggctgcagtgagctatgatgacaccactgcacttcagcctgggcaacaggaggagactctgtctaaaagacaaaaatacacaagtggccgggcactgtggctcacacttgtaatcccagcacttggggaggctgaggcgggtggatcacggggtctggagactgaaaccaacctggccaacgcggtgaaaccccgtctctactaaaaatgcgaacaattagccgggcgtggtggtgggcgcctgtagtcccagctactggggaggctgaggcaggagaatggcgtgaacccgggaggcggagcttgcagtgagccgagatggcgccactgcactccagcctgggcgacagagcgagactccgtctcaaaaacaaaaacaaaaacaagaaaaccacacacacaagtaaaatatacagggggtcagatggtggtaagagctaagggtgaggggcggggggtggggtgggctggaaacaagcagtaaaggagaacagactctgacggagataaatgtggggaagtggccaggggaggtctctgtgagaagcgccatttcaatagagaccaaaggaggtggaggtgggggagggagatagaaggcacagcccacgcggaagccctgaggcaggaccccacctggtgcgttggagaaacattgaggaaaaccctgtggctggagcacagtgagcaagggaaagagacggaggaggaggtgtcaaggcaggtcacacagagccttgtgggccgcagagaggacttgctttttgactctgagggaggtgacagccatggagggctgtgggcagaagagggacaggacctgactcaggtgctcacaggcgccctctggctgctgaggggggaacggtctgatgggttagtgagcaggggaggtgaggaccagggcagaagcaactgtactggtccaggcaggcaatgatggggctggacctggggatgtaaaagaggggcgagaagtaggcaggttgtgaatagatttgaaggcagagccaacaagattttctaaaggactgatggtgaaatgtgaggaaaagagttgacttgagattgattccagggtttctgacttgagccccttggatgttagaggtgcaacctattagtatgagtttggggaggatgaaaatggatgaataaggatggatggatggatggatggatggatggatggaagagtgggtgggtggacgtgttacggatggataatagatgatgaatgaatgaattatggatggatggataagtgagcgggttgatgtgttatagatggatatagatgatgaatgaatgaataaattatggatggatgggtggatggatggatgagtgagtggttgggtggatcggttatggataataagtgatggatggatgagtgaatggatggatagatgaataaatgggtgacggatggatggatggatggatggatgaatatataggtaggtgggtgggtgagtggttgggttaatgggtcatggatggataatagataatggatggataaatggatggatggggatgggtggatgaatagatggatgatggatgggtgtatggagggatggatgggtgtatggagggatggatgagtggatgaatggatggttgaatgagtgggtgaatgaatggttgggtagatatattatggatggat

SEQ ID NO: 34344 - DNA, 935 bp, Artificial sequence
  DNA replication origin
aaagaaggaaggaagaaagaaagaagaaagaaagaaagaaggaaggaagaaaaaaagaagaaagaaagaaagagaaaagaaaagaaagaaagaaaaattagctaggcgtggtggcacacacctgtagccccagctactctggaggctgaggtgggtggatcacctgagcctggggtggttgagactgaagtgagccgtgattgcaccactgcactacagcctaggtgacagagtgagaccctgtcttggaaaaggaagggaaggggaggggaggcgaggggaggggaggggaagcgaggggaggggaggggaggcgaggggaggggaggggaggggagatggggaggggaggggagtcggggaggggaggggaatcgggcaggggaggggaggcaaggggaggggaggggaagggaggggaagggagggaagggaagggaaaagagaaaggacaagggctcaccctggttgctgtaggaagggtaaattggaagaggagagaacagaggccatgagaccagggaggaggtgatccctgttgtctagagctgaatgtaaagtggactgaagggatcagaggccatgaaaatggaaaggagcggatggatgataggaatgggcagaatgtgggtactgaccattgatgggtgacaatgagggaggagaggcagctcacgcccaggtctttgagcaaatgagcctcattctagcaaatgttgtcttctgatttggagcacagaaaccagctcaggtttagggtcacaggtgtgagagccatccctaaaactgcaggaataaatgcgtctgcctagagaaagatacaacagggacctgtgagcaagaaaccaacatttgggccagcatgatggctcacacctataatcccagcactttgggggaggccgaggtgggtggatcacctgaggtcaggagtt

SEQ ID NO: 34345 - DNA, 1189 bp, Artificial sequence
  DNA replication origin
cagaattccagggagcgcgcatggtccacggacatcctcgaagcacccacaagtggtgggggggagggctccatgtctttgagcctcagttttccctgtgtgaaatggggtagataaaagcctccacatcccaggactgctgtgaagatccattcaatcgaggaacaagcacaatcacttgcccatacggggtgctggggatacggcaccaccgagttgggcccaggctccacggtgaggtctggtggggaaaaacagatacagcgggtcatttcaaaagaccatacaagcaaactaaaaaaaaatgacgaaaataaaaacaagggcatgaggtggagagtgagttggatgttactttagaccagcaatcaaggagggctttcctgaggaggtgatgtttaaggagaataaaaagaagctgtggggaaaactgggagaagagttccaggtggagggaaccagcccgtgcaaaggtcccgaggcagcgctaagtctgacagaacagcgaggaggcctgtgtggctggagcagagtgaggagggggagagagggaggaggggagcagagggtggggaagggatggggcaggtagtgcagggctaaaaagcacttcgtaaggacttgggctttgaccccaagggagatggaagccatggagggctgtgggtagaggagggatggacgctgactcataggaggttcataggagctctctggctgcttgctgtggggaggagagactgcggggtgggagccaggtaccagaatggaggtgaccctgctcatccagataagcagcgatggtgccaggtcaaggctggaaccacaggaggagtgaggagaggacaagaccaaggtctatttggagccaacagatttcattctagaagtattgggttgtgggggaggtggatcggtcgttcctgcacaggactggacccacagtggcaggaggggtaaacagtagtgggatagttgggtggtcttttccttcccccactgcctactccagtcctctacattcaaggccaaatgaatgagtgagtcacctccagctgagagtggctgggagaggtatacactaggcgctgactcaaacctcccactctggcgtctgtactcctgagtcatccacaccccctgctcctcactgtctcaaagccagagggccaagtgtaccccccaagcg

SEQ ID NO: 34346 - DNA, 1718 bp, Artificial sequence
  DNA replication origin
ccgcaggtcctgcgaggcggcctcgctcacgaacactgaggggatggcgatctggcccctcaagtcctcgtagacgtgggtcatgctcacgaggtcgtcggagtggacgttgtgcacgatggccgcctcgaagccggcgcgctgggcgttcagcaccttgaggtcgaaggtgcagtcgtagcggcggatcagcacgatggcgcccagagagcggttgcccagtcgcggggcctcgatgggatggcacgcgttggctggcttgacctccatcaggtagccccgtatgccctcgggggccagggggacgccgaacagcgccggcagatccgcaaagtccaccgagctcgagttgtcttccagcacggcccgtaccactgcctgcgcgggcacctggagcagcgacaagaccagcaaggctttgactgccacgagggctcggcccggccgtggccaccccatggtcacccgcttcgctgtctgtgtgctgctaggtcccactggaggcggcaggcatgaggcctttgggcatctccggggtctcccagggggcctgtggccaggacgcgagggcagttgagttggaatgaccgcgtggctcagaggcagtgacgcggccactgggaccctgctggctctaggcattaagtgctccggacggcagagcggcatgcgtcgtgtctttgaaggccggtctcaggaggtgctggcgcaggtggcctttctggcagatgacatggagaccaggagtcaccagggttctagatgcccccagcttctgtgacatcgccctgctacattctgtcccaggagctgccagctgcctgggcctgtggccaatggatcattcctaggtctgtgatttgccggtacccgggcaagctttgagataacttcttgaaggctcagggtatctttggacccaaggaggcccagggatgcttcaaaagggctgccggcccccagcagtgcagattcagccctcactgtgcgaagacgctaccagcatcagcttctggaggttcctagcaacacactgtagaaggttcaatgttacccttgtctgagactccaagagtgacccagacttgttcaagccacgcccccctacaatgagatcagtgcttaaaacccaaattcctgaccccctgtcaccatccctcactctgctccagccacacagatctccttgctgttcctccaacacaccaggcaggatcctgccccagggcctttgcatgggctgggcctcctgcctggaaagccctttctctccgtagctggctcttttatccggactcaggtctgagtccatatatcctcagagccctcctggacttgatttggagggagagtcaagtgccagggtcagggtggggctggtgggggtcagtggtcccaagtccgcaccgccaggttggcctccaggcttgcaccagcttcattctctctccctatagcattgcctctccagctgggtctccaactgtgccccctgcctgagcttcagccctgggcatcagcctcacctcctccccagtccccatcccccaaatttcacaccctcaatctgtctgcagcccactcaagtcggatttctgtctctgccattcataagctgtatgacatcagctaaattccttagcctctctgggcctcagcttccagacctgtaacatagtctttcccatgctctaaactctcccatggctccccattgc

SEQ ID NO: 34347 - DNA, 1247 bp, Artificial sequence
  DNA replication origin
tccccgaatgggttttgagcggctaatgcggcccccgctgggcaggagatggagcgcctggcagggcctcccaggctagagcatttgaggcccacccactgtagccggggccttaacccgctcactctcactgctgggccactgggaaacttccagtcctggggtctctgaggggagcaaggggggcaagaccctcccaccttctggatctggctgagccagcgtgggtcagtgcagctgaggctaccgggtgggctttaggatttagaggtagccgagctgggagggattcagcctcctccaggggcggtaaaagaatctgacactcagagtcaggcagtgtctacagtctcagccgagagtcagggctcaggctgggattggggctcagcctggggttggggctctgttgatattagggctcaggctgggattggggctcagcctggggttggggctctgtcgatattagggctcgggctgggattgggtctcagcctggggttggggctctgtcgatattagggctcgggctgggattgggtctcagcctggggttggggctctgtcgatattagggctcgggctgggattggggctcagcctggggttggggctctgtcgatattagggctcgggctgggattggggctcagcctggggttggggctctgtcgatattagggctcgggctgggattggggctcagcctggggttggggctctgtcgatattagggctcgggctgggattggggctcagcctggggttggggctctgtcgatattagggctcgggctgggattggggctcagcctggggttggggctctgtcgatattagggctcgggctgggattggggctcagcctggggttggggctctgtcgatattagggctcaggccagggtcagcagggctcaggcagggttagtccaagtctggagctcagtctgcggttggggctgaccctggttgaccctggctcaacccagggtctgagattcagtccaagctcagccaggatttgggttcagtccatggttaggatcaggtcaggtccgggactcggctgcagtcagcccagggctggggctgcacctggtttagacttatctgaaagtgggcactgggtcggtgtttgttgagtgaataagcaactccactagtgatttctacaaggtctgcagggatggagccctaatgctggaatttcagatacagtgatggccactacggttcctgta

SEQ ID NO: 34348 - DNA, 1515 bp, Artificial sequence
  DNA replication origin
gagatggagggataggggatgaaaggtggatgggtgggggatgggagggtgtgtgtgtgtgtgtgtgtgtgtgtgtgtgtgtgcgtgtgtatgaatggatagatggatgggtggatgaatgagtgtgtgatggatggatggatgggtggatgggtggataaatgagtagatggttaggtgggtgggtggtgaatggatgaatggatgggtaggtgggtggatggatggatggatggatggatggaaggatggatggataaatggatggatgggtggataaatgagtagatggttaggtgggtgggtggtgaatggatgagtggatgggtaggtgggcggatggatggatggatggatggaaggatggatggatggatggataaatggatggatggataaatggatggatggatggatggatggataaatggatggatggataaatggatggatggataaatggatgaatggatggatggatagatgggtagatgcatgcatgaatggataaatggatgggtaggtggataggtgaatgggtgcatggatggatggatggatagatggatggatggatggatggatggatggatagctgcatggatggatgggtgggtggtgggtggatgggtgaatggatggatgatggatggatgagtgaatggttgggtgtgttgatggacaggtggatggctgggttgatggatggatgagtggatgaatggatggtgagtggatggatgggtggatggatggatggtttttgggtaggtggttgagtggaggtaaggatggataggcctgtaggtagatggtggaggaaagggtagatgagtgaatggggattgtaggggtgggtatatgggtgggtgtgtaggtgagtgaaagggggatgggatatgaaggttgggggatggaaggcggacgatggggaatgggtgggcgggtatatgggtgagtgtatgggggtttgggaaatggaaggaaggatggatgggtaggtgttggctggatgggtgaaggatggatccgtgatggagaaggcagatacgtgaatggtcggatgatggagaatggagccccactttgatgagctgggcttggctggctgtggatcctggtgaaaccctcaactggggcctgtcaagtggctcggagcattaagcagactccatgtgttgaagttgggggagggggcggatagatgcgactcaggcctcagcctctctctgcaggactcagcttgtcttcagcagggaagcctggggagccaggcctgccagtgggagttcactcccccctcgccaccctgcaaactcatgttcctgctaccaacagcaaactgcatccccctaacgagggccccacttttagctgggaatgtgcccccttccaccctcacttgattcagtcctgctgcccgccgattcaattattccactgctggggtggctggcaattttcagttggggttgaacgctgtctcatatctgtatgacttttaacagcatggac

SEQ ID NO: 34349 - DNA, 1755 bp, Artificial sequence
  DNA replication origin
taaaaataaataaataaataaataaaatacagcaagccacgtgctaaaaacagtgccaagtgtcacgtgatgctacttttcagctattatgattcaccgatcgcatctgccacgggacatcaggcctcggtgggctcacagggaaggtggcggaagagctggcctcatcccaggtctgagggtcgaccctgaaccacgagagagagggagagagaaaaaggagtcccaaggctggcacacagctgtcctgagctggcttccccactcccgcttcccaccaccctgcctggccggtgcctgcattttcacccttagggctgcctccatggcacctgcaccagcccctgggaggagatgctggagctgcccagagctgggggcccgagtggaacacaagcccccatcctccactcttccccagtcaccctggcagcggggaggggaggggaagggaggggaggccaaggttacagagcccctccccctgcctggctataattagccccgagatgaattaaacatgaggctgggcttgtctgcagcagcggaggcagcagcttcgtccctgacactataattgttcccgggcagcaggcagaggacagggctgatgtgtgaggctgggggaggtggggacacactcactgggcacggctgtgggaacacagctgtgtggggcctgtggacgtctttggcaggtacacgcgtgtgcccgcatgcacatgtgtgtggtcctcaggactctccaggcacgagggggaaggggtggtccttgggcctggagaaggctcaaggctcaggaaccccgggatgaaggtagcagccccacaaggggcatggagggggcactctccagccccatctccagcagccctgcggtgggggtgggcggccaccattaaagctgccaacagccagcacggtggttcacgcctgtaatcccagtactttgggaggctgaggagggaggatcacttgaggccaggagttcaggaacagcctgggtaacatagcaagaccccatttctacaagaagtttaaacattaactgggtgtggtggcacgcacctgtaatcccagctacttaggaggctaaggcaggaggaacacttgaccctgaaaggtggaggctgcagtgagccaagatcatgccactgcctgggagacagagtgagaccctgtctaaaaaaaaaaaaaaactgccaccatcaggattcacaccttcgtgggaagccaccattccaacctcccgtcacgaagtcccagactccctcatccacagcgctatcgggcactcgggcaccgtagctgtggttccagcattccggccgccaccagccactgtcatgctgatgggaacccatcagtccagtctgcagtgaacatgcctgtctggttctgtctctcccaggctgggagccccctcagggctgggtctctggaccccgcatggcccagctcaggtgggattcccataatgggggaacacttctggggtctttggagtttggggaggtggagaggctgtggatgagggaagcatcctttaggtctagaaacatctgcaaattgatggacatccttgggcctcctggtcatcatcttcccactccaaaaactattatccatccattttataagggagggaaactgaggctgggagagagccagtgacctgcccaagtggcacaacgaggaaggcacagagcctggaggtcttagtggctccattaagaccattagcagggccgggtg

SEQ ID NO: 34350 - DNA, 1177 bp, Artificial sequence
  DNA replication origin
aaggagaaagaggttgagggatagtgagggaggttggagaagagagtaaaaagaggccgcttaccggatttgaaattggtgggatgtttcctgggctggttggactgaggacctgaggtggtaggtggatctttctcacggagcaaagagcaggaggacaggggattgacctcccaagggaggtcccccgatccgagtcacggcaccaaatttcatgcgcgtctgtgtgaagagaccaccaaacaggctttgtgtgagaagcatggctgtttatttcacctgggtgcaggccggctgagtccgaaaagagagtcagcgaagggagatacgggtggggccgttttataggatttgggaaggtaatggaaaattacagtcaaagggggttgctctctggtgggcaggggtggatctcacaaagtacattctcaagggtggggagaattacaaagaaccttcttaagggtgggggagactacaaagtacattgatcagttagggtggggcaggaacaaatcacaatggtggaatgtcatcagttaaggctgtttttacttcttttgtggatcttcagttacttcaggccatctggatgtatacgtgccagtcacaggggatgcgatggcctggcctgggctcagaggcctgacagtaggtatctaataaatgctgtagctcacgcctttaatcccagtaatttgggaggccaaggcaggcatcactggagctcaggagttcaagaccagcccgggcaacatagtgaaaccctgtctctataaaaactacaaaaattagcctggtatggtgttgcacacctgtggtcccagctacttgggaggctggggtgggaggatcacttgggtccaggaggtggaggttgcagtaagccgacattgcaccattgcactccagcctgggttacagagccagatcctgtctcaaaaaaaaaaaaaaaaaaaaaaaaaaagctgcagaatctgtgagttgactgcaggcctcattctgtcccccacctagcaggataaaatggtgtgaggatcagcggcagactccctatctccaggcagatctgtctcccttagatgctgaaagatgccagatggtaaacgtgtctccattgtaagaactgatctaactgatcgtcagcttgaactactttcttttccttcagattccg

SEQ ID NO: 34351 - DNA, 698 bp, Artificial sequence
  DNA replication origin
ccagaaaaaagagtagagacacggagaaggggtggggggttctcgccctccagaaaagcagagaaggggttggggcacggaagtaagggattggggcacaaagaggtcagggtgtggaaataagggattggggtgcagagatataagaggttggggtgcggaaataagcgattgggggtttcttgccccctaggaaagcgggacttgccactgagggtgaaggagaaggggttgaggggtacttgcccctgccccaggaaagcgggacttgccactaagggtgaaggaccaaggcgggcgtccctgcgtggtctgacacccttgaaacgtgagtgtataatcagagaggcgtccctgcaatgattaaacaccaagggaaggctgccttcccagtccgtgaccggcgccggagttttgggttcacggataaaacatgtctcttttgtctctaccagaaaatgaaaggaattgaaattaagagaagggagagattgaaatgtggcgccaagattgaaaggagaaagaggttgagggatagtgagggaggttggagaagagagtaaaaagaggccgcttaccggatttgaaattggtgggatgtttcctgggctggttggactgaggacctgaggtggtaggtggatctttctcacggagcaaagagcaggaggacaggggattgacctcccaagggaggt

SEQ ID NO: 34352 - DNA, 1728 bp, Artificial sequence
  DNA replication origin
tagcctcggcaccccctccccaaagaccctccccaggggctgcgcaacgatgacgtggctgcaggtcagaggtgcaacggaggcccggcacactgccctgagggtctccacccggaattcccacaacgcactccctgcaatgccccgcgatgacctcccacagctaggcccagttccccacccccagatcctcgtcctcttggccagagttcttcagaaccccttccccgctgccccaagaccctatgcaagacgaggcatccggatttaaggggaagggggaaacagcccagggggtgggcacaggtgcctcctggggaggtatttgggggtggaaatggggcacagttggaggcctgagaaggagctaggatgtccgcatctccccgcttagtcattggagagttcggacacgactggctgcacccccagccagggctgttcactgcacaaagggcctgtgggggccccaaagaaggctaggtgctctctggctgggaaggagggaatctgagaagacttcctggaggagactgcaatcccaggtgtattggagctgcagagaagaggttgaaaagtgctccaggcagggggcacggcttgggcaaaggtgtggctgggaaaatgtcctgggcaagagcggaagtgcctctgagtgtctctcctgccccttctgtgcttctcttcttgcgatgccctctggctgcccatgggagctttccaaggtggcacagtgctttccactgaagacagggcacccagggccccaagaggggagcaacaacctcaaagtcacacagcagagctgaaaggctcaaggctccctcccgataggctgggcaggagcaaaaatgtcctaggtccttgtcagggactggggctccagcaggagtgtctgaagcagtgtgcatcagctggtcaggccagggtttcatggtccacctgggagcccagaccctggaacaacaggaggggaagggtaaacccgtttcaatccaggaccagggaagggtgaaacaccagttctccagccatttgtcctttccttttacctaacatccctgacacggacagtgatctgcagtcatcccctcctgtggatgtcccttgtgtcctttaagaggaacagggatggcccctggtgaatttggctgttttcttttttctttcttttttttgagacagagtcctgctctgtcgccaggctggagtgcaatggcgtgatttcggctcactgtaacctctgactcctgggttcaagcgattctcttggaacttggctgttttctgccacctgatggcagtcacaggaattgcaggcaaagagtgcagtaaagccaaatcaaagctcaatcctttattgtaaggagacaggtaacagagcccagagaggagaagcaattttcccaaggtcacccagcaagtcaggggcaacacggctctggtccacgtgttagtccaaaaagaaatgagacaccaaggccatgtccctaccctagaggccagaagcataagtgtatggagggggatgatggtcaataacatctgtctcttctcctctctgggcctcagtttccccatctatggtctccacaatctctaaggtcctttctctttctcaactactacaattacttacctggagtgagatctaggctcccgggaggcaggagaagtgccttccaaaagtgccctctaccccagcctattccttcagccagtacccag

SEQ ID NO: 34353 - DNA, 1371 bp, Artificial sequence
  DNA replication origin
tccttctctggtctctccctaccgccttatctttcccacagccccactccagtgtccgttacccacactcacacttggatatctgggtccccaaagaggtcccctggccaagacgaccctcaagtggggcgtcttctggcccaaggaggggtctgcagagaagggcgctggggccacgggaacagctcactgccggcctggggcagctctgggaaatgggtcgaggatggccgagaggtggtgaagatggtggggcctcgtctcagagcctgggaccacctccttggaagcattgaacaggagagggacgggggccatgtgaattaccctggattttatgggggtcacattcaccagccctctagaggcttgagtcaccgagcctgggttgatgttttgagggcaggagcctcagatgccaccccgttgcaggagtctggggctgcaatgggggcaggagaggccccctccccaggccctcttgagggaagatcttagcggggacggggaggctgagaggatgatgagggatggaggttcagagcttggggctaggagagggtgttctcggcagcgtaccttctatgaggtctgggggctggacgaccctcagacgtccagactgtaattatgcagtacagagtcagcatttattgtgtgcctactgtgtgccagactccatgctggacactgaaattcagcagtgacccagagagaccagatttcgccttcacagagcctagagccaaataatagcacaggagaatgtcaactcgcaattggcgctgtgggggatgcagggaaggtggagagggatcagtgactgggggacgcctctccggaaaggtgacatgtcaggctatgatgtggaggaggtggttaaacagagagtcagggaagggtgttccaggcagtaggaacagcctgtgcaaaggccctgaggcaggactgcacctggcatgttggaggaacagcgaggaggcccgtgtggctggagcaagggggagagagggaggaagggagggcagggaggggccagggcagttcatgcagggccttgcggactgcagggaggacttgggccttgactccgagggaggtgggagccatagagggctgtgggcagaggagggacgggacctgactcaatgctcacaggcaacccctggctgcagcggggagaacagactgtgatggggggagggctggagacaggagaccagggtgaggtcccagtgagccatgctggaggcagagaacagaagccttcagaggagacagttttggctgggcgcaatggttcacacctgcaatcccagcactttggggggccaaggtgggcggatcacctgaagtcaagagttcgagacc

SEQ ID NO: 34354 - DNA, 2004 bp, Artificial sequence
  DNA replication origin
gacgtctgagggtcgtccagcccccagacctcatagaaggtacgctgccgagaacaccctctcctagccccaagctctgaacctccatccctcatcatcctctcagcctccccgtccccgctaagatcttccctcaagagggcctggggagggggcctctcctgcccccattgcagccccagactcctgcaacggggtggcatctgaggctcctgccctcaaaacatcaacccaggctcggtgactcaagcctctagagggctggtgaatgtgacccccataaaatccagggtaattcacatggcccccgtccctctcctgttcaatgcttccaaggaggtggtcccaggctctgagacgaggccccaccatcttcaccacctctcggccatcctcgacccatttcccagagctgccccaggccggcagtgagctgttcccgtggccccagcgcccttctctgcagacccctccttgggccagaagacgccccacttgagggtcgtcttggccaggggacctctttggggacccagatatccaagtgtgagtgtgggtaacggacactggagtggggctgtgggaaagataaggcggtagggagagaccagagaaggaagagagagacagagcttcagagacagagaaaaacagcagagaaaaatgcagagacaccagagagataaagagacacagacacacatgttgagacacagcgagaaaaagagcagagaccaaaataacagagacagagacacagagagagaaatacacagcgggaagagacagaaatggacagagacacgcagagaaacagagagacaaaagagacacacagagagaaaaagagcagagacagaaatggagagagacagagaaagagagacagaaatggagagacacacagaggaaagaaagcagagaccaaaatgggcagagacacagagagagacagagacaaaagagacagagactcacagagacacagagagagatgcgcgcacacacagacagaactggacagggacacagagacagagacacagagagacagagagaaaaacagcagagacagagacaaatggacaaagagacagagagacagggagagagagacacacacatacacagacacagagaaaaacagagacaaaaatggacaaagagacaaaagagacagacacagagagacacaaggagaaaaacagcagagacagaaatgggcagagacacaaagagacaaaggggaagagagacagagacacacacacagaggaaaaaagcagagaccaaaatggggagacagagaccagagagggagacagaaaagagagagggagacagagatgagggagaaacagggaggaaaacagcagagagagaagtgggcagagacacagagtgacagagaaaagagagacagagacagagacaatcacaggcaaccaaatcatcagggaaagaaataaacagaggcagagatggagagagacacacagagaggaaaaaacagagaccaaaatggagagagagacagagacaaagacaaaagagagagaggtgaggagacaaagatgagagacgcagagataaaagagacagagacaagagacagaaacaagagggagacagagataagagatggagatgagacagccacaaaagagatgagagagacaaagatgaaagagacagagataaaagagagacacagacaaaagagagagatgaaagagacaaagagaggcacagagataagagtcagagacaagagacagaaagaagagggagagagatgagagacagagacaaaagaagaagagacagagatgagagacagagacgagagagtgacaaagatgagagtgacagagacaaaagagagagaggcagaaaaacagcagagacagaaacaggcagagaaacaggcacagacagagagcccgaaagcaagacctgacaccggcaaggccgggtcaggagagaggccgggcgggcagcgcg

SEQ ID NO: 34355 - DNA, 824 bp, Artificial sequence
  DNA replication origin
gaagcctcaggctctggaggtgggggaagccgtgggggagggaaggggagaaaaaagagggatggagagataaagacaccgagacacagaaaaagagagattcagggagaagagagacagagactgagacacagagtgaaacagacgcacacacacagggacgcaaatagacaaaagcagaaacagatgaacccaggacctgcacagatgtggatctgcacttggggcagccgggccctctactccatgtgcccactaggtggcgcccaagagccacgctctgcaacgcagccgacccggttgggcccctcctgccgcggaagcccccatctctctgcccgcccagcgtttcccccacgggcccaacaccacctttgtgggaggccctggaggcgcaggtggaggctggaatgggggcttcctcaagggtcgagggtctccagagcctcccaacccggcccccggtaggcgaaggccctggttgtgtctgtgcttctcttagagtgagtttgtattggtctcaggagtggacgtgcctgcttctgtcttggggtgtggatctggtgaatctccgtgtgtgaggcttaaggccgtgtgtctctctgtgtgcatctgtgtttgtcatggggcgtgtgtccgtgtgtgtctgtgtttgctctggggggcatgtgtctctgcgcatgtgactacgtgtctcatttttctcttgctacatatcatggctgtatttgccttgggtgtgtctgtgtctctgtgtgactgacttctcctcatgctgtgtacattttggtgtatccgggctggcgagtgacttgatgtgtgcc

SEQ ID NO: 34356 - DNA, 893 bp, Artificial sequence
  DNA replication origin
atcacttgagaccagcctggtcaacatggtgaaactccatctctactaaaaacacaaaaattagccaggtgtggtggtgcacgcctgtaatcccagctactcgggaggctgaggcaggagaatcacttgaatctgggaggtggaagttacagtgagctgagatcacaccactgcactccagtctgggcaacagagcgagactctgtattaaaaaatagatataattagccaggcacggtggctcatgtctgtaatcccagcactttgggaggctgaggtgggtggatcacctgaggtcaggagttcgagatcagcctggtcaacatggcaaaaccttgtctctactagaaatacaaaaattagcagggcatggtggcgcatgcctgtaatcccagctactcgggaggctgaggcaggagaatctcttgaacctgggaggtggaggttgcagtgagctgatgttgcaccactgcactccagcctgggcgacagagtgagagtccgttgggtatcacacccccactcactcagcccctggctgagtcatagcaggtggacactcatggggaccaagacgccgttgagggacgggacccaagagatgcggctataagtggggtgtgctgggtcactggagatgcctggcttgcttattgacgaagcctcaggctctggaggtgggggaagccgtgggggagggaaggggagaaaaaagagggatggagagataaagacaccgagacacagaaaaagagagattcagggagaagagagacagagactgagacacagagtgaaacagacgcacacacacagggacgcaaatagacaaaagcagaaacagatgaacccaggacctgcacagatgtggatctgcacttggggcagccggg

SEQ ID NO: 34357 - DNA, 1283 bp, Artificial sequence
  DNA replication origin
aggtgagtagagccccgatgccaagccctggggccactgtactgctgtgcaggcatagcggaccatttctagccaggcggccgcttgatcccagagaggtggcaaccaagtcagcacgtgtggcgggtatgcaagtgtgggttctggccagcgactagaagtacaaatatttagtcggacgtggtggctcatgcctgtaatcccagcactttgggaagctgaggtgggtggatcacaaggtcaggagttcaagaccagcctggccgacatggtgaaaccctgtctctactaaaaatacaaaaaattagccaggcatggtggcgagtgcctgtagtcccagctactcgggaggctgaggcaggagaatcgcttgaacccgggaggcggaggttgcagtgagtcgaggtcgcaccattgcactccagcctgggcaacaagagcaagactccgtctcaaaaaaaaaaaaaaaaaaaaaaagcgcaaatatttgattgttttgtaatgctcaagtttctgtcattttcaaatatgttgggcttgttcttcattgtatccggtagaaacctcatgtgtctcttcattgtccacttgctcagggagcctttgggtcttagtgcctgtggggtcccccaagaacccaaatggtggttgtcgtttagcccacatgtgccagggtcggggggatgggggagcccgggcttccccatgtttcaagtccgtgcttggtgggcacggggggctgaagaccacaagaatggtccctgagtctctgtggtgccatgcgggtgccccgtgcgtggtggcagggtgtgagttctgagaaagcagcagcctggtggagaggtgggaggtgggcggcagagtaatggcctgtaacagcaggcagcacccgcctgcttcctggctgctggctgctccgtgcagagttggttggccagggaggccggaattgtggccctgccagagcacaggggggctgacccacccgagggccctcctgttatcggaaaggaggcggcgcccaacttctcagggaagacagggtttggtgacgtcttagtggatcttgagcagagctgttgagggcagtaatgccagggtgccctggctcctggggcagctcaggtggggcagtgatgcagctgtaggggtgcgaggaggggagccagggagcagagggtcagtgaagcagggcccagcagggctgagactgcacccttcagtcctctctcagctccgccccacctgccaccctggggcctgcagtggacaggccttccgga

SEQ ID NO: 34358 - DNA, 1785 bp, Artificial sequence
  DNA replication origin
aatgttgccagctgtgctgcctttgcttttcttaaggtagctttgttaagtaaggtaaccccctgcacgcgcagctttagggaagcccggtgagcttttggatccattttttttttctgcttccaatacacacccagttttgggcaccgggctttctccttggaggctcacgcagggagttcagggcagcctcacctgtccccgcagggagcgcgagcagcgggagcgggagcaacgcctcgaggccttccatgagcggaaggagaaggcccggctacagcgggaacgcctgcagctcgagtgccagcgccagcggctggagcgggagcgcatggagcgggagcggctggagcgcgagcgcatgcgcgtggagcgtgagcgcaggaaggagcaggagcgcatccaccgcgagcgcgaggagctgcggcgccagcaggagcagctgcgttacgagcaggagcggcggcccgggcggaggccctacgacctggaccggtgagtcccgcccagagcgtgggcaggacggagaccagcgtggcagcggtgttcacccttccagcagaacagcggcttcccttccgtccctgtcggtggggagaatgaaatttgatatggagcatgcgccttggggaccccccgccgatctcactgcgctgctgcaggtttattagttcgctgtcctcaccggaggctgtgtagcatcttcctgaacttgagttattctgggaaacttgatggctgccacttgctgaagggtttgtgatgcttttcctctccacttacccgtggagcatagctgttctctgtcttgcgagacaaccgaacgcccgttaggcccaagttggccaccgctgactctgccggtctcatgtgtccttgtagacagagaggcagagcaggcgctgtggaaaaggaaattgcctctgatttagaaagtaggtttattggtctctagctaccccaggcggcttaattgacagtcacccttcaccccgctctccgtgagcctagttttctggtaaaaatcaggaagaagataattggatgccgtccagagctgtgtgtagttcactatcaccccatctaattctctttgcttttgcaagaaactcagagggagattcaggctcccgtggaaggcagggaaagtaaaagtgtggcaactcgaatgctattccagaagaatcaaatatttcttttcagttgctcatgaggggggatcaaggtaataacagcctcacgagacaatgagctcacagcagtgctccttttgggactgttggatgagaacacaagtgtgcctctcggctgttaatggcggttttaatttatcagatcaaagcaatgatgatcgaatgtttagagattagccctgcaggacattttaaacgatactgggtctggggagagagctcccctccccacctccacctcctccttttttcctcctcctctctcattaatggaatttgtattcttttaaaataaaaaccaacagacgagatgatgcctattggccagaaggaaagcgtgtggcaatggaggaccgatatcgtgcagactttccccggccagaccaccgctttcacgacttcgatcatcgagaccggggccagtaccaggaccacgccatcgacaggtcagtggtcttgtcccctcctttagctacagtcattgtgggcaccggggcatccagctgacctcgttctcagcccagtgcaggggttcctgtgtgctctgaagcctcgtttacttctgagatccacagtggatgactctggcctt

SEQ ID NO: 34359 - DNA, 2304 bp, Artificial sequence
  DNA replication origin
ctgtaatcccggcactttgggaggatgaagcagcagatcacttgagctcaggagtttgagaccagcctggacaatagggcgaaaccctgtctctacaaaaatagaaaaattagtcaggcatggtggtgtgcacctgtggtctcagctactgaggaggctgaggtgggaggatcacttgatcctgcagtgagctgtgactgagccactgtactccaggctggacaacagaacaagactgggtctcaaacccaaaaaacctacaaaaaataaattacggaagttggctattagtgttctgtaccttattaggagcactgttttgcattaaagcattttggcatattctctttatttatttgagacggagtcccgctctgtcacccaggctggagtacagtggcgcaatctcagctcactgccacctctgcttcccaggttcaagcgattcttctgcttcagcctcttaagtagctgggattacaggcatgcgccaccacgcctagctaatttttgtatttttagttgagacggggtttcaccatgttggtcaggctggtctcgaactcctgatgttgtgatccgcccaccttggcctcctgaaatgctgggattacaggtgtgagccactgcgcccggcctggcatattctatttagagctgtctgcctgagtcctgagccagcagttgagatgtgaaacatgtagtctgccctccagctgtccaaacagctggcctgactgctgtcccctctgaactaatggccacagtggccctgtgcggatgtgcccgtggctctgagaggcctaggtttgctttggattatgtgagtccttggctgtgctatgctagaagaactgtgcctgtaggttttctgaggcgtgggccaacctcttctcttccatgaatgccccttgacatctgaaagcaggattctggattaggcagtaaaatgcaaacttggagggaagcagcctatgcctgggcctctggtctggagaccacagccttccatctacaccatgtggggccagagaatcttagtctcatgcacacgtgcataatctccattgtttgtttgttgcaatcattttcctgacattaataaaccagttttggtaaacagagctccaagagtcaggatcgcaagtcagaaagcaaagaaaagagagacatcttgtcgtttgataaaatcaaagaacaaagggagagagagcgccagaggcagcgggaacgggagatccgcgaaacggagaggcggcggtgagtggagctgggtgaggctgtgggctggtggtttcctctcggggtggctgtccttctcccagctgtacttggagtgcgcagtctgtgtgcccgagagccagtgcctgggctggcgggtgtcgtgcttaacctgggtcctcgaggcaggggccagcacctgttcacacgtgagccgccagacatgccaggtggcatgaaagtcatcaaagggccaggtgcagtggctcacacctgtaatccgagcactttgggatgccagggccagaggatcccctgaagccaggagttcaagaccatcctaggcaatgtagcgagaccccacctctacaaaatatttaaaaattagctgggcatggtggcgtgcacttgtagtcccagctactcaggaggttgaggtgggaggattgctggagcccagaagctcaaggctgcagtgagctgtgatcacaacagtgcactgcagactgggtgacagagtgagaccctgtctcttaaaaagaagtcatcaaagccctttacagtatatggggtttggctatgttgccaggctgataactgctgggcccaagcgatcctcctgcgtcagcctccctaagtgctggattacaggctgagccttctgctggctcaaagtctattttcgcccctcctctgatgttggaccttggcccgtgtggaaggcccagccgtgtgtggctttgatgggatgggatggtgcctgggtgctgaggcctgtcttccctgttgaaacctttcacctaaggtcagaaactgcaagcagagtccagttgtcattttgccgcggctcccttctgggctgtggtcttgaaggaggcttgtccctctgccttgacattcggccttttcatgtcgggatgcccggcgttctcttgtcacttttcctcaaatattgctcagtaaagcaaaagctgtgctcacagcatttggaaaatgttctcgagcaaacctagaaatgttgccagctgtgctgcctttgcttttcttaaggtagctttgttaagtaaggtaaccccctgcacg

SEQ ID NO: 34360 - DNA, 1323 bp, Artificial sequence
  DNA replication origin
ggacgcgcgagcgtccttgctgctaagtacgctagtgggggcggtgcgcgtgcgcgtgcgcggccgcaaagcggggcgggaggaaacgagtgcgttttcctcttaggcggcgccattttgtgttcagagccgctatagctgccggcggtgtgcgactgagtcggtggcgaagacgggaacgcgacgatggcggagactctgcccgggtcgggcgactcgggccctggcacggcttctctcggcccgggcgttgcggagactgggacgaggcggctcagcgagctgcgggtgatcgatctgcgggcggagctgaagaagcggaacctggacacgggcggcaacaagagcgtcctgatggagcggctcaagaaggtgaggcggcgcggggctcgggggtggcgcaggaggcccgggcacgcccccgcctgcacctgtcaccgcggctcccggacccggggcgccctgggttcgccccgcgtcttggccgaccccggttcgaggtgtcgggcacccagggggccggctgtgtgaccttggcccgtcaccgctcctctctgtgcctcccttcctatcctctttccaccttttctcctcaagcgcgctcagcgtgcggtcttctccgctaccagggtggccccgggacccctcctggggctcccgatcgagccttggctctgtgaccttgggcaggtgcctttctctctgtgcctcagtttcctcctccggagaatgggtgtctggcggactccagagcatttacaggaaagggggcggtgcttgttcttgccccagggctttggcctttacgaagctgtccacccgggtcccccagatcttctcgtggccggccccttgttgtcattttgggtctgcctgagacatcaccttcctgagcgcccttcctaatgcgctgccccacctccttgccagctcatcctgcgtttgtgtcgcacctcgctgaaagcaggggctaaatgcaaaatattaaggggttgggaattgtctgtttccgcaactggaacaaacaacttgagcatagggagggagcttgtgggtacccagtcctggacccggcaggtggcaggcactgagggacctgttgaatctccccaggctggctgctgttcctcctcaccagcggtggccagcccttcaccgaggccgggccaagtgcagcctctctgttctaatttgtcccatcatataactttaaagtcgaaggtttggcattgtcgagttgagttgccattttggaactggtccttgaccccaattctggagctcctgctcacagcctccctctcctttgtcatttggacccag

SEQ ID NO: 34361 - DNA, 1087 bp, Artificial sequence
  DNA replication origin
gaggcgcgctggggcgactggagcggttccctcgcaggcggcgccattttgtgctaggagcctgataaaaccggcccggttctgtggaaagtgggcggcggagccagggtccctggaatggcggagactctgtcaggcctaggtgattctggagcggcgggcgcggcggctctgagctccgcctcgtcagagaccgggacgcggcgcctcagcgacctgcgagtgatcgatctgcgggcggagctgaggaaacggaatgtggactcgagcggcaacaagagcgttttgatggagcggctgaagaaggtggatttggggccccgagggcgggcacagggtgggtctggggtcctcttggccgcgacggtggctcgcgggccctggcgtccgcccccggccgcgttcgcggcctcgccggacctggcgctctcgcgtcccccggctcctccgaggccccggagagagttccttggccggctgggcctgggttcaaatcctaacgccgcaatggggccaggagaaccacaaaaacggcacgcgtgcaggagaaacggtgacgggtgacatcgtccactgagaggagggttctcccctcgtctcgtcccctcctccgtacctggaggggagaccctgaaaccctcacttcccaggcgaggggaagggactcggccaaggtcacacggccgaggacgggcagcgtcgggatttgaacccaggccctgggattcctgattcggctgcttggtttccccagggaagatgctttgtgacccacaggggaccgaccagcctgaatcggggctgatttacaaaggaaacacccgtaggacatactcaaagggaaaaatagaaaaaaacccaccacaatccagttttcacggtttgccggtactcgctcggtgaagtaacgtggcaggaaggaaaagtggtgttgacggtagtgatcagaaatgtgaaatgaggggagaccccgggtggactttaaaaccagcctcagaactgcccgggaggcgggcagagcctgggctcccccagctccgtcagtctctctggacttggggaccctgccagctctcggtggcctgat

SEQ ID NO: 34362 - DNA, 1167 bp, Artificial sequence
  DNA replication origin
atggggtgggtgagtggatggatgatgaatggatgggtatgtggatggatggatgaatggatggatggatgggtgggtggttggatgattgggtggatggatggataggtatgcatgggttagatggaggatgcatgggttagatggaggatggatggatgggtgggtggttggatgattgggtggatggatggataggtatgcatgggttagatggaggatgcatgggttagatggaggatggatgggtggtgggtagacgggtggatggatgggtggtgggtagacgagtgggtggatgggtgggtgggtggatagatggatgggtaggtgggtaggtggatggacggatgggtggttgggtgggtggttaggtaggtagacagatgaatggattagatgaaggatggatggatgggtgggtgggtaggtgggtggatggatgggtgggtgggtaggtaggtgggtggatagatggatgggtgggtgggtagatgggtggatggatgggtgggtgggtgaatgcgctggtggatggatgtatgaggactggtttgtctactccacttacccacaaagcaatggtccatcttggttcagagagtcttgccagtgaaggcctgctgttggggagagcctagcattgttgggctggctgccactagaggcacggccaacaatgaagacgtttccctggctgaggtgcaggccgaagtggacactcatgtacgttgccgtgctgaaactaagggcaaggtctatccctctgggacctgggcttcagctgcttcctggagacacgtgtaaggatggggaccagatttggagggaaaagactcctcttactgtatagaacaacctcaagagaccaccaagtagcccatggccagagacttttcactcccagagtgttaaaaatacatggtgctgtcccctgtggccattcccctcttcccccacagccttctggcagtttctcccacaagtttgctcctgttggcctcagagccttcagtgtgttcccccagccaggaaacgcctccattccttctgtggccagggcaacctgtaccatgaagctgcacttccttttattgagatggagtcttgcgcttctcccccaggctggagtgcaatggcgtgatcttggcttactgcaacctccac

SEQ ID NO: 34363 - DNA, 1085 bp, Artificial sequence
  DNA replication origin
gcagcggcctagtctggtagaaggggagtccacagggcctgcccaccccattccccccaggagcgtggtcccgggacaggtcccccacatctgatatgcccctgtccttactgggccttagcagtggtgggggcaggtctagggtgagggagggatgagcagggcaggggagcatcactgaccctcagtgctgcaggaggaagccggtgctcgccggagcacccacgcactcactgtcccctgacactgtccaccaagtccttcccgaaggcccaggaaggagcagactgcaggcccattttacagacgaagaaacttgcacagacagacagttctgtctgcccagcctgtccggagcccaggctgttcaccacaaaccctcgcaggggatgcagaatttctagtcgcctcgcacccaggcacccagccccagccccagccccagcctgtgaggacaggaggggtttgcactcggtgctgtgatgccatggctgggccagagggcgtccgtccgctccaggaggcctctgcagcctcacacctgttaccgtcactgttagaggggaaggactggacgaggccagtgagcagctgctttctggcccctcccctccatccaggcggccgggtcctgcagctccacgaatgtggcttagttcttccctggggtcacaggctttatcccatgagttcgtcctcacccatccactggcacctgtgtgcaagaacatgcctggggtcaggggagttggggggccatggaagtggagctccagaaagcagaggtggctgaggcaggtctaggggtgactttgggaaggcgggaaggggctggggaaacacctgaccacacccacagccaagaccacagagcaaggcaaggctggcatgtggcacagtgccatttgacagctggggtcactcgatagctggaagcaggacgggctaggaacggagtccagggaaagctagcccatcacgatgtgggctgggcagagctagaagagagagcagggggagtccataggcggaggccagctggggctggggcgtgggggacaccgagtggctgcccttcctttcag

SEQ ID NO: 34364 - DNA, 1179 bp, Artificial sequence
  DNA replication origin
tttggccaagcctgggttgtggagggtcttggttttggagggctgagaccagggtaggacagtggaagagccagagtggatagaagtggggtctgcttccctgcgggacacagggcaggagcccccagggccactggttcctgccctcctcagctcctgtccgcagtcctgtcccggcccttccttggccggactccaccctcattccaccctctcccgacaaccctagcaggggaatcctggtcattgaaggaaatccaggtgtttgttgccattcagagggtctcccggacattgcctctcccctgggacgccttccctgacacccctgccgcacactggccaggctacctggcagcctgcatggttcccccgcatcaggcatgagccctgggaggctcccagcacccagccacagagggcgatccacggggttgggtgatggcaagaggcctgtgcccagaaaccagtctggtggctccagacacatgggggtggtggggagcttgggtggggccagaggcctccgtaggatgctgccctgggagcagggagcagacaggtgatgctcaccgagctgggacagggtccccgttcccatgagttcaggggtttatgttgcttggtatagggaactgagcttaggaggggacagctgttacagaggagaggagcagagactagaggccggggcatctcccccactgtcccactcagagaggagaagccactggcctgagcagggcgtaggaggggtgtggctgggagcagcggcctagtctggtagaaggggagtccacagggcctgcccaccccattccccccaggagcgtggtcccgggacaggtcccccacatctgatatgcccctgtccttactgggccttagcagtggtgggggcaggtctagggtgagggagggatgagcagggcaggggagcatcactgaccctcagtgctgcaggaggaagccggtgctcgccggagcacccacgcactcactgtcccctgacactgtccaccaagtccttcccgaaggcccaggaaggagcagactgcaggcccattttacagacgaagaaacttgcacagacagacagttctgtctgcccagcctgtccggagcccaggctgttcaccacaaaccctcgcaggggatgcagaatttctagtcgcctcg

SEQ ID NO: 34365 - DNA, 1007 bp, Artificial sequence
  DNA replication origin
ggcaggaggcgcccagggacacttggtttctccagggctggaaggcttctagaaggtcaagatcttacgtcttcactgcccctgctcactgtgggactttgagtgacccactctccccctctgggtttcagttcatcagttcaagtggcgtccagccgccctgccttgcacgttgtaaaacgagtgctgtatataataggggtctgggtcgacggtgctgcactacagagtgtcaccctgtggacggtgagccctcaggagggtctcactctccccgtgggccttggcccctgagggtggctgtcagtgtccgctgagcttctgctcctcccgtccctgcccgcaggttcctcatcaagggaagtgtggctgggggcgccgtctacctggtgtacgaccaggagctgctggggcccagcgacaagagccaggcagccctacagaaggctggggaggtggtcccccccgccatgtaccagttcagccagtacgtgtgtcagcagacaggcctgcagataccccaggtactacgggccgggaacgaggccagggtttggcgggtggtcagctctgggaggtccctccagccctgcacgatgttgtcctccatattgatgctgacctgattctccggcctgtcctcctccctccgcctctggggatgggctgctgagccttttcaccagttctttctgcccatctctttttcccagctcccagcccctccaaagatttactttcccatccgtgactcctggaatgcaggtaaggcacccagtttctttgcttggagggagacaccccagtctagcccctctccccacttcctggccattcctttctgtccatcctccttcctgcccgacacgtgtctcttagggatctaaaagggaaaggaggccgagcacagtggctcacgcctgtaatcccagcactttgggaggctgaggtgggcggatcatctgaagtcaggagttcgagaccagcctgggcaacatggtgaaacc

SEQ ID NO: 34366 - DNA, 1144 bp, Artificial sequence
  DNA replication origin
acctccctcctagaccctaccccgggcctgaccacccccatctttcctttggcctcccttccatctccgatttggtctcccccacctccacactggcttccccatgtccatactcattctctccctgcctcttctgtcaatgcagccaaaggcgtctgtgtcaaaagcaacatggccatggcccttcctgctccaaaccctctcaggggtccccactgcaactgatggaaaccaggctcctcactgcaccccatgaggccctgcaggtatagcccctgactacctgtctatccttctctcccacggccccatctatgaatcgttcagttctcaaaataatgaactcctcacctttcccagacacaccaggcatgcccacagcaagaaacgagcttccaccttttccccttccagggacagcccatgaagctcctctgctcatccctctttccacccccagctctacactgactgcagcagcccggcagggggaagtgggaccagatggactgacgggtggacggatgggtggatggatgaatggatagatggacagatgcatgtatggatgcatagatagaaggatggatgggtggatggccagatgaatagatggatgggtggatggatggatgatggacggagagatgtatgggtggatagatggatgagtggatggatgtatgaatggataaatgggaacacataaatggatggatggatggatggatggatggacggacggatgcatggatggatggatggatggatggatggatggacggatagatgagtgggtggccagataaatagatggatgggtggacagatggatgagtggaaggatggggggagcagatggatgaatggatgggcggacagatggatgaacggaagtgtggatggatagatggaaggatagatgggtggatggccagatggatagacgggtgggggacagatggatggatgggcagatgaacggttgaagcagcccggccgaaatgcgggagaaatggggggaagccctgcagaacgcatcggccccttcttgacctcggcgggccttagcttcccctctgaacaaagcgggcgtgtgaccctctgcgcacccctaaaccgtgcactcacccgctcaggcctc

SEQ ID NO: 34367 - DNA, 1019 bp, Artificial sequence
  DNA replication origin
actcatccatctatccacccatacatctctccgtccatcatccatccatccacccatccatctattcatctggccatccacccatccatccttctatctatgcatccatacatgcatctgtccatctatccattcatccatccacccatccgtccacccgtcagtccatctggtcccacttccccctgccgggctgctgcagtcagtgtagagctgggggtggaaagagggatgagcagaggagcttcatgggctgtccctggaaggggaaaaggtggaagctcgtttcttgctgtgggcatgcctggtgtgtctgggaaaggtgaggagttcattattttgagaactgaacgattcatagatggggccgtgggagagaaggatagacaggtagtcaggggctatacctgcagggcctcatggggtgcagtgaggagcctggtttccatcagttgcagtggggacccctgagagggtttggagcaggaagggccatggccatgttgcttttgacacagacgcctttggctgcattgacagaagaggcagggagagaatgagtatggacatggggaagccagtgtggaggtgggggagaccaaatcggagatggaagggaggccaaaggaaagatgggggtggtcaggcccggggtagggtctaggagggaggtgacaatctgggagtcctggagagagagaggaagggacagctggggagagactggagagggagaactgataagatctgaaaaccatgagctcgtgggggtgaaaggatagaaggaggtgaggacaatacctgggtctcccatttagggacaggggatagtggggctatttctgtgatggtgagctgggaagagaagcaggtatggggtgacatgctgagcctggattgggtcctgctggttctaaggggcctggaggttgtcaggaggagacacccagaagacagcagaggcaaagaacctagggctggacctacagatgggagatttagggactcctcaatgatcc

SEQ ID NO: 34368 - DNA, 964 bp, Artificial sequence
  DNA replication origin
agagtgagactctgcctcaaaaataaaaaaaaataaaaataaaaaaataaataataaaaaaaggaggccctcacttgaaggaggtcactgttctttttttgtttgtttgtttgtttttgatacggagtttcgctcttgttgcctaggctggagtgcaatggcaaatctcggcacactacaacttctgcctcccaggttcaagcgattctcctgcctcagcctcccaaatatctggattacaggcatgtgcgtgcctcagccccctgagtagctgggattacaggcgcctgccaccgcgcccggctaatttttgtatttttaatagagatggggtttcaccatgttggccaggctggtctcgaactcctgatctcaagtgatttgcccgcctcagcctcccaaagtgctgggattccaggcatgagccaccacatccagctgaaggaggtcacttttgcactgagacttgaaagaagtgagagagcaagccattgggttatatccgggaacagcattctaggcagtaggaacagcccacgagaaggccctgaggcaggatagtgactggctggtttcaaggaacagcgaagggtctgttttagtggagcggagtgagcaaggaggacaggtccacacagggcgtttgtagccaccaaggagtctggtttttattctaactggaacaggaaggattttcagtccaggagaggcaaggtgtgcagatggagagggctgagaagggtggagggggagggtgcaggtgcggtggttcatggagccgcggtggttcatggagccaccgtggtggcctggacaggtggtggctgtggaggtggataggaaggcgtggatccaaggcggtggcatcaccaaacacccaccaaacacgggtggctgtgggccaggcctgtgccggccacctctgtcccctgtccctctgcaggcccacacaggaccatgaagg

SEQ ID NO: 34369 - DNA, 946 bp, Artificial sequence
  DNA replication origin
taacaaatgagagtattgagtgtccaggcctgtgctgatagccagggttcttaaactcgaagggaaggatgggcacttcttagcaacaagcagtccattgctacttcaaggaagggtatggctcttgggcacaaacctttcaatatttcaagagaagctagcaatcaggaaattgtagatgaaatgtcctgttttagatgttggtgattgactaaccaccaaattggccagcattctggcccgcgggcctccactttgcgcccctcaagcagtggtaaatttttgggaatgatgttgaatgggtcccgaggctcagagtaggggggggttttcaggcgggggcctccctatggccagcaggtgcggtggagggggaagcgctgctgtagaggagaggcccacgggcagctctggccccccccaggtggtagggaactgccggaagctgggcgcccccaaggtcttctacatcgcggcggacatggcctcccctgaggcgcccgagagcgtggtgcagtttgcgctggacaagctgggtgaggggctgggcctgaagcctggagtccgggaccgtggcctaggccttagggacaggaccagaattgggctgtgggtgtggccacagtaacaggtgtctcagggcggagacaaatggggactgggggcgtgggcggggtggagtctcattgcgtctgggggaagagctctgaacggggcctcgttgaatgggaaccaaaccttgctagatccagggtgtaaggccaaggctgggtgtctttgatcgtagtgggagttacctggggcggagctcgctggaccagcgctctgggtggagctaagctcgggggcggggtttgatcgtttccttggggaggggcctccggggctgaccggcgtttctgggccaggcgggctggactacctcgtgctgaaccacatcggcggc

SEQ ID NO: 34370 - DNA, 1154 bp, Artificial sequence
  DNA replication origin
cgatgcgggtgagcctggagggtctgggcaggcttcccggacgagggggagccactcagccgctgccgtccgcgcccccaggccgcgtgcccacgtcgttctccactccctactcggcggccaagtttgcgctggacggcttcttcggctccctgcggcgggagctggacgtgcaggacgtgaacgtggccatcaccatgtgcgtcctgggcctccgagatcgcgcctccgccgccgaggcagtcaggtgaggcccggacaagctgggggctgggctgggggccatggcccagccccagccgcagtccccaccgtgccctcctgtccccaggggagtcacgagggtcaaggcggccccggggcccaaggcagccctggccgtgatccgcggcggcgccacgcgcgcggccggcgtcttctacccgtggcgtttccgcctgctgtgcttgctccggcgctggctaccgcgcccgcgggcctggtttatccgccaggagctcaacgtcacggccgcggcagcctgagcaccggggggtgcccctccagtcccagacggcaatgttcctccctccaactgtccctggagccagaacactcacagagacacccctgagagggtggccacagcccaagatgaagtcatcaagacagaaaagcaaaaccgagaaaaacgacgggcacctggaaccagtcacggcttgggaggtgcaggtgccccgtgttaggcgcctttgtcggggacttgcaaggcctcacctgtttggccatgattgatgacgtgactgcttccattttgcagatgaggaaactaaggctcagagaggccacgccacccttgagccacccatggacccctctccatctcctgcctgcgcctttaagtccctgatttattctttccattcattccatctgggaggaacccccccaactcctgccagcttcccctagctggggtctctggtactcttcacacctgcaggggcgtctacactgttcgtctacctggtggcagggtctgagcgggaggaggagggaaagagtgtgttctgagctggacccagcctcttgttcgagaataaaaactcttcttctcttgcatatctgttgttcaaattccttggtaattccaatttgctagcagccagcgggca

SEQ ID NO: 34371 - DNA, 1034 bp, Artificial sequence
  DNA replication origin
ccagcccttccgccacggccgtctctggagagcagcaggtaagtggtttcccgcactgccggtatccgccgccatccggactcccgggtcctctgtgcaggttggaggatggttggttgtggcgagcgaggctgaaggagccgggacgcggggctctgggcctcgggaactgagccggtactcacctccgccccttctccccgtcgctgtccgcagccatggccctacgctaccctatggccgtgggcctcaacaagggccacaaagtgaccaagaacgtgagcaagcccaggcacagccgacgccgcggggtgagtgcgggtgccgcgcggaggttgtcgggggtttcttggagggcggagggcatggcttgggcaaaggctctcgacctgaaagaacgcgcgttcgggcgcagaactaaggggggcttgaatggaagagatggggtgggggagtgggacttcctgcctggtgctcgaaggcgggcacccatctgggtttttcccaaccgtgcaatccacgctggggcagagggagcaccttgagagcggcgcggggcagcgggtttggggttctgacgcaggagtaggagttcgctcatggagctggcccgaggttgcggtgtgtgaggttgagggatttcaggtgtgtcagtgtattgggcgcctttattaagcgggcagcgggtttggggttctgacgcaggagtaaggagttcgctcatggagctggcccgaggttgcggtgtgtgaggttgagggatttcaggtgtgtcagtgtattgggcgcctttattcagcaggcagcccagactccaggtgcgtcctgccagtgttgcggagactgggacttagggaggatgggagctgctccgggcgcggcgaaaagcgctaggcgttaataccttggttctcacagctacccacagaggggaggaagtagccagggaaatcgcggcagcgcgagagaagctgcttaactagaatgcagggatccccctaccctgacggccgcccctttcccccctagcgtct

SEQ ID NO: 34372 - DNA, 1281 bp, Artificial sequence
  DNA replication origin
gcaagaattgtgtggggctgtgggtgaccctggagcccctgacccagtccccttcctcatgtgctgagggcagcagccacgtaaccagtcagccaccctacaggccctgggtctgtgtatggggccagcccatggggcaaccaggaggccttcctggaggaagcggcatctaagataccattgggggataggaagtggatccaagcagaggacgcagcacaagcaaaggcctggggcctctgggcatggtgggtggcagggcggggtgtccaggccctggtttcaccatcagggacctcgttcccaggccagggtctgggggccatgggagaggcattggctcccaggttctagactgagctggtgggcaaggtccctccagacccaaccctgacggttgcccttgcagcgctacctggtgccccaggctcgcgccctgtgtggcttggatgagagcaaggccaagctgtcatcggacgtgctgacgctgctcatcaagcagtactgccgcgagagcggtgtccgcaacctgcagaagcaagtggagaaggtgagcggccagcccgccctcctggcacctgccgcccacctcaccatcccacgctgatcaccccacctttccatgcccatcatcccactttcctgcgcccatcaccccaccaccccgcgcccgtcacacctttctgtgcccgtcaccccaccaccccgcacctgtcaccccaccttcccgtgcccattgtgttgccctgaccgcccaggtgttacggaaatcggcctacaagattgtcagcggcgaggccgagtccgtggaggtgacgcccgagaacctgcaggacttcgtggggaagcccgtgttcaccgtggagcgcatgtatgacgtgacaccgcccggcgtggtcatggggctggcctggaccgcaatgggtgagcgtggtggcgggagaagaccccaaagccattcccatttctacccgagaacaagcaggtcccaccttgtacacctgtgcagtgggcctcaggtggctctgaacggcctctggcggggggtggtgtgctgggagcccagggggtctgggctgagggaggggaaggctgtgacacatgggggtggcagcacaccatgggccttatggatttgggtgccactttgataggcttacaggtaaggacaagctcatccagatgggccttggggccaccacgcacaaaggaggcgagagggcaaaggggatggtgcgggaggggctggagaagggcttgtgtctgtctgcagggcagcgg

SEQ ID NO: 34373 - DNA, 998 bp, Artificial sequence
  DNA replication origin
gcttctcctgggccacgtagcccgacacgttgatcatctccatacggtctcgcagcggctcggggatggtgtccgtgacgttggccgtgcagatgaacagcacctgggggcggcggcaaggtgctgggggactggccgcttaccctccccagcaagcccaggccccagacaggccccccaccttggacaagtccacgggcacgtccaggtagtggtccaggaagttggcattctgctctgggtccagcagctccagcagtgccgacgacgggtccccctggtagcctcggccgatcttgtccacctggggcagcagacagcaggtggtgcccctcgccgtgcccctggccagcccgcccagtggggagaccccagggtcagggctggggagaccccgagtgagagcggcacccacaccctgccttggacgggcagcctgctgggcgtggctgtgggtgggagggacccgtccgtgccatcagggccagcatcacggcgatggcccctgagttggctcggggatcctaggacccggaaggctcggcttcatcttgcacacggcattgccgggttagggggtctccgggcctctccgcacgcacctcgtcgatgaggatcagggggttctccgtcttggtcttcttcaaacactggatgatcttcccgggcatggcgcccacgtaggtccgcctgtgggtgcacagcggggtcagaggtcacttggtagcctggctcggccacaacgacaccatgcaccctccagggccacaggggagaggccacctggagccccacaagatgtggccatgatgtgggaggcggaaatgctggcagccgccggatgtgtggcacctgcaggcacgctggtcacttgccctgactcgccagctcagattctggggtcactgattcaaagccagatctccctcagtcccatccctcagctgacaccatggtgaaagccagacaggcgctggcagcagaaggcccccactcct

SEQ ID NO: 34374 - DNA, 837 bp, Artificial sequence
  DNA replication origin
ctggggtgatactagccatggccagcactggctctcaggagggcttcctgcaagctctgtgctctgccccagcacaggggcccggcccgcgacagggacagaagaatcccaggccccacgagagacagtgaggaaggctctgtctgtgggatgaagacacagggaggcagggatggagggactgagatgccactgggatgtgtgtgacactttaagtgtgcaggggggtaaggagtgtcttagggagaggccccgagcaacgcacgtgaggagagagccacgtgagggtctgagagatgtgttccaggcccaggacacagcccgtgcaaaggccctgaaacaggaccacgcctggtgtgttagaagaacagtgaggaggccatgaggctgaggcagagggaggagggggggagagaagagggaggagagggggaagagggaggagatggagagggaagggggtagagggagggggaggaagaagagagggagagagaggagggggtggggcaggtcatgcggggtcctgtgggctgcagtgagaacttgggctttgaccgaggaacgtgggagccctggagagctgggggcaaaggagggttttgctgctgttaataacaacgatccatcgccccgcagccagtctcctgtccttgtccttgtctcaggaacccagagacgtcagcagacgcctgccctccccgcagccccgctacctggtgactccctcccaaggccagaggtgacccaggcttgttcagaaccccgccagggtctctcctccggcccgcacctccagccatccctgaaccaggctccaagaggcttcgcgaccac

SEQ ID NO: 34375 - DNA, 1305 bp, Artificial sequence
  DNA replication origin
cactgcgcgggccagcatgctgtcacccttgcagcgggcgggcagatgctaggaaggcctgagccgggaggtcgggagctggggatgtttttagagaaggcagaaatgttcactttaaacctggactcaagtgaatgccttgcaggatggaaacacgtggtggactcagcagatgcctcacactcggctctcactgaggctacggtttccaaagaaccgctgtctacagaggctggcgaggagggaagccccagaaaagccgcgcccggctgcccacccaaagggtcaggtgggagggcgctgaactctgagggccgtggcccctgcttctgggcctgaggctggccgggacgagtgagcccacagaggcgccaaggtttctctggtgtgcgcggcccggtcctcactggagaccgtctctcctgactccagcccacaggcttcggggtggggggtggagccgaccccacccctagtcctggggcatcagccacagcccacatagaccagcatctgcacggcaaacgccggccctgcagctctggcccgggcattgcaggtcctatgctggaactaccgggggtgtctgctgagggccggcccgagaagtctctctcccaggggtcaagccatggaggttcctgccagcgctgtttgagcacctggaatcagctgggcctgaagtccgccacatggctggacttttcagttactccagcatgagtggaatcggttgcccacaacccggattgctctaccagatgttaaagggtgaccggagaagacgaagcccggcagcacagctgaggggagtgcgtggggagagctgtcaggccaggcctacctgtggcccttgatctcagccacgtcagtcatgcccccgacgctgaagcggaagtactctcggttcagggcgcgggcgatggagcgagcaatgctggtcttacccacgccaggggggccatagaagcagaggatcttgccctgggtggagccgcggagctggctaacggcaatgaactcctgcagacagaggcaggttcagtgggcacgtgagctggggaagccggggacccgcgcatgactctcgccacctgcacactgcctttcagacgtctgagggctgcgagaagggaccaggattgtccgggaggctgagcacatcagagctgccactggccacggggaggggcagcctgtgacaagggctccatttaacaatttaacaccaaaggacaactaggtgctaggagaccgcggccacccggcagtgccaggcccgttcagcagttcccgggaccctga

SEQ ID NO: 34376 - DNA, 2220 bp, Artificial sequence
  DNA replication origin
ctgttgggtacacctcccagatggggcggctggccgggcggggggctgacccccactcctccctcccagagggggcggctggccaggcagaggggctcctcacttcccagtaggggcggccgggcagaggcgcccctcacctcccggacggggcggctggccgggcggggggctgacccccccacctccctcccggacggggcggctggctgggcggggggctgacgcctccacctccctcccggatggggcagctggcctggtggggggctgaccccccccccaacctccctcccagacggggcggctagccgggcggggggctgacccccactcctccctcccggagggggcggctggccgggcagaggggctcctcacttcccagtaggggcggccgggcagaggcgcccctcacctcccggacggggcggctggccgggtggggggctgacccccccacctccctcccggacggggtggctgctgggcggagacgctcctcacttctcagacgggtcggttgccaggcagagggtctcctcacttctcagggctgccgggcagagacgctcttcccctcccagacggggtcgcggccgggcagaggcgctcctcatatcccagacagggcggcggggcagaggcgctccccacatctcagatgatgggcggccgggcagagacgctcctcaccttccagactgggcagccaggcagaggggctcctcacatcccagacgatgggcggccaggcagagacgctcctcacttcccagacagggtggcggccgggcagaggctgcaatctcggcactttgggaggctaaggcaggcggctgggaggtggaggttgtagcgagccgagatcacgccactgcactccagcctgggcaccattgagcactgagtgaacgagactccgtctgcaatcccggcacctcgggaggccgaggccggcggaccactcgcggttaggacctggagaccagcccggccaacacagtgaaaccccgtctccaccaaaaaaataggaaaaccagtcaggcgtggcggcgcgcgcctgcaatcgcaggcactcggcaggctcaggcaggagaaccaggcagggaggttgcagtgagccaagatggcagcacacagtccagcctcggctcggcatcagagggagaccatggaaagagggaaaggggagaccgtggaaaggggagaggcagagggcagaggcagaggcagaagcattttttgtatttttagtagagacagggtttcaccgtgctagccaggatggtctcgatctcctgaccttgtgatccgcctgcctcggcctcccaaaattctgggattacaggcgtgagccactgtgcctggcctgtaaattgttttatagagatggggtcttgctgagttgctcaggctggtcttgaactcctgggctcaagtgatcctcccacctgggcctcccaaagagctgggattacaggcgtgagccaccgcgctcagccccacacatgggtttcaagccccttgcaaccacccagccaagtccagcagagagacaggcagctcgtgagctccactcagcatctctccatctgtcccctggcagtgtcacccgcaactacctagactggctcacgtccatcccttggggcaagtacagcaacgagaacctggacctggcgcgggcacaggcagtgctggaggaagaccactacggcatggaggacgtcaagaaacgcatcctggtgagcccagtgtctggcctgttgtggatttgcatgtgggtgcccgggcccaggactcttgtgtgctgtgggttgagatttcaaaggagccccctggtgaattcgtaggcctgggggtgctggtcggggggatcccggcggaggtagcatcctgccctgcccccgagggctcgaggatttcccaggtggactgaagtcatgcctgacgggccgggcatggtggggctgcttgtagtcccagttactcaggaggctgaggcgggaggatcacttgagcccaggaagttgaggctgtggtgagctgtgatcatgccactgcacatcaggttgggtgacagagtgagacccccatctctacaaaaaattttaaaattgcggctgggcgctgtggctcatgcctgtaatcccagcactttgggaggctgaggcatgcagatcacctgaggtcgggagttgaagaccagcctgacca

SEQ ID NO: 34377 - DNA, 947 bp, Artificial sequence
  DNA replication origin
gaggagcgtctccgcccagcagccaccccgtccgggagggaggtgggggggtcagccccccacccggccagccgccccgtccgggaggtgaggggcgcctctgcccggccgcccctactgggaagtgaggagcccctctgcccggccagccgccccctccgggagggaggagtgggggtcagccccccgcccggctagccgccccgtctgggagggaggttggggggggggtcagccccccaccaggccagctgccccatccgggagggaggtggaggcgtcagccccccgcccagccagccgccccgtccgggagggaggtgggggggtcagccccccgcccggccagccgccccgtccgggaggtgaggggcgcctctgcccggccgcccctactgggaagtgaggagcccctctgcctggccagccgccccctctgggagggaggagtgggggtcagccccccgcccggccagccgccccatctgggaggtgtacccaacagctcattgagaacgggccatgatgacaatggcagttttgtggaatagaaaagggggaaaggattgagaaatcggatggttgccgtgtctgtgtagaaagaagtagacatgagagacttttcattttgttctgtactaagaaaaattcttctgccttgggatcctgttgatcggtgaccttacccccaaccctgtgctctctgaaacatgtgctgtgtccactcagggttaaatggattaagggcggtgcaagatgtgctttgttaaacagatgcttgaaggcagcatgctggttaagagtcatcaccactccctaatctcaagtacccagggacacaaacactgcggaaggccgcagggtcctctgcctaggaaaaccagagacccttgttcacttgtttatctgctgaccctccctccactattgtcctatgaccctgccaa

SEQ ID NO: 34378 - DNA, 869 bp, Artificial sequence
  DNA replication origin
tgcaagatgtgctttgttaaacagatgcttgaaggcagcatgctggttaagagtcatcaccactccctaatctcaagtacccagggacacaaacactgcggaaggccgcagggtcctctgcctaggaaaaccagagacccttgttcacttgtttatctgctgaccctccctccactattgtcctatgaccctgccaaatccccctctgcgagaaacacccaagaatgatcaataaaaaaaaaaaaaaaaattagctgggcgtggcagcggacacctgtagttccagctactcgggaggctgaggcaggagaatggcatgaacccgagaggcggagcttgcagtgagccgagatcgtgccactgcactccagcctgggcaacagagtgagactccatctcaaaaaaaaaaaaaaaaaaaaatttacaaactgccctgtccaaagcacccagtgcaggaaggaggagatggccggaggtccactgctgactcatcaggagagccaagacggcactggcttctgcccagggctgagtgagcagaaccacagaggggacgaggcttagaaaatgggacaaggcctgacccagggcaggtggggaaatggaggccaggtcccctgccgggagagtgacgctgaaggttgggagggcaactccatattggtccccaagttgggagccgtgcagcagtgagcagcggccactatgggccaggagcaagtcagtgagggctgcaagagcacacggcaggattggggaagaggatgaagaggaggacggcttccgaggaagggccaggcggccccacgagcagacaccgtcagggcgcactgccacccaacgggcatacgagacgcaccgggacaggc

SEQ ID NO: 34379 - DNA, 1892 bp, Artificial sequence
  DNA replication origin
tgccctgtccaaagcacccagtgcaggaaggaggagatggccggaggtccactgctgactcatcaggagagccaagacggcactggcttctgcccagggctgagtgagcagaaccacagaggggacgaggcttagaaaatgggacaaggcctgacccagggcaggtggggaaatggaggccaggtcccctgccgggagagtgacgctgaaggttgggagggcaactccatattggtccccaagttgggagccgtgcagcagtgagcagcggccactatgggccaggagcaagtcagtgagggctgcaagagcacacggcaggattggggaagaggatgaagaggaggacggcttccgaggaagggccaggcggccccacgagcagacaccgtcagggcgcactgccacccaacgggcatacgagacgcaccgggacaggccagctgggccacacggatgctggagtttagagacacatgaagtcactgtggaagtgacacaggcagtgacactttgcggagagcattctgggtgggagaggtagctggcagcctgctgcaggcatcttggtgacacgcaggtactgagggcttgtcccccgtgacttcccaggacctgaggacagaacccgccttacagaccccctcagctcctgggggaaggagctatctgcttctgcaggacaaggcccggtctgagcaggtacttccaccagcccaagggcagctgaggcactcgctgggagacagaagaaccccgaaaacatctacgttctccccccacaggaggcggcggcacaggcctctcacatggcagcagggaactgcagatggggctgagtgaaggtccccgagacaggagagcattctgggtgacccagggggcccaggttcctcaccaggtcctcacgacaggcggtgggaggtgagagactgactggaagaggctgcgctgtggctgtgaaggaggaaggggccccgagccgagggatgcgggcgcctccagatactgggaaaggcaggaaacggattctcctctggagcctctgggagggacgggcccggcccacagcgggatctcagggctcggcattgtgtaaggcactaagttgtggcaccgtcggagcagccatgggagctcacaggccactcaccgaaatcggggcgtgctgggaggggaagccacagccttcgcgcgcaaccagtgcctctcagggccctgggggagagactccggcgaccgtgacattcaaatctgaggcggggtcctgggccagcagccaggaaagaaactcatgccttccctctaagcgctgtcctacggcctgcccagccctgccccggggacttctgcctagaagctgccctggcgtgacaactggttcctgggctgaaaacagagcatgctgcatgggaagtggccaggtgggttctgtcctggctggacatgggcatggctgaaaggatctcagaggtacctgaggccctcaaacctggggcggccaccctgactcatggcatgctcaggacagtggcccccgggcaaggccagtgctgcgggaaggcatggtcacttcctggctgactctcgaaggggcaacagaagccaggggtagccttgcaaagacagccatggggactcctggtcctggcgagaaggcctggcttaggccaggcgtggtggctcatgcctgtaatcccagcactttgggagggcaaggtgggcggatcccttgaggtcaggagtttgagaccaacctggccaacatggcaaaaccccatctctactaaaaatactaaaaattagctgggtgtggtggcacatgcctgtaatcccagctactcaggaagttgaggcagtagaatcgtttcaacctgggaggtggaggttgc

SEQ ID NO: 34380 - DNA, 1128 bp, Artificial sequence
  DNA replication origin
attctgaaaaatgctacgaccgtgaggtgaccggccatcaggcaggctgtgatctgccgaaaatcatgacagcgagcctcaatggctgggtcttaagaaacagcatcttcacttttcccaggctgctttccaatttccaacactgtccccaagattacaaaggcaaaggaattcttcccttaatgttggacggtcctgagactgctccaccctgggctcattacactgggaccagctttaagcttccctgttcaacgcggagagttccacagcccaggacgacagagcagatgatggcacgaagccctcaaaacccagacaggccttcttggcttgccctggccgatgccaccggtccctccgtgtgctccagagcctgactgatgtcacgtggcccgaggggaaggcccccaagagtggctgcgcctcagccgcgggctcacctcccgccccaggcgctgctgcagcttgctcagttcaaattccttcttcagcagggagagggccttgtacagccgcttaggaatctgccgagacagggaggacagaaaggatgagcagaagtcggcatctgtgtgtgtagggccgaggttgggggaaaatgcgcaccctgagagatgctgccgggaggacctggccatgctgtacccagcacagaggcatgtgtgccctctgccccaacaaatcccgtgctggaaacgcatcctacggatacttcacaggccctccagctgcgtgcatggggacgcgctcaggagtgctgctcacaacagcaaaagactggcaacgccccgggtacacggcccagaggatcccactgaacccgcaacggtgactcccaaccgaaggctatgaagccaccgaaaggcggatggatgtggaccaagacacgcagcgggaaatcatctcaaaaacagagccagggacacacagctgggtgtggatggtgcacggtggagggacaagggcagccaggcatgggggagctgaggaggaacgggggcagccgggcgtgggcggagcatagtggaggtggggtgcagccaggcgtggggggctgtggaggtgacgagcactcacattggtctcttccaggacgtcctgcagctcatgggactcggccccggt

SEQ ID NO: 34381 - DNA, 1267 bp, Artificial sequence
  DNA replication origin
tgcgtcacgcagggcggccacagctgcctcccccacgggctcccttgagccgttcctgcggcctctccgaagagtcatctcccaccctgagccccttaggaagggtctggcctgtctggaactcaattctaatggaacatagagggtgcttttcctcccagaggtcttcggaagactctgggatgggagaggcacaggaaattcgctggagcctgtagctgctcaggaaggagacagggttggaacccaggtccagccccagcccgtgtcccctgtgccaaagcctccagcggttaccaagacaccttccagccctggcttcttcccaccaagcctgggaggttggtaccagtggttgcaggacaggaaacagcctgttggccaccctgatcccccaacctaggccgtcctgcctgcctggtggcacaaggagtcagcttccgaggtgggcaggctcttggcggtgccacctgccctcccgctgtagggacagtcagcgaagctaaccaaaggcctgaagcgtgtcagctccttacctgtgtgcctggtgtcatcagcctcttccccaggctgctgcagggcctagggggaagtgctgtgagcaactggtgatgtctgctgtgggcgctggcaggggtggaaagtcctgtccacaggcccacctgggttcttgaggtcagcacttctatcctgccccactacccctgcgaggtttttttttttctttctttttttgagacagagtctggctctgtcaacccaggctggagtgcaatggaacgatctcagctcactgcaatttccacctcccaggttcaagtgattctcatgcctcagcctcccaagtaactgggattgcaggcacgtgccaccacacacggctaatttttgtatttttagtagagacgaggttttaccatgttggccgggctagtctcaaactcctgacctcgggtgatccgcccacctcagcctcccaaaatgctgggattatagtcgtgagccactgtgcccggccacctgtgagtattgagcacttgaagtagagctgctgtggccaaggaacagaatggaacattttattggctgggtacagtgtctcatgcctgtcatcccaacacttttggaggccaaggaaggaggatcacttgagccctggagttcaaaaccagcctgggcaatattgagacccctgtctccacaaaaaaaataaaatccctgggcatggtcgcacacaccagtggtctaacctgtgggaggatcgctt

SEQ ID NO: 34382 - DNA, 1692 bp, Artificial sequence
  DNA replication origin
aaaggccttcagcgcataaagtgggagaccggaagaggcggagacgatccgatgctcgaactccgccccctcttctccgcgtaggcccagctccctgaagcggctgtttcgagccacgcgcccatcgggtaccgaggcacgcgccgggcgtcacgtgcgtttcgcggcgagcggaaatgacgcgagttgtgtgagccgccagtatggccgggctatggcggcgagcactggctacgtgcgactgtggggagcggcgcggtgctgggtgctgcggcggccgatgctggccgccgccggggggcgggttcccactgcagcaggagcgtggttgctccgaggccagcggacctgcgacgcctctcctccttgggcactgtggggccgaggcccggcaattgggggccaatggcgggggttttgggaagcgagcagccgcggcggaggcgcattctcggggggcgaggacgcctccgagggcggcgcggaggaaggagccggcggcgcggggggcagcgcgggcgccggggaaggcccggtcataacggcgctcacgcccatgacgatccccgatgtgtttccgcacctgccgctcatcgccatcacccgcaacccggtgttcccgcgctttatcaagattatcgaggtaatgggagtccccgcctcggcctcaggtttcccacctgtgcaagcagcgggctgaaccgtgggatcacttgagcgcccttgtgtttcgcaactttttcagacatgaagtttctcgaagggtgcagttcgaatccttgtctgctcaccactagcttgggaaccttgagccaaagtcctctccctttcggatttcttaggatccgttagatgagaggagttgaacccgatgagcctaggattatccactttagaacgccggtcatagaaatccggggccgggagggacctgagtagtgttacggcgctgttagttttctccttacttggcacgagttttgtaatacctcctcgccccaggcgctctgccgtctggttacgagcctcactgggatcagaattcattcctttcttagacaaatacttcttgattgcttattatttgccagagagtgttctaggttctggggatatggcagtgaacaaaacagacaaaaatttctgcctttgaagctgggcatggtggcgcgcgctgtactcccagctactctggcggctgaggtggaaggattgttggaaacctggagtccagcctggtcaacatggcgagaccctgtctcttaaaaaataaatctgccttggagcttacattttggcaggatgagacaggcaataaagatgtttagtaacgatattgtattagaaggcaataattacgagaaatagtagagcatggatgggacaggaggcttaggagggtgggaagaggtgggttattcagtgtgttcttgacctcctaccacgtagcaagttctgagaatactgtagagaacaagtcattccggtggtagaaattagatcatttcagactaagagccttgggggtggggagggagcaggatgatgtaatagagagaaagcagtgagtgtaaggaacttgagcttttacagtaggaaggccccaaaagccttctcccccagctccccttcccttaaaaaaaaaaactactgatgtggaaagtggcatctatgggaaggttatctcctaac

SEQ ID NO: 34383 - DNA, 882 bp, Artificial sequence
  DNA replication origin
gcgaaacgcacgtgacgcccggcgcgtgcctcggtacccgatgggcgcgtggctcgaaacagccgcttcagggagctgggcctacgcggagaagagggggcggagttcgagcatcggatcgtctccgcctcttccggtctcccactttatgcgctgaaggccttttccggtcacgtggaaggctgtgagcaggcgccagcgcccgtacaaaacactggtagtgttgcaaacgcaacgtttaggaactcatgagcagcctgtgcacatgcttaggcgcgcggacaacatgcgcatgctcagactctagactggccacgggtggccgggtgcgcatactcaggctctgagcgcactttggggtgcgcggattcgggcttcccgggattcgtctgcgcatgctcaagattcaggcggagcgccgggctgcagtgcgcggaggcccgctcccgggactcattgatgcgcatgcgcagggcttcagcctgcacgtactcggattgtgcagcgactccccgtggcggttgaggggcagtggtggcggcggaagcccaagtcgatgctgatgttgatgctggtggcggctgtgaccatgtggctccgaccgctggtcacagctcagctctgtcggtggggctgccaggactcctggggctggggtgctgccgggggtcgggagggtgctggttcatcttggagccgaggcctgctccccaacctcactgaggctccccttttactctttttaggaatcgaacttgacgcctcgctcaccctactccaccccatcctcccagcccgatattaagctctcctacctctttttttttttttttttgagacggagtctcgctctgtcgcccaggctgcagtgcagtggcgcga

SEQ ID NO: 34384 - DNA, 943 bp, Artificial sequence
  DNA replication origin
tccctcccctgacatgtgaggattacaatttgagatgagatttgggtggggacatagaaccaaaccatatcagaaggataaatgggtagacagatgagtggatagatggatagagagatggacggatggttgggtggatgggtggatgggtgggtggatggatggatggatggatggatggataaatggatagatggatgagtgaatagatggatggatgggtgggtggatggaatggatcgataagtgggtagatggatgagtggatggatagagagatggatgggtggatggatggatggataggtgggtgggtggaatgaatggatggaaggatggatgagatagatggatggatggataaatggatagatggatgagtggatggatggatggataggtggatggaatggatggataaatgggtagatggatgattggatggatagagagatgaatagatagatggatggatgaataagtggatagatggatgagtggatggatggatgggtgggtggatggaatggatggataaatgcgtagatggatgagtggatgggtagagagatggaagggtggatggatggatgaatggatggatgggtgggtggaatgaatggatggaaggatggatgagatggatggatggatgcacggatgactgaatggactgaaggatgaatggaatgcagctgtgtcgtttacaggggtgctattctctaataacacaggttccgttgccttgcagtttaaagaaagccaccatgtctaccttaactgtggacatagcaaacaaggaaatttcatgtgtggatatcaagccactggtaggtcccaaatctttgctgtcccatattcggtgtcataagtgttaagactcatggaagctggccctgaggttgcaatgagctgagatagtgccactgcactccaacctggg

SEQ ID NO: 34385 - DNA, 1423 bp, Artificial sequence
  DNA replication origin
cacgtgggggccttggggatggggagggggctggagatgcacgcctggcccctcaccccatcatcccgcggactggcaaggcagcgcccccggcctcacagtgaggcctcttagcaggggagccccggaatcacaggacaccctaaactccttgagtcccagccctggaacatcagactcctctggcagaggcaggggcctcctggggcacgagggagctgacccccagactcaacgcgttctaagggttttcacccctttgtttggtgggggaaagcaaggctgcccagagcagcaggaacttccttggagacacacagccatcagggcagggcttgaggagcatcctccagatccccacccagctgcctcctgtccccaggaagccacagccactgcaggcagggcgggaagggccacgctcttgttcagacagacaggtgggtgcaggggcttcacctgatggtctgagggtgggggctggggcagggatgagacagtgcccacgcgtgaaggggtggggagcacacggcacccagggggcctggcatgtgcacccaagatggagacaggagacagcacctggagcccaggagagggtcaggggccccacccggccacacttcggggtccggggtggcagggacagcctggctactcgttccaaaatgggatgggcccagcctcggaagaacgacctccgggtgctggttcccgtcactgcttacccacatcagggtctcgagagccctcctgggggtccaggcagtggccacctgtaccctcctcccctgaaacgctcatggtggccctggagaggctgaccccattcccccagggacacataaggaaacaggaggtcgagtgccatccagcgcctcctgggatgaggacacccctctgggatgggaaccttcagcctaccccttccccaggctgcgggctggatctcctgggtctccggagtttgggtttcaaggcctctgcttggggaggccctgggaggctcacctagagtccaggaggctgatgggtgtttggaggccgagcagagaccatggtcccggctctgtgtagggcactgtgcctgctgctctctggagctactctcccggaaacccttattcaaaaaactcaggaggaggccaggtgcagtggcaaacacctgtaatctcagcactttgggaggccgaggcgggcagatcacttgaggtcaggagttcgagaccagcttggccaaaatggtgaaaccctgtctctactgaaaatacaaaaattggccgggcgcagcttctcacgcctgtaatcccagtacttcgggaggccaaggcaggcagatcacgagatcaggagattgagaccatcctggcaaacacgatgaaaccccagctctactaaaaatacaaaaaaattagctgggtgt

SEQ ID NO: 34386 - DNA, 1846 bp, Artificial sequence
  DNA replication origin
cagggaagtggccgaggtgaccctggaggtggctgtaggcgtctgggggcagtgtgggctctgcaggcagcgtgatgagtacagggggcggcttgttctccttggggggtgggggtggcagcggggccgggccttcctctaggggcggtaggggcagctccacgaaggcggcgggccctgcgtcccccacaaaacccagagcctctggcccggggccctcaggcgggaagtagggcaagagaaactggggccccccgggtgcctgctggtagtgggggtatggaggcagccccggggccttgaggtagggctgaggctccaggaggtagctgcctggggcggaggggacccccgctggccccccgctgcttgctgccagcttatacagggctgactggcccaggtcgggggtggtccactcgatccgatagatgcgggggtcgaagaagcacccgcatggggccatctggaaacctgtgggcggcaggcgggtgccctgagagcagctgctgcctgaggggcccagcccaagcctgggggcctgtttgggagatgccacaagaaccttgccattggggggcccctttgggggacgacatagatattgctttggggccctggctgggtgatggatgacacagagcttgtctttggggctcatctgggggacctgtgtgaagcatggggagcagaggccatgccttcaggctcccacttagggacggggcaggggcaagatgggcctgcacactcaaacccactcccagcctcgtcaagggctcaggggaggccggtacctgctggtggggctggaaacacctctttctctgggtctgggggatgatacaggttcaaggagcctgtggacaaaggtgcccaggtgggtagggcccttaggcgggtgggcccctgaaccctctccagcaggtgctcccacccacccgatcgtacccatagcgggaggaggctcggcacaggtgggagcaggctggttgcccagcacctcagccccctccagactctgcgggctgaaaccttcctggggagctgcaggggcacagaacggtttggggtgctgcatggggcagcggggggcccggtccagacaggccaggagggcggcagtgggagtgcaagtggcccaaccggagaacaggctgagaacctggtggggttctgtttgcctggttactcggggcagcgggttccagcctgcagcgcgcccactggttggggttctgggtgttgggggcaagcaggggcagacgttggcagacatggtcatcaccatgggagggaggattctgggccaggcctttgcctcttccagcaacacccccctaacagctttgaggccgcctcctccaggcaggctgccctgatccacacccacacaggctgaggccccccgggtcctcaacccgctaccttcttgggggtcaaggcctctctgggcaccagcagcacccagcttggggcagggcccatggaggcagctaagaggtttggggaaggtgggggccgaggaggggctgcttcagggtcacagaaaggcctggattttaaaagaataaaatttattgtactctcctcgccccagggtgcccctgggaaagcctgaggctacttgtacgcgttggccttgtgcttcggcaagaaggcgaagctggggggcactggcccaaggagcatctcgctgtgggagagcaggtggaaagcgaggtcaggcccaggacctgcaaagtaccctccgtgaccccgggcccccgactgcagctccccaactccagcccacccaggcacctgatgcggatccagtcggctgccttctggctggccatcagcg

SEQ ID NO: 34387 - DNA, 2621 bp, Artificial sequence
  DNA replication origin
ttttaaaagaataaaatttattgtactctcctcgccccagggtgcccctgggaaagcctgaggctacttgtacgcgttggccttgtgcttcggcaagaaggcgaagctggggggcactggcccaaggagcatctcgctgtgggagagcaggtggaaagcgaggtcaggcccaggacctgcaaagtaccctccgtgaccccgggcccccgactgcagctccccaactccagcccacccaggcacctgatgcggatccagtcggctgccttctggctggccatcagcgtctccaggtagtcgcggcccaggtagtagggcggccgctcgttgatcctctgtgggagccgctccagcagccccacgggcacgtacctgcggcgggtgggcgggcaggacaggcttgagtcagctctaaccagccgcggcccacgcgccgcccaccccagccagccccggtgcccaccggcacaggaaggacagccactcgagcagaaagcgccgggtcttctccacgccctgcgtgtccgagccccagtgctccaggccgtagttggtgaagtcccgcaggatgtccaggcgctcggacgacgagatgtcccagtgccgctgctccttgatctccgtgaagagccacggcttgagcagggcgccactgtgggacgggtgacgatcagtgggcccagccaccagcctgcctgggatcgtgtggcctctgcttccatggcctggcctgagccggagcccagaccacaaaacctacaagcctagtaagcctcccagctgcatgcacacaaccttcaaagcacaggactttcttttgttttttctgagacggagtctggctctgtcgcccaggctggggtgcagtggtaagatctcggctcactgttcaacctccgtctcccaggttcaggcaattgtcctgcctcagcctccctagtagttgggattacaggcgtgtaccactacacctggctaatttttgtatttttaatagagatgtttcaccatgttggtcaggctagtcttgaacctccgacctcaaatgatcggcgtgccttggcctcccaaagtgctgggattacaggcgtgagccacacacctggccaaagcccaggactttcaacccacaatcatcagatcccacagcagcagcaatttccagtcccctctgccgcaacgcagctgcaactcctgacatcgctctctgctcctcccatcttgggaccaacagcccaccacagaacaggggtgggtgacggcgtgttgggttcagggcactgctgctgtgcatgaagctggatctctaacatccctgggcacttaccgggcaatcatgatcccggtgacaccagtctgcatggcgcggttggcatcctcaaatgacaagatgtccccatttcctgaggagacagaggctggggtctcagggagacatgggcaggtgggaccctggagttctgctcaccagcccttcaggagttttggctgacccagtggctcccatcagggtggtacgagggggtcccaagtgggaaggcgaacagcccagaggtgtgagtgaccaagggtggtaggggagagggaggtggcttcccggaacacccaccgaacaggggcatggggctggcggcctgcacgcactcctcgatgtactgccagtcggctagcttggtgtagcgctgctcccgagagcggccgtggagctgggggagaagccgccacgcagggtaggaggcagagagtgagacgcagagaggaagagaccaagagagccaggctgagagagacagagagagacacaggcggagacagagggaggtgtggaggtgaagagggagggatgggaggagaggagccattaggaagggacgcggggtcgaccgcgaggccccaatgcccgaggcgtcccaagacccaccgtgacgagtgccacgccccagtcccgcagctcgggcagcaggcggtgcgccaggttcacacgctcctggacgcctgtgcggatcttcacagtcagcggcacatccagcacctacaggacggtggtgggaggtggtgggagatggtgggaggtggtgggagacggtgggaggtggtgggagacagggcccgggggagttgtttgggagccagtgcgaggatgtggctggccgtacctggttcatgccacggacgatctgctggaacttggtggagcgattcatgagggcacagcccccaccctggaagagacaggcgggtggagggagggcaggacgtgggctgacccaagacccctcacccctgctgcccggaggcccccaccaggagacgccgacctgcaggaaaggcagggactccagggccacacttgagcccaaacccctgaccctccaccgagacatcgccggctgggtcagtgcctccctgcccagatggggaaaccgaggcacacgtccagggccgctaccttcttgtacacgaggtcgatggggcagccgacgttgatgtccacaaagtccacctccacggtgcggctcagcagctcggcacacttggtcatggtgtcggggaaggcgccctccagctgtaggtgggtagtggcagaacaggagggtgaggggagagtccgaactgtcccc

SEQ ID NO: 34388 - DNA, 1180 bp, Artificial sequence
  DNA replication origin
ggacaacgtcagtagcagatctgtccatctggtgtgcgtctattaaataccagctgtgtccacgttcctgttctagctgcctgggagtcagaggctgtgtgccttgagggagctcctggctgagtctccctctctgtgctctgtcctgggcccagccctcaggaggtggggacagaaagagctggacagggccgggggcggtggctcacgcctgtaatcccagcactttgggaggctgaggcaggcagatcatttgaagtcgggagttcaaaaccagcctagccatcatggtgaaaccctatctctactaaaaatacaaaaattagccgggcctggtggcgggcacctgtaattccagccactcaggaggctgaggcaggagaatcacttgaacccaggaggcggatgttgcagtgagccaagattgtgccaccgcactccagcctgggcaacagagcaagactctatctcaaaaaaaaaaaaaaaaaaagagctggacacactctaagtctcagagggtcagggtcgggcagcgggggacaaatgtgggaggcttcctggaagagggggcattgggactgggtttggatggttaagtagaagctctccagtggaggagacgatgaggaaaggaacattcctgatgaagggattgattggcacatgcagaggcccagcaaaggagccagaccatttgggccaagtgtgtcctagactgtgggtagaagggaggctccagggcctcagcagctggggtggaggccaagctccacttgtgtgtatttttttccctccagctggacatccgtggcaaactttacctggcccccctcaccacggtaggacctgggtcaggtggctggtcgggtggcagggtggcagtgtggtcattccaacagggcttagtgtctgtccccacctactggattgtggggctggggcgcatattcagggttctgctgtgtgtgtgtgtgtgtgcgcgtgcaagagcatgtgtgtctgtcctgctccccccgcagtgtgggaacctgcccttccgacggatctgcaagcgcttcggggcggatgtgacatgtggagagatggccgtctgcaccaacctgctgcagggccagatgtccgagtgggccctactcaaacgccaccagtgtgaggacatctttggcgtccaggtcagtgc

SEQ ID NO: 34389 - DNA, 1324 bp, Artificial sequence
  DNA replication origin
agctgtgcatgccgggagattaggcagcggctgagggcgagaagccaccggctcttcattccgggccgttcttccgcctgcagggtggtcagcggaggtacctgagatcgtgcacgttggggcctgtcacatgcgcgaaggacaccacgtgcatgctagggcaggtgggatttgaggccaggcccgcgctgcatactggggattgtagtccctgcatatggacgtacggcgcatgtgctctgccagcggccgttactggcgggtcttggggttgaagcgagtgccgcggggcgtgctggggcctgcggtgtttgaagggccgaaaggcgtgctgggaaatgtggtggcttagactccgcttcaaggcatgctgggaattgtagtttttcgcagcctaacgtgcgcagggacgttcttgactgaacctgataatagtttcgcgcaacactttggacagtgaggacccagggacaaaataggtcttttttgaggccgtgaggggctcccaggctgggagctggctggttcttaagtagtgagctccccatcagcagaaggatttaaggacgtgcaagtgtttctagcctcctttccccagtgtttattgactatgttcggagggttttcctttccctttctgtcggcagatacctcaccaccaaggagcagtttcaccaattcctggaagccaaagggcaggagaagacttgccgggaaaccgaggtaggagaccctgctggcaatgagctggctgagcctgaggctaagcggatccgactggaggatggacagacggcggacgggcagacggaggaggcagcagagcccggggagcagctacagactcagaagagggcccggggacaaaacaagggccggccccatgtgaagcccacgaactacgacaagaacaggctgtgtccctccctaatccaggcaagtgcggccacgtgagcattcctgccggggcaggcaggagcagggtgtgtttcctggcagcgggtaattgttagaaagctcctgggccttcagcaacgagcagtgagcttgctctgatgccattccgtcttcattctcctcgggatacattgtagggcttgtcattgttctcattgtataaatggagatgcagaggcacggtgaggtgcctgacttgctcagggacacaagagccaggaggggtgatctagagtttgaaccctggctgctgggctgccccggggtctccctgtcctccctcactgcttccctgtttcctcgcaggagtcggctgctaagtgtttcttcggtgatcgctgccgctttctgcacgacgtggggcgct

SEQ ID NO: 34390 - DNA, 1064 bp, Artificial sequence
  DNA replication origin
acctcgtctctacaaaaaatttaaaaattatccaggcctattggtgcatgtctgtagacgcagctacttgggaggctgaggtgggaggatagcttgagcccaggacgaggctgcggtgagtcgtgatcgtaccgctgcactccagcctgggcgacagaacgaaaccgtttcaacagaacaacaaagacaaaaacctccaaaacaccctaacagttaaatttcctcagtccagaagctgattgcagtccagttcgcaattggccaggctctagtttatataggacctgaggctccacccatgtgcaggcaccgcccccgtggcgtcacgagcgagcaatggcgtcattggaacgacatgagcatgcgcacttccccagcacaatcagggaagacacgcgtgacccggaaggtcttcccgccacactccagagcggatgtgaggggcgccgatggcggagggaacggcggaggctcctctagagaatggtggtggtggcgactcgggagccggagctttggaacgaggagtggcgcccattaagcgtcagtgagtcgccggggcaggagggaagctgaagggccttttccggcacccatagcgcggtccgagctgtgcatgccgggagattaggcagcggctgagggcgagaagccaccggctcttcattccgggccgttcttccgcctgcagggtggtcagcggaggtacctgagatcgtgcacgttggggcctgtcacatgcgcgaaggacaccacgtgcatgctagggcaggtgggatttgaggccaggcccgcgctgcatactggggattgtagtccctgcatatggacgtacggcgcatgtgctctgccagcggccgttactggcgggtcttggggttgaagcgagtgccgcggggcgtgctggggcctgcggtgtttgaagggccgaaaggcgtgctgggaaatgtggtggcttagactccgcttcaaggcatgctgggaattgtagtttttcgcagcctaacgtgcgcagggacgttcttgactgaacctgataatagtttcgcgcaacactttggaca

SEQ ID NO: 34391 - DNA, 917 bp, Artificial sequence
  DNA replication origin
agagtcatacataggccacagccaccaaggtatatacacaatccctcatgcaccttcataacacactagacagacacacaatcacgcagacacacaatggcacacacacaggcctcccccaagtcatgcatccacggcagtctggctcccacatgcacacacactcagggacatgcgctcgcacccggctcccccgctctctgccacctcccgcccacccgcctgccctgccatctcgcgtccttggcccgggctgccctaatcccaggctcctgtcctgaagccaggagataaggagcagctgcagccacagataaaggagtcgcagccacaaatccggggcggccgcggcagcatcgggcactgagcccggggccgcacctgccctgctgctgccacccccatccggcctgggcgagagggctgcggagagggcaagagggggacacagagtgggggagagactgaggagcatggagggagggggaactagagagagagagagggagagatgcagagaaaaattcgagagattcgagagggtcacagagagaaggaaatacagaaagaactagaaatgttttctgagttagaaacaggaagaataggttgagcacagtggctcatgcctgtaatcccagcagtttgggaggctgaggtgggaggattgcttgaacccaggagtttgagaccagccaggacagcatggcgagaccctatctccacaaaaaatacagaaattagccaggcatgatggtgggcgcctgcggtcccagcgacttgggaggctgaggcgggaggattacttgagcccaggaggttgaggctgcattgagccgagatcatgccactgcactccagcctgggtggaagaacaagatcctgtctctaaaaaaaaagagagaaacagtggccgg

SEQ ID NO: 34392 - DNA, 774 bp, Artificial sequence
  DNA replication origin
tctcccgtggagagggaaagggacttacccaggacactgggacagctgagggctccccagaaacgatgttttggggctactgattcaacggtcactctcaccccaggcccaacccatgccgagcacacacagaggcctcagctcaggcagaggacacagagctggagacacactcccgggcgggggtcaggctggcccggagcaaggtccccgggagctgggttaggagcccgccaggcggggatgggacccacaaggcctgtgggtggcaggaaggggccggcccgttccaggtgaggatggtgaaaacagggccagcagctgtccccacaggaccatttacagccacaggtcgcaggtcaaggggcccgtccctgggggccttaggtcagcaaggtgggaaaaccatcaggcccaccaaggaggccagggcaggggaatagagtctcaggagcaaggttgtgcaagcagggagctgggctggggttgtgcggtctcgtgtgggacatagcagtggctgagtggctcttctcaggaactcacagtggcaccaacattcatgcatacccacacacaaacacacagacacacacatacagagtcatacataggccacagccaccaaggtatatacacaatccctcatgcaccttcataacacactagacagacacacaatcacgcagacacacaatggcacacacacaggcctcccccaagtcatgcatccacggcagtctggctcccacatgcacacacactcagggacatgcg

SEQ ID NO: 34393 - DNA, 994 bp, Artificial sequence
  DNA replication origin
atagcatgtgggttggtgacagagagagtgtgcgggtgatttgggagggtgtcaggatggaaggaactgtgttcctggtgtgaccacatggggctgagcaaggcagggtctccgtgtcccccggtgcgacggggtctccaaccacgtgtgtggttgtttcagcgtgtgtgtccctgagtggaatggctgtagctgggcgtaggtcctcgcgtccccacctcctgcgccccgccccgccccctaccttggacacgcccctagcgtctccccccaatcccagaggaagaaccaactctttcaagtcgctgttgccggggcaaccgttttacaagcgtccacatggtgggcacatgtgtgtgtgtcctgcgccccatgtgtctgctcggcccccgcccccatggcccccagccgcggcggggagggggcacaggcggtgtggggtgagcgggaggcagtggaggggcagctggtgacagcttaatgatggagggctggggtgggggtgggctcctggccctgctgtgtgtgtgcaggggtggctgtgccttccagacggggcccggggtgtatgtgtgtgtctgtgtgtgtgtgtgggtgtgtgtgtgtgtactaaccagtgccaggcagcgtgggggtgtgtaaggatctgctgagagtgtgtgtgtgtgtgtgtgtgtgtgtgtgtgtcgggctgagtgaaccccgggtctgtgggcatgagtgcattcagaagggcgtggggtaaggaaggacccccgcaggagagtgtacgcgtgaccttgtgagatactcgtggaggggttgtgtcagcgtgtgtctgcgtgtgaggacccgggggtggggcggggtgtgacagtgcaggagtgtctgtgctcactagggcgtctaggtttgtgtgagaaggaaagataggccgggcgcggtggctcacgcctctaatcccagcacttcgggaggccgaagcgggcggatcacgaggttaagagatcgagac

SEQ ID NO: 34394 - DNA, 1247 bp, Artificial sequence
  DNA replication origin
attcagaagggcgtggggtaaggaaggacccccgcaggagagtgtacgcgtgaccttgtgagatactcgtggaggggttgtgtcagcgtgtgtctgcgtgtgaggacccgggggtggggcggggtgtgacagtgcaggagtgtctgtgctcactagggcgtctaggtttgtgtgagaaggaaagataggccgggcgcggtggctcacgcctctaatcccagcacttcgggaggccgaagcgggcggatcacgaggttaagagatcgagaccatcctgaccaacatggtgaaaccccttctctactaaactgggcgtggtggcgcgcgcctgtagtcccagctacttgggaagctgaggcaggagaatcacatgaacccaggaggcgaaggttgcagtgagccgagattatgccattgcactccagcctgggcaacagagcaagactccgtctcaaaaaaaaaaaaaaaaaaaagagagatggcagggggggtgaccccaccgggaataaaggtttgagggtgtgtgtttgaggttagggtatgtgtgtcactgggagtgggtttctgggagtgaacatttgggaacactagtaatggcagacattgggacatcacccccaacttgccaggcttactcacttacttattcacatttactcattacttatacaagcttgttcacactcattcagtccttactagaacacagtgaagatctactagtaataccctgttacaagtggggaaactgaggcacgggggggaaggcccaaggccacacagaacacagatccctgttaacttccatcctagatctgggaacaggctgccacttctctgacataggtccgttctctcgtccccccacccacaactcacattccagcacgcaccccgcgcacgtgcacagcaccgcgtgcatcagcccgcgtgcagcaggaggcgaggctgcgtgagtgtccccatcaccgcgcgcactgcgcggccccgcaagttttacaggcgctttgtggggacgtgcatatgttggggttagggatcttctaggaaggcctaatctgcatgcgaacccccaggctgctggaatcagaaacatgcaggcagccagggccggagtgaggaggaggccccaagaacctcagcggcgggagcgagaaaccagagcacgggggctccaagaacgcaggcggcgcggggaggagtctgcagggcgggagtttttcggtcaccccgcggggcgggggcgg

SEQ ID NO: 34395 - DNA, 1200 bp, Artificial sequence
  DNA replication origin
cagcaccgcgtgcatcagcccgcgtgcagcaggaggcgaggctgcgtgagtgtccccatcaccgcgcgcactgcgcggccccgcaagttttacaggcgctttgtggggacgtgcatatgttggggttagggatcttctaggaaggcctaatctgcatgcgaacccccaggctgctggaatcagaaacatgcaggcagccagggccggagtgaggaggaggccccaagaacctcagcggcgggagcgagaaaccagagcacgggggctccaagaacgcaggcggcgcggggaggagtctgcagggcgggagtttttcggtcaccccgcggggcgggggcggggccgcagcagtcccagcccagctcagccatcccagtcccgtccccgagttagcccggcgccgccagggagcgctgtgggagcgcggagccgtcggggaggagcccgggtgggtttgggctcccctgcccgtgagccttggtgccaggagggggcgccggcgggagctaggagcgagaaatcccctgcagggctctgaggccgcactgggggacttactgcttgatggggggcgctgaggacagcgggtgtcgtcatccgtccgaggggaagactttgcgtctcagttccctggaagagctttcttgggagggggcttcttcagcttctggggaaggagaacctgggacgagattggagggggacaccccaatcctcagtggggtggggggagctgtatgcgggggccacagctgttggggtgtgggccatgggtcttagttcgccagaaggggtcgggggagcgtcttggagctccggatttaggcaagaggagccgtcaggggtccccggagtgaggatgggaaacagctagtttgaggggggcgccgctctgggggcttcccttgaggggcttctttagtgaagggacttcttggcgccttgttctctggaaggggacctgggacaggtttgggaggtctggcagaaaggtcagatcctcgatagaatgtggggggcgccaagggccacaggcactggcgtcgggacagctgcggctcttagacaccttcggagggggtgtcttggggtcccggctctcccgaaggggagccgtcggagtccccggggccgggggagaaagccgtctaaagggggctctgtggttggttcccgcgcctctgccacctgcgctcctcc

SEQ ID NO: 34396 - DNA, 885 bp, Artificial sequence
  DNA replication origin
ctccggtcccctccggcgggggcggggagggcggggagggccggggaaacccgagccaccgcccccagccccgcccccggccccgcccccggccccgcgccggccgagccgtccgcggcgggacgggcggaggcggcgggagagcgcgccctgaagccgctccgagtgcccaggtccctctcgccgccgccccggagccccgtgctgcgcgccgaggccgcctgcgccgtccgtgcgcccccgcgccccgcgccctctgagccgccggccgtccagggcacccacccccagccccagcccccgccggcccgggatggccgcagcccgcggctaagcgagcccggggggccccatgggccggcccgcgccgcaccccgcccgcggccgccccctccggcccgggccccccccgggcaccgcgggcccaggcggcccggatggcggtcgcggcggctggggcaggggctggggccgcgcggccgccactgacgggtagtccggcgcccacagcaggtaagcaaggggcaggcggggcaggtgggggggcagcagggtacgacggggacgacctgccccatggacggggcatggagggtgctgaggactccgagtagaccaggggattccctcctgcagcagaaccagcgggtgtatgagggtggggtcagagggacgacaggtcagcgcgtggggaggggcgggggcgtgaagccagatcctaagcggctctccaagcccgaatccagccgcggtgtccctgtccgacggggcgggcgcactcctgtctcctaaaacctccaagtgtgcatctgaggaacgcacggtgccctccccagaatccccttagcctctaggagggcgagacccagacagccctttagccat

SEQ ID NO: 34397 - DNA, 1215 bp, Artificial sequence
  DNA replication origin
ctccgagtagaccaggggattccctcctgcagcagaaccagcgggtgtatgagggtggggtcagagggacgacaggtcagcgcgtggggaggggcgggggcgtgaagccagatcctaagcggctctccaagcccgaatccagccgcggtgtccctgtccgacggggcgggcgcactcctgtctcctaaaacctccaagtgtgcatctgaggaacgcacggtgccctccccagaatccccttagcctctaggagggcgagacccagacagccctttagccatgtggtctccaaggggccgttggggggcttccggatcctgcagagcccgggcggggggctgccgtcgcggtccagctgcgcacagaagtaaacatctgtcagtggcgcgttccctgctcgccgccgccgccgccggggacacggtgtcctccggtgagggccgggccctctcggctcctggagcagcccgttcagccaccagagggcgtgaaaccctttggtgttgggggtgggggtcccttaagggcaaagcctggatgtgaagtggcgggaggctgtgcctgcctttcctgctttttataaaaggtgtctcctgcacggggatagccccgaattgtcccaggaggtggtttgtggattaggagttattaggcccaagggggctgcagacagattagtggggaggggggtgtgctggagagagaaatggctctcccagggtgaatgccaccactgtcccctccccagaacgcatccgacctgcccacaggcctgtgattacctgcagggctcgtcattggtccagatttggggagtggggccaggggcttaaagcaggggggtgcaggaggccggacccctgactttcctccctcttgcctgtctcccctgccctttccctgttctctacatccttgtccctgttccatggccctctttgtctgtctctgagtgccccgggctgaggaagcctgggtggggtgtgaccagcctcagaggatgtcagtgaggggcaggatcccacccacactgccagcttctcccacccccagcttcttgccttggggccctttggacacccctccctcctcccttcatcctaagactcccgaggttcatagctccggcaccgactccacccccagggagctacagaaagcttcttccaggggtgcagggaagaaaataaaacattcccctcttcagctgggtac

SEQ ID NO: 34398 - DNA, 1319 bp, Artificial sequence
  DNA replication origin
cccctgactttcctccctcttgcctgtctcccctgccctttccctgttctctacatccttgtccctgttccatggccctctttgtctgtctctgagtgccccgggctgaggaagcctgggtggggtgtgaccagcctcagaggatgtcagtgaggggcaggatcccacccacactgccagcttctcccacccccagcttcttgccttggggccctttggacacccctccctcctcccttcatcctaagactcccgaggttcatagctccggcaccgactccacccccagggagctacagaaagcttcttccaggggtgcagggaagaaaataaaacattcccctcttcagctgggtactgcatctgaaactccaccatcagcactggcccctcggcgtttcaggtcccagttttcagggagcgaacagaggagacagctttcaagagctgggcagaagggactcaaaaagtttgcagccgggcacaacacaatcaaaagattgtttcgacaaatgtgtgtcgatggcaaccgcgtggttgactggtgtcagggttgttgggtgctgtccttcaagggaggcagatttagacccagggacacagggctggggaagctcagagtggggatggagggctctacctcagggtaggaatgtcagagaagacttcctggaggaagggcctcagaggtggggctgtgaaggatgagtaggagttttctaagtgggaaaggaaaaggcattccaggtggctgtgcatgcaaagatctggaggcatggaatagtcaaggcaccttggtgagtgtgggagagactgttctagaaggttggcagaggaagaactgggctggggcactcaaggttgcatccctggaggtaggggctgaatacgcagatcagagaggtgcaagttgttaatgtatctggagtcactgggctggactatctttgctggggggctgtgggcttcctccgctgatgcatctccctggtcctccaagttgaggcagaggctctggggcctcaaggtggaggtggtggccgggggttggggtcgggagatggacaggaggctcccaaaccagccttgcacttgcagggctgataatggccttgaaggaagcctgaagaaagagtggatatgaatggggcatgcctgcaggaagggtgtctcggagatgatgatgttggaatggaggggtctccctgtcaaatccaaatgaaatcaggcttcaggtgagccctggaagaaatcagacagcaggcccagcttacagcatgtggccctcacttcccaagtggggaaactaaggcccagag

SEQ ID NO: 34399 - DNA, 1051 bp, Artificial sequence
  DNA replication origin
gccctggctggtcatgaactcctgggctcaagagatcctcctgtctcagcctcccaaagtgctgggattataggcaggcgccaccatgccttgccctgaataatcttttaggatgtctgtccctgcctccctgcaagggggctggctggccctatctttaaaaaacctatgacacccccccaccacctcccactccactgcctgaaattctaccccttacgttgggggtatctgaccccacacagaggaggagcttacactgggccaggcgggcaatccgggcgtccagggttcgaggcaggcggtgcagggggaccagcgcaggtccgaggcggtggctgagaagcaggccctctcgacacatccagatggacagcacggagctgcagagcactgaggccaaggccgccgccttccagcgctgcatcctcagcctgcgggcacgggatggtcagccgcacgccccgtctgtccctccagcagccaacgggcacagggcgctgggccaggactcagtgtggggcctttgactttgaacgcctgccgaatggtcgataatcacatgggaatggtccctcaaggaaccattgaacaaggaaggggttggcctccgtgccaggagtcacagggaaccgcccccatctgggggtcccggagtgccttcctgaggagccgatgacaaggtccagacttgaataaacgtaggagttggccaggcagaggagaatggcatcacaggcaggggacacagccagtgcaaaggccccgaggccagactgagtgtggcgtatcccaggaacagcaaggaggccggagcggctgcagctgaggagccagggggaagagtgaaaggaggagaggtcattcccggcaggtggcagtgtgggacaaaggcgcggggagggtggtgtttaggacagtctggaggcaggaatctggggctgacactgttccctacatgctggtgtcctccattgactctgcccctctctgagcctgtttcccatccagatggataagcaggcccagaagtgggcagcaatggaccaga

SEQ ID NO: 34400 - DNA, 1667 bp, Artificial sequence
  DNA replication origin
catgtagggaacagtgtcagccccagattcctgcctccagactgtcctaaacaccaccctccccgcgcctttgtcccacactgccacctgccgggaatgacctctcctcctttcactcttccccctggctcctcagctgcagccgctccggcctccttgctgttcctgggatacgccacactcagtctggcctcggggcctttgcactggctgtgtcccctgcctgtgatgccattctcctctgcctggccaactcctacgtttattcaagtctggaccttgtcatcggctcctcaggaaggcactccgggacccccagatgggggcggttccctgtgactcctggcacggaggccaaccccttccttgttcaatggttccttgagggaccattcccatgtgattatcgaccattcggcaggcgttcaaagtcaaaggccccacactgagtcctggcccagcgccctgtgcccgttggctgctggagggacagacggggcgtgcggctgaccatcccgtgcccgcaggctgaggatgcagcgctggaaggcggcggccttggcctcagtgctctgcagctccgtgctgtccatctggatgtgtcgagagggcctgcttctcagccaccgcctcggacctgcgctggtccccctgcaccgcctgcctcgaaccctggacgcccggattgcccgcctggcccagtgtaagctcctcctctgtgtggggtcagatacccccaacgtaaggggtagaatttcaggcagtggagtgggaggtggtgggggggtgtcataggttttttaaagatagggccagccagcccccttgcagggaggcagggacagacatcctaaaagattattcagggcaaggcatggtggcgcctgcctataatcccagcactttgggaggctgagacaggaggatctcttgagcccaggagttcatgaccagccagggcaatgtagcgagaccgccatctctacaaaaaacttcagaaattagccaggtgtagtggcgcacgcctgtagttccagctacttgggaggctgaggtgggaggatcacttgagcccaagagttcaaggctgcattgagctatgattgcaccactatactccagcctgagcaacagagcaagattctgtctcaaaacattataataataaatacattttctaaaaaaagatggggtggagggaggttgcaaattcccccaatggcctggtggagctagggtgacttctgggaactggggtctttcggctcagctgtcacaaggaattaggctctgccctgaggtcccgtgggggccagatggagattagacctgggcattcgcctggttggcccccgcggcgcagcagggggggcggtgggaggagagagaggctggatctgaggtcccagtgacctgccccaggggacagggaccaaggggaggcgggagatggagcaggagctaaaaaccggaagaaaggcccagagattcgaaggggtgaggaggggtggagagaggagagacggggctgggggcacagacacgggcaaaagtgctgctatagggacacagaaatgcccaccctgagggcaagaccctcgcccaactccccaccaatccctaatgcctgccccaccgcaggtgctgtggggtgagggtggtgcgtg

SEQ ID NO: 34401 - DNA, 1053 bp, Artificial sequence
  DNA replication origin
gtctttcggctcagctgtcacaaggaattaggctctgccctgaggtcccgtgggggccagatggagattagacctgggcattcgcctggttggcccccgcggcgcagcagggggggcggtgggaggagagagaggctggatctgaggtcccagtgacctgccccaggggacagggaccaaggggaggcgggagatggagcaggagctaaaaaccggaagaaaggcccagagattcgaaggggtgaggaggggtggagagaggagagacggggctgggggcacagacacgggcaaaagtgctgctatagggacacagaaatgcccaccctgagggcaagaccctcgcccaactccccaccaatccctaatgcctgccccaccgcaggtgctgtggggtgagggtggtgcgtgggccctgacccctgtgcccacgcacatgtccatgcgtgcgcctgcgcgggcatctgaggcgtggatgccggcagggtgcgtgtgcagcgcctttgggtgtgggccacgagtacgcccatgtgcgcgtctgcgcccgcccctgccagcccacacaatcctcttttcttgtccttacaatgcacaagggtggcctccagcacgagctccacttctgtcctcccaccacttccctctctgcaagcggcgtgaagtccttcctaggactctgggacagagacccgggcgggacccccaaaatccagtgctccaggacttggggtgcggggggcaaagcacgaatggaggaatttcaggcactgcggagggtcagggcccatgggcgggtgcctgtctgccctactgcaaaaagcgagtggccactgactccccaagtccccatgttctaggctcctggtggaatttcaggctggggaccttgtgttctagcccctgtgcaagcagccagccccgctgcagggaggcagggacagacatcctaaaagatgattcattgttgccaggtgcggtggctcacgcctgtgatcccagcactttgggaggccgaggtgggcggatcacgaggtcaggagatggagaccattc

SEQ ID NO: 34402 - DNA, 2073 bp, Artificial sequence
  DNA replication origin
ccatgggcgggtgcctgtctgccctactgcaaaaagcgagtggccactgactccccaagtccccatgttctaggctcctggtggaatttcaggctggggaccttgtgttctagcccctgtgcaagcagccagccccgctgcagggaggcagggacagacatcctaaaagatgattcattgttgccaggtgcggtggctcacgcctgtgatcccagcactttgggaggccgaggtgggcggatcacgaggtcaggagatggagaccattctggctaacactgtgaaaccctgtctctactaaaattacaaaaaaattagccgggcgtggtggcgggcgcctgtagtcccagctactcgggaggctgaggcgggagaatggcgtgaacccgggaggcggagcttgcagtgagccgagatcgcgccactgcactccagcctgggcgacagagcgagactccgtctcaaaaaaaaaaaaaagattattcattgtttatatggaattcagatttagccgggcacctgtattgtatcgggcaagcccacaaatgtctgcttcgatgcacccctctggggttgggtgtgccccctaaccccccagcacagtcctggccactccagtcctgctccggggcttaaagaacacggactaggttgctcagtcatcgcccaccccccgcaccgatttcccaccctctcagccccggccaagacagagatcatggaagcttcatgggacagacagggaaactgaggcctgaggttgcaagtggcgaaagtggcagagtcatgctctgaggctgggtttgtctcgtttctgagaccccctgtgggaacagacatctcctcccccaccaaaccccaggagacagacagcccctccttccccagggccacccagaggctcattcttttgacagccaggtgcaccagcccggggggcaggtggggactaaagatttcctctcccaaccacaagcgtgactgccacctgctctggggctgggagtcccctgcctgcaggtccgccagcagcgctgcctgtcattccagcgtctgcagttctctcccggggcttccgagtttgggggtggagccaccgcttgggtaataaatttaggctgccaggccctgggaatcggtgacttgggcacctcctggcgagtgtgggagaaagcggctggacctgggccaaacttgggtgaacgatgaaggcaggaagaatgacctttaagcccgcctctgtcgctctctctcggccacctgctaatgatgtgaccttgggatggtccgttttgtcacctgtcacatgggggtggccttgacagtagctgctgccactccatggagtggggtccccacacaggcttcggatgcagtaggctgcggtacctgctgctcctctgcattctgagaaacccaaacaccccgattcatttcttggatagggaaactgaggctccactgcacagcggggcagtggggatggagggagtctgaaaagcccggggcctcagagcagacgtcggggcctgaagagggggctctagagacctatgacaacctcactaaagagggatagggcatgggaagcagccccccagtgctgcccagagaggatgcaccagtgtcctggggcagcccagcataggggcggggtccagatagatttgcgatggaggacgaggagaatggagcagcaatggggtgagagaggggcccagaggaggtgagttagagaccccggtcagctcagctcaaggtgagacgggctggaaagcggcccagaaaggatggaccaggttctgggcagccaatataggctcagggttcagaaaggggttttggaccagcgtaggggtgtgagtgtgtacgtgccccccagtgccgcccagagagggtgcatgagcagctcagcaagagggtggggaaatttgggacctgggagtgagacgagaagccgtctaggcctggcgtcccagcaagggtcttcgtttgcaggggtacagagagggtagggggctccctcccaccccctgcacccactgaccccccctcctttctcttcctcccctc

SEQ ID NO: 34403 - DNA, 1308 bp, Artificial sequence
  DNA replication origin
ccgcgccgtcgggcggggccccggcggcggcgcgcgcgtgcgcggttgggggcgcggccttgcgggctgcgcgagctggaggtgcgcgtgagcgagctgggcctgggctacgcgtccgacgagacggtgctgttccgctactgcgcaggcgcctgcgaggctgccgcgcgcgtctacgacctcgggctgcgacgactgcgccagcggcggcgcctgcggcgggagcgggtgcgcgcgcagccctgctgccgcccgacggcctacgaggacgaggtgtccttcctggacgcgcacagccgctaccacacggtgcacgagctgtcggcgcgcgagtgcgcctgcgtgtgaccctacctcactcggccggcgcggcggccactccccccgcctcgacggcaccactggccggccccgcgaaagactgcgcgtgcgtagagcacgccggcgcggccccgggactctcgcgataactgtactgagataaagtgtggcaactcgagctggctggtgattcatcctcggcgaggggctcgcgtgtgggccacgtcgccgtctccaccgggaaagcggggaccagtggggggggcccagctgcagggtagtgggaggatgctgtttgctttgggggaagggtagatgcaaagtgggtccagtttatggcggacaaaaaggaaaatggggtgaatggggctatgttggcagggaccgtccttcctgcctccctacgggtccctctgcccgtcccgagcgtgttccggtccgcacctcttcgctgtgtgggcttctggggaggggaaagggaagctacgctcggatgaagagaccgaggtctaggtggaccccgtttccccagcttgttcccttccgcacctctccgcggtgcgggcttctgggatgaagacactgaagtctaggtgggcccagtttccccagattgtcgctgactgcacctctcgcttctgggatgaagagactgaggtctaggtggacccagtttccccagcttgttcctgactgcacctctctgctgtgtggacttctggagagggggaaagggggagacactgtgggtgaggagcctgagatccaggtggaatcagttccccagcgtctccctgtccgcactgatcccgctatgtgggtttctaggaagggggagccactctgggggtgaggagagtgaggtccaggtggacctgggcctcccttatccgacggcctcctcgggccggtcttcgcccaccagggtgagctgaaagccactatctccttccaccagctactaaaaatacccgcacgctgcccacc

SEQ ID NO: 34404 - DNA, 1790 bp, Artificial sequence
  DNA replication origin
gatgttgttagccgcctgtgaggggtgcagagagataatcaccgcaccgtttccagatgtaatactgcaaagaaaaccgatgatgaggccgggtgcggtggctcacacctgtaatcccagcactttgggaggccgaggcaggcggatcacaaggtcaggagatcgagaccatcctggccaatatggtgaaacccgtctctactaaaaatacaaaaatttgccgggcgtggtggtgcatgcctgtaatcccagctacttgggaagctgaggcaggagaatcgcttgaaccagagagtcggaggttgcagtaagccgagatcgcgccactgcactccagcctggcgacagagcgagactctgtctcaaaaaaaaaaaaaaaaaaaaaaaaaattagctgggtgcggtggccggtgcctgtaatcccagctacccaggtggctgagacacaagaatcgcttgaacccaggaggcagatgttgtagggagccatgatcgcaccactgcactccaacctgggcgacacagtgagactgtctcaagaaaaaaaaaaaaaggggggagtgtccctttctgagtgtgcaattctgtgtggaaggtgactgtgtaggatcatgggtcctgcctgctgagcccttatgggtggtgatctctgtgtcttgtgagtgtgcttgtgtgtgtgtgtgagagagaccctcatccggtgtgccgatgcgctgatgacaaccgcagccccagggaactgcaggggcttctcggtttatttatgttccaattccctggtgggctgggcccgcgccctgtggttgggacgctggatctgggtgggagacaggaaggccgaggtccgggaggccccggagggtgggcaacactcacacacacatgcacactgtggcaggggagcttcgggggggcggcagacccctgatggtcagctttctcgctgtgtgtcctgggctgaacaacactcctctctgaggccaggccatctaggatggggaaactgaggctcggagtaagcgtcacttgggcttccgcagcgtctgggaactccggcctctctgcggaggccgggctgagtcggcccaaagggtggaggaatccaccaccttaaacctcagagtcagaagactgcgggggtaggcggggaccccagccagcggcagccctgaaactgcttcccaagcagatcacccgcctggccgccaagccctgctctcagggctccctggaagtcctgctgattagccgccttgagtgtctccagctgtagctgtgggtccccgggagccaggggctagggatgttccttcatggctgggtgattctccctgggggcggtttccgatctgcgccctccagctttgcggggggtggggggatgcgggctgagcctgggaagggacactgtggttagagggtggtcctaagggcagacgtgtgggaaggaggggagggggcccagctaaggagaagggttgtagccttgggaacccccagtctgaggggcaggaggggaggagtctcgcctcgccggtgcctgctctgggctcgcagtgcccgccccttccccgcccctcagaccgaccgtgggacccgccgacccctcccgcgctctggcaacccaacacccgaggcctgccaagcatcaaggtgacaccgtggggaaatctaaacaccgagccgggctttttccatactccgcaggggctcgtcgtaaatcccccccgtggaggcccggccagggcttttatgggccgaggacccaggtctctggggacccagctcta

SEQ ID NO: 34405 - DNA, 704 bp, Artificial sequence
  DNA replication origin
tgtggctggcgtttctctctcagcggaggcaagtaattacaactcagaaatacgttgccacttggctgtatcttttttattattgtataccttgaaggcaaggttaattaagtcctgttgtggggttcgagggctggaatctaatttttggagttttttctaatgttaggagcggattgagtgataaactgcatattgagaataagacggtcttctggtccctctgggtctagggtggtaaagcatctcagggttgttgccaaatgggccatgaactgggccgggtttttatatttgatggaaaagagcctaaatgctaactgatttgagagaggtcagctaaagaaaaaggagcattaaccttgcctatgccttcagctccagccacctctctaagaggaaattgttgggcaggtgggggagggctgtgtcacggaacgaaactgtaagccagaccgggtgtgaggaggggaggtgatagaaggattatagggtgggggagcggaggttgaggaagaattgggacctggctctgcctggcaaggagcagcctggggaggaggggagaggtcagatgggttcgtagaaaaggaggattcaaaggactcagagcttggggtgcagactgaaggaacagacaggagagaaagaagaaagatttgggacgagtcgcattgggagcagagactagggagggaccagtg

SEQ ID NO: 34406 - DNA, 784 bp, Artificial sequence
  DNA replication origin
cattccacacatagttctggagccctgctgcgttcctcggctgggtgccggggtgtaggcagaggatataacagccaggatacgtcccagtcctcaaggaggtgcacataaataacacacgtgatggtgacgtgggacttagaaactggcaggggctacgggcaaaactagaaggcaaatgagtgtggagtgctggtggcctggggacgggggatgaggaggtggcttgtgagctgagaattgaaggaggtgaggggtgagcttggggacatctaggggacaggcattgcaggcagagggtatggactatgcaaaggccctagggcaggactgtgccaggggttttggaggaagagtgaggaggctggtggggctggagcagtgaagaggggaggggaggagagggaggggagggagaggaggggtcgggacacacagggcatagtgggctgtagagaggatttgggcttttcccccaagtggggtgggagccatggaggactgtgggcaggggaggggcgggacctgacttaggggctcacaggcgccttctggctcagggggtagccgggtgaccagggcagaggggactacgcttgtcgtgatgatggaatcagactagaggcagatctgggacagattctgaaggcaaaggggctcgagatgcggggagggcgggagcagctcttcagtcccaggaggggcacacatcagccccgtggggtcttctcagctgtgtcccaccccaatcatgtcaaacacatttataggagcccacagccca

SEQ ID NO: 34407 - DNA, 1267 bp, Artificial sequence
  DNA replication origin
tccccaccacctacctggccctgagttctgggcccggccccggcccaagctcctcatgcatagaagccaatgtcaggggccaggcggcctgggaaatggcagagatggaaaagctgaccggagtggcgaggctgggtggcgggggcggcagccagacagccaggtgtgcaggacgagcccaggcccgagctgccagcaggagggggtcgagagtggcaaggaggaggcgttggcagccaggcagggaagcagagccactgccaagggggattaggcccaggagccccgggccccacaggagaatagagccattgatgggaacctggagctggggccctggtgccagggcccgtggggggcgccgctgagctggcggtgtgaggctggaagcagccgcagaactgaggtctcaggcctgttcttgtgtccaccacgtggatgagtctccgtctgccggccggtgccctgccagggccagcatggctgatgggcgcccagcaggtgctctgcaggagccagtactggtcaggcttgagaaagtggccaaggaaggcctggcggggagtggggaaggaagtgagaggccccccagttttggagcagcaaacccgagttcaaatccagctctgccactcagcagccggggacactatgggcaaagaaggggggcatcgtgaggactgagggagggagaccacccagtggggtgcccggccaagcaagggcttagcagcagtggggtctgaacagcctccctcctctgtctcgcaggcctgaccgccgctgcctacagagtcacactcaatcctccgggcaccttccttgaaggagtggctaaggttggacaatacacgttcactgcaggtgagcacgctgggctgggcatggctgggccctctcctggcacagccccagctctcagagcacatttgacggctgcctcttctctctgactccccagcccgtgtccacagtgctggccatccggagaaagtggggtgttcctttatcaggaatacatgtagggtggggaggcccaggagaacagctccaggactggggccaggaggctgccatgcacagcgagcagccgactcgtggcatctctctccatccagacactggcagtgagcgcccaagaggctcctgctgtgcccgtctcgaggcccttgctcttcccgtctaccccgcagctgctgtcggggccgtgtttggcctcaccacctgcatcagcgcccatgtccgcgagaagcccgacgaccccctg

SEQ ID NO: 34408 - DNA, 1338 bp, Artificial sequence
  DNA replication origin
actgatcgcagtcgtcctcagtttcaccctctaggaatcggcctggggatgcacgtgctactctcttcctccaggccggtccccggcgcgtgcgcgcgatccatgtccatgtccgcgcctatcaataaagttgctcacttgttgccggcccgctagcccgaaaggttgcgcgcgcagcccgagaagtctcgcgatagccagccgcggctgcccttgcgcttcccgagctggcggggtccgtggtgcgggatcgagattgcgggctatggcgccgaaggtttttcgtcagtactgggatatccccgatggcaccgattgccaccgcaaagcctacagcaccaccagtattgccagcgtcgctggtgagcgccggccgggccccgagggtggagggccgaggccgcagggaggtcgtggggttactgggggctgtttggatcgaacgggtctgggagtctcgcgggtacgcacgtggttgtcatcggggtgtcttgggcggtcgtagggggggatcttgtgtgaaatggatgttggtagggggtccagcagggttggggagcactgggaggtcgtgacatgcgacaagctagtccctggggtcatctgaggcggtcccaagctatcgccaggctcggggaaattgtggagtgagacagggctattatcaggtccaaggagctaagggaccacgagactttccaacggggtagagattgttagaggggatcatgagtcatgattggggcatctgagggcggtacagatgtttgagaaagttttggggtgggatgaggtctttctgtggtcagggggtgctgggtggttagggacacctgaagcttttactgggaccgccagagaggtcctaggtgaggtggatcaggagctactatgagggtagccttgcaggggaatgaaggggacccgcaagccctggcattctccttttttttttttttttttgagacagagccttgctctgtcgcccgggctggactgcagtggcgagatctcggctcactgcaaccttcacgtccctggttcgagcaattcccttgcctcagcctcccaagtagctgggattacgggctcacgccaccgcgcctggctaattattttgtatttttagtagagacggggtttcaccgtgttggccagactgatctggaactcctggtctcaggccatccgcccatctcgggctcccaaagtgctgggattacaggcgtgagccaccatgcccggccggccctggcattctcttatagagtaaatctgagtcttgccccttccagcctgagcgtttcatgggcatcatgccctttaattctcagccac

SEQ ID NO: 34409 - DNA, 1234 bp, Artificial sequence
  DNA replication origin
ccccacgacctccctgcggcctcggccctccaccctcggggcccggccggcgctcaccagcgacgctggcaatactggtggtgctgtaggctttgcggtggcaatcggtgccatcggggatatcccagtactgacgaaaaaccttcggcgccatagcccgcaatctcgatcccgcaccacggaccccgccagctcgggaagcgcaagggcagccgcggctggctatcgcgagacttctcgggctgcgcgcgcaacctttcgggctagcgggccggcaacaagtgagcaactttattgataggcgcggacatggacatggatcgcgcgcacgcgccggggaccggcctggaggaagagagtagcacgtgcatccccaggccgattcctagagggtgaaactgaggacgactgcgatcagtgcagacagatttcgctagtcccagctcagggagtcctaggttagggactactagaggcggggactatctactaggggaggggccgggctcagactgggacgggcgggactccagttgataggagcaagacatgacgaaacaatgactggggggcggggcatggcggggatgtggccacacccagtgtcagaatctgcatagcgagtggtcatgccctgtggtcagtcaccaagctggagtctgagcagcgtgctactgttttgggccgtggacaggatcaggggcggggattatcgggaaagtgaccaatgacaatacgagaagctcagcgggacgtggcctctgttcaccccgcggctgtcccacgccctaggccggatgaagtacacaggcgcttgacttgggggcgtggctagaattggaggcataacctaaaagggacttgaccaatctgagactgtataagggatgaaggggcgaggccgtgcctggatctacccctgacaggccacaggttcggggggcgtggtcaggcttgctgtttcgcggagtccgggccaatcctggtgttagcttccaagtagggaggggacagtatcgaaggtgtgaccaatcttgtttccagagcctgagttgcgcgagccgccaaaggatgtggccagcctgggggcgtggctgtcaagatcttgtccaatcctagagtgagcccaaactcaggggcggagtttcatgatcccggaaccggtggtagtgtttgggtttgaggagagcacgacccagccctctggggtggggtctagcggggtcagcgacca

SEQ ID NO: 34410 - DNA, 1348 bp, Artificial sequence
  DNA replication origin
aaaggatgtggccagcctgggggcgtggctgtcaagatcttgtccaatcctagagtgagcccaaactcaggggcggagtttcatgatcccggaaccggtggtagtgtttgggtttgaggagagcacgacccagccctctggggtggggtctagcggggtcagcgaccaatcgcgccgaggtctagtggggcggggccctcccgggggcggggcctgtgccagttccgggccgcctgggggcgtggccgggcctgtacagcagcctgggccatgtcggcgccgccggccctgcagatccgggaggcaaacgcacacctggcagccgtgcaccggcgcgcagcggagctggaggcgcggctggacgcggcggagcgcacggtgcacgcccaagccgagcgcctggccctccacgaccagcagctgcgcgccgccctagacgaactgggtcgcgccaaggaccggtgaggcccggggccggccaggtggacttcaccgaggcggtaggcggaggcagagccgaggctggaaagcgaggaagggcagggggaaccgtgtgcacttgtatagacgctagactgagtatcggattgataaaaacaccaaaaaactcgaattagtaatcagtatgtaaagttgcgagaagtgacacaggtgtggacctctaacttcaaacaggcccactttcccacaggtgctgagcgacgcagggaccacagaccgcccagcgtaggcattgggagccatagcaggctcttcagcaggggaggaggggatcatatcagcattttaacttttaaaatttattattatttttttgagacggagtttcgctcttgtcgcctaggctggagtgcagtggcgtgatctcagctcactgcaacctccacctcccagattcaagcgattctcctgcctcagcctcccgtgtagctgggattacaggcgcccgccaccacgcccggtcgattttttgtatttctagtagagactggttttcgtcacgttgtgcaggctggtctctaactcctgacctcaggtgatccgcccgcctcagcctcctaaaagtgctgggattacaggggtgagccaccgcacccggcctaaatttattatttttgaggcagggcctcactcctatgcccaggctggagtgcacctcgacctccggagctcaggtgattctcccacctcagtctcccaagcagctgggactacaggcgtccaccaccacgcatggcttattttttgtatttttttgtagagacagttttgccctgttgcccagtttggtcttgaactcctgggctcaagcagtcctcccacctcacccttccaaagtgctgggatt

SEQ ID NO: 34411 - DNA, 1584 bp, Artificial sequence
  DNA replication origin
gtgggaggtcttagggccccaggacctgggccacctggggctttttttttttttttctttttgagatggagtcttgctctgtcgcccagactggagtgcagtggtgcaatcttggctcactgcaagctccacctcctgggttcaagcgattctcctgcctcagcttcctaagtagctcggattacaggcgcccaccatcatgcacggctaatttttgtatttttagtagaggcggggtttcaccatgttggtcaggctggtctcaaactcctcaccttgtgatctgcccacctcggcctcccaaagtgctgggattacaggcatgagccaccgcgcccagcccacctggggcatttttgttgctgtacaatagaaacaagttctctatatgttccccaggctggtccaaactcctgggctcaagtgatcctcccacctagacctcccaaagtgctgggatttcaggcatgagccgcagtggccggtcagaacctggggcccttttgaactttgattcctcagcaattttgtcagccctggctcgggctgagaagcccctgtgaagccagagagggaaagggacctgtccagggtcacacaggaatcatgcgtcaagcctccccagccacggacttgtctccatccagggcatttcagcccctgcagggcagtggcctgcccctcctccttggagccaggaagggatgcagtgccacagggatctggctctgtcccaggccctgtggggctggcagttgagtaagcagtcaggctgggcgcacccatccctcccccactccccactgcccagcacagtgcattcatgcagctgggccccaccccatctccagaggcaccttccactagcaacagtctccccaggcacaacacagctaacacaaggccccgcaggcaggactctgggacagacgcaggccaggtgagcatctgaacaaggggcagtcggccagggtgggcttgcgggagtccccaccttgacctctctcccttccagctgcccagagcccagaccaagcatggacgccgtggatgccaccatggagaaactccgggcacagtgcctgtcccgcggggcctcgggcatccagggcctggccaggtgagctgtcccctctcaccttcctgaccccggcccctgagaccactgttccaaccgtgtcccctgcctccaggtttttccgccaactagaccgggacgggagcagatccctggacgctgatgagttccggcagggtctggccaaactcgggctggtgctggaccaggcggaggcagagggtgtgtgcaggaagtgggaccgcaatggcagcgggacgctggatctggaggagttccttcgggcgctgcgggtgagcccccacctcacagtcaaggcgtgtgccctgggcatggggcgacagaggatgctgagatgcggagacggggactcctccctaagagctgctgttaagaggcgcctgctggggcatacagccccagtgctctgcacagcgtcttgggggtttgggtgtgctacccaccacccccagtcaccacctcctgtcccagccccccatgtccca

SEQ ID NO: 34412 - DNA, 1430 bp, Artificial sequence
  DNA replication origin
cacggccctctgttcccaggtcacactggcggaattccaggactactacagcggcgtgagtgcctccatgaacacggatgaggagttcgtggccatgatgaccagtgcctggcagctgtgagcagctccggctcagccctgctgccctggcctgtcactccccacccctgccggagacctcccttccctgggccccttctctcctgggcagccacaccacagagcggggaggggcaggtgggggaatggaggctgcaggactggctagaccaggtccctgccggtccaccaggcggaggtgggacaaaggtcctaacaggagtcactggctcaggaccccagggagaaacgctctccccacccacgccatgctgaccagagatcttgcagcccctgtggatgcccccgccgaggtcccccgatccccgcacccggactgctgctccctgcccctcccttgcgggtcccccaggaagccaggtgaccccaggtgggaggctgtgtgtggaggccatcctggaaggaagtttagacctgcccaggtgtggagcgaggggcacaggggcatcctaacctcagaaactgaaataaagcctttgaaaaaaaaatctgtaaaacatcaacccccaatcagaagatggcaaatggggaataaaaatagcaggtaacatgtccagcgggcccagtatctacattctggtgagcggcccgaggctgggagctctgggcgggggcagaccggcggggccttgcagcaggggtgggggtaaagtgcgggtggtggtggagagaacagggctgtggctggaccccagcactggtgacacgctgggtgggagcatgaggccccaggctgctggaggtcctcgcccggggaggtggaggccgttcctggtcaggggcttcctgaggcccctggggcatgcagaggccagggttttagttaaaagtttaatgtagttcccaaatacatttcatatgacaatcttacataaatgttccaaaacacatgggcgttatctcgttgtactcgtcactagctggctaaggcttaaagcagagacgtgtgactgggtctctcgggagggcctctggttcttcccgggctcaggcttgctgggggctgggggccagggctctggcgacctagaggtgtggacggcacagctgcaggaggccttctcttaaccctccgagagtgggactgggagatttcctctgaagtcccaaagaggccctgtgcccaggggacctcctcctcggcctcccaggtgggtggtgcaagctggctcttggccatgctccaggctcgggtgggcacaggcgtccactccagtgtgctgcgtgcttgtgagactgcctgttctgggaccagcccctgggctcttccaccaagatttggtgagggtccccctctgcctctcacagaa

SEQ ID NO: 34413 - DNA, 918 bp, Artificial sequence
  DNA replication origin
ggcctgctccagtggggagaggcggctggcaggaaggtaggggcttggctgagtccacggggtgggcccaggccaggcgcaggggtgttgcatcctctagaagagtcagggccctcccattttcctccgtaatctgctgcccacagtcctctcgtctcctctccatggaagcgctaagctgcggtcctactctgccttctcctaaggaaaccagagggcagggctggcccactcaggggaggccagtcaggaggacgtggactcccatggaggccgatgtctcacacacacagaaagcgcatgcaccttgagtgtcagcccctgcctcccgcagcccaccccgtactcctctctaatccccccttctccaagggaactgccatcctggtgcccacctgtgtggaccaaacacaacctcccacaagctgcatgtggcctctggtcactgatctgcagcaccagcctgtgcagccacctgcagttgtggccttcagtggtccaggcttggggaggaggagccccgccccgggagcaggtgtgccagggctggcctcagggagaagtcttgctctgtgggtgggtcctgggaggatcatgggcttttgcgcggtgatgtcgctttccatctggactgtgttggctcttggagctggctgtttgtgagggggccggtgtgggggccagggctgagtggccttgttggttgtagtgatgcggacccaggggagcctgcgactgatcctcaacaccaagctgtgggcccagatgcagatcgacaaggccagcgagaagagcattcgcatcacagccatggacaccgaggaccagggcgtgaaggtcttcctgatctcggtgagccagccacgcgggtgcatctgggacccctcatcctgccagccctgtgggggttcctgggca

SEQ ID NO: 34414 - DNA, 1164 bp, Artificial sequence
  DNA replication origin
gctggcaggatgaggggtcccagatgcacccgcgtggctggctcaccgagatcaggaagaccttcacgccctggtcctcggtgtccatggctgtgatgcgaatgctcttctcgctggccttgtcgatctgcatctgggcccacagcttggtgttgaggatcagtcgcaggctcccctgggtccgcatcactacaaccaacaaggccactcagccctggcccccacaccggccccctcacaaacagccagctccaagagccaacacagtccagatggaaagcgacatcaccgcgcaaaagcccatgatcctcccaggacccacccacagagcaagacttctccctgaggccagccctggcacacctgctcccggggcggggctcctcctccccaagcctggaccactgaaggccacaactgcaggtggctgcacaggctggtgctgcagatcagtgaccagaggccacatgcagcttgtgggaggttgtgtttggtccacacaggtgggcaccaggatggcagttcccttggagaaggggggattagagaggagtacggggtgggctgcgggaggcaggggctgacactcaaggtgcatgcgctttctgtgtgtgtgagacatcggcctccatgggagtccacgtcctcctgactggcctcccctgagtgggccagccctgccctctggtttccttaggagaaggcagagtaggaccgcagcttagcgcttccatggagaggagacgagaggactgtgggcagcagattacggaggaaaatgggagggccctgactcttctagaggatgcaacacccctgcgcctggcctgggcccaccccgtggactcagccaagcccctaccttcctgccagccgcctctccccactggagcaggcctggagacggtcagaaacttgtccccctgccctggcccagcgaacagacctccctgagcccaggtgcccacctcagaggccgagtgggagaaagacagaggtgattttgctctccctgaagctggggagggtactgctgccacggggctacaggctgatgacccaggcagaggggatgacctgggggctcagggctctatgccctctctttccatggacatttgaacatttccacgagacaaaaggaaaaacacaagaagacgtcca

SEQ ID NO: 34415 - DNA, 1041 bp, Artificial sequence
  DNA replication origin
gcacctgcgcacgagccatctcccgcctccttttcccgccgactgagagggcggggaaagggccgggaagggcgcatgcgcagtggcagcgactaaggtttagtgaggcggcaccgcgcggcccgaggcgggtcttgaagcactcgttttcccactcgttttccggggttcccccgcggtgggacagtgagcagttcagggcgccgcagccgaggccttcctccaggtaaatcgccgggcctgcgggggcttcccacacgcgcgggcgggagacgcgttgcctcctacctcagtttacccgccttaggagccggtaccttcggcaaacgctttcctgaaaccacgggggaagtggcgagagggcgcggggtgcttgggattggggggtaaatcagagctcatcggcgggggcgggggtcgtggtcaggctctaggagggggcgcagccctgggacccaggtgctggcgttgggggcggggggagccggcgcgagggactcgacccctcggagctacgagaatcaacttcacaagctcatgggaggggaaccgcgcgcctccaggttacccatctgtaaaatgggaccatcagcctcactcacaaggctcatgggagggtcctggacaccctggagttgttctctactcacctgctatgaatctctcagcaaatccttcggacttggccttgcctccaaaatacagcccagagccacccattgtcacccccaggctgtcaccaccctaggccacatcgtccgtatctatctcatggaagacttggacagcggcctctctgctatcctttgctgcattcttttgaagccccaggcttggttctgcacatggccgcaggctgaggagtctttgaaaaatataatcagccagacgcggtagctcacccctggaatcccagcactgcgggaggccaaggtgggaggatcgcttgagctcagttcaaaaccagcctaggcaacagagcaagaccccatctctacaaaaacacaaaaattacccggatgtggtggtgcaagcctgtgg

SEQ ID NO: 34416 - DNA, 871 bp, Artificial sequence
  DNA replication origin
tgtctcccaggcgacactggcagtgtccagagacatttttgcttgttaggattgggctgtagtgctcctggcagggagtgggtggaggccagggatgctgctcagcaccctgcagtgcccagtacgggcccccccagagaattatctgatcccccaccatctgcggtatctgcagtgccgaggggtagaaacagctcttgaaggcttagtcccgtgctttctgtatgttgaccttctttctcacaacaccgtgaggtatttttaatgtctcttttccagtgggagaaaccgatgaaggtaatttacttgagggcacagtgaatgaccgtggagctgattctcaaacctgtgcagtctaatccctgccactctgcctctcccggccgaggaggagctggggagtagcaaagaggaaggggagaagcgctcagttggcggccattttgaggagcagggccaaggggcggggcggggcaatgcggggacggacggtgctgccaaggctgtgatggagacttggggaggaggtctggacggccagatgccggaatgctgtcttgctctgccgagggccaggcacccaggagctctgggcagaggtgaagtcagcagctcctggagggtgtttccattgtgggagtggctgaggtgactgagggggtagaaggaggagaggagtgggcaggacccaggcgcagaggggcagcagccagaggcaggaggaaaacaggggtggcggcggttggcgggggtggggggcactccagctggagcatctcccctttcttttttttttttttttttgtttttttgagacggagtctcgctctgtcacccaggctggagtgtagtgacgtgatcttggcttact

SEQ ID NO: 34417 - DNA, 1180 bp, Artificial sequence
  DNA replication origin
ctgccgttacccagaggtgcccccagctcgggccaggcgaaagagcctctgccctgtgcctccctttcccagcgccgacgggcctggggcctgctccccacagggctggggcctctggggtcctcccacccgcatgggacagagacggggcccgggggtccctctggcctgcctgtcccactctcctgctgggcgtgggcgcaggagaccaggggctgcctagtctgggcctggtgctgaggtccctgggcagcggctacccagaggccagcggcagtctgagccccagccgagccagtctgcagtgtcacctgctgctcaggcatcacccactgtccggatgacagatcccagggccctcaccccccaaggggctgcccgcatttccacctgttcatcatgagatggggcagacaggccacggccaggagtaccaccctcctgggagggtcgtggtgggaaagccgcagacgcacctacctttgtcgagcagcgtcagcgacagagaggcgagatcgttgaactgaaagagaaacctggagtcaggggcgcctgcagaggggcggcagttgctgtttgggggctcgggggatgccggcccaaccttgccttgagccacgtcctccattcacagtgaagcagctggggcctgccctgaaatgtggctctgatgctgccaggtgtctgggtgggtccctgtgccctgtccaggccgcctctgggagctgctgggggtggagggtgctgactactcggggcagcgaggggacagcagctggctcccaaagtcccctgggtgcggctgctccgggttttaaggtggcatggaagagccgtgggccaaattatctttgctccctgaagtctgtacacagcaggaaaaccactccttggctgccccaaagcccggcgttcacgccaatgtgcagagaacaggcggcttccacagtttctgtacacgttgcggggccctggccaccgactcttagagtgctgtggcttctgggtagtaagagtgcagggaccccgccattcatcaagcatcatctcgtttcttcctggaggccatcccacgcagcccagcaagtccactccaaggtgtggaccccgaagaactgaacacaggagtgcacacaaacacccgcccacacacgcccacgcagccccgttcacgacggcc

SEQ ID NO: 34418 - DNA, 1418 bp, Artificial sequence
  DNA replication origin
ctgcacgttgtggatgtgctaagcgccacttgattgtgcgctttcacgtggaaatctctccctatgtgtgtgttaccacaataaacagaaaactctgggtggtgtgtccgaggcctcccctgtgtggcgggacgcccaaggacaacctccttccagagccagcggtgcgatggggactgtgaacttggacagagccccaaatccttcccagtgctgataaaacttgtggttttgatgttttgagacactgctgtgtcctggcacgggtgggcccgtttctgtggcttgttctttatcgagctgcagctctgtccgggcggcagagcagtgggacctgcgagtgtcctctctctgggctgctcagagcacaccgccctctccccacaggcccggccaagccccggccgtcccacccaggagggtcctcacctctcccatcacagcgatcggcgtctctccggtggcctccgcgacgcggtgctccaccaggtagaacatgtactcgtcgtagagcaggcggatgaggtggaaggagccgaagctggcagcgctgcgcagggtcaggtcccggatcaccatggagctggggacaagcggacagaggctggggaccctcaggggagcatggaacccgggccccaggccagacttcatggcagcaacacaccccctgctctacgttccctggggaacccagaggctgagtgatcctaagacgtgcaggcctacgcgggggctgacgggctgccgagaccctgggcccacgtgacggacaggtggggccggcctgcgcgctcagttccagagaccacctggggaacaggagagggagatgggcagtcagccccaaagcgacaggctgcgggaaacaactgtggctggtgctagcgcaggcgctagatgggatcttagctggtgagtctttctagtgacatttcggactccgaatcagagcacaggctggcagctggtgcctgtctccccagcaggaggcgcctttccccaccttccccgtatccttgccacctcccgccattcctcagcctgtggtttcaggcacctaaaaacaagacaaaaagccagggtgctttagtctctgtcagcgaaagcaggggtttcagagacttcagcccagatccagtccgcgtccagccctcagcctgtgtgctgacaatgctttacattttgaaatggttggaaaaagtcaaaagaataattatattcggtggcacgtggaaattacatgaaattcacattttggtgtccacagacagtttcactggcacgcgtcatgcccgttcctatgttgtctttcctaggatggctgcaaatactacctggttctttctgggagaggcggcccctgacctaaaggatcagtataagaccaaagggggctaggcacggtcgctcacacc

SEQ ID NO: 34419 - DNA, 1297 bp, Artificial sequence
  DNA replication origin
aagtgctgggattacagacgtgagcaaccttgcctggccccagataaatttttttttttttttttagagacagggtctcactatgctgcccaggctggtctcaaactcctgggctcagcgatttgtctgcctcagcctcccatagtgtggggatcactggcatgagccaccgcgcccggccacttttgggttttctgtgaaagcgatggtctgaggtggctgaagacgtacatgtaagaaaggacagaggaggcaggaagagaggatggagcagcgccgggcggggccgtgggtcacttactggggaccggcctcagcacgtcggggatgagaatctccaccagcgcctggtagaggatgtggtcgcagctcctcatccacctgaggatggggtcgcactgacacagggagataagcttgtccttgggcaggacggcgccctcggggtcttcgtcactgtggagggaggggggacaggtgagctgtggcctggcccaggtgggctcactcagccacgggagcgagcagagagccgggctgcgggacttttgcccaacagtggggctggggttttgctccccatccctgagcctcgatgggtcccctccctccatgttgctcccggcgcctccgtgtttccccctgtccctcactgtccacgctgtccctcccctgccagtggtcatactgtcatactgcgtctcactgcagctatgggttggggtcacttctacttgggattgcatcatggtcacctctaaaatcctccctattcaaacagtctgaccctgcaaaggggcggatggcaatgtgaatttcaagtcaactctaccaagtctaaaaattacagggatggaggcagaggggtctgaaccctgattcttggagagctgaggctttcgtttgtgggttacctgtggacgtcagcagggggttaagtctggggtggctgtgaacccagccagggtgtggcagtcacctggcaggaagagaggtggggccgtcgctggaggaggccttagagttccagaaggagagccacagcttctcgatgtagtggaactggaggttcatcaccacatctacagttgcctaggaatgaagggaccggtgagacagacgggtgcgtgcgcccatcacgtgcactcagcacacgtcaagtgagcagccgtgatccgggctacagcggggtgccctggaatcccaagggaggccacagagaggagaggagcaggcgatggacatggatgcggaggggctgctgcttcagagaggatgcttgttggggggctcgggg

SEQ ID NO: 34420 - DNA, 1316 bp, Artificial sequence
  DNA replication origin
ccccccaacaaaggcctgtggttctgggctctttgcaggcacagcccctgtggacagatatcctcacctgccggtgggaaggcagggatcatgcccacctacctggccccctttgtctcctaagatacttgtttctattcctgggggcaaatttgcctgacactggctcctggtggtgagttagagtctcaccgggccatacactagcagctcgggcagctattccaaccgtccaggtgtgccctgtgttgacataatccgacttggaacatccaccttttcacccattccacaaatatttacgagagctggctctatgccaggccttgtttaggtgctggggatgcaacggcgaataaaagacaaaaacccctgccccctggaagcgtccgttcttgtctggcagagacccacaataaataagtaaaatgaaccgaatgagggctgatgccgagtgccgtcagagaaattcacctgggaaaggggatggggtcgccgccacggagggactggagggaggactgcaacggtatagtaagttgaggtggggtgggggtgtcaggcagggctcactgagaaagtgcccactgagtgaagactcagaggaggtgagggggagcctggggaagagagcttcaggcagagggccccacagtgcaaaggccctggggcaggtccgagcctggtgcattggaggaatagcgaggaggcccgtgtggctggagcacagtgaggagtgggagagagcgggtcctgcagggccttgtgggccattttgacaacactcggttctacttggagggccaaggggagccctggaggcttccaagcagagcagtgtggcgatctgacctgggttttagcaggatcactctggtggctgctgtgagaaggggctggaggctgggtaggggtgggtgctgacggctggctaggaggtggccgaaagaatccacagggacagtggcggctcgggaagtagtcgaagtggaggaggtggggggtgccacctggttctggatctttcttgaaggtgaggttgaagagcatctgggggtgggcatgagaggagcaaggaggcgaggacgcagtggggttgggggccgagcgcctggaagattggctgcccctgcctcagatgggaccgtgggcgggaggcgcaggggttgtgggaggcgcaggggttgttgagggtggaggccacgcactgagctaagacactaatccgaggcaggcaggaattccaagggaaaacagcggcacttctggacagaggccccttctgaggagctgccggctctagcaaccccactgtg

SEQ ID NO: 34421 - DNA, 1257 bp, Artificial sequence
  DNA replication origin
agcagagagaagaggcctagggctgagttctggggctgtctaccatttagagatcccaaagaagcaggagcctgaaaagaggccaaagaagtataagcaagtggtgtcctgagaaccaagtgactctggggctgagtggtgatcactggaatcagcaaagtggaggtcaccagtgattgtgacagaggagctccaggggaaaagtgtgtgcaaaagccacagaggttggagcaggttcaagagagccccaagtggagcagaactggagacaggaggaccagatggctcttttgaggaatttttgctagaaagataggaagaggaatggggaggcagctggaagaggaaactgagagcgggtttctgaaaatgaaagaaataatagcaggtaggacctaccaggagggaactgggataggagaaagaagggagacttgcaagtggatgttctttcatggatgggatgggatgggatgtggatgggatgggatgggatgtggataggatgggatgggatgggatgggatgggatgggatgggatgtggatgggatgggatgggatgtggatgggatgggatgggatgggatgggatgggatgtggatgggatgggatgggatgtggatgggatgggatgtgaatgggatgggatgggatgggatgggatgtggatgggatgggatgggatgggatgggatgggatgggatgggatgtggatgggatggaatgggatgtcctgcagaacacaggtgggcttggccagggctaggtgcatggatatgcatccaccagtacaggagagaagacagagtgtccaccctggaaggtgacaccaagtcatagtccttctggaggggggtcctggtccccagtcccattcttcatccatggaatccctgtgtttactcctcgccagcctcaatagctggctgctgggggcctccactctcagcagggtggacgggcttgaagccacacgatagggcctgggtataaagtatgatgacctaggtccacagacctcacatcagagcctccagcagaccctgggttcatagtcacatatgggctccatgtgaccaatacttgcccccaccccatggtcccacctcaatgcctgacagaagccccactcctcaggtttatgcacatgatttgcctttttcactgctttctttttcttttctagacacagggtcttgctctgtcacccaggctggagtacagtggttggatcatagctcactgcagcctca

SEQ ID NO: 34422 - DNA, 1374 bp, Artificial sequence
  DNA replication origin
ggaggttaaaataggaagatgaaccgcgccggcagccgccagaatggcccgggcgcttggggccctcgggggcccttgaaatagccactaggatcgggaaatccaactttcccagcggtgcagcgaggaaaaccaaaaggaacggagccggaggctggtggcgagggagcgcggaggcttctcggagggaggaaaaagaaagaaatgagcatttggggtgtgagtgagtgtgtgtgtgtgagtgtgtgtgtgcgcccgcgagcgcgctggtgggcggtgggggcagggggtggagtttaaatccacaaacacacacacgcactcgcactacctcggagaaaatgcctggagcagtttaggttctttaacaaaataaataaattgaaaaaaaaaaaaagtttcactcgcgttggtgaaacttttctcccttccagatcagtcctaagaggagagctgcggacgtgcggaggggcatcttgggggcacgtggaaagactggcggacgcacgaacccctatactcaggaatatggggtcacagggagaaggggagggggtgtccgaggcgacctgaacgcgaggatttggggcaaaaaggtgagaaacagttcccggggaagctcgctcggggagtttgggatgaaaaggtgagaagggcaagaggggttctccccagggcagacgcaccagcttttagttaaggaatgagaaaaaggttccaggggtgcccccaaattcagtatgtctgggagtccattaaaaagggggtccccgggacaagtcagatctaggaatttggggtaaaaatgagaagggagtcttcgaggtccccccgatgcaagaagtttgcgactaagagtgacagaagggctctggggtcaccccaatttcggaggtttggggagtaaagtaagaagagggccccaggtggccccaattcagggagtttgagggtatgagtaaaagaggggtccccgggtgtccccatctcagagatctggggagtaaaagtgaggagagggtccccaagcgcccccaattcagagaattcgagggtttgagtaaaagaagggtccctgggtgcccccaactcagagatctggggagtaaacgtgagaagagggtcccctggcgcccccaattcagaaaattcgagggtatgagtaaaagaggggtccttgggtgcccccaactcagagatctagggggttaaggtgagaagagggtccccaagcgcccccaattcagggagtttgaggagtttgagagacgttcccggggcgcccccaactcagcgagtttgaaggtaagcgtgagaaaggggtccccggacgccccaacctcaggaagttttgtaaaaagtgaggcgacggca

SEQ ID NO: 34423 - DNA, 951 bp, Artificial sequence
  DNA replication origin
gtagttttaaagcaagcaccagacagtgtgttctttcatgcatgaatcctttggcaacaaggattcctttctctaacttcaccccaaagcaattatcatactttaaggaagtaaacatcccctcttcatttcttcatgtcgtctgagacacagtcagtggtggagttcttggcggcctcgtgcacatcttgtttgaattgagatctagcagaacccacaatgcgcctgggtgatgggcctctcacgtgaccaggacctctcaggctcctgggaggaagcttaggtccaggcaggcggagagagtggatcccattttgaaggctgagctgatggaattagctaatgagtcaatgtgctaggaagagagagggagagagagaggggaagggggaagggggagggagggagggaaagaggaaggaggaaaaggaaggaaggggagggagggagggaggaaggaaggaaagaagggagggagggaaggaaagagggaagagagagggaggaaggaaggaaggaaggggaggaagaaagaaaggaagggaagggaagaaggaagaaagaaaaggcagggacggagggaggaaggaagagaggggaagaacgaagggaggaaagaaggaagggagggagagaggaagggtaggagaatgggaaaaaggaaggaaggggagggaagaaggaagtagaaaggagggaagaaagggaagaagcaaagggaggaaggagggagggaaggaagcaagtcaaaggtgaattaaggatgactttgaggttctgggccagatccagctgctccagaggggccttgggcttcctcctcatttcttcttgggccgcacactccgtgcatgtttttcatgcatatctgtagcttggtctggatctgctgttttgggctgctcgctttgtcctgctgattgatctactttgtgtgtgtaaactccgtag

SEQ ID NO: 34424 - DNA, 1131 bp, Artificial sequence
  DNA replication origin
gtacagtggcgtgatctcggctcactgcaagctccgcctcccgggttcactccattctcctgcctcagcctcccgagtagctgggactacaggcgcccgccaccatgcccggctaattttttgtatttttagtagagatggggtttcactgtgttagccaggatggtgtcaacctcctgacctcgtgatccacccgcctcagcctcccaaagtgctgggattacaggcatgagccaccatgcccggcctctggactctaccttttttttttttgagacagagtctagctctgtcgcccaggctggagtgcagtggcgcaatcttggctcactgcaagctccgcctcccgggttcacaccattctcctgcctcagcctcccaagtagctgggactacaagcgcccgccaccatgcccggctaattttttgtatttttagtagagacagggtttcaccgtgttagccaggatggtctcaacctcctgacctcgtgatccacccacctcagcctcctaaagtgctgggattaaaggcatgagccaccatgcccggcctctggactctacctttttatcagcttgatcactccccccgttctagccacagggggacagtggtccctagaccagacatccagaatgttcctgtccatggccagcctggtgccatcactgtgtatcccgtggcccagagccatgatggggacatggcccattgcctctttgtagaggccagttttagcgggcagggagggtctacccaagaaggcccttcactgccctgacaagccagtggtctgcaaggtgacagtccccagggaggagccaggggcaagtctggcagcaggagggattccagagtcactgttctacattgttgaggttgagtgagagagttcccaagggagctggaagaagagtggtgagatggaggaggtaaataaggtgtgggcatcatcgaggtcaaggaagcagagccctgggctcccagaaggttgagttagagaaggactttgagtcactgtgcctgggggtttatgaattcatttgcccaccaagcataattgaaagcaggggcgtgaagagatatttatacacccatggtttcttttctgggcgttgagtgcgtttt

SEQ ID NO: 34425 - DNA, 746 bp, Artificial sequence
  DNA replication origin
caagtgggccggagcggcgcgcaggcttaccgggggaagaaaggcgcgcaggcgcaggacgcggggaggggcgggggaagaaaggccctggagcgctgcgctggcgcaggaggtgaaataagtggcgcgcaggcgcaagagggtgggtgcagaagaggcgcgcaggcgcaggaggggcgggaggggcgcgcaggcgcggaccgcctggcggtactttgaagaaagacttctcgacgccgagacactgctggtggtactcgatgtaggtgagcaggtggcagctgttggagccgggcgcgatgttgttggcgtacttgatggccgtgctcgcgaccatgtcgtgcacagtgaggagtgtcttgttgctaacttagtccttgctgagccgcagtcgcgcctccccgtcgcgctccgtggtccgagtagctcagcctgcggacaggcgggtcagcggcggccggagacccccagatggacctagagagaggcgagcaggtggcgtgtcaggggcaaaaccagggagagatgggagcacaggcaggagcgtggcactgagagatggcagacggaggaggcgtggtgtatgaagtggattgccaagggagaaagatgaccagcgaggcacagaaggggatgcagggacaggtggacagtgagacgcactgacccagagaggagttcagcaggaaacccaccagcaagcagacaggtcagctgtaggcccactgtccctgccgggcgccgtc

SEQ ID NO: 34426 - DNA, 1060 bp, Artificial sequence
  DNA replication origin
acttgaggtcaggagttcgagaccagcctcaccaatatggtgaaaccccgtctctactaaaaatacaaaaattagctgggtatggtagtgcatgcctgtaatcccagctacttgggaggctgaggcagaagaatcacttgaacccgggagccagaggttgcagtgagccgagatcacgccactgcactccagcctgggcaacagagtgagactctgtctcaaaaaaaaaagaaagaaagaaagaaaaaggtggctaaggagagcctcactgagagaaagtgatatttcaacaaagacttcaatgaagagaaaagatctatgggatggtgttccaggtcaaggggagtttgtgcaaaggccctgaggcaggacagtgcctgctgtgttgaaggagcagtgaggaggaggcccctgtggctggagcagagtgagggagggagggggtggggaaggttgagaagtgcctggtgggccttgtgggggacttggcttttacccgaggggagggggagtgggagccatggaggcagaggagggatatgccctgactcaggtgctcacggcgctctctggctactgtggggaggacagactgaggggaaagagaccagctgagattgagatgatgatagtttggaccaagatgtagcaggagagagggtgagaagcgttcggattctgaaagcagagcccacagaatttgttggtgtctcagcaaaacccgctgagaatgaccaaagttttctggtcagtgccacttgaaggatggagctgctgttgtctgagattatggtaggttggagtggagggaggagatttagggatgagggctgtgggtaacatccctcccctagctgggctgtttgggtttgagatgcgtgttagacgaggaaatgaggggtgggcagttgtatccaagagtctggagtggtggggaggggctccacctggatccgatggactcacctgagtgaatggaaccaagagagttacaccatcttaaattgtcaagtcgatccatatgtcggcacagataatcacagtgcataggcaaagcttg

SEQ ID NO: 34427 - DNA, 1641 bp, Artificial sequence
  DNA replication origin
cccccagtgcaaatctctgtgttttgctctctcctgaacaaaaatgtaaaccgacgccggaaagcaaatggtatcgaatacctttcttgcccataagggtttttacaaagaacgtgtctcactaggaactaggacactcatcggcccgagaccaactcctggataaaaggaataaggagaatcgtgtttgtaacgagttacaggattgtttctttcctggattttaaacttttgttaaattgtgaaattatggaggagttttatagaaaaaaaaagtgaaataaagtcagatgggaaagcagacgcatgcatctgcctggttcctcctgtccagtcagtgggcaggcttgcgaggtagcctggggccccctgccccgactacgtgtcccagtgcccccagatcagtgaccaaaacagagaaggagggttgggaccaagcctggtgggggtggggagtgtgagcaaggctggagacgatgctaccagcaattcaagagggcagagaattcggctcacatcctgcttctgatgctgtgctctctacttggaagcagacagcaaggtttgggttgagaagaaaacttggtttcataaggtggatgcatggatgatggatgaacagatgggtgggtgagtggatgggtggtttgatggatgagtggatgattggttgggtggaccatggatgaatagatgggtgggtgggtggaagaaaggatggaaggatggatggatcgatgggtggatggaaggaaggaaggaaaggaggaaaggagggagggaaggacggaaggagggaaggaagggcagatgggtggatggatggaaaggatggatggtaggaaggatggatagatgggtgagtggatggaagaatgaatggatgggtggatcaatggatgggttaatgggtggatggaaggaaggaaggatggatgcgtggatggatggatggatggatggatggatggatggatggatggatggttggatggacggaaataaaaatgtaggcaaagacattttttcccaggagccagcgtgccatctcccagtttccctctggtgggtttttctctggcctcagtgtggcagagctcagtgaacctccaggagacaaagctgtcactggccccatttgagcagatctgtcccctctgtgctccagctccagctccacccagaggagcaggagttccattcctgagcagcccacattacaggatcaccgtggcagccactgattgagatcacttttgtcagcaggcagcagctggggactcagctgggctcagcttagcgctggggactctggagcatgtcttctcccttctactctggaaccaaaagatccattcccagcatcagagtgtggctttccctgccccgtgccttaccagagaaaggttcttttaggccttcggggtatggttttgggtctgagctcctaaagtaagaatatggagtgaaagaaggtctacagtggttccttcagggttcccagaccctccaaggtgcagtggaaggactatggatgtgtaaaaacgtggtagggctttctggccaggcatggtggctcacacctataatcccagcactttaggaggccgaggcgggtggatcatttgaggccaggagttc

SEQ ID NO: 34428 - DNA, 1404 bp, Artificial sequence
  DNA replication origin
gaggaaccaggcagatgcatgcgtctgctttcccatctgactttatttcactttttttttctataaaactcctccataatttcacaatttaacaaaagtttaaaatccaggaaagaaacaatcctgtaactcgttacaaacacgattctccttattccttttatccaggagttggtctcgggccgatgagtgtcctagttcctagtgagacacgttctttgtaaaaacccttatgggcaagaaaggtattcgataccatttgctttccggcgtcggtttacatttttgttcaggagagagcaaaacacagagatttgcactgggggcaggcggcttaacaggaaacacgtggcaatcacaaagtgccaggcccctttcctatggaagtgtccccagagccctcgtgggcccagccgccgggcagctggggtggggtgggagagcagctggggatgctgccttgggagcccatgctgcccagcacgtccatcaggtggtcacggagccagccctgggcccagagcagctctggaggacaacgtgaggccttccggccagaggaggtaactgagaactgggttggtgcttccggaggccttggaaacggcaggaagggccagacgccaccaccgagagcaggcgggggagcccgaccctcctctggctgagtggaaggctgctcgagtcgctgtgtggattttgggggactcctgcgaaggagaaaggccagcaccctgggctgaggttcctgtccgtgaccccggcggcctcttgtgcgtagagctcccagcagcacgggcccccggtcagcccccctcaggccagttccttcagtccaatgtcttagtttccagagaagaaaggaagcgccccatggtggagtattgttggccgccctgggaaggggagagggggcacaggggcctgccctcttcctgatacctgaaggcagtggggccgggagagaaacagagcaggtggcgaggagtcccggaggcttcctccgaaggttctcgggcctttccccgagagttctggggagtttccccaggacagctggcattgggggcagccttggaggcatgggtccccaccaaggagtgttcaggatctgctgacagaatcagagcagggacaagatgagggacctcagggagggacagatggagccccccaagtctgaactcataggctggggaggaggagacatctaggtgggttcgagggggtgcgagcccacctccaggccctcagccctcttttcctcataacttggtcagggcacaaggacttgaaaggacttgaaagtcagggggttgagaggactggaggcgcctcgagtcaatgtctgggaaacagaggctaaccaggcaggcctccagcccctgggacccccagccacga

SEQ ID NO: 34429 - DNA, 1161 bp, Artificial sequence
  DNA replication origin
cgaggagactggccacttcaatgtcaccaacaccaccttcgacttcgacctcttctccctggacgagaccaccgtgcgcaaactgcagagctgcctggaggccgtggccacatgaccctgggccgcgtgccgggcccccaccgccggggtcctgggaggctgcagccaggcctcgcctgccctcctctcccgtctcgcctgcccgcagcactgccttagcgacagccctgtcctcgcccgcacagcccgctgcactttcctcggcggctccctgcccactctccccgctccatcgccaggagccctggggccgggctgggccacacgggagccgccccccgggctctctgggctcccctcagagagcggctggtgttgaaggcagctctgggcagagacagggccgggggcccctcgcccagccttgggaccagcccccactgctcggcgggctgtgcggcgtcgctgccccagcctttctgagcagcggatcgacggctggggggcatctccagcctcccgaatggttcagaacacaccctccgcccaccctggacctcagaaggccctgcctgtgtgtctgcgtcgtcctccgtgtagacctagcgccggctcctccccggctcgcgctgcgctggggtctgtgctgtatagttctctctattatatatgtgtgtgcactgtctggtcaagagcagtgtccatgtgcgtttctgtggcagcagtgcacgtggggtgggtggggggtgcgtacggtggggcttgtaggttaagatgtctctgcggtggtgtggggctggaggccgagccaggcacggcagctggccctctccaggcgcatggaggaattctccctttgccgttccaaggatgccgccgcctcctaccggggctcccgggggggtcagccaacactacaaagggcagcgagtcctcagggcgcccgggagccaccagtctgctctcgggctctactcagactagcgccaacagtctccgcggacagactcgcatcagccgccctggggctcggcctcctcccataggctcctcttcctctctttcattcaagtcttcaaactttgaaaaaaatatgagcttttgccaaataagacgggatagtttatggagttttctgaggcgcattgaactctggtcagc

SEQ ID NO: 34430 - DNA, 1429 bp, Artificial sequence
  DNA replication origin
gtgcacacacatatataatagagagaactatacagcacagaccccagcgcagcgcgagccggggaggagccggcgctaggtctacacggaggacgacgcagacacacaggcagggccttctgaggtccagggtgggcggagggtgtgttctgaaccattcgggaggctggagatgccccccagccgtcgatccgctgctcagaaaggctggggcagcgacgccgcacagcccgccgagcagtgggggctggtcccaaggctgggcgaggggcccccggccctgtctctgcccagagctgccttcaacaccagccgctctctgaggggagcccagagagcccggggggcggctcccgtgtggcccagcccggccccagggctcctggcgatggagcggggagagtgggcagggagccgccgaggaaagtgcagcgggctgtgcgggcgaggacagggctgtcgctaaggcagtgctgcgggcaggcgagacgggagaggagggcaggcgaggcctggctgcagcctcccaggaccccggcggtgggggcccggcacgcggcccagggtcatgtggccacggcctccaggcagctctgcagtttgcgcacggtggtctcgtccagggagaagaggtcgaagtcgaaggtggtgttggtgacattgaagtggccagtctcctcgatcagattcacaatctgtaaggtggtggcaggtggcttcaggggcagggggccaagggtggggttgccctgttccctaacagaggtaggggctcctggggcagcaccaggggcccccgcagcccacactcctcacaggcaccccgacctctgccgggcaggaccctcaggggggcgatacctgctgcagcacgttgcgctcccgcagcgccatcagcctccggtgtagctccaccagctcatccgtgtaggcctggggagggggggcaggtctcagcagcgtgtgggggccctggacccttcctgctcccatgcccagccccacccatgacccagtccatcccagcacaggacagaggtagccacatccaaaccaaggaaggcccaaggctgcaggggcagcccctcagctccaaggccacaccgggaggggaggaaggactgtccctgctcctgcccaggaagagtccaactgtggggtgttggggggctctggggtcctccactggctgcaactcccaccacccacccctccgtagcctccccgccttgtcgtaggtgcccccccaccttgtcgtaggtgcccttcttgaggatcttctcaggcttgctgcaggactcggggctcctccggcctgacacctgcagggaacccaggtctctgctgagctgtggcccacaccctccccagccccgaaggccccacaaaccctcctaggacagcccggcccagggctaagcccggcctc

SEQ ID NO: 34431 - DNA, 1434 bp, Artificial sequence
  DNA replication origin
agggctgtggcgtccctgggacaggacctggaagcaggctcccgcctcgttcggtgacattcagggtggattctgcttgcgccaagagccgtgagcgcagagaggctgacggaaggttcggttctagaggggctggcaggcacggcacagggaccgagccacacgcgaagcgccttttgattcctcccggaacgtttgtgtgggccctgggtgagggcttgccggccttgtccctgcgttgccggggcagggagcgcccaggccacaccgtcggagcttctgcacaccctggtctgctgcctgggaagcccagtctgcagcggtgcccagccgtcatcccagtcacctgtgggatgcggggcagaggccggcaggagcacaggcaggggcgtcgcctgggcaacgtgagccagacctggagctgccagagccgggaggcagctgcagagagtggccccagcctgaggccactgaggggcaagtttaagagatgaacggagcctgcgccggggcaggagcaggccaggaacagggacaatggctgtgctgcccaccgggaagtccggtgtgctcgagccgcttctggcacctccttgttcactaggaggcctggggtttgctgtgttttaaacgtgttgtgaagtgatggttgtcaggggcccctctcactggatcaagcccaaaatatccctggcagagcgggaccccaggcacgcagagtgagagaaaaatgggcccaggctctgtgtgtggtcatagcagcctcctttcacagatggggaaactgaggcagaggtcaaagacctgccccccagggtaggggaggttgagagcttggacctctccccaccaccagatacccctgtttaggaccacaccctctagggtcaggggggccgatgtgactgatggaggcctgctgtccagagcaaaccagggtcaggcggccaggggagcatcggagggacgggcggccatggaagccctagggcagtgctgggagaagagggcaggttttcagcaggcagctcctcctccccttgttaaagccacagaaccaagtcagaggaccacagcccagcaaggcccattggctggggggctttgtgtcccgggtatcccggagcactcttggcctgctcgggcggcccccaaagggcctctgggtggcctggtttccttggggttctttcctcttggtggccacacacagtatttttaagttgaggttcctgcgcagaggtgaatggagctgttgggggtgtgtgggctcaggcaccgactccgtgcggggcagaggcttgagcctgggggtggggtgggggccgtggtggcggcaggggcctgatgcgcccccgtgtgtcggttcaggttgagcttcagcgacagcgagagtgacaacagcgccgactcctccctgcccagccgtgagcc

SEQ ID NO: 34432 - DNA, 1237 bp, Artificial sequence
  DNA replication origin
ccgagcagaggaggggttctcctccggctgcagcaatggaggggccctgcgcgcccactgccggccagtcccctgaggcctgcgagcagggccaggaaggtagggaggggtgggggagccagggcgttctaggggaagcgggtggctgccggtgtgggggcagttcttagagatgggcacagggacccccaggtggacgggcgtgtgcatttgggggtcaccagtgtcaagaagctctgcgtggcctcatgggcgaggggccctggaggctcagtggagccctgcccttgtctcccctccctccctgccccgcctccccaggacccctgcgctccatggtggaggacctgcagtccgaggagtccgacgaggacgactcttcgtcaggcgaggaggctgccggcaagaccaacccggggagggactccaggtgacggcccggtgggagccagggggcggaggcggccacccggggcgactccggctgggtctgcagtgattgtggggctgcaggtggggttgggactggagggtcccctgggagggccaaagcagggatccatccccaggtggccccagtccagcctgggccttggggtgggcctggggctgtgtgtcctctcctggtccctgaggctgagggcctcaagggctgcccccatctggggccttgggtggcatccctcctcgtggtcactggcaggtgtgggctatctggcagggaggggtgcaggagggagcccaggctggaggtggggggaggggagcaggcctgtttctctgctcttgggccaggagactcccagtcctttcccacctgccttacatggggcgaggatccatggagagcccgtcctggggcagcggacacccagtgtgggagcagctttggctgcctgtggccttttccccaggaggcacaggggtgccgaggcacatccttgggatatgcaggacccttggcgtgaccccacctgggagagctccatgcgctcggcctccaacccagcgacagtggagaacgtgctggccttggccccgggcacacaggcttcagcgggcgggggtccaggcttttccaaagctgtagcagagccggcagtcagcccctcctcccgtgaggctgaggcctccaggcctcagtggctcctactggagacagggctggttatcaccctgcacccagcaaggtgcatgggagcctcacagacgcctgcaggtgtgttgttcactaaag

SEQ ID NO: 34433 - DNA, 726 bp, Artificial sequence
  DNA replication origin
tggaattcagccgtgcagttgccgagggggctgggggatggggcccttgaagcctacactcgctccaagtgttcttatctgccgggaagggagggggacctactgaagcgggatcatgtgactaaggtaattgagggctttgtgtccctctgttgccttggtaacaggaatataaaccaagatgccgtctgtaggggactggaaccgtgtgcctctggagaaaggggaggacggtggactgggagcagcagaggggattaccgagggggtgggcaggccggcgtagggtgcaggaagagagatctgtgaccccaggcccagcttcccagccaggctgtggctccctcgccctccctgggctctcggcagagcttctgatctctgtgccccgagcagaggaggggttctcctccggctgcagcaatggaggggccctgcgcgcccactgccggccagtcccctgaggcctgcgagcagggccaggaaggtagggaggggtgggggagccagggcgttctaggggaagcgggtggctgccggtgtgggggcagttcttagagatgggcacagggacccccaggtggacgggcgtgtgcatttgggggtcaccagtgtcaagaagctctgcgtggcctcatgggcgaggggccctggaggctcagtggagccctgcccttgtctcccctccctccctgccccgcctccccaggacccctgcgctccatg

SEQ ID NO: 34434 - DNA, 1085 bp, Artificial sequence
  DNA replication origin
ccctcccttcccggcagataagaacacttggagcgagtgtaggcttcaagggccccatcccccagccccctcggcaactgcacggctgaattccaggccagactccctccacaaccccgcacactcctctcccccagcccccctgcaaaggattccaggccaagggggaaggaggctcttgttccaatccaggagtggaaacgctttttgcctgggagtgggtgctggggtctggactggggccgggggctcagggcagctctcccactgtgtcctgcaggctgcctggtccccagggccctccccactctggggcaggctggtgcagccaatgggcctatgtcctttccccaaaaagccgcccctactcagggtggcctgcctggagagggagagggcactccaaacactccggcagcaggagaccccggccgtccacaggcagccagtgcctcgctggccctggggagcgggtgggatgggcggaggaggtgacgccgtccgtccatggtccccagcagcacagggagagttctggccatgggcagggccctcaccagaagcccctcaccagcctggctccaggcacggggtgcatgccaacagccaccacaaggaacagtgcccccgggcctgactggaggtctggtgacttgttcctgctttgcttttaaatatagactcccccaggccaccaaaaccctccatgtacagatctgcagggcccagcctgtgcaggcagtggacgctgaggaatgcccatgtggcctgagctccaggccctccccggccccatccgtgccccccagctgctctccatacacaccttggctgtggttctgggatggctcgaagtctgagtctgagctggagtctgagctggagctggagttggacgggcttgactgggcagacttcacccaatggtgggatgggcagggaggggagaaagggagagctgtcacctttcagcagagacaaagggggccccctggcagcagctacgctgagtgggtctcccccagacacccctagggtcccaagggtacccacgtgtgccgctgagaacccactaaggagccagc

SEQ ID NO: 34435 - DNA, 2640 bp, Artificial sequence
  DNA replication origin
cagggcccagcctgtgcaggcagtggacgctgaggaatgcccatgtggcctgagctccaggccctccccggccccatccgtgccccccagctgctctccatacacaccttggctgtggttctgggatggctcgaagtctgagtctgagctggagtctgagctggagctggagttggacgggcttgactgggcagacttcacccaatggtgggatgggcagggaggggagaaagggagagctgtcacctttcagcagagacaaagggggccccctggcagcagctacgctgagtgggtctcccccagacacccctagggtcccaagggtacccacgtgtgccgctgagaacccactaaggagccagcggccaggccatgcgcagcctatagcctcccgtgccagccctaggacacccgtggatgtctgggtttccggtagcgccaggagaccgtgtggaccacgtgggctctcctgtctacccaggcaggtgcacagggtactgggagggaggctggggcaggggcttgaagtcccacaggtgggtgggccttgccttcgtccaagagggcaggcattgactggtgtcgcaaaaatgtctggaacaggaaagctgggtgtggacacttcttgttctgacccagtgctgtccggggctcaggggtggcagagagctctgtatccccacccattcgctgctcctaccgccagctgcccaagacactgaagagcgtgcgtgcacaggggacagaagccatgggcaagcccggccccacccgcctcctcctcctgcagctgtccttccaggctcagccaccagggggcagtaaaagccacaacaaggacacaaggggtgggatgccaggacagagggtgacagtgcagggcaggcgtgtatggggcagaggcgtagctcctgggtggacgggaggcaggcactgcagacacctgcacggggaggggcccattgttctgggcccacatttctgccaatgagctcatcccaaggggtgtgccagaggacatggcgggcccagggcagccccctcaccttgggggcccgtctggtggaactaggtggcttgagcccctcagaccagtcccctccagggtcctccctccatcaggaggaggcagctggtctgctggattctggcaggggccgctgcagccgccagccatgcaagggaagccgtgaacggagtactgagctggtgggactcaggaccttgagtgcctgggagcccccggcccctcccctagcatgtggaggagacagcctccaccctgcagaagggtccccacgaaagcccaaggcctccccaagcagcaggtccagactcacccgtgcctgagagggaagagggacttcccaagggtttactgcagcccaacccagccccctcctgcccctcaaaccagcccctgccagcgccccttcccaccaacacatggcgctccctgatgaatcatcactgggaaagcctgccgtggtgcccatcagtcactgcccactcaggctacctgagtcccggacacataccccagagcgtccaggacccctggctgggcctgcctggagctgggtgatgcacagcctggacttctgttcttgggggccaggggtgagtaagaggtgaccgagagatggcctatttaaccccagccttctaaccagcaggccttgctactcagaacaaggccgtcctatgtcagcctcagttttcccagcaccgccagctgcctgcacaccgaggccaaggctagtcctcccttgacctccggatggaatccctggggcagaggggtgggcaccaacctggagggaggtggactggagaagtatccaaggtcctggccccatatcccatgcactttctcactaaaggtggagagggggcagttcaggcggccaaaggaggctgcacaaggtcagcagggatggaagcagagaggatgctgagccccgagaggcccccaagcctgtcctggcgccgtgccagacagaggaaagccagtcaggcacacgcatcccctttccttccgcccaaatccaaggggcagggaggaaaagaatccggaaatggtctcagccagaagagccctaaggtggtgtgatcagaagggccaccggagcacgcccggggctcagagggagggcggagcagactgggtccacgactgactccagatccccaagggccagggagaccccaaggcagcagctggaggacgtgggagctcggctcggggactcggcccaaagagtggccctacgagggtgggcgtgggccagaccccagctggtgcagattcttccgatggccggttctggtagcacagccacacacagcctctggggaggagcagcccaagacggccaaggggaagccaaggggccagtggtctggaaggccgatgtgcttcttcaccatagcagcctgggcttcggtgaagcccccgggggaagaggcgtcagggactctgtgctgttggggcctgggtctcactcccgcacagacctcggggcgctaagccgcattgctcaaaagcctctcagcacgcggggcgctcttcttcggccaggaggaagtcccaaagcctcctccagcaactccagcctcaaggccacccagccactc

SEQ ID NO: 34436 - DNA, 1299 bp, Artificial sequence
  DNA replication origin
cctgggagctccacaacctgtgccggggcgtggtggctgcaggtgactcgttgctggtcaccctgtgcttctgggtggccatgggtaattagcaccttcctgcaggaagtgctgggaagggatgggcgcgaggctggtctgaccgcgtggctgggcctggagctggcttgtaactagctgggcagggcctccgcacagggcccctgccgtgcgcatcgccatcacctctgacttcgggaggccagacgacagtgccagctctgggaccagggctctccaggagtcgtgtggccgggacccccatgcggtggctggagtcgagccctccggaccctgtgggggctcagagttccccacgagggctcttggcaacagggtgggcgcagggctggtggtggttatggaggaggggggcgtggagggagggacgtgcaggctgaggcctggtcacagaacagcaatgccaccttcagggcccagggccacagagcctttgcctgggtgccagcctgagcctgtgatggagcgggctggggtggcgtgttgtgtgtcgtgtgcggtgtgtggtgtgtcatgtgtatgtacgtgtgttgtgtgtggcatgtgtctcgtgtatggtgtgagtggcatgtgtggtatggggtgtgtgtcgtgtgtatgtgtggggtgtggcatgtacagtgtgtggcatgtgtggcatgtaggggtgtggtgtgtggtgtcacgggtgtggggcgtgtgtgtgtgttgtgtggtatgtacatacgctgtctgctgtgtcatgtatggtgtgtgcatggcgtgtgtgtcgtgtcacttgcgggaagtgtgtggtgtgtcacgcacgtatggtgtgacgtgtgttatggggagtatgtgaatgtgtcaggtgtgtatgtggcatgtatgacgtgtggggtatgcgggtggggtgggtcgcctcctgagtggatttggggcaccgtggctgtgggtgtcaggctggggagtcctccttcctcctcatggggcatggtcaggtccttggtggccgtcgttctcctaagaagaaggaggcgtctgtccatgtagaagcttgagtgagtcctgctgtgatccttgtgaagccctgcttgtggttctgatccggggagggcagtgccggcgtgggcctatgtggatggcgtggctgagtgctgggtggcctgaggatgtgagggctgggtcccagcgccctcctggctccgcttttccaccttctttcatggccaggtgttttcaccacgtttgcagtaggtgtttttgggcgtccccggaggt

SEQ ID NO: 34437 - DNA, 939 bp, Artificial sequence
  DNA replication origin
atgtatccctaaccgacacgccccccgccaagtccacacttcccctacgcagctttccttgaggactcaaatgtggccacgtgcccctcctctgtggcccctgcctttaaggagacacttgtcccagtgggtccctgccaaactgggaacctggggctgtgaggactcctctcctgtcttcccccgaggtacgcagctggcctagttccaagtgagccaactgagtgagatgctagggcagactggaggggggatggtccagcagcaggggtgggaggggctgggaaggctccctggaggctgtggtggggctgaaggatggccaggagctggttggctcaagaagggtaagaggtggacgggtgcccaggctggaccgccaggagcacgcgtggcctcacacaggaaacagtggcatggactgcggtgtcctcgcgggacccccgggctccagcacagctgtggtggagacaggtggtgacgccgaccctggggagaagggccttggccgcccctgcggagggggagccctgtccggaggtggaggagggttttcagctcaggaacaacggtcacatccatgtctcaggaagccacaccctccggcctatggcgcaaaggcacttctgggcacagggctggctggaacctggcagataaaggggaacgaggtgggggaggagagctcttgtcctgcctttcctacagaagtgacaccactaggtgaacccggagaaggcaagcagctaacctgcacagactgtcctagctgacccaagaaggaccacgagagcatcctagcacctcaccatccacttggccgacagcagagacgtgggcagccacacagagagaccaagcctccagattcaggcccccaagacacggacacacgagtcagagggcgatcctgagtgccactgcatgtccacaagcagc

SEQ ID NO: 34438 - DNA, 1125 bp, Artificial sequence
  DNA replication origin
gctttgtaggcccaggtctcgtgtagagggcatgccgtttagtcattcccagtgcccgtgactcactggccgcttccagcagccaatctcaatcccagggtgctggccgcagggtgcttcggggcgtgacctctacctggccggcagggggtgccttccttgcttttcggtgctgcccctctctgcagttgtgaacatgccgggtctcctcgtcgtggctgccttccctgtttggtttgtgtgggcaacaggaacctctccaagacctggggcttcccaagaacctctgccggggtgcgctggctctgctgctgcccagatcccctgtctgattcagcatcttcatctgtgacggggggacaccaggaacccctgggtttggggctgtgaagcattcgtatccgctgagtgcttagaaagtgcctggtcaccatcagcgctctgcagacactgtgacacggtacagttggtgtcacactggtgtcactgctgcgtggctgtttcgcctttgtgctctgactatccgtaagattagagacctcttctctcttgtgatccctgctgggatcttatggtaggcgcctgtggcatttttggtggatacatgagtatttagggatgttcagcagacagggtgctagtccagcaccaggcccatcaggaacaaaacaggacagtcccattgtgtgtggtgttcatgggtcagtgggatgctgggacagaagacagacatgctttggactgtaaggagagctggcagagagtgagctgtgctctgtgcctggggacagcagcaggccgggataagggcgggtgggggtcaggaaggggtgagctgggtggaggaggcgtggaagaaggcagcatgtccctctggctgcaccgaggatgtggagcctcctccaggctcatcgaggccattggtgggctagggtgagccctgagcccatggagataccgtgcctgaaagggggctgtggtggaagcgggtgacggttaggaggcaggtggtccaggagagaggggctggctgaggagcttgggagaagcggctggactcgctgtgcagccagggtgcacagctgtggccaggagtgtggagaggagaggacccagttccgagcc

SEQ ID NO: 34439 - DNA, 1406 bp, Artificial sequence
  DNA replication origin
aagaagaaaactcccccgcctcccctgaccagggccagcctcttccaggcaggcctgtaggtggctggctttcgctgtttcacatggggctgcaggccctgagcacatgtgtgggagggggcggggcctctggggtctccctggcctcccaggctgagcggtcaggcaggcgtgaaggggcctgggctaatgctgcccacactgtcctcccagccagaggcaccggtggcctttctgcctctttcctgtttgattcctgcctctctctgaggctcagagaggtgcagcagcccgtccagggtcacacagtgagccagtgctgagccgcttcagcatccaggagtcctctgactcctggtcagaggttttcagcccacatggtgctgttttacctaagccttaaaaaaaaaaaagtttttcttttgatgacaaagccaaggtgatatatgcagattacaaggaattgaaatcctctccatgataagcaatgtttgtcctgccaaaacagttctctgtgtgcgtgagtctgagtgtgcatgtgagtgtgtatgtgtacaggtgtgtggatgtgagtgggtgtgtatatgtacataggtgtgtgtgtaagtctgagtgtatgagtgtgggggtgtgtgtgtacacgggtgtgtttgtgtgtgtgtttgtacacaggtaggtgagggatgagtatggacgtgtatgagtgtgtgtacatgggtgtgtgggtgggtgtgtgcatgtgcatgtgtgagtacacaggtgtgcatgtgggtaagtgtgggtgtgtgtacgcatgcgtgtgtgcatgtgtgggcgtgagtgtgactcacacctctgaactccctgcccgtggccctccggcgtcagcacaggccgctgtgcctggttctggccagggtccatgtcgtgttccctggcatttgtgtcagctgtcatttatctgactaggggggacatttggcatctccgggtctccctctgcaggggtgcctcggtgacccctcgtacgttggtttatactctgtgggtatttcggtcggatcgcatcctggacgtgggatttcagggatgaggttgtttgcctcttgggcgtcttttttccacatttctgtcttcccttgctttcttgccggactgtgtgtcagccccattccagtatgccgtggaccggtgaacgcgagagcctagtgccttacagctgtgtccagaggaggggcagggctctgtggacgcgagaggcttttcatgtgtggactagtgggtttggcacttactggttctgtgaggcttcggtaaatggccagatgccacgaaacctgagcttcctctcctagcagctggtgagagagtgatgccctcctggagtgttggtgtggactgactaaggcgtggcggggtaaggcctg

SEQ ID NO: 34440 - DNA, 820 bp, Artificial sequence
  DNA replication origin
gagtgctttgaaggcatgcaactttgtgttcagtggcatggaactggcctgagctgccttgtatttcagagcaaagtgtcagacacgacatgtgctcagcggagggagctgggctgcccaggccacgggtccacctgggaccggtcaccagggggccgcaggctggcctctgccttcttcttgggaacctcccattctgcttttgaaactgaaagccagtgttgtagctgatgacttagggaaaggagaggggcctccgggaggcgctgtgatgcgtgcttgggaatgaaaatgctggagtcaacaagcttaggtggcagagacaccgacagccatcagcaagatgacttttgatagtgaaagtgctcggaagagcatcctctatgatagagtgatgggagcggtggtggatgcttttggatcggtggtcaggggaggcttccctgcagagggacagtcaagctgagagcccagtgacaagaggcgccagtgtgggaagtctcaggagcagaggatcctaggccagtgtggtggccccgaggcaggagtgagctgggctgagctggggaccggtgaggaggctgtgcgggtggaattgaggatgaggcggtggatgagaggagacacggggtctgtgtgggagtacggaggggagaaggcacgggacgtctgcggcaaggtgctggcgcgataggaagccgtctgtgtgctgctcactgggttgagagcgtattgcactgctgggggtctttatcgaaagttctctgtgggtaaggggacagtcccctgcttggaggcgtgtgctgacttcatctcccca

SEQ ID NO: 34441 - DNA, 1905 bp, Artificial sequence
  DNA replication origin
gggcagtgcaaagccagctctctcccacacctgtccacctgagtgagacctttatctccctctgtcgcagaccaggaatgccacccatttccaccatcccacttacataagtgacagccacccagacctccagggttccacacatcacaaggggaacagacacgcttcggcctaggacatctcccccagggactaaggaaggaggaaaggggccataccctatgcctctgtgtgcccagcgggacttgcctggaggtgggcttcattgaaagtggacactaaaggtatatttcatttgggtttttaactcaatacagattggaagcaacaagctctgtcccttcaacggaaatcaactcacaccacgccgtggaaatccaccaatcaactgctgcaaactcttccttacctcttaagaagaaggcagcaacacccaaaccagatgggaagccatgggaactgggtgccagaagcatgagacacctgtctccatgaccctgtgccacaggcgccgagatgggcaggagggaggattcttgccccccacccatgaaaccacacagacagtgccacttcagtggcgccagcagccagggacgccccaacctgccctctctaacggcggagattttggctgccacccccacagccccacaacacctttcctggcctggtgcccctgaaagccagggcagcagaggaggaggaagaaatgatcccatgttgggggccagcaatgcttctgggcttgaggaagaggggtaggggcttgggtattggagaagaggcagcgcagagttgggtaaagggggtgccagggtgcaggaaggcctcgtgtttatgagaaccaacacagaccaatggggaggggccgtccagagcgtttagggaggttggggaacccacccacccaccctgggtttcaactgaggctctaagatcctgggggaaaaaaacagaaaatgaggtggaaggagggagagggtagtggctgaaagagacatcaggactcatcaggctgatgggcgttagatgaagtgggagatcctgaaggcaaaggttgtacaggagactgcaggactgtgacgtgaccaaccagcctgggagggagatctggactggggtcaagtgtggggaagcctaaatcaggatcccaggggcggagagggcccaagctgaggggaacagcaggccatcagtgactcaaaggtctggggaatccaggtcagagaagaaactgctcctggtcctggtctcagagcagagggtctgaaggtgaaagagacagccccgccgggtccgagggagagtgaccagggcctgaaactagaagggggctgaggcggcagggtgggtcaaagaaagaagtctgaaaaagcaagtacaaagagaggggacactccaaacaggcctgagtccctgcagcagaagaccgaaggccagggtcctagggagtcagaggagctcaggccagggctggggttgggagagaaagggatgccctggctgcagccggggcaggatcagacgggagagaaggctcaggtccaggtaggggatgggtggagataaagcttaggctgggccggggttcaaggaagagagacgccgcagagcagggtcccagggggccggggacgcctcatatctgagctgaggttgaagggaagacagacagcaggttggggactctgggagtttgaggcgactcggggacaagggtccagacaggaaaggagacagtgactggccctggacctagagacggaaaggtctactgggcagatccgaggggccccgggaggggtctgaacagggcccagatcccaggaagtgcctggaaggagctctgggccaggctgaagtcccgagagctgtcttgaggtccctaagccgggctggggt

SEQ ID NO: 34442 - DNA, 1120 bp, Artificial sequence
  DNA replication origin
cccgcgtcgctcgccgccgccgccgccgccgccgccgctcaacgccgccccgccgccctcattgtctgtcaagcgccgccgccgccgccgccgccgccgatcccggccgcccgctcgcccgccagccccgcggaaccggaaaccaccgccagcccgggtcgcgcaccgatcacgggcccccgccgccgactagggcccgccgcatcgactgacagccacctgggccaatcgacggcgcggacggccgcttgtggcgcgggacttcctgcctggcgggggcctgccgggctgcggccggagggacgaagcccgcagccaatgggaggccgggaccggaggggcgggaggagggagggagggaggcgcgaggcgagcctggcggaggggagcgcgaggtgtgcgccgcacgtggaggggggcgggggcgggacgggcgcgcggcgcctgcgcgctgcggcccgcagggggcgctgcctcgtggctggagcctccagggcgggagcgtcccgggggctggaactgaggttacgggttcgagccctgtggagggatcccccagcccccccggtagggacacttttgtttcctgacctcatgatgctgctatgtaatggaacgagccctgggctctggaactggagattaattttcttttcttttttttttttatgagacacgtctcgctctgtggcctaggctagagtgtactagcacgatctcagctcactgcaacctccacctcccaggttcaagagattctactgcctcagcctcccgagtagctgggattacaggagctcgccattatgcccagctaatttttgtatttttagtagagacggggttttgccatgttggccaggctggtctcgaactcctgacctcaagtgatccgcctgcctcaacctcccaaagtggagattaattttctaatcttgcataatccttggcaaacctggtcagccccttcttcacctttccctgagtctcagtttgtgcatctgtgaaataggttgaagaacagtactgtgtgattcttcatgctaatttgaatgatacaaatttgaaatcgtgctacattcaaatgacccaagagagtcacatgttttcagttagacac

SEQ ID NO: 34443 - DNA, 1378 bp, Artificial sequence
  DNA replication origin
aatcctttccccgcctttcccccctttctattccaccaaaccgccattgtcatcatggcccgttctcaatgagctattgggtacacctcccagacggggtggtggctgggcagaggggctcctcacttcccagtaggggtggccgggcagaggcgcccctcacctcccggaccgaggcggctggccgggcggggggctgacccccccacctccctcccggatggagcggctggccgggcggggggctgaaccccccacctccctcccggacggggcggctggccgggtggggggctgacccccccacctccctcctggacggggcggctggccgggcagaggggctcctcacttcccagtaggggtggccgggcagaggcgcccctcacctcccggacggggcggctggccgggcggggggctgaccccccccacctccctcccggacggggcggctggcctggcggggctgacccccacctccctcccgggtggggtggctgtcgggcagagacgctcctcatttcccagacggggtggctgctgggcagaggggctcctcacttctcatatggggcggttgccaggcggagggtctcctcacttctcagacggggcggctgggcagagacgctcctcacctcccagatggggtcgcggccgggaagaggcgctcctcacttcctagatggggtggtggccaggcagagacgctcctcactttccagactgggtagccaggcagaggggctcctcacgtcccagacgatgggcggccaggcagagacgctcctcacttcccagacagggtggcggccgggcagaggctgcaatctcggcactttgggaggccaaggcaggcggctgggaggtggaggttgtagcaagccgagatcacgccactgcactccagcctgggcaccattgagcactgagtgaaccagactccgtctgcaatcccggcacctctggaggccgaggctggcggatcactcgcacttaggagctggagaccagcccggccaacacagcgaaaccccgtctccaccaaaaaaatacgaaaaccagtcaggcgtggtggcgcgcgcctgcaatcacaggcactcggcaggctgaggcaggagaatcaggcagggaggctgcagtgagccgagatggcagcagtacagtccagcttcggctcggcatcagtgggagaccgtggaaagagagggagagggagaccgtggggaaagggagaggggggagagggagagggagagggagtgacacttctcctgtttttaaagtttttgttgtagagacaaggtatcgatatgttgctgaggctggtctcaaattcctgagcttgagcaatcctcctgccttggcctcccaa

SEQ ID NO: 34444 - DNA, 1163 bp, Artificial sequence
  DNA replication origin
atctgggaggtgaggagcgtctctgcccagccgccccgtctgagaagtgaggagaccctccgcctggcaaccgccccatatgagaagtgaggagcccctctgcccagcagccaccccgtctgggaaatgaggagcgtctctgcccgacagccaccccacccgggagggaggtgggggtcagccccgccaggccagccgccccgtccgggagggaggtggggggggtcagccccccgcccggccagccgccccgtccgggaggtgaggggcgcctctgcccggccacccctactgggaagtgaggagcccctctgcccggccagccgccccgtccaggagggaggtgggggggtcagccccccacccggccagccgccccgtccgggagggaggtggggggttcagccccccgcccggccagccgctccatccgggagggaggtgggggggtcagccccccgcccggccagccgcctcggtccgggaggtgaggggcgcctctgcccggccacccctactgggaagtgaggagcccctctgcccagccaccaccccgtctgggaggtgtacccaatagctcattgagaacgggccatgatgacaatggcggtttggtggaatagaaaggggggaaaggcggggaaaggattgagaaatcggatggttgccatgtctgtgtagaaagaggtagacacgggagacttttcattttgttctgtactaagaaaaattcttctgccttgggatcctgttgatcggtgaccttacccccaaccctgtgctctctgaaacatgtgctgtgtccactcagggttaaatggattaagggcggtgcaagatgtgctttgttaaacagatgcttgaaggcagcatgctggttaagagtcatcaccactccctaatctcaagtacccagggacacaaacactgcggaaggccgcagggtcctctgcctaggaaaaccagagacccttgttcacttgtttatctgctgaccctccctccactattgtcctatgaccctgccaaatccccctctgcgagaaacacccaagaatgatcaataaaaaaataaataaaataaataaataaataaatagactggacaccctactacccatacccagtttaagatacagattacaaccaacaccgttaaagcc

SEQ ID NO: 34445 - DNA, 1041 bp, Artificial sequence
  DNA replication origin
ctcctgggctcaagtgatccttctccctcagccttccgagttgctgggactacaggcacacgccacattgcccggctaatctttgtactttttttgtagagatggggtctcactacgttacccaggctggtcttgaactcctgagctcgagcaatccgcccgcctcagcctcccaaagtgttgggattaccggtgtgagccactgtgcccggcctaaaatctaccaatttttaaatgtcagccgggtcaggttggcagaacagtatgtgcaggatcaaagaggccacatcctgacttgtgaaccgaggctcaaaagccagcaacaggcaccttttggtggtttaaagccacttctggaactctgacgctctgcaccctttcccagagagagaacatccctgacccgggattctggtcccctgagtcacccgtgtgccctgacgagtgcccctggcacccaggaaagaccctgctcaccagggctgttgatgtacatgtggatgggcttcttgttgctctcggattgcaggaagaggagctgtgcgataacaaggctggcaacgctgtcatcgatctgcaggtggagagggcaggggtgtccccagattcggggtggggagagagttttaagggaggctggggatgggtcagggaaccaggaagggggaccagagcccaaagtaaaagggatggggaagaatttaggccccagaaggggatggggagagagtagtggagaggacccagggggtttggagcacaggaaggggggagtcagggggctagggacacaggaaaggaaggggtgagaatggctggggagagtcttgagcgtaggaatgaggggagcggtgccaggtgtcaggaaggaagtcggagattaagagccgaggagcagagaaggggtgaggagcgggttgggggaccgggagccaggaggggagtcagaaggggagggaagggggttagaaggggagcggagcctgagggaaagtctggggccagggaaggaggggcgcagggagtgtcggcaggcgcttg

SEQ ID NO: 34446 - DNA, 1621 bp, Artificial sequence
  DNA replication origin
aagctgcagacggacttgcgactcagccactggtgtaagtcaggcgggaggtggcgcccaataagctcaagagaggaggcgggttctggaaaaaggccaatagcctgtgaaggcgagtctagcagcaaccaatagctatgagcgagaggcgggactctgagggaagtcaatcgctgccgcaggtaccgccaatggcttttggcgggggcgttccccaaccctgccctctctcatgaccccgctccgggattatggccgggactgggctgctggcgctgcggacgctgccagggcccagctgggtgcgaggctcgggcccttccgtgctgagccgcctgcaggacgcggccgtggtgcggcctggcttcctgagcacggcagaggaggagacgctgagccgagaactggagcccgagctgcgccgccgccgctacgaatacgatcactgggacgcggtgagaccggcagcgccgggggcgagggacgggggctcgtcgggggcgcggcctggggacgtggagcatcagatggggcggggacacgctgggggcggtacctagagcggggatttggagcggggacagaggagacgagcgccgggaccgggcagggccacactgggggcggttacagtaccgtttagcgtgggggcggggctacggtgctggggttgtggggccaggggggtcgggcgcagggatggggcggggccacgctggggcggggacaaaggagacagcgcagggatggggcgggggcactctgggggcgggacaggaggcgagcgtagggacggggcgtggccacgctgggggcggggacagtggggaccagtgctgggatggggcgtggccacgcttgggggcggttacagcgcagtcgagcgtgggggtggggccagggagtcgggtgtagggttggggtgcgattacgctgctagcagttacagtgcagaagaacgtggcggctgggattggggcgtggtcaggtcgtcgagcgcatggatggggcggggccaagcttggggcggggtccgtggagtcaagcgccgggatgggttggggccatgctgtgggggggacggggaagtcgaggtttagagagggcagaaccacgctgggggcggagataggggagacacatgctgggatggggcagggcctttttggggtcggtagctattgcagggatttgggagctgggctatggtgggggctgggctgaaactctggctgtgggaggggcgggacctgggggatgaggaccttggggtcagggagagcacttttgcgacctgggaccaaggttaggggcggaaacggatgtggagccagatgatgttgagagacagagacaggacacttgggtggggtcaagttgtagggagattcagccaattgaatgctggggccgggccagcattggggacctggaattgtagcctcagggtgagtactaaggactgaggtcacacctaggtagggccatagttgaggggctaggggagtttgagttgagggcagggtcaagagtcacatagggaaaccagccccttgccgttttctgcccctccttgcctcagtttccttgttccctctgggagctcccaggcttaaccgag

SEQ ID NO: 34447 - DNA, 983 bp, Artificial sequence
  DNA replication origin
cagcggctgccccagctctcggcggctgcctgcggctgtggtggctgagggtgcccggcctggcacccagaagctgcagtgctgggggagctcggctgacttatttattggagacctggatgcagagacaacgaggaggggagtgggctggggcgaccagcagtgagtgcaataaaggacaccactctcccggccttgtgactttgaccatgtgtccagccagccacacctggagctccctatgggccagtgccatcctgggttcccctgcaaatcccggccccagcaagcagccactgcaatgtcccagttaggctgtccattccccaactttattcacaaatctggtgtctgtagaaagctgggggtcagcaggctgggggcggctgtccagactcccctggccccatgccctcagggagggagcggcagatcacggagatgcgccggccccggggaatccggcgttccccaaagaaggactcttcatcccgaaggatctcatgggagaagtcataacgggctgagcccctgcaggaagaaacaggctgtgactgggtgcaaggagggcagcccctgctccaggcagacctggattccagcctcctggattccagccccctgctgcctcccacacagaccctggggtaaaggcgtcttcggggagggctggattgagggaaagtacccagggcacagggtgggcggatggcacattcttggaggggtgggtgctgcctggatggaggtacctaaggatgtagagggagcccggctccagcaagagttccagccactcccccggctcctgggtgtgcaccagccgcataacgctgggagacaggagagacaggccggcgatggtggccccgcagaactgcaaaagaggcgtggggatgggtcaggatctaaccgggcctgcctaccccctggctgggagtgccaaggcaccgtcctctgcccaccttgatgctgtccacgtg

SEQ ID NO: 34448 - DNA, 822 bp, Artificial sequence
  DNA replication origin
ccgtggggttcccgtggccgatggagagttctcgtctgaacaggtggcaaaggctggagggacctggctgggtaaggacttccagggaccctctgtgacttcccaactttccccagccctgaccctgctcactgtcagcgcccttccctcccacaggcacccaccgcccccttgcccgcctgcgccgagccctgtctggtccatgccagctgtggagcctgaccctgtccgtggcagagctaggcctgggctacgcctcagaggagaaggtcatcttccgctactgcgccggcagctgcccccgtggtgcccgcacccagcatggcctggcgctggcccggctgcagggccagggccgagcccacggcgggccctgctgccggcccactcgctacaccgacgtggccttcctcgatgaccgccaccgctggcagcggctgccccagctctcggcggctgcctgcggctgtggtggctgagggtgcccggcctggcacccagaagctgcagtgctgggggagctcggctgacttatttattggagacctggatgcagagacaacgaggaggggagtgggctggggcgaccagcagtgagtgcaataaaggacaccactctcccggccttgtgactttgaccatgtgtccagccagccacacctggagctccctatgggccagtgccatcctgggttcccctgcaaatcccggccccagcaagcagccactgcaatgtcccagttaggctgtccattccccaactttattcacaaatctggtgtctgtagaaagctgggggtcagcaggctgggggcggctgtc

SEQ ID NO: 34449 - DNA, 1778 bp, Artificial sequence
  DNA replication origin
ctcagcctcccgagtagctgggattacaggcgcccaccaccatgcccagctaatttttgtatttttaatagagatggatttcaccatgttggtcaagctggtctcaaactcctgacctcaggtaatccacccgcctcagcctcccgaggcatgagccaccacgccaagcccaggcttttctttccatcggaaaattatcatctcaataagcacttcagtaagaaaaaccacaacataatcatcgaagcaatccctcacggatggagttgaggccacttccagactttcctaatatgaagaaggcatcagatgtccctgtgctggctgtttcacttgcctgtgtgggaggaaccccgcaaacagggctcctggggcagagggtgtaatttacaattccccagtagcagctgctcatccaaagagctgctagcaatttacacccccaccaacagcacagggtgcacctgggtcacacgggttgtgtgtgagggttttctgattttccccaatcttgtgggtgcttagagtcaagcaccccttcggacaatcacaagctgtttgcttgtttttgcattcgaagctacgggcactgccttacactctaagtgcccatctctttcctcaccaagccgagtaggaggggttctgaggagctcccctgtaccggtgaggggactgggctcacacggggctgggtatggaagcctcgagagcccttatctgtctgcatcgtgctagacgttaccatgacctggacagcctccatcgccccgggggctctgacatgctcagatcccaggatggggctgcagttataggggtctcaggttggccttcccgagacaggcgtccctgtccccttgtgtccccacccttggctgtccccaggcctctcccttttcctgttttgatgctggctcagccaggcccggagacaggggcatgatgtcctaatcctccaggcgggagccaccatggagggttcccgtggactcagtcccctgccaagccacctttcccagcactcacatatgctccacctggcacatgatacacgtgggggctcctgagccccagcaccctgacttagtggggagggaccccaccggggtcccatgaagccccctgacttccactccaggcagcaggtcgggggaacaccagttgcctgccctggccgccagcacagcactcgtaaatcagggggtgtctggggcgtcggaaatggctgtgtggaatgtcggggtggggtaggctgggggtgagcccttaactcttagaagggtggggtgtggggcagaaggagcagatgcctggattcgagggtgcaggagatgggctggtgcagacgtggggcctcctggctgcaggggccggcagtgaagaggttagctcccagcccaggcagggcataaatttggggcacagctcccactctcaggacctgcccgtcacaatggccgtagggaagttcctgctgggctccctgctgctcctgtccctgcagctgggacagggctggggccccgatgcccgtggggttcccgtggccgatggagagttctcgtctgaacaggtggcaaaggctggagggacctggctgggtaaggacttccagggaccctctgtgacttcccaactttccccagccctgaccctgctcactgtcagcgcccttccctcccacaggcacccaccgcccccttgcccgcctgcgccgagccctgtctggtccatgccagctgtggagcctgaccctgtccgtggcagagctaggc

SEQ ID NO: 34450 - DNA, 964 bp, Artificial sequence
  DNA replication origin
cacccaggctggagtgcagtggcgtggtgtcagctcacagcaacctccacctcccaggttcaagtgaatctcgtgcctcagcctacggaacagctgggacaacaggctcccgccaccatgcctggctactttttttttttttttgtgccaggatttcattctgtcacccaggctggaatgcagtggcaccatcatagttcactgcagccttgaactgggcttagcctcccaagtagctgggactgcaggcgctcaccatcatgcccagccaaaactgaagacttactgggctatgtggtggataagtcacagctgaagagagacttagggaagtggaagggagaactgtagaagttacccagtgggcagcacaggcccttggtcagtgtgagggaggccgagccaggaggaggaggacaataagaaggcctaacaggcatctgaagattccagaaggaagggccagaggaggagatggcttaacttttccagaattgctaactacggggccctgggagtcagggagcaagcaggatgtcgaagggtcactgagagcctgaagttctggagggcagagccatgtattggacagagcctcactctaggatggcgaaggggcagtgagagccttaagttctggggggcagagccatgtattggaccaagcctcactccttgagggagaagtgcattttgtcgttgatcatcttgcgctcggggttgagtcgcttgaggatctgggccaacacgttcactgtctgctcgctgctcagccctgtcttcttggtctggaactttttcagcaggtccttagtggtcatgggcttccgtgtcaggtagcggcgcacggcatcctcagtcacctgcacgtcgctgaggatgggaggacggggaaggtggcatcagtgagattgtccccagtagcccttgccctgccccctgctgtcctcgtcaacttacccgc

SEQ ID NO: 34451 - DNA, 1232 bp, Artificial sequence
  DNA replication origin
ctgggaggctgagtcaggagaattgcttgaagccaggaggcggaggttgcagtgagccgagatcacatcactgcactccagtctgggcgacagagcgatactctgtctcagaaaataaaaaaataataataaaaaatagcaagaaaccagtgtgactggattggggccagactctgagtccgagggaggtgctgagactccagcagcacatggggacctgctctttgagggactcggggcagaacgggaaggcaggaagggctggctctatccgtgtggtttcagggagtcctgtgccacagcccaagtccccgggggccacatcaccttgaaggctatgtgggtggtgccctggggctcgccccctgcaagcacagatgcagggtggtgccaggcccggcatgagcccccctgtgcctggcccgcaggaggaacaaggtgctgaaccacttcagcatcatgcagcagcggcggctcaaggatcaggaccaggacgaggatgaggaggagaaggagaaacgtggccgcaggaaggcgagcgagctgcgcatccacgacctggaggacgacctggagatgtcgtccgatgccagtgatgccagtggtgaggagggtgagtacgggcgcctgggcattaggtcacagaggtgcctgctcaggcagtgccagtgaaggcaaagtctaccatcgctcacagtggccctagaatgagaggcaagtggggccgggcacagtggctcacgcctgtcatcccagcactttgagaggctgaggcaggcagatcacctgagatcaggagtttgagaccagcctggccaacacagtgagaccgtgtctctactgaaaacacaaaaattagctgggcatggtggtgcatgcctctagtgccagctactcgggagactgaggcaggagaattgcttgaacccgtgagatagaggttgtgttgagccgagatcacgccactggactccagcctgggcaacagagagagactccgtctcagagaaaaaagaatgagagtcaggcgaggccgcctggaggagcagtgatgtcagtcaggaggcaaggccagagcccgggagagctgagccatggcccttcttttttttttttttttttttgagacaggatctctctctctctcacatgggctggagtgtagtggtacaatcacagcttactgcagccttgacctccgagggtcaaacgatcctcccacctcagcctcc

SEQ ID NO: 34452 - DNA, 1168 bp, Artificial sequence
  DNA replication origin
atgcgcaaagtgcctgggagcccgcaagggggattcgtctccctcttcccacccaggatgccccacggtccttgggtgctgacgtcacgagagagggcggtcccccatttgatgaagttaaccgcgttatatacaagagcgccagcgacagaggcccgttagtttatctcagactcggcctaggtttgctgagtctaaaaagggaccgcggtggaccttttgaggtgaccatagccgccgaggagcataagtgactgcgcactgaggtggccacagtcgctaagaaggttgccatcgcgacgcggctgctcgagggtttcgcttccgggttaggcggccgcagaagcgtagaccgagtagcttgagcgcctcttccggttaccttttcccagcgccagaggcgcctagggttggggtcctcgctcaggcacagagacccgacaccgagcggcggcttccccgggatcgagggacgcgcacgccagaggagacgaaaggaacccgggtcggaccagatcggaaccactgaccattgcccatggcggccctagtgagtgtggatttggcggggttcgggggttccgacggcgacctcggcgacccctcactcaccgcttcctctttccgcagggccctagcagccagaatgtcactgaatacgtcgttcgagttcctaagtaagtccccagccccatctcccactcctctccaccccccaaaaatgaaaaccttcacgatcttcttagccagccatttctggccctgtctgtggttctccctccagaccgggagagacttggagggcagggctgggattaagctgaggcttctctggggacaacactgcttttttgaacgaatgaatgaatgagtgcattaatacacggtgatccagccccctggcctaaccttcgaggagtatatggtcccatgatgcccaggccagctgtaaggacatattcctcgtcctgtttcaaagtggtcaggctgtctttcctttccaggcctttgtacatcctgttcctctgccatgagtgcctcccctcaacccctaaactgtgactctgctgggtgaattcttgatgattctgcaaaactcaactccagtatcttcctcctccaggaaatactccctgcctgtcctccctcctccccaaggctgagttca

SEQ ID NO: 34453 - DNA, 1355 bp, Artificial sequence
  DNA replication origin
accgtggggggggccaggaagccccctcccaaacctgcgctggctcaggctggaaggacgtgcttgttaactgtctagccaggtgctcgcgggactcgctgaagtcacgctgctccctgatggagaaggagggacagagcaggaagagaggagaggggccgcggagggcggaggcgctagggtcgtaggggagctgccctgtctccggagggcggtggctcccggcgcagcacgacgacatgaacaatccagagatcatggtgtccccacaacacccctgtgaggtaggttggaaggtggcaacgatcttcacgcccacttcacagacaagcccgggacacaggcaagcgcgagcgcatgggaggctgagcccggcggggcaggggcctgggccgctccccgcgtccccaccagtccctgccagagccaggccgcctgcaacacagtcacttggacacaggaaaaaagatcatgggtttaaaaaataaaagaataaaaagaacaaaaaccaaaaaagtgatgcagagaaggggaaaaaatagacgttttcttcccaagtggccagattgtgagcgaggtggtggcggccgggccggtgcccaccgtccgcgctgtctgcctgccccccgactccccagcagttcagaagtcccgcctgcgagtctcagcgctccccagcatcacgacagcggcacacaggaacaagcagccggcgcagggaggcctcttcgtttaacctctggacccagcgaatgcttccctggcggtgcgtggggactcccggagacctccggccacacggcccccgctgcaggcatcaagggcacaccccgcaggggaaggggtttccggcgctacccactaaggcaggatggacggtggccgggggttggaaggagaaaggaggaggaggagggtggcaattcccacttgcctgctgctgtccctgctgcgtgggcggcggctgggggccgccaggacctggggtctgtccgtagtaagcggcctgctgtctgtaatattccgcccaggcggcactgtagtctggctgggagcctgggggagctcctggaccccctccggtggccacttgcgctgtgggtggacaaaggcaggtgagaggctgtgggtgagggctgcccctgcccctgtccccgcatggtggccactcaccttgcttcttgtagtactcctcccaagccttcgtgtagtcctgctgtgggggtgctccgggctgctggggctgctggcctgtgcgggcgccgagacaggtcagaaaccactcccccggcagggctggagcccccccgccaccctgcagactcaccgatctttttgtaatactcttcccaggc

SEQ ID NO: 34454 - DNA, 1926 bp, Artificial sequence
  DNA replication origin
tgggagcctgggggagctcctggaccccctccggtggccacttgcgctgtgggtggacaaaggcaggtgagaggctgtgggtgagggctgcccctgcccctgtccccgcatggtggccactcaccttgcttcttgtagtactcctcccaagccttcgtgtagtcctgctgtgggggtgctccgggctgctggggctgctggcctgtgcgggcgccgagacaggtcagaaaccactcccccggcagggctggagcccccccgccaccctgcagactcaccgatctttttgtaatactcttcccaggccttagtgtagtccgactggccggtgggtgggggctgagggggctcaccctgagccggtggggccgcaggggccggtgcggggccggggacggggcccgggggctgctggtagtagtgtgagtagtaggcggcccacgcggcgttggggtccgcggccgctgcagctgctttgcctgcaggagatacctcgggtgagacggggggacagaacagggcctgccctccgccaggtggcccatcacttacttgggtcatgaggagcaggcggctgccactgggggtaggtattgccccagccctggggtgggtactggtgaggagggggccccccggcactgcaggagagaagaaagggatgcttgagcagtggtgcgggggtggccgcagccggaccacctggggtggggatgtttttcagtggggaggcgccagagacccagaccaccaggctcaacggggcgcctgggaaaggcctagacaagaagcaactcgaaggacgcgcagcgtcagcttgaggacatgaaagaagccgcgaaacttgcacgtgcacagagggatgctgaaaggcacatgctctaccagtagacaggagagggcctgttgatggtatccacaaaaatgggctggatgaggccccccgcctgcacttctagggaaagggaaatggggtctgctattcttcttgccagctcagtaagcccccggcctcaaaacccaggaggcagaggatactcactgtgggggagccccgggtggcccctggttgaagggcccaggattgaagggccccattgggccagcagggcctgggccacctgggcctggtccaactgggcagagaggaccctagaaggaaggagagtaaccaaggtaagtgggctgggatccgggctgtgagaccaaatccccagagcccgccccaacccacctcgatcttttcctcgataagctgcttggcgtggtcaatctgctggggtgaaccccggatgatgaacaacttgaagttggggtccccgttgggtggcagctgccgggagatctctacgaaggctcccgtctgctggtttatggctttcacattctcgccacctgcagaaacgcagaaggtgaaggtggcctgcagtgatggcccagggaagagggggcaagggatagggtgcagggggccacactcacctcggccgatgaccagcccacacttgtgagtggggatggagaaggtcatctccccgccagggggaccccaattgccttggcctcttcctcggcctcggccccccgggggcatgcctggaccccctggaggacctgggggaccactctgcaagacaagaggaggaggaggatgatgaaccctggaagccggtctggtcttgcactcccctggaggccctgccagccccttcagcacccggggccacctaccctgaggctctggaggaggtcgttgatgatccgggctgcgtgctcgcacctgtctgggggccccattatatgagcaatcttctcgggccctgtcccgtcatctgaggccagcaccgagagagcagagacacaagtttaaaagaagagcccaccccagagccctgcaacgccgcctccagcgcagacaccacgccg

SEQ ID NO: 34455 - DNA, 863 bp, Artificial sequence
  DNA replication origin
aacgaagtcagtgtggattatgggctggccacaattaagacacaaatcccaggagaagggaagaggggaattttgatattcccagttaactggtgagaaccttgaggcctaggttcaaaactcctaggatgtcttaaccaactgactcttccctaagttggagggccagacaccaagacctgatgggctttcgtgtccaggagatgttctgagaagttgacctgggtgccatggagggttgtttttggtggtaattcttctgtgcttactactttattctagattgcagccaaaattggaggcgatgctgccacgacagtgaataacagcactcctgattttggttttgggggccaaaagagacagttggaagatggaggtaactccctgctgctgcctttagcttaggaggaagggctgggggcctaaagaggtgcttttgtttgagtgtggttcagagggggtgggtgtcactgttgtttggtcttttaaaacctcagcaatcccggccttgttaattcttcttgttccgtctgccatcctgaggtatcaggtggcagagaggagggcagattgattgtgactgggtcgaagttgtaagttcccaagatgattcctccctttctgggaggctgaggcaacctggagcagttactgaggcttgatgtgaagttggcccagctctggggtgcgtagtgtgaccccaagtagcggatgatcaaccctgaccaactccactgttatccacgacaccctccctgctagaggcaggtcctgtcctaaaccgggaggactcaggtgcctggtggtggttgcgtgttctgaaggcttttttactctgagcgttggtggcggaattggcg

SEQ ID NO: 34456 - DNA, 1521 bp, Artificial sequence
  DNA replication origin
ccccgcccgggccgccgccgcccgccggcgggggcgggggagccggaggcgccgggggaggccctccgccgggcccgccaggcgcgggggaccggggcggcggcggtcccggcggcggcggcccgggcggggggtcggccgggggcccctctcagccacccggcggaggcggcccgggaatccgcaaggacgctttcgccgacgccgtgcagcgggcccgccaggtgaggaggccgagggcctgaggggcgcgctcgcgcgcgcgcgcaggcgggggagggggcgggggtcacgtgcgcgcgcgcgcgcagggtcgcggaggggggccggggccgtcgcggggtcacgtgggcggtaggcgggggcctggccctcccgctgcgcctcgagtgggatcccaacgggtgacccccctgcagggagtaggggcgcactgggggtcaccaggagcggcgcctgggtgtgcaggcgccccggagctcggagacgcacttttgggaccccccccttagccccccggccttaggacatgcctggaggcaggggtccaccttcccgggcggagggcctttactctcccctccatatcagggcaaagggcagtgtttgcccccaacccagtcccatttctgtcccctctctaggagaaagggacattgtgggggtgggagggacagtccttcctcttcagtcgggaaagtggatggggacctgtctagggctgagcacttgggcgaaatggggaagacgagcatggggactggctcttggatgctttggtggcttgaaagcgtggtctgtctctttgggggaaagaagggagggtctcccacccccgtgtattgaggcgtaatgacaaggaagtgtcacatgctgctaggactgacctctccagctccatttgcagcctccccatggcctggaggggtgggggtcggtagaatgggaggactttgccgccgaccggctcctgggctgtcccaatgcctccggggctagagactggctcctcccaaggtgggaggtcccgttaagtgaacgcctgtgttctggccctctgtcgtctctctcacccttggagttgggtgggttctagcgtgcatttggtcttattgcccatggaaccgtctgattctgggacagcttgaagggaggaagctggtgctgtcagttggtggggacaggccccctgtgggcatcccatgagttttggctctagggcagcgtagaaaaatggagactggtggaaagggagattcttaacatggtttgggtttctaaaccccagactctgatcctaagtttgctgggttgaggtttctttaaagttgctcttcacgtgtctgagatgtaacttgtgtcccatagagtcttggttttttgtttgtttgtttgttttttggaaacagtctcaatatcacccaggcaggggtgcagtggcacgatctcagcacaccacagcctccacctctccagttgaagtgctcctcctgcctcagcctcccgagtagctgggattat

SEQ ID NO: 34457 - DNA, 1768 bp, Artificial sequence
  DNA replication origin
ctcggcctcctcacctggcgggcccgctgcacggcgtcggcgaaagcgtccttgcggattcccgggccgcctccgccgggtggctgagaggggcccccggccgaccccccgcccgggccgccgccgccgggaccgccgccgccccggtcccccgcgcctggcgggcccggcggagggcctcccccggcgcctccggctcccccgcccccgccggcgggcggcggcggcccgggcgggggtcctcccgtgctgtagtccgacatggcgcggcggggccgggcctggcgcggaggctgaagctgaggaggcggcggcggcggcggcggctcaacgcgggaacaaggcctcgctccacacggccgcggagcactctgggaacccagccgctgggaggacgacgaggggggagagagtcgcccctcccgccgccgacgtgacggacgactccggcgggccaatgggaggcagccgccgcaccccggacaccaatcgcgagctctgtaggaggtggccaatcggagtgcaatgaggggcagtgggcgggaggctcagagtgactgacagctctcagaggcaatagctgcgagctgcccgtgctgggcgggcaaatgaaggagatctgagaaggcaggaggcccaatgaaacgcgagtgccagattcgcggggcggcttcagaattagattgacggttctgaagagtcacgtggactgtaaggccgggcctagtggaagactcctatggaccggctgggtgggcgttaggtttgatagtcgtggacacaagccaatgaatgcacgtgagaggtggtgcttgtaaagatgggcagccaattaatccaattcctgacgagttctgggtgatgaggttggctttggactttaattgcttcccttgttaaccagaatccttttctatccctgacttctaagccaatggctgagcgacatgggtgggtgttcggtgactgacactggtctggacaaatgggaatgaaggaaatcaaagcgcccacttttggtgggagccagtggaagcgccgctgcattggggcggagtcggccaccagacagcgaggggattagcgggaactgtagtgaatggcagccgacgtgggcggtggcaatcggctgcccgaactcaggcctgatgtctgggttagctcaccggcagcctggttgggtaggcccggcacgtggcccgcttgaagccttagagatcgagcgcttccggaggtggggaggccggaaagcaggaaactcgggatcccccgggccttcttctctctcgaccccccatctagagcgtccagttctcttgcaggactcaaggaaccagccccactcacgagtccagaaccgttccaacaaccgggatcgagggatcacagcctcgatcacacccctcacttcacacccctcactcccttcgcctaaggccctgggatccaagcctcaagctcctatcctaggtcctcacttcctctcctggacacaaattcccattcaggacccagaggcccaaggtccccagctcccctactgggtccagggatctcatgcacccagttccactcctaggcccaagtatccagacacgttcagcaaaaaccatctctttattccttgttgtgtgacatgttcaccatttcgccctggagccaggacgacccacaaggggccagactggagtccacgtttcttgtctcaggctgcaccctggggagggagtcccaggagttttctgacccagcactgcccccctccacc

SEQ ID NO: 34458 - DNA, 1240 bp, Artificial sequence
  DNA replication origin
tataaatttatgaaaatgttatatatatgtatatgtgttatatataatatattcatatataaatttatagaaaggaggaggagattggagaggaggagaaagaggtaaagggggaagagggagaggagggagaaaggaggagggagaaaggaaaggaagaggggaggagaagggagaaaggaagaggggaggagaagggagaaaggaggagggaaggaggaggaagaaaggaggggaggaggagaggaaagaggaggggaggaggagggagaaaggaggaggaggagaggaggaaggagaaaggaggaggaaagaggaggagggagaaaggaggaggggagacagaggaggaagaggtgaacggggaggagggagaagtgtgagaaaaaaggaggagaaaggaggaggggagaaaggaggaagaggaagtagccccagcaacgtgggtaactagtttccacggcgtttcctcacctgcggggcacatgctctcttacctccatggggttgatgagggtctgggagatggccacagccagggagccagcaaggagacgctcctggaagggcggggacccttgtattccacagaagtaattcttgcactgggagaggagagaggagggtgagagagaagtcagccaccctccgacacaaaacccgcgcagggaagaggcctggggtctggagggtgagtgtgtgcttgaacaagggcctggagttttgggggcatgggaggggtttgggcttgagctgggggaagcaggcccctcattccccacctgctcgaatacggagaacttgatggcatactcaggagcaatcttgagcacgttgatgccgttgccccgccacagggagcggaagccgccctcctggaccatgctctgtagcccccccagcaggttggtgaagttcgtcttggaggagtagacctgggtggagggaggaccctggaggagcccctgctcgcctctgtctccgtccccatccctgccccaagcgcagccccaccgggacctcccaagccacccaaccccaacccatccccatcccatccccattccttcttcagctccttccccggccagttctagaatcgcatgcaaccctgacccaaagccaacatcaacctacattcccacctcacccctcctcttcatctcctcagtctttttctctctctctttcttccttccatcctttcctttctttctccctttttgttccctccctccct

SEQ ID NO: 34459 - DNA, 921 bp, Artificial sequence
  DNA replication origin
agactctgtctaaaaaaaaacaaaaacaaaacaaaaaaaaaccaggggggagggttgaatcacttgaggtcaggagttagagaccagcctggccaacatagtgaaacccatctctactaaaaaaaaaaaaaaaaaaaaaaaaaaaaattaggtgttgtggtgcatgcctataatcccagctactcaggaggctgcggcaggaactgcttgaacctgggaggtggaggttgcaacgagctgagattgtgccactgcactctaacctgggcagcagagcaagactccgtctcgaaaaaaaaaaatgcagacttgggggaacagggtgggtctttcaccaggtgggtgccctagatgtgtgtctggggaaggtgccccaacctggctgaggatgagggagggccgggtctgccctgcaggtactggacacaggagagcagctgatggtccccgtggaagtcctggaagtggataacaaggaggccttgtggaagtttctactctcaggagctatggccggggcggtgtctcgcacgggcacggcacctctggacagagccaaggtgtacatgcaggtttgtgtgggttggggggaggacgggacccagcgctggagccactggggagaacgtggggtgaggacagatggagttgacgtggatggagttcaggataggagtgctggctggagttgggctctcctggactagctgagattgaggttgtggatggtgatagagctggtgtggacatggcttggagtcgagtttgaggagttgagagaacttgccagggacagggaccaacgctgggccaaggtgggggttggaggtcagggaattggggatggggtctttggacgagtttaaagacaaggtaggggccaggtgcagtggctcatgcctctaatgccagcactttggg

SEQ ID NO: 34460 - DNA, 2504 bp, Artificial sequence
  DNA replication origin
ttgaatttttctttctttttttttttttttttccagaaggagtctcactccgtcaccctggttagagtgtcctggcctgatcttggctcactgcaacctccacctcttgggtttaagggattcccgtgcctcagcctccccaagtagctggaattacaggcatgcaccaccacgcctggccaatgtttgtatttttagtagagatggggttttaccatgttggccaggctggtccccaactcctgacctcaggtgatccacctgcctcagcctcccaaagtgctggggttacagatgtgagccactgcgcctggccagatctgtctgacttcaaagccccaacctctcagctgtatcctccttgggactgggtctggagcccagaagacagagatggccaaggggtcactgtgtcctgagttactttggattccagacccccagcgactcacctgtgcaaaattttctcagcctgctccagcgagatggaaatgcccagagctcggaaactctgttggatctcagagacatcaatgtgacctggggagggggccggaggtggggaaggatgtgcgtgtgaggacacctggggaaccccaggaccaaggatcagaacagcttggaatggaggtggtctagcaagatcaggggctccagaaacctaggaggaggtttgcagtagggctgtggggggacccctgactcactggggtcagagaggtggaactgggaaatactgggggggcttctctgttctgtaaatgaatgaaggaatccaggggtaattgtaggggtctctatgccatgggggattgagaggcaatatccacaacccagatgctgctatgaggggatctctgtcccacaggggacccaggaacagcatagggtatctttgccccatagaaaaatctaagggtaattatcggggttctgccccagtagggaaaggaggtgggatgggctggctgggcctcgaaccacctagctagggggtgaggagtgctcctgaaatagcctatgagtcatcggggagaagcggccctccccctctcctcctagcgctgccagttctaaccccactgatgtctctagggcccccacagccctatcccttggggcctgcaggcaggtcgcccgaccttaccatcctggttccggtcaagactgtgaaacatgagcagcagacgctgttcccgctcctgcagatagcgggaaaattcctccaggtcgagcccgccatctgggtcagcatcaccctcagaggagataccctgacagagggaaaggggatagaggtggctccaggaacctgctcctgatctggaggggacgcatgtcaccttatgccttaggaacccagagcccccagcgccttgaggaaggggatagaagacgtcaccccacttctccctcagtcagctaacttctcagccagatccctacagccaccacaggtctgtgcggtgggtgtgagtggtctagttttcctggtgagcaaactgaggctctgcaaggtcaagtcaccagttcaaggtcacagaaccaggaaatggtaacctcagttctcatctgtaaagcctgtccttccagctgtctcttgtttttagtttttgttatttttttaggtatctcattcctgttgaacccagctgcctcttaaaaaaccctgtccacatgggggacccaggggttccctttggaggaagccctgggcgatgtggggcaggagagaaccaagcggagtggctgaggccttggtttttcccatttgggaagtgggaggttggactgctctcagggttgctgtggttctcttagagcgatctggggctacaggtgtgggaaggacctgcaaagtggaggtgggggcagcgggaggaaagtcttgttataggtgcattcccagctgcgggtgaccgcagacaggattgggtccctggctggggcagcccgggacagtgagccaggcccgtgaacggcccatgaaagggcaggccagggaatgtaaacacagggatcggggcagctgcaggccagggcagtaggtgcccagaggatggagggtgtgtctcctggaggtgagagcagggcacgtcatgggctgtgcagtctggaggagggtgtgtcccgggcagtgggcaggaaagcgcccccatctcttcccaggcagacgccccctgccccgcagcagggggatcgggtgttggccgcggaactgcaggcttggggcctcggcgtccctgtcttgagcgatcccgttaggccaaacacgagtgggtagggggaacgagacagagacacaggttctggagtccagccacaggtagtccctggtggctccggccgcccagttcaggggcttgggtaaccgggagcgggcggggccgggaggggaggaggtccctgggggtgggggtacctgttgggcgccggggtctgggttgcccccgcccagcctggccagcccctggcgcaactcgtgcacgtccacgcggccatcc

SEQ ID NO: 34461 - DNA, 945 bp, Artificial sequence
  DNA replication origin
cagtaccacctaccttatagggttttggcaaagacgactcgagaggtgagtaaaagccctggcatgtgcaaagcactgaatcaaagtgagatttgttatcgagtattcgctgtcaagtggtctgggctcccttccccctaatggtggatcgagaaactgcgcccgaaactagcagtagggacattccgcaggtgcagcgagtgcgacaggctggggccctgcctccagcgctcgaccactgggatcctcaaccccgcgcccgggtcactgagccaccccctccccacgccgctcagcgtctgattgcggccgcggcccctttaagatctcctggcaggcggtgggactgcgggctggaggcagtcgggggtctgcggggaggccccgcctaggtgggagaagaggcggggcgggcgggctcagcccaggaggcgctgaccaataggaaaccgactttgcagccgcgccgcgcgttgattttctgtttcccagtcagagtgggaaccgagaaaggaagcgcgcgggcgggaagaagggacagtgggagagcatcgctcctggatcttctgtttctgcggccgagcggggaaggtgtaaggcgcgggcgggcagagagcgagcgagatggtgcacggttcttgcgtgcgtctgggaaaagcgagaacttgagttcctgaagattagtgggtgtggcggggaggtcaagtggaaggggattatgaaacccaatccccgacagcgctctaccttgcccccttgggcaaagggggaaagggtaaactgaggcacgcagaggcggaactctgaaaccagacctgagaccactgagctccctagcccgtcttcccagaaggaactctggtgttcctcggctgtgcaataccagaccatcccagacattccctccccacgcccccagctccgccctcggtcccctccccccaa

SEQ ID NO: 34462 - DNA, 910 bp, Artificial sequence
  DNA replication origin
gcctcagtttaccctttccccctttgcccaagggggcaaggtagagcgctgtcggggattgggtttcataatccccttccacttgacctccccgccacacccactaatcttcaggaactcaagttctcgcttttcccagacgcacgcaagaaccgtgcaccatctcgctcgctctctgcccgcccgcgccttacaccttccccgctcggccgcagaaacagaagatccaggagcgatgctctcccactgtcccttcttcccgcccgcgcgcttcctttctcggttcccactctgactgggaaacagaaaatcaacgcgcggcgcggctgcaaagtcggtttcctattggtcagcgcctcctgggctgagcccgcccgccccgcctcttctcccacctaggcggggcctccccgcagacccccgactgcctccagcccgcagtcccaccgcctgccaggagatcttaaaggggccgcggccgcaatcagacgctgagcggcgtggggagggggtggctcagtgacccgggcgcggggttgaggatcccagtggtcgagcgctggaggcagggccccagcctgtcgcactcgctgcacctgcggaatgtccctactgctagtttcgggcgcagtttctcgatccaccattagggggaagggagcccagaccacttgacagcgaatactcgataacaaatctcactttgattcagtgctttgcacatgccagggcttttactcacctctcgagtcgtctttgccaaaaccctataaggtaggtggtactggcgttcgcactttgcagataaggaagcggaggttaagtcattctccccagtcctgatgaccactaaggggcaaaacagggtttaaagagatctgggatccttaaccatcactctataccctag

SEQ ID NO: 34463 - DNA, 1128 bp, Artificial sequence
  DNA replication origin
aggagaaggagaggcccaggcgttgggatcggggtggggaccccggcgcaggcccacaggagagacaactggcgccagggcacccatgagtcccgccccgccccagccgccagaggtcagcgattaaagattaactcccaggagcgcgttcctgggctggggaaaggaaggggacgggacgggacgggacgggacgggcagggtggacgggcgagggggcaggcctagcggtgcgtcctgccttcctacctggcccgggcgtctttgacctagctcaggttcctggtccgtgtccctccctcgaaccctcggtccgtcggtcgttctgtgggtccgaccccaccggctccgccctgtcacgtgacccggaaagtttagtcactcacctgggagagcgcacttccggcttgtgcacctgagcctcgctgagagggcggagtcaagaagggggcggggccgcgctgtgggcgcacctgtaacgggaccccagtcccttaatggggatgcggggagggagaccgcggaagcgcgcaggtgtgagggggaccttacacctgcattgcgagcatatctgtgggagcgcacaggtgtggagacgcacggggtatgtatgtacccgtgcactaggcactcctgcctagggcagacttggatggggagcgcttaatgagaaaaaatacctgcccaggcgcaatggctcacgcctgtaatcccaacactttgagaggccgaggcaagaggattgcttgaggccaggagtccgagaccagcctgggcaacacagcgaggcctcattctctacaaaaaataaataaataaataaacaaataaataaaaagaagaaaataagccgggggcggtggcgtgatcctgtaatcccagcgctttgaaaggccgaagtaagagaatcacttgaggccaggagttcgagatcagcctggcccacagacggaggccccatatttacaaaaaataagaaaattagccagatgtgatggcacgcacctgtagccccagctacttgggaggctgaggtgggaggatcgattgggcccaggagtggaggtaacagtgagtgagctatgattgtaccactgtactccagcctgggtgacaaagtgagaccct

SEQ ID NO: 34464 - DNA, 1619 bp, Artificial sequence
  DNA replication origin
gggagggacacggaccaggaacctgagctaggtcaaagacgcccgggccaggtaggaaggcaggacgcaccgctaggcctgccccctcgcccgtccaccctgcccgtcccgtcccgtcccgtcccgtccccttcctttccccagcccaggaacgcgctcctgggagttaatctttaatcgctgacctctggcggctggggcggggcgggactcatgggtgccctggcgccagttgtctctcctgtgggcctgcgccggggtccccaccccgatcccaacgcctgggcctctccttctcctgtccccaggtgccccgtcgcaggtgcccctggccggagatgcggtaggaggggcgagcgcgagaagccccttcctcggcgctgccaacccgccacccagcccatggcgaaccccgggctggggctgcttctggcgctgggcctgccgttcctgctggcccgctggggccgagcctgggggcaaagtaggtaccagctgagagcgctgggggggaggggtctggattcctggatctctgctggggacgtggcttagaagcgctgggtatctggggcgcagagagggtcaagaattggggagcggggaagaaataccttggggaggggtctacagggttagggctcggggggattaagatttctagtttcttccttggacactgggagttggtctaggagacctgagttccccagcgaggtggaattgtgtgttggagtgggggctcctaagtaggacttggggggaggtaagggctgcgtacctgagtcttggtatagtgcaggtgtttttgggtgaactgggagctgggaggaggcctgccgagccgggtcgacctggttggctgaaggtgtagaccccagccattcagtcttagatttgttttgggagcctgtggggaggtgtgagtcagacactccagggaaaagctaggcccgcccagatccttaagggcccagggccgagaggtgagtaggggaggggtggacttctggacaccctactgggctctgcgggactgggtcgggggggtgtcctggggagcaaacacccaagggagaggtcttacctgcaagacacccaaccatctctgtgcgaatgaaaggcagagtttgaattgggacctgctagggggaggtgaaggggaatgcccaaagcaggtgcagatgggcggggatgggagagaaagatggagactgagttattctctgccttcaccctccacagtacagaccacttctgcaaatgagaatagcactgttttgccttcatccaccagctccagctccgatggcaacctggtgagttggaggtatatgtgggaagatggcagcaaggatgttatctaggggtcacacatatagcatgtagagaggactagacaccccctccccccagaggtggcaggtcagggtggctttggagagctctaagtaggagagacctgaagtcttagaccaagaagactaggacaccctggagggagtgggcaggaatactgtagctgtcagatgtgtgggctcaggaattccatatgcctctcaggtgggtgggggagcaaggagctcagacttggtagatgtgatgaaagcaggagtccc

SEQ ID NO: 34465 - DNA, 1306 bp, Artificial sequence
  DNA replication origin
aagggagtggccctgagtgggcaggtgtgggcccctcgcctcccggggcaggaaggtgggaggggcgacactgaccacgtctggaggcagcgcctgcacgtcgttaaaggtcgtctccaaggtattggcgtccacgttcagcaccacgacgtcctccagggctttttctcgtactctctgcggaaaagcggggtcggccgctcagagcccgggagtccttggcagaggagggcatctggggatgtagaggaagggggaaccctcacgtccccgtcgtctgggtagatccacgctcacctcggcgagactggcgtgcactccaatgaggtagggcatgggcgcgctgcggaccgaggggacggggtcatgcaggcaccgcccccagggcctgcccacaggccctgcccctcccagctgccctcgctcaccagcagtagtccagcaggtgtgggggcagcgtggggatcagcacgtgctcccagcgcatggggtacaggagcgcgcaggacgcgtggacgcacgaggtcagctggggagcgatggcggggcgtggagtcagggcctggaccctctagcgcgaggtctcttccagctgcatttcccacgtccccagtctcctgttccccctccccatccactgctggataatgagtgacaactcgaacccctttagaaatcatgtggagaccaggaatttggccacttacagtgctttaagcgggtgaagccaggactcataccgtcctgatccctctctgtaaggggcgcagttaataggcaacacccctgagtcttccccatgcaggtagagcaaggactgagcctccactgactccaccccgaaagaggtggagctatgacgtagaccgcccttgtcccgcccctaggggtggatccaagacgtaaccccacccaaagaggtggagccggaaggcaatcatttggccccgcccctaggggtggagccagtctccacgtctgcctttgaccctgggtttcagggtccctgggagtatgggtctctagttttttgcgccccttgttatctgagtccctgtgttcctaggtccctgggtattcgggtccctgggtcctcagatctctgagtccctgagtccctgggtccctgggtccctggattcccacgtgtataagtccctagttctcagtgtccctgagggtccggaggggtggagccagacgtgttgcggcccatagtgggtggagcctgagcacagtactcccaaaaaggaggagctgcagcgcagccccctcccacgagggcggggccagagttcaactctcc

SEQ ID NO: 34466 - DNA, 1786 bp, Artificial sequence
  DNA replication origin
cctgccaccacgcccaggtaatttttgcatttttagtagagttggggtttcaccatgttggtcaggctggtctctcctggcctcaggtgatccacccacctcagactcccaaagtgttgggattacaggcatgagccactgcacctggctcctttatttatttatttaattattattattttttgagacggagtgtcactctgttgccaggctggtgtgcagtggcgttatcttggctcactgcaacctctgcctcccaggttcaagcgattctcctgcctcagcctccggagtacctgggactacaggcgcccaccaccacgccctgcgaatttttttatttttagtagagatgggatttcgccatgttgaccaggctggtctctcctggcctcaggtgatccacctgcctcagcctcccaatgttgggattacaggtgtgagccaccgtgccctacccctttactttcttaataaacgtgcttttactttatggacttgccctgaattctttcttgagatccaagaaccctctcttggggtctggattgggaccccattcctataacagttgtggggggatcctgggggaaaacatacgatcccattttacaggtgggaagaccgaggctgagagaaggcaaatggcttagtcaaaacctcagggttagtgggtggcctagcctggcccgtctgatccctccccagcacgccccccatccagagatgagatgtcatcggtaccctcctccatcctgtagagaaaagcccgcacttgctgtaagagaggaaagagggattcggcagaaacatccatgacaacaattaatttatttattgagggtgaggcagggaagcggggagggagggtaggggtgacctctcttcctcacaggcaccaggccttgtttctctcccagataagctaaggtcggcaggggctgaggggagtgaggcagggaggatgcatggggcctgtgggaatcagagagaagctggggtcagaggtaggagctgacgctgtggggggtggggggtgaaaggtgaggcaaggtcaaaggtgaactgcagctcggagggaggggtccaatataaaccaggacttgcaggtgtagaagtaaaatgggactcatagagggtgaaagagaagttggagtcagaggggattcagagatcaaagagaagttggggtcagaggtaggagctggggctcaggtggggggttaaaggtgaggcaaggtcagcggtgaagtgcagctcagagggaggggtcaaacataaaccagaacttataggtctagaggtaaaatgggattcatggggggcagaggtcaaaggtgaagcagaagtcaggggtgaaggaaggtctgcaaagttaaaggtgcggtttccagagtcagaaggggtgaagcggggctcctcctgggaatgtcaaggttggaagagctcaagggggttaaagataaattagggctcaaaggggagccagggtcggagatgaagtagccagaggtaaagcgagctccaaaggtattgttagggtcagcggggagtcagccttggagggaaagcggggctctagggttcagagatggggggcctagcggatcaaaggtcagaagcctcgaggggacaggtgggaagcgatgggagcagcctaggccacctcctcctccgcctcctcctcgaactcgccctcctcggccgtggcgtcctggtactgctggtactcagataccaggtcattcatgttgctctcggcctcggtgaactccatctcgtccat

SEQ ID NO: 34467 - DNA, 1031 bp, Artificial sequence
  DNA replication origin
ctcgtccatgccctcgcccgtgtaccagtgcaagaaggccttgcgccggaacatggccgtgaactgctcggagatgcgcttgaacagctcctggatggccgtgctgttgccgatgaaggtcgcggccatcttcaggccgcggggcgggatgtcgcacacggccgtcttcacgttgttggggatccactccacgaagtagctgctgttcttgctctgcacgctcagcatctgctcgtccacctccttcatggacatgcggccccggaacacggcggccacggtcaggtagcggccgtggcgcgggtcgcacgccgccatcatgttcttggcatcgaacatctgctgggtgagctcgggcaccgtcagggcccggtactgctggctgccccggctggtcaggggtgcgaagccgggcatgaagaagtgcaggcgaggaaagggaaccatgttgacggccagcttgcgcaggtcggcgttcagctggcccgggaagcgcaggcaggtggtgaccccgctcatggtggccgacaccaggtggttgaggtccccgtaggtgggggtggtcagcttgagggtgcggaaacagatgtcgtagagtgcctcgttgtcgatgcagtaggtctcatccgtattctccaccagctggtgcacagacagcgtggcgttgtagggctccaccaccgtgtctgacactttgggcgagggcaccacgctgaaggtgttcatgatgcggtctgggaactcctcgcggatcttactgatgagcagcgtgcccattccggaccccgtgccaccccccagcgagtgggtcagctggaagccctgaaggcagtcgcagctctcggcctccttccggactacgtccaggacagcgtccaccagctctgcgccctccgtgtagtgcccctttgcccagttgttgccggctccggattggcctagagagggaaggggaggggacacacatgcagttatggggagccccaacccttgactctgtctctccaccacctggagggcctctagtagtt

SEQ ID NO: 34468 - DNA, 2116 bp, Artificial sequence
  DNA replication origin
tggctccctaaggggcctcacccccaaggcaggggtcggagcacgtggcgtcccggacttctctgggaggccccctggggagggaggtccctgcaccacctccccccaccccagccccctccatcatcccggggcgggaccaaggggcggagcgggagggtgaccggccgtgacgcgtgccccgcccgctcatatagcggctcccgggggcgcagggaccgtgctccgccgtctccgccgcatcttccaccctcgccgccgccgcagctccccgcgctcgtgccaccgccgccgcgtccaccctcagcgccaccgccatgcgggagatcgtgcacctgcaggccggccagtgcggcaaccagatcggggccaaggtgctcggggaacggggcccggggaggcagtggcggccccggggagcaccgcggggtcggtccccggagcaccccgcaacctgggagtctttggaaaggaatgaggtccccaggaggccagcgcgccccaggggccttgggggaagggtcgcggggtgggggtggcagggccagactgggaacaaagaggctgcggagagtgggagccagccttctgtccgcctgtcacagctgggcccacagctgggccactgtcccctcctcacgcacaaagagccccggtgcctcccccgggctgcagcctgggtgcgctggcaccagccggccccgctgggtgctgactcggctgcaccccgcccccaccgctccttcttgctgcctcatcctcgccccgacaccatgcctctaggtcccccgttcaccttgctgggggagaggtggcagctagggagctagttgggggctgggggcagtcctcggcttggccaccggcttcccctctctcaactcttccgaccacctctctctctagttttgggaggttatcagtgacgaacatggcatcgaccccacaggcacataccatggggacagtgacctgcaactggagaggatcaacgtgtactacaacgaggccacaggtagggcgaaggaggcaccttccaggtgggaaggggcagctgggagggaacaggatgctaccgggcgcctgtggttcctggcacgcatcgaactgccctccatctgtttccctgcaggaggaaattatgtccccagagcggtgctggtggacctggaacccggcaccatggactctgtccgttctggccccttcggtcagatctttcggccggacaacttcgtgtttggtgagtcccccagcagggagccagaggctggaaaacctccttattcctgctaacaccacagagtcaacagccaccaccggggcccacagaccagagatggggtggacagggcaccaggcaccagccctgcatccagggctgtgatgaggggatgctcaggccactgtgagagccctgaggagggcggatacagagaaggattcagggaagtcttcctggaggaggtggcattttaattcaacggtctgaaccggaaccagactgcctgggtgcacatcccaattctgccacttcatgcattcaacaaacagtgagcactcactgcataccaggccctgttctagaagctggagatccaggtaagaatcaaacagccggagctccctctctgccccagtgcagctcccattctggtagaaggtgataggccacaaaggagataaataagtaaagctctgccaggggttgattcagatggataacttaggatgggctcctcagcctttctgggcctcaaaaatcctcttttttttttttttttcagacagggtctgtctgtcctgctgtcacccaggctagagtgcagtggcatgatcacggctcactgtcacctccacctctgggcacacgtgatcctcttgcctcagtctcccaagtagctggacctacaggcatgcaccaccacacccagctaattttttagttttctttgtagagaggtgggtctctctatgttgcccatgctggtctcaaactccgggactcaaacgatccacccaactcagctcccaaagtgctggattacaagcatgagccaccttgcccggcctcctcgtctttaaaacagggatttcactgggcatggtggttcat

SEQ ID NO: 34469 - DNA, 1156 bp, Artificial sequence
  DNA replication origin
caggcggacagaaggctggctcccactctccgcagcctctttgttcccagtctggccctgccacccccaccccgcgacccttcccccaaggcccctggggcgcgctggcctcctggggacctcattcctttccaaagactcccaggttgcggggtgctccggggaccgaccccgcggtgctccccggggccgccactgcctccccgggccccgttccccgagcaccttggccccgatctggttgccgcactggccggcctgcaggtgcacgatctcccgcatggcggtggcgctgagggtggacgcggcggcggtggcacgagcgcggggagctgcggcggcggcgagggtggaagatgcggcggagacggcggagcacggtccctgcgcccccgggagccgctatatgagcgggcggggcacgcgtcacggccggtcaccctcccgctccgccccttggtcccgccccgggatgatggagggggctggggtggggggaggtggtgcagggacctccctccccagggggcctcccagagaagtccgggacgccacgtgctccgacccctgccttgggggtgaggccccttagggagccaccagtgcagtctcccccgtcccagcccccagccaggcttggccacccgcagaaattgggcggaggaagggaggggagcgcctggtaaacaggcatctgagaagtcctgcccctcccccttagcctccaccctcccgccccaggccttgcctcagtttctcggtccgcagccccccttctcattctatttagacctcattcgccagaatccttgcagtaaccgcgagccctcccagtgggctgggggctccggagcggcgatctggtttgcgggtggggggcggtaggttcctggagggcttgtcctgaagctgcatagtaaaaccacgattttcctcccatgattgggtgcagatgctggtgggctcccctggtacacctctactgggcattgagctcgtcccaggtggggtcacccccagcctggcctaaggaggagagtggaggagtaagacagctgggttcatattgggagggggacagtgagtccccagggctgcctcgctttcccaaaataacacccctcctctccagtattgtaatttatctttatctata

SEQ ID NO: 34470 - DNA, 1023 bp, Artificial sequence
  DNA replication origin
ctgcgcccggccttttttctttttttttttgagatggattttcacttttgctgcccaggctggtgtacaatggcgtgatcttggctcactgcaacctctgcctcccgggttcaagcgattcttctgcctcagcctcctgagtagctgggattacaggcatgtgccaccacggccagctaacttttttgtagttctagtagagacagttttcaccacgttagccaggctggtctggaactcctgacctcaggtgatccacccgcctcggcctccaaaagtgcttggattacaggcgtgagccactgtgtccagccgcatccaacatcttggtggtgccggagttctggtgacagtggagtggctggggggcatcctgtgccagtccccaggccactggtgctgagaaaggattcctgctggggtggggccatcaccccacgtggtgaccttttccacgtcaggggagcagagggctttgggatgggttcacccactcagaccaggcctcatggaggaagggtggggtggagaaaccaaggcctccgtagctcctgttagtgatttaagacacagcccccaccccacaccaggggcgtggcaggtctggggtggggtcttggtggatgtacatgcggattatgggtgagggcagagcctgcatgtttggagggcagaacgaatggggcaaggcctaaaggaatcaaagggcggctgcaagtcccagcgaaattggtgagggatgagcatggcttgaaaacctggagtgggaagagggtgcaggactccggaagggcagaacccagaaaaggggctaggggttgagacaggacaaaccctcaaagggggagaggtgccgagcctgaggagagggtggtatggactaagaaaagcagaaaagtgccaggcgcggtggctcacacctgtaatcccacaactttgggaggccaaggtgagtgaatcacctgaggtcaggagttcgagaccagcctgaccaacatggtgaaaccctgtccttactaataa

SEQ ID NO: 34471 - DNA, 1244 bp, Artificial sequence
  DNA replication origin
ggctgcaagtcccagcgaaattggtgagggatgagcatggcttgaaaacctggagtgggaagagggtgcaggactccggaagggcagaacccagaaaaggggctaggggttgagacaggacaaaccctcaaagggggagaggtgccgagcctgaggagagggtggtatggactaagaaaagcagaaaagtgccaggcgcggtggctcacacctgtaatcccacaactttgggaggccaaggtgagtgaatcacctgaggtcaggagttcgagaccagcctgaccaacatggtgaaaccctgtccttactaataatacaataaaaaaaaaaaattagacgggcgtggtggtgcatgtctgtaatcccagctactcgggagcctgaggcaggaggatcacttgaacccgggagtcggaggttgcagtgagccgagatcgcaccattgcactgcagcctggacgacaagagcaaaactccgtctccaaaaaaaaaaaaaaaaaaaaaagcagaaaacagagtggggcacgaagagtctccaggccctattcccaggtcactaatgattgggaaatgggcggggcctgggagaatgacagggaggtgtgagggactgaggagtgggcagggtctgggaggctgataacaggggaagtgggcggggcctggagataatattgggaggaactgtggcgtgggaagggcctggagcggacagcaggggaagtgggcggggcctggggagaatgacagggaagtgggagggactaaggagttagcaagggctgggagacaaataactatgaagtgggcggagtctagggagaatgaccgtggggtaggggaactgaggagtgggctgggcctgggagtctgctggggaagcggacggtcctcgagagaatgacaggaaagtgggaaggactgaggagtgggcagagcctgagaggcaaacggatgggtacgagggcggggcctggggagaagctagggaggtgggaggcggatgacagcggaatggggcttcggtagactgacaggatcagtcgtggaaggggcgggcccatctttctcttgaacccgcgagccaaagccacgttggtgctggtgatcatccaggctgagcgctgggcattcccagtctcgggcgatttcttggcgttacttccaggctgagagccatgactaggcgagcttcggccgtgggaccgaagacctcccaccctcagcactctaacctccccgac

SEQ ID NO: 34472 - DNA, 839 bp, Artificial sequence
  DNA replication origin
caggagccgcacctgccgggtggagacgcggggctggctggggtgcgggagtaggaggtcttcggtccaaccgcctccaacccattcctgcttccgacgttctgttcccgcgcttaatgccctgcccgatccagttccggcctcccatctccccttcccgcgtctccacgctctttccttccccggttctgccgtgaatgctcccaagtcctagagcaccggaactccccgcgcgccttggctcctgggccccagctccgtgcagtcctggactggggctccaggtccaccagggggcgcccgctgcccaagctgggtatcgctgcggagaaaaggggcccagagtgattgttcctcaggggagggagggggaggtccccagagggaagggcctgagtttcctcttgggggatggatcctaggtggtctgaggggtgagtcctgggttccctggcgggagtggatcttgggtggtcctctgtgggtacagggtggaacttgggtgttctgaggggtagtccctggggactcctctgggagcggggcagaccttggatggtcgtaggattggacctggacctctgtgtgtgtgattgtgcatgcccataacgtgtgttcttgcgttatgtctatgactagccatggtgcctgccatgtatgtgtatctacgattgtgtctttgggtgtctgtctcagtgtgtaaccgtgtacgtgtgtgttgtgtacctccatgtctgttttggtatgtgtgtgatggtgtgtctgtgttggtgtgttctagtctcggtgtgtttggttatatgccctgaatatatgtctcttgtgtccttgtgtgtgtc

SEQ ID NO: 34473 - DNA, 2215 bp, Artificial sequence
  DNA replication origin
ccagcttgggcgacagagcaagaccttgtatctgaaagcaaaacaaaagtccctttattttatgggctgttgacttctgctagcagagggatgaaaggcgtggtctaccctcccatctcccatggggctgggagatgggaagggagttggccattgtggacccacactggtctgggcagaccaggacttcaacaccagccaagggctttccccgggtcacgtccctctccatctgggagtgcttcctcttttggggccaagttttcaccgcttcttggcccatcctcccagccccggattggccgcctccagcaggccagagcagatgggaaatgtgtttcctccaactcgctcaacactgtccctttcttgcaaggggaatttctccacctggactctccgagcttctgcttgtagggtcccgaggggctcctgccgggaaccatccagtgggtgggtgggggcaggccagggaaggcccaggggtcccggggaaggtggccaggagggctgagcatgacactcagggttccactggggggttggggatcagggggcagatgctccaggagtgagggtggttgaggcttggctgaagcctgacccttcttaggaagtgctggatgtgggggaacccgggggagtcctagtgatggggggctagggggtgctgagaggaggggaaggagacaaagagagactaaagaaggaaaaggagagagacagggagagacagagagtcagagagagacagagggaatcagagacagagagaaacagggagagagacagaaagagtgagagccagagacatacagagacagggagagacacagagatgcataaagagagggagtcagagatggagagagacagagataacggagccagagatagggagagtcagagacagagagaaagaaacacacagactgacacagataaaagagccagagacagggagaggcagagacaaagagagatacagagacagagataacagagccagagacagagagacagagacagagataacagagccagagacagggagagagtgtcagagacagagacagacacagagataacagagccagagatagggagagtcagagacagagagaaagagacacaagacagacatagataaaagagccagagacagggagaggcagagacaaagagagatacagagacagagatagcagagccagagacagggagagagtgtcagagacagagagacagacacagagataacagagccagagatagggagagtcagagacagagagaaagagacagacagacatagataaaagagccagagacagggagagagacacagagacagagacatagagacagagataacagagccagagacagagtcagagacagagacagagagagccagacacagagacagagagagagagtcacagccagagacagcgacagagataacagaagcagagagagggagaaagataacagagccagagacagtcagagacagagatagagagacagagataacagagccagagacagatacagagacagagataacggagccagagatagggagagagagtcagagacagagagagatatatagacagagataacagagccagacatggggagagagagtcagaggcagagagagagaagacagatagagagacagagccagtgataacagagccagagacagggagagagagtcagagagagatacaatgagagacagagataacagccagagacagagttagacagagagatacagagacagagataacagagccagagacagggagagagaattagagacagagatagagagagacagagacagagataatacaggcacagaggcacgcatagacataaattggcagagagagagaaagatctctttccacccactgcagaggcaatcaacagagacagagaaagacgttaacggggagacacagagagcaaaggagactgagtcagcaagagacccacagagataccgggaaagagcggcagagagggagaaccagggcgatggagagacagcagggagaaaggaacctggagccgagcttggaaggccggaaacggaaaggagagcgaaaagcggagagagatccgagtggagaaaattccgcagagtcacggggacgaggggaaaggctctgggctgggaaggggcgtggcc

SEQ ID NO: 34474 - DNA, 1713 bp, Artificial sequence
  DNA replication origin
gaggagacccccacagtcctcaacccctcagggatacgtcttctgcaccccgggtcggagaaaggctggcttccctccatgtggcagtgggtgggggcacccctcttcattccgcattcccaaggcaccccatctgcaccctggacgggggaccctccgcggttctccaaccctcgacggcttcctttctctatgtaggacttaggacattgagggcacctctttttaccccgcacccccacaagctctgcatctctggggggaaccttttttccatccccgatccgaggggggcacttcctctttatctgggaccgccaaggagacccccagttcctttgctaactcccaaagagccttatccccaacatctgaggtacccctctccctttcaagacccccaggggaatacccccaagggggctggaaagaagagggatcgcttttccctcctgaattcttggagatctgtccttggggcaggttgagccaccagcttcgtgtgtgtgtgtgtgtgtgtgtgtgtgtgtgttcgtgtttgtgtgggtgtttgtgttcgtgtgtgtgtgttcgtgtgggggtgcgtatgtgtgtgtgttcgtgggtgtgtttgtgttcgtgtgggtgtgtgttcgtgtgggtgtttgtgtttgttcgttcgtgtgggtgtttgtgttcatgtgggtgtgtttggatatttgtgttcgtgtgtgtctgtgtgtgttcgtgtgggtgtttgtgtgtgtttgtgtttgcgttcgtgtgtgtgttcgtgtttgttcgtgtgtctgtgtgttaatgtgggtgttcgtgtgtgtgttcgtttgtgtttgtgttcgtgtgtttgtgtgtttgtgtgtgtgtgtgtgcggtctctgttctttagttgggagggaagggaagcgtaggcttcaggtcggcacagactctggggaccctgacagctgaagtgagtggggacagaacctccattttctaggggaacccccatccactttcctcctttctacttttaacagggcatgtttgcgcagctggtggcccaaaatggtaagtatcctccgccacttccggtccctggccccccaccatccccaccccgggatacgaagaagggggaacctggagagtgaggctctgccgcacactggctttgacccttgaccgctgctgtctctgaaagctgctacttcccctctttgaacgccaccgatccctctttctgacttgctctgactctctggatgccatggcctccccatcagacccccatctgggcccacctgggacccctgccctctcagagctggggcttgacacccccaacccccagcctggttttgtgtctctggcctccttcttttcgaaaccctcttccccgctgcttttcttccctctttcctgccccttccccactctcccagcctctcttccctacctcttcccctcgcccagagcctcctccttactcccattctcttccccatccccaggccctcctcctgtccccttccctccccctagaccctcctccctgccccttccccaaaccctccccagccccatgctctcccagtttccaagacactcctcccagcaccttccctccccgtccagagacttcttccccgctcgagacctcttcccccttcccctcccagagacccccttcccccttcccctctccatctagagatcacttccccctttccc

SEQ ID NO: 34475 - DNA, 1129 bp, Artificial sequence
  DNA replication origin
tgcagcaagcggccctggaaaccgaaggccgagttccgagcctcggaggaggcgggtggcaggtccacggtcaaagccagggcggcggccccagcagcagagcgcagtggctgcaggtgcagcgcaagtgaaacggagcctgagccctcgccggccaccacgcgccgcagctctagttgaaagaagacatagtagactccagccttggccaccaccagctccttcgtgtcctctttgtagctcaggccccccgtcagggacacgcctgccaggcctgggtcactgtaccagctcaggggcccatcgatcagcagaactgtgggaggaaagcatgcacttagcttagctgagcatgtcccagcacagctgagcgtggctgagcaccgaacatgtcagcgcagccctgggagaaaagaacgggtcaggggccggggggcggggaatggcggggcagggagcgggacaggggagcagagcggggagcctgggtggggggggcgttgggggggtgctgattgaagagaactgaggttgttgggggcgggactctgagcaggggtagagctaggggagggaaagacggggatagaacagaggaagggaatccagggagaaggacaagagtcgggacagggcaaaactccaagaggttgggtggggaaggagtgatgcgggtgcggggaaagacatgcaggaagaggaagagggggtgaaaagcaaaaggccaggcgagtctggctggaagaggcctcggggaggggtaaggggactcctggagagggcggtgagggggttggagggagcagcagatctcggacaggatggagatggggggaggagaagggagagaaggaaggaaaggggagaggagaggtggacagggagctaggagggagagggaagactgttaggaaaggaggaagttctagaggaaggatccatcagggaatcaagggaactttaagaggggtggacaggggacctggtaagagaggacttcgaagaaaggcaaagggagcaggaaggggtgggggaggggttagggagaaggaagcaccaaggagagaagatggcagggaggggagtcttaggcagggggagggaagggggaaggggtctctggaggggg

SEQ ID NO: 34476 - DNA, 1586 bp, Artificial sequence
  DNA replication origin
ccacgcagcccacagccctctggagcccacgccctgctggagcagcgcggtcgggcagagaggggcccggatgtggagctggggccgtgctttgggggcgggggcaggaagagggagcagcgccctctttggggactagccagccgcgcagccactgcacccaccccgcagagggttcagggttcctaggcatcaggaggaggctctgtgcagggcttgccagccgtgttcttggggtccaccccgcatcagagcgaccaccaagcctgccactccccgtggccaggctggggccaggatcagctccccacaggctgcccctgagtgccggggcaacaggggcagttcgtggtgatattgcccctgccctgggcgccagcccaggcccggcaaggatcaggaatccccgccccagcttgcaagggggagcacctgaagctgcatcctgggcctctgcagccgcccaagttgtggccgcagattcaagcctccctgtgctcttggggggccagggaggcccccctgcccttgcaggctccaaagcacctgctcccactgcctggtttctccctgctctcagcgcctgctctgatcttggagcaaagtcagggtccaacctggggccatgaacggcagcaggaggcagactgattcctggcagaagggagcaagtcctcgctaagaccccaccttcaggccagggagggcctgaaggctgagggccaccagacctgtggaccagagtggggacttgtgatgccttttccaggcccatgcatggctgttaatggaccagtcggcacacactgcatcccctctgaggtccataaaagccccaggctcagccagagcagggcagagaaaaagagagacgtccagatgaccagctgcagagagaagccactctctgtgctaatagctggagatgacctgacgaccagctgcagaaaggagctacactctctgctgaaagctgcagtgaggatgggatgacctgctgggcagagagaagccaccctctccaaggcctcctctctgctgagacctgcagccatcaggaggaccagagaggaactaccctctctggggtctcctctctgctgagagctgagcactcaatggaatgaactgtctacagagaggagctgcccactttggtcttctctgagctgttctaacactcaataaaactcctcttcatcctgttcaccctccacttccctgtgtaactcattcttcctggacacaagacaagaactctggcaaaggtgccaggggacacagatatttccgaccagaaatgtgacaccctaaagattctgtaacagtattacgtaagcctttttttttttttttctttttgagagggagtcttgctctgtcgcctgggctggagtgcagtggcacaatcttggctcactgcaacctccacctcccagattcaagtgattctcctgcctcagcctcccgaatagctgggattacaggcacacgcggccatgcccagcttttcgtattttagtagagatggggtttcactgtgttgcccaggctggtctcgaactcctcagctcaggcaatccacc

SEQ ID NO: 34477 - DNA, 2144 bp, Artificial sequence
  DNA replication origin
tggccccccaagagcacagggaggcttgaatctgcggccacaacttgggcggctgcagaggcccaggatgcagcttcaggtgctcccccttgcaagctggggcggggattcctgatccttgccgggcctgggctggcgcccagggcaggggcaatatcaccacgaactgcccctgttgccccggcactcaggggcagcctgtggggagctgatcctggccccagcctggccacggggagtggcaggcttggtggtcgctctgatgcggggtggaccccaagaacacggctggcaagccctgcacagagcctcctcctgatgcctaggaaccctgaaccctctgcggggtgggtgcagtggctgcgcggctggctagtccccaaagagggcgctgctccctcttcctgcccccgcccccaaagcacggccccagctccacatccgggcccctctctgcccgaccgcgctgctccagcagggcgtgggctccagagggctgtgggctgcgtggccggggagctgtcagcctcctccctgggccctccctgcagcagccatgtgatggcagcagccagacagcccaccacagccatcaataccacacgaattttcacaataagctggacaaactttccctggtggaaaaattagtctgtggccgggtgtggctggccctggctctcccaggaggttttcatgacgtaacctgccaatttgataaatctctgcctcatagagtcacaaacgttcttctctagatgagaagttctccatgattccataaatataaattttaaaaaatttaacctggggccgggcgcggtggctcatgcctgtaatcccagcactttgggaggcggaggtgggtggatcacctgaggtcaggagttcaagaccagcctggccaacatggtgaaacccttgtctctactaagaatacaaaaattagctgggcgtggtggtgtgtgcctgtaattccagctacccaggaggctgaggcaggagaatcgctggaacctgggatgcggaggttgcagtgagccaagatcacgccactgcactccagcctgggtgacagagcaagaccccgtctcaaaaaacaaaacaaaacaaaacaaaaaaaacaaaaactaactttaagttcaggggtacatgtgcaggtttgttatatgggtaaacctgtgtcatgcgggtttgttttacaggttatttcacccaggtgctaagcctagtatccattagctatttttcctgatcctcttcctcccccaaccctccaccgtctgataggccccagtgtgtgttgttctcctctatgtgtccatgtgttcttatcatttagctcccacttataagtgagaacatgcagtatttgtttttctgatcctgcgttagttttctagggataatggcctctagctccatccatgttcctgcaaatgacatgatctcgttcttttttatggtgcatagtattccgtggtgtatatgtaccatattttctttatccattctaccattgatggccatttaggttggttccacgtctttgctattgagaatatgctgcaatgaatatatgcatgcacgtgtctttataatagaatgatttatattcctttgggtttacacctagcagtgggattgctggactgaatggtagttctgtgtttaggtctttgaggaatcctcacactgttttccacaatagtggagctaatttacattcccaccaacagtgtaaaagcgttccttttcttagaagacaatacctttttttgttgttgttgttgttgagacggagtctccctctgttgcccaggctggagtgcagtggtgtcatcccagctcactgtaacctccatctcccgggttcaagcaattctcctgtctcagcctcccaagcagctgggattacaggcttgcatcaccacgcccagctaatttttgtatttttagtagagatggggtttcaccctgttggccacgctggtctcgaactcctgacctcaagtgatccacccacctcagcctcccaaagtgtcaggattacaggcgtgagccaccgtgcccaggcaagaagggaatatcttaatgacaacttctccccgccgctttcctcgccaaaattcttcacattcacc

SEQ ID NO: 34478 - DNA, 1039 bp, Artificial sequence
  DNA replication origin
gtcagcagttcaagaccagcctggacaacagggcgagaccccatctctacaaaaaataaaaagtcagccaggtgtggtggtgcacgcctctggtcctggctactcttgggaggctgaggctggaggatcgcttgagcctgggaggctgagactgcagtgagctatgatcacaccactgcactccagccttggtcacagaaaccctgtctcaaaaaaaagggagggggatagaaggttagagatctaaagggaaggagagaggggtaaggggaaaggggtagagacagggagagagagacaccaggagagagagagacaaaaaaaaaaaaaaaaaaaacagaaacagacaagggtaaagatagagggggagggagagatatatagagagagaatgcagagagagagcaagagagagagtgtatgtgtgagagaggacgagagtgcacgagagagtgcgacagagagcatgagagagagagcatgagagagcgagagagtgtgtgagaggacgagagagcttgagggagagtgcacgagagagtgcgagagagcacgagagagcaggagagagtgcaagagacagcatgagagagagagagatcatgagggagagagagcatgagacagcgagagagtgtgagagagaggacgagagagcttgagggagagtgcacgagagagtgagagagagcacgagagagcaggagagagtacgagagacagcatgagagagagagcaagagagagagtgtgtgtgtgagagaggacgagagagcttgagagagagtgcacgagacagagtgtgagagtgagctcgagagagtgcatgggagagtgtgtgtgtgagagaggatgagagctacagagctcgagagtgcacgggagtgagcgagagagtgcctgagagagtgagacagacagcacgagagagacagcgtgcgcacgagacagcgcgcaagagagtgcacgagagaattccccaagggacgcctgctcgggtcacaccctgaacgccaataaaagctttggctcccaggac

SEQ ID NO: 34479 - DNA, 1156 bp, Artificial sequence
  DNA replication origin
aaacatagagaggcgcgtgaccgaaaagacagaatgagatgggtacaaagaggccagagaggaagatctggtagggcagagacagagaccagaacagggaggcgaggcggggaccaggctgcccggtgtaggggctacgagacaggcagccctgccaggaggtacagggagatcccgggatgggaaaggtaggcacacatggaaatggaagatgactcggctctggtgttcccccggcaggctgactcagaggctgctgggggcttcacaaggctgggcgtgggggcttcctggggcctcctaggacgggatggccccagccactcgctccgggtgggggaggggtccctttggggaccgcgccgggcgcctttgcagcgtagagagtccgctgcgcgcggtgctctcgcgcccagtgacatccaggaaaacgattcgggaaacgaagaagttcttttgaaggtctcgacttcacgttccccgctggttcagacctgcttcctctttaagaagtcttaagagtaaaaaaaaataaaatgaaataaaatcaccagtgcgcgccgtgggatgagaggtggaaaggaggatggacagagaaaagagagctcctggcacaggggacacatagaacctctctgcttacgtccgtgccctgttttctggtcttttcttccagtgggacgtagctgagctgcagctgaatcacacaggtaacacgggggacgtggagggacggggagaagaagaggcacagagagagaaggaaggagaggtagaaagacaagtggggagagacagagagaaagagacacagacagagacggagggagagagggagggagagatagggagggaaacggagagggggagacagagagaagacagagagggagggagaggcccagagaaagggagggagagacagaaaaaagaacagagagagggacagaggggacagacgggacaggagaagaaggggaaagaaagaaacagggagagacgcagggagagtggaagagggagggagggagacaggcgggggagacagaacgagagagagggagagagacggagaaagagaaaaaagacagatagaggaagagagaataaaaacgagagaggcgacctggcgtggttgctggagcctgtaatccca

SEQ ID NO: 34480 - DNA, 1575 bp, Artificial sequence
  DNA replication origin
ccagctactcaggagactgaagcaggacaatcgcttgaacctgggaggcggagggtgcagtaagccgagatcatgccaccacactccagcctggtccacagagcgagactctgtgtcaaacaaacaaacaaacaagcaacagaggaagacatgtgctgaccggcagccccctttgtctctctcttcccaacaggggccaactccagcttgaccggcagcggggggccgctgttatgggagactcagctgggcctggccttcctgaggggcctcagctaccacgatggggcccttgtggtcaccaaagctggctactactacatctactccaaggtgcagctgggcggtgtgggctgcccgctgggcctggccagcaccatcacccacggcctctacaagcgcacaccccgctaccccgaggagctggagctgttggtcagccagcagtcaccctgcggacgggccaccagcagctcccgggtctggtgggacagcagcttcctgggtggtgtggtacacctggaggctggggagaaggtggtcgtccgtgtgctggatgaacgcctggttcgactgcgtgatggtacccggtcttacttcggggctttcatggtgtgaaggaaggagcgtggtgcattggacatgggtctgacacgtggagaactcagagggtgcctcaggggaaagaaaactcacgaagcagaggctgggcgtggtggctctcgcctgtaatcccagcactttgggaggccaaggcaggcggatcacctgaggtcaggagttcgagaccagcctggctaacatggcaaaaccccatctctactaaaaatacaaaaattagccggacgtggtggtgcctgcctgtaatccagctactcaggaggctgaggcaggataattttgcttaaacccgggaggcggaggttgcagtgagccgagatcacaccactgcactccaacctgggaaacgcagtgagactgtgcctcaaaaaaaagaaaggaagaaaaaagaaaactcaggaaacagatcttgggggacactccagggaacccaaaactcaaaggcggagagctcagtgggcaccaccaaggcgagatgaagccccagcaggcaccttcagaagacccacgtagactgcagaccctgccacggacaatactaaggacaaaaacccagagacttggggtctgtgggcccccaaacatggggtaaagttgatttgcctgatattcaggaagaaggggtgaggggtgggtatttatgcttttgattcagaagaaagtggggcttgggattccagggacttggctgggggtgggaaacttcatccacttccctactctcatcatgagtacggacagggtgggcgggagactgatcatcgggactcatcatgaagagcccagccccaccccacatactcagatcccacccacagactggtggccacacctcagcctggtcacaaagagttacactcagatacatgagcacggcagcgtgctcataactgtttaacaaccagctgtcctgggagggggacagctttgtaatgtttgccaatttccatggtg

SEQ ID NO: 34481 - DNA, 2109 bp, Artificial sequence
  DNA replication origin
gcccctctcttccattttgccctaaatcccagcctcttacaatcatttcttggtgtatcacgggcgcatcctcctggaagaccccgtcgggcttctgcttctccaggatcagccatttaacagccccgcagaggacttgggagtcgatggcgatgaggttgacagccagagagaagaccttgaccacgtaggcggtcagcctggagtgggcacagagcatgagccaatcggctctgagatccagagactgccatgtcaaccagccaatgagcgtgggggagggaccagggcctggcccagtttgcctggtttgccttcccaggccccaggacccagctgttgtatgcggtccgtgcttaaggatgcttaatgaccgccggccactcagccagcgcttgcctggactctgcaggtccagggctgtttgggcaaggctggcctaagggaccacccctggccagggtccgggccctgctgggggttgagggtggggagtatgcatggcctgagctggctgttgggactcaccaggtgctgggtgcccgtttcacgaaggccgcaaaggcagagctgggttgtctgaaggccagctgctgggtgtaccctgcagagaagagagaggaacccccaaaagagccggggctgagcagagggggcacgccagaaagggcaggggcggggtgcagagaggggacaggggctcagggtggcggaggggttctgggaggaggggaccttaaaaagggaaggactcaaagagggtgggggatcagaacgaggaggtggaaaagttctcaagaggacaagggattcagagaggagaaggatattgagggtggggggctttcagggaggggagggctctcagagagggggtggagtctcagggaagaggcatggcctggagaggacgtggggcctcagatgagagtggctgggacaggaggtggcgcctcacagaagggtgtggccttgagaagatgtggggacccaggggatgggcgtggccttgaaaagaggcagggtctcgagattctggcctgggaggagtcagggcctcagagggcgtggccttgagaagaggtgggaggccctcaggggatgggcatggccttgaggagaggcggggtctcatgaagagcctggcctgggaggagtcagggcctcagagggcgtggccttgagaagaggtggggggccctcaggggatgggcatggccttgaggagaggcggggtctcatgaagagcctggcctgggaggagtcagggcctcagagggcgtggccttgagaagaggtggggggccctcaggggatgggcatggccttgaggagaggcggggtctcatgaaaagcctggcctgggaggagtcagggcctcagagggcgtagccttgagaagaggtggggcctcaaatgaggggagtggctaggagagaaggtggagcctcaggggagggcgtggtcttgagatgaggtgggatcttaggggagggatgcgctcggaaaggggtccctggggtctccaagaggggcagggagcccacccttcttgatgagctccaaggccccctgccgcttctctaggccgaacttctcccactgctccgtttcatccaggtaatgcacagcgatgaccgtgggcgtcatgccgatcatgttctgttccccgcagcccgagggggtcacaatgaggtgcttcagccgttccgcgtcgacggcatcctctgtcatctgggccactggggtccctgcagcaggtgggaagaggacgttgctcaagccaggtgggtgacccaccttggggtggcgtgaaaagggttccagcctcccaaccagccagggccaaggggttagggacaggcgaggactggggaggatgtgactgcggggaggggaggctgcatggctgagtggctgttcgggggtctgcactgttaggagtgggaggtgcttcacaggggcaccctggtccttgggtctcatttcaccagcagtaaaataattccagtaacaatattcaggaatacttatatcacgcttaatgttactttccagactgttctaagagaataccatagagtgtctcacttaatagtcaacgaggct

SEQ ID NO: 34482 - DNA, 961 bp, Artificial sequence
  DNA replication origin
tgctcccgcagtcggcaagtaccccaaggagctgcgcaagtgctgcgaggacggcatgcgggagaaccccatgaggttctcgtgccagcgccggacccgtttcatctccctgggcgaggcgtgcaagaaggtcttcctggactgctgcaactacatcacagagctgcggcggcagcacgcgcgggccagccacctgggcctggccaggagtaggtcccacggggtggggacagggggagggggccgtctgatgggggaggagactcctgtctgaggagggaggatgccctgtctggtgggggtggggctggaggaggccgctgtctgaggggggaggaggcccctgtctgagggggcaggaggtccctgtctcaggggggaggaggcccctgtctgaggagggaggaaacctccgtctgaggagggaggaggtccctgtctgaggagggaggaggccttgaggggggaggaggtccccgtctgaggagggaggaggcctctgtctgaggagagaggaggtacctgtctgaggggggaggaggcctctgtctgaggggggaggatgcccctgtctgagggggtaggaggaggcctctgtctcggggggaggagtcccctgtctgaggagggaggaggcctctgtctgaggggggaggatgccgctgtctgagagggtaggaggaggcctctgtctgttgggagaggaggcccctgtctgagggtgatgccgatgaggtgatgccctgccagcgtgaggtagagaagacccaggtctgaagaggggaggatcaagtcagagaagcgtagatgcccatctgagatggaggaggctcccgtccgaggggaggggacactcctgtctggaagggacagaggccttcagatgaggagccaggaggcccaggcctgagggaggagaagggcctagtctgatggggagaagggcccttgcctgaaggca

SEQ ID NO: 34483 - DNA, 1245 bp, Artificial sequence
  DNA replication origin
ctgagaggctggtggcagcacacccagggtcattcagtggggaaggtttccggagtagggacgaagatggagatggggttggcttgggatcaggagtgaggatgggaatgcagatggaatcagaggggaaatggagataagatttggaatggaggccaggtgcggtggctcacgtctggaatcccagcactttgggaggtcaaggtgggaggatcacttgaggccaggagttcagaccagcttgggcaacatggcaagaccccatctctacagaaaaaattttaaaatagctgggcatgatggcgcatgcctgtagtcccatctgctcaggaggcagaggtgcgaggattgcttgagcccaggaatttgaggctgcagtgagctatgcctgcaccactgcactccagcctgggagacagtggaaaatcccaacttaaaaaaaaaaaaaaagaatggaaagaaaggaggaaaaaaaaagaagagagagagaaacagagagaaagaaaaagaaaggagataaagaggaagggagggagggagtgaagaatgaaggaaggaaagaaggaaggaaggaaggagggaaggagggaaggaaagggggagcaaaggaaggaggaaaggaggaatggagggaggaagggagggagaggaaggaagggaaagaaagaagacagaaagaaaagaaaaagaaggccgggcatggtggctcactcctgtaatccctttgggaggccaagcactttgggaggccaagacaggcgaatcatttcaggtcaggagttcgagaccagcctggccaacatggtgaaatcccgtctctactaaatatataaaaattagctgggcatggtggcatgcacctgtagtcccagatactcgggaggctgaggcaggaaaattgcctgaacctgggagttggaggttacagtgagcggagatcacaccactgcactccagcctgggtgacagagcaagactccatctcgaaagaaagaaagagagagagtgagaaagagaaagaaaaagagaaggaaggagagagaaggaaggaaggaaagagaaagagaaaggaagggcagaagcaggaatgggggagatgagagtgggacagggtggggtcatttgggaagagatacacaggtgcatatgtgggggatcccaattgtcagcctggcctccctgcgtcccgccacccctatgccccccgcagatctgggacgtggtggagaaggcagacatcggctg

SEQ ID NO: 34484 - DNA, 957 bp, Artificial sequence
  DNA replication origin
cggggcccgggtggtactggtggccgtggacaagggcgtgttcgtgctgaataagaagaacaaactgacgcagagtaaggtaagggccagtgacccaaggctgctgagaagaggcggaggcacggagctggggctgggggaggtgggtgggactggagagggcagtgcagtggggggcatgcgctgaaagcagagatcggagcagaccagacacagggatggttgaagctgaagatgggaatgaggttggacatgggttccaattggggatggtcctgagaattggacttttttttctgtttgtttgtttgtttttgagacagagtctctctctgtcaccaggctggagtgcagtggcacaatctcggctcactgcaacctctgcctcccaggttcaagcgattctcctgcctcagcttccctagtagctgggactacaggtgcccatcaccacgcccagctaatttttgtatttttagtgaagacgggggtttcaccatgttggccaggatggtctcgatctcttggccttgtgatccacccgcctcgacctcccaaagtgttgggattacaggcgtgagccactgcgcccggctgagaattggacactttcaactggggccctgagaggctggtggcagcacacccagggtcattcagtggggaaggtttccggagtagggacgaagatggagatggggttggcttgggatcaggagtgaggatgggaatgcagatggaatcagaggggaaatggagataagatttggaatggaggccaggtgcggtggctcacgtctggaatcccagcactttgggaggtcaaggtgggaggatcacttgaggccaggagttcagaccagcttgggcaacatggcaagaccccatctctacagaaaaaattttaaaatagctgggcatgatggcgcatgcctgtagtcccatctgctcaggagg

SEQ ID NO: 34485 - DNA, 896 bp, Artificial sequence
  DNA replication origin
ggtcaccctctatcttcagggtcatctgctgcccaggtacaggctgccggtcttctgactggccgctttttaccaccagctgtggggagggtggagacgccgaaagaagtcagccctgggagagaggagtgcctgggatggagtgggtgctgggctagagtggaaagacagaaaggttggggggagccgtggggctggggagggggagagagagggagagagagagaaagggagagagggagggagagagagggagagagggcgggagagagagagaaagggagagacagggagagagacggagagacagggagagagggagagagacggagagacagagagagggagagtgaggggggagagagggaaagggaaagagggagagaaagggagagggagagagagggaaagagagagggagagagagagggaaagagagaaggagagaaagagggagagagaaggagagagagggagagagagaaagggagagagagagggagagggaaagagagagggagagaaagagaggggagagagagggaaagggaaagagacagggagagagaaaaggagagagagagggagagagaaaaggagagagatggagagaaagagagatcgagagagggagagagagaaggaaagagaaataaagagagagggaaagagagatgtagagagagggaaagagagataaaaagagagacagttgagagacagagagggaggagagaaagggagaggaagagaagagagagaaaggagagagaaaaggagaaagggagagagagagagagaggagacagggagagagagagagagagaggagtagggagagggagagggggcgagcgagcccagggcacacttaccgagcccacgcaggagtcctt

SEQ ID NO: 34486 - DNA, 1303 bp, Artificial sequence
  DNA replication origin
acagggagagagaaaaggagagagagagggagagagaaaaggagagagatggagagaaagagagatcgagagagggagagagagaaggaaagagaaataaagagagagggaaagagagatgtagagagagggaaagagagataaaaagagagacagttgagagacagagagggaggagagaaagggagaggaagagaagagagagaaaggagagagaaaaggagaaagggagagagagagagagaggagacagggagagagagagagagagaggagtagggagagggagagggggcgagcgagcccagggcacacttaccgagcccacgcaggagtccttgacgtccacccacacggagtcggccaccacctccctctggccgctggcaccgatcagcgtgtagtacgccaccaggcggaaggaagggatgaagtcggtggtgatggacaggggcagcaccaccaggtcctggccgggctctcgcacctggcgtcccgccttcaacagcctgcccttgttcatgatctggggggacaggctggcatcaggctggggagggtgagtggcagggaacgcagggagggatccgggatgggggaaggagtcccaggggtgcggaagaaacaaggaggaggcgggggctgaggtttccaggtggccacggaccaggtaggtgtagtagcggatcttggcctcgtgggcgcggtccattcgcaggaggaagttgacgttgagggtctccccgggtctgagctctgtacgtagcactgagagatgcaggtaattgttggagttgcccacggtgctgtagggcagagcctgcatggtcctggtagcctgctctgcctccgagagctcctgcttcttcgtgcgcacctgggtggggaaagagggatgcctgctggtcgccgcccgaggatacccacacccgaatccctgagacctgggaattggtggcctttcttaacaaaaggggctttgcagatgggattaagttagggatctggagatggaatcattatcctggattatgtaggtggagctaatgtaatcataagggtctttattaagcaggggcaggggagaaaggagagacagagacagagagaaagagagacactggaagatgctatgctgctgcctttaaaggtggaggaaggggccatgagccaggcctttagggtgccctggcgacactggaaaaagcaagggagcgaactttcccccagagccaggacttctgacctctcaaactatagacccataaatgtgtgttgctttagatcactaggctgtggccat

SEQ ID NO: 34487 - DNA, 1510 bp, Artificial sequence
  DNA replication origin
tcaggtggggggctgggggtggggaaggtggggggctgggggtggggcaaggtgaggggctgggggtgggaccaggtggggggctggggggtggagtcaggtgggggctgggagtggggaaggtggggggctgggggtggggccaggtgaggggctggaggtgggaccatgtggggggtgggagtggggcaaggtggggggctgggggtggggccaggtgaggggctggaggtggggccaggtgagaggccagcagtgggttgggggctccagtcttcagcacaggcaggagaagctgggggagatcccattctccaggagggatggacctgaagccctccttgtctgtcccgtaggttcctctacgggaagaaagtggagggaactgcctttgtcatcttcgggatccaggatggcgaacagaggatttccctgcctgaatccctcaagcgcattccggtaccatagacggaggccgctttgatccctgccccagtccccgccacctctgagcccgctcccctctctgagccctcctctcccttctcagattgaggatggctcgggggaggttgtgctgagccggaaggtactgctggacggggtgcagaacccccgagcagaagacctggtggggaagtctttgtacgtgtctgccaccgtcatcttgcactcaggtgaggcccagtctgaaggccaggctcaggaccaccaagtgggccggtctgagaggggagaccaggtcagaagagaaagcctagtctaaggagggaggctcagagtgaaagtggggttcagtctgatggggtaggcccagtctgagaggggaggccgagtatgaagatggattccagcctgatggggggaggcagggccagtataaaggtggggtccgggctgatgggggcacaggcccagtatgaagtctgtgtccagtctgatgagggaggcagggccagtataaagatgggtccagtctgatgggggaggcagggccagtataaaggtggggtccggtctgatgggggtcacaggcccagtatgaagtctgtgccagtctgatggaggaggcaaggccagtataaaggtggagtccagtctgatggggggcacaggcccagtatgaaagtggactctactctgagggaggaggtctagtctgaagttggggtccattctgagggaggaggtctaatcctgaggggtggcccagaagcctacactcacagctggtcccctcaggcagtgacatggtgcaggcagagcgcagcgggatccccatcgtgacctctccctaccagatccacttcaccaagacacccaagtacttcaaaccaggaatgccctttgacctcatggtgagacccggggcgggaaggggtcccactcctcccttcggggacaccggccacagccctgagcctgcctgaacttcccccacctgcaccccacatcacaggtgttcgtgacgaaccctgatggctctccagcctaccgagtccccgtggca

SEQ ID NO: 34488 - DNA, 2204 bp, Artificial sequence
  DNA replication origin
tgagccattgcatttgccccaattattttttgagacagggtctcactctgccacccaggctggagtgcagtggtgcgatcacggctcactgcagcctggaattcctgggctcaagtgatcctcctgcctcagcctcctggggtagctgcaaccacaagcaagcaccaccacacacagctgtttttttgtttgtttttaacttttcttttttgtagagacagggtctggctgtgttgcccaggctggtcttggactcttgggctcaagcgatcctcccgccttggcctcccaaacagctgggattacaagtgtgagccactgcacctagccttgtatgatttcaacacatcctcatgataattctatgagaacaccctccttccccttctctcctcccatccttctcgcttcttccagtaagttttttattaaacccaactatataccagcattgtgctgagttcaggtgacaaaaccctcaacaaacataacaattccttcctggagggatttaggttcaatagagggcgaggcgatgggagaagcaattatcaaatgaataaatctcatttgcaggacatggcaggaaggaggagtgtgtgtagcggggaggggggacgctcagggtgggtatttgcgactttataggttactcagagagacctcattgtaaaattgagacattggtgacatttgagcaaagacttaaaggaggagagagaacaagctgtgtggatatttggaagaagagggttttcttgagaagagggcacagcccgtgccaaggcgccaaggcaggactgcacctgggtgttggaggaacagggaggatggcccgtgtggctccagaagagtgaacgagggggagagagggaggaggggagggcagggaagggacagggcaaggtgtgcagggccttgtggactgcagggaggacttgggctttgacgcataggaaggtgggagccatggagggctgtaggcagagcagggatgggccctgactcaggtgctcacaggcgtcctctggctgccgtcggtagaatagatgacatacaattatccgtcatgatcccgatattcagataaggtaactgaggctcagggaggtgaagtgatcaggggtttaactgaaagcagaatccacggacacctgcactgctccctggggtctccctggatctccaccttgtctctcagcctgtgtgtgtgtgtgtgtgtgtgtgcgcgccatatggtgtattgtgtggttgtgtgttgggttgtgtgttgtgtgtgctatgtttgtgtgcactgtgttgtgtggtcgtgtatgttgtgtggttgtgtgttgtgtggttgtgtatgttgtgtgtgtgttgtgttttgtgtgtgttgtgtgtgttgtgtgttgtgtgtgtttgtgtgtgttgtgtgatagtgttgtgtggttgtgtgttgtgtgtggtgtggttatgtatgttgtgttgtgttgtgtgtgttttgtgtgtattgcgtggttgtgtatgttgtgtattgtgttgtgtgtgttgtgtgttgtgtgtgtggtcatgcacgttgtgctgtgtgtattgtgttgtgtgttgtgttgtgtgtgttgtgtggtcgtgtatgttgtgtgtttgtgtgtgttgcattgtgtgtgtgcattgtgtgtgcacatgtgtctgcatatctctttgcctctgtgtgtgtattgtgtgctgtgtgtgtgcatgttgtgtgctgtatgtgtgtgtgttgtgtgggtgtgtgtctgcatatctctttgcctctgtgtctctgccactgcaccccttccggtgtgtctttctctgtctctctcgatctctttgcctctcctaagcctgtgcccctgcttcccctggggccccctctggctggcacctcaatgttgaccatgaccgtccggcccacgggtagcagcttgtggttgacggtgaagatccgatagagaactggggagagacaaagaggcctcgtgagaccctagcccgcccacgccggtgccccgccctctccagccgcccccagcctcacctgtggagccaggggtgtagatggtcttgtctgtctggatgaagaggtacccgctctgcaggctgaccagcaccaccttctccaccacttgggtcccgaaggtggcctgcacggtcacgaacttgttgcgccccttttctgacttgaactccctgttggctgg

SEQ ID NO: 34489 - DNA, 2144 bp, Artificial sequence
  DNA replication origin
tgcttcccctggggccccctctggctggcacctcaatgttgaccatgaccgtccggcccacgggtagcagcttgtggttgacggtgaagatccgatagagaactggggagagacaaagaggcctcgtgagaccctagcccgcccacgccggtgccccgccctctccagccgcccccagcctcacctgtggagccaggggtgtagatggtcttgtctgtctggatgaagaggtacccgctctgcaggctgaccagcaccaccttctccaccacttgggtcccgaaggtggcctgcacggtcacgaacttgttgcgccccttttctgacttgaactccctgttggctgggatctaggcgtgggcagggcattgtcaggggtctgttccaaggccccatgcccacggtccagcttccggatcttgggctgggtccctccttgcctgcccattattcttggtcttccgaggtggccgttttggggagggaggggcatgtgaaggaggtgcgaggggagaggggggaccagggagggaactcaaaaagaagagctcacaaggaggagagagcttataggaggaggggctcagaaggggcggggactcagaaagggaaggggctgacatgggaggggctcagaaagggggagggactcaggtgagggaacttagaaagtgatggagactaagaggggaggagttcagaagaggagacttcgagggggaggggcttggaaaaggaattcagtgggagggacttagagggggaggagactcagaaggggtggagtctcagagaaggggaggaacctcagaaggggtggggtctcagggaagggagggactcagaaggggaggagtctcagaaggggtggggtctcagggaaggtcagggcttagaaggggaggagattcagaaggggtgggggggggtctcagaaaagggaggggcttataaggggaggagactcagaaggggtggagtctcagagaagggaggggcttagaaggagaggcgactccgaaggggtggagtctcagggaagggcagggcttagaaagggagaagacagaaggggaggggctcaggaggagggggggagtgggcgtggctgtgggtgtcagccgggtcctgcgccagtctgcactcaccgtgaaggtgacgttgcccatgtggttggtggcaggggtcagcacagtcttctcactggacagcactagttttttgcctgggaagtcgtggacagtaacagtgactggaacatccccttgcgcgtcgtgggcctccagcaccatggtctcctcgctctccagccgcaagatgttgggggtgatgatagagtacctgtcggagtggggcacgggagtgggcttgtcattccacggatgtgagacgccagtcctcactggagtcagcgcctggcaggctgtgtgccccagcctctggtcctggagaggatccagtgactgccggcgcacttgccaatgccattatcttctctgggcactgccaccgtctcaaccacatgggcaggacagcagccaccatgactcccactctcagccagctgggcctggcctttgaaagcctgggcaacgagggggccacacatcccaccaaaccctgaaccttccaaccagcgtcagcaactcctccaagtctctggacttccagacccacaatcgcctaaacccacacatgccccaaaccctaaacctctacctctctaaacactccaaatatgtaaacactcaaactcccggacaccctcaactctacctacccaaacccacatacgccaaaacctctaaacctcaaatcttagagcaccccaaacccagcctaaacctccaacaccccagtcctaataaatacaatcaattccaaatgccccaactatacatgaacccgaagtagccaatctttaaacccacactgaaaattgcaagtccccaagctgcaaactcccaaatcttgtaaagtccaaacctccgagtctccaaacacccccaaccgcaccatcaatgaacaccacatacaccctaaaccaacagatgacctcaattctagaaacatcccaaactccaattccaccatacctggattccacaaacacccaacccataaacacccaaactctcaggcag

SEQ ID NO: 34490 - DNA, 1236 bp, Artificial sequence
  DNA replication origin
ccaggtgagcccgaggcccaggtgggacgggagggcggccacggtgggggtgggggtgcgcctgacgcccccactccgccccgtcccccagctcttggtggagggctccaccctggccttcttcgtgctcacgggctacaagttccagcccacaggaaacaacccgtacctgcagctgccccaggaggacgaggaggatgttcagatggagcaagtgtgagctgggcaccatgggcagggccggcggctctgggggtggagtagggggtgggcagctctacgggcagggtgggcaggggggagggactgtagcagccctgggggcagtgttagggcagagcctgctgttgagaagggatggaggggagatggggggcagccagggcagctgtgcaggtggggaccggacagctgtggagtacctaaggccaggctgagctaggggtggggttagggccgctagggagacacccagggccgctctgggggcgggggtgggcggggcctaggtagttcgggtagaacgggtggggcctgggctgctatggcagtaaggtgggcggggcctgagtggttacgggtagagtgggtggggccagggctgctgggggcggggcctaggtggttggagtagaagggtagggcctgcgctgctgtgggagcgaggtgggtgcagcctgggtgagtctggggtagagtgggcaaggccagggctgctgtggttggggggagtggggcggggcctgagtggttccgggtagagtgggtggggcctgctgccctgcaacgctagacgcctcctcgctgtctgcccccagaatgacggactctgggttccgggaaggcctctccaaagtcaacaaaacagccagcgggcgggaactgttatgatcacctccacatctcagaccaaagggtcgtcctcccccagcatttctcactcctgcccttcttccacagcgtatgtggggaggtggagggggtccatgtggaccaggcgcccagctccccgggaccccggttcccggacaagcccatttggaagaagagtcccttcctccccccaaatattgggcagccctgtccttaccccgggaccacccctcccttccagctatgtgtacaataatgaccaatctgtttggctacgccgttgtcttgcctttttgggggttggggtctacacggaggttgtgtttacaatgtagaaacctgttttcgctgtgtgtggcgggg

SEQ ID NO: 34491 - DNA, 1049 bp, Artificial sequence
  DNA replication origin
gccagggtggagccctccaccaagagctgggggacggggcggagtgggggcgtcaggcgcacccccacccccaccgtggccgccctcccgtcccacctgggcctcgggctcacctggtacagccactgccactgaaagggcacagccacctgcagcaggatggcgatgatgcgggtgaagtagacgtagcagatgacctgcaggggcgcgagcaggcgtggggccaggactgtaggggcacgggcaggcatggggctagactgcaggactgcgggctggggagcctggatgggggcctcgggatggggcagcagctgaggggctggggtgggcgtgcagcaggccggtaatccccccaaacccgctgtgagtgaggcgggctcctaccatgacatagtaatgccggaacagcttcagcttggccaggttcactgccactgagggtgggcacagagagggcggtcaggggagactgagggtgggagggaggggagggggctgggggctgggagaggtgacaaacagaacatctgagggagtgtccaggagcagcaagtctcgaggggacattaggtggggcagaaaggcggaagggggagatcagagaggagggaagggccacccaacagggcagagaggccagataaaggcattcgggggaaagagaggccagactggggcatccagggaggcagaggcctgggggctgggcagagaggccaggaggggcatccaaggggcagaaagaagggcccggaggaggaatggggccatgagcagagggcctgcaggcgcagggcctcacccttcccgtctgtgccagacgcatcctggagatgccggatggacctgggacaagtggaggacacagggtacggtcagcgcggacatcgcccatgtgcacagggcagagcctcagcccgggggcagggtcctcaccagactacggggaacaggatggcaccacagcagatgaggtccaccaggaacaaaatctccttccacagcacgtagtcgctggcgccttcctcgcgggactcgatgatgat

SEQ ID NO: 34492 - DNA, 1357 bp, Artificial sequence
  DNA replication origin
gtacggtcagcgcggacatcgcccatgtgcacagggcagagcctcagcccgggggcagggtcctcaccagactacggggaacaggatggcaccacagcagatgaggtccaccaggaacaaaatctccttccacagcacgtagtcgctggcgccttcctcgcgggactcgatgatgatgtaggccacgttggccaggacctgcgcaggcggcgggggtgggtgggcactgcctggcacgctcccctttgcccccactgccctgtgcagccctccccgccctgctccggaggctgctccatccgcacctgcatggggatcacgatcccaaagaccttcttctccttatccgacaggacgtacttgatgaaggcccagcctgagccaatcagggcgatggtgatgaagaggagggcgcccttcagcctgaaggagcaggggagggcgtgatgatgaggtggggggccaaccctcccctgcctgcctccccccagctgcccagcagagtgggggacactcacaggtgtgcgatgtagtacatgacggcaaggccttcgatggggtggccctggctgttgatgaagtagtagttgatctgggggtggatggacagacggacagtgaggcgcacagaggggtgggaggctgatggtggtggtgggggattaggaacacggaccgtcaccatcagatgggtggtcagaaagttgaataatgaggacggtgggtgggactcaaaactggtaatcggggctgaaaaaatggagggaacagtcacagctgaaggggtgaatagttggacaatcagagacggacagtcacagctgaaccaagggacagtggtggacagagctgccccgcaggactggtggacagaggggatgggtgactggccacactggtaaaatgggtggacacgtggatagctggcggatggccctcccacaggcccagggtctgcagagatttgggggatggcccgggtgggcctttcagcccaccccccgctgctccccggtccaaggctctcacgctgtggaagaggagagagatgctcttggtgaaggccaaggccgccatgagccagtggatcttgaagacgctgtacctggtgggagggtcagggagagatgggggtgcggggcatcagcagagcatagggatgggggtctggtgaagggacgtgggggaccctcaggggcaggggcattacgtgttcctgcagaggatggacacccagaagatgccagcggccaggaagcaggcggacatgaccatgtagagcttgaaaaggggcatctccgctgccgacaggaagccatcggggttcttctcccggatcatcacctgcggagggggc

SEQ ID NO: 34493 - DNA, 1064 bp, Artificial sequence
  DNA replication origin
cagagcacccaggctcccagaacagagagatacagctgagcccaggaggagagccttgggagcccacactgggactgatgtctctgctgagacctggccccacctgctggtggcttctgagctagaaaatgtctgattgcagttgggcaattgaacccagtgagttctgtggctagtctcaaatgggggctcagcctagcaaagttctgagttcacctctgctcagagactcaaactggaattggggttcagtccaggtcagcaccaccgtggggataggggatagaggccagaggcttaaccagaaggattagcaacccggtaaggggtcaggtccaatctggagtcagggctagtccagatcggtggcctaaaccagagattaagcctcagtgtgtggtgtgggggacgagggggtgtcagagtttcaggctgaagttaggactcaacttgcagagagggagttcacctggggtcagagttcagcccggagtccggtctagcctggaatctgggggtggggctccaattgcctcactctggaataaaaggcttagcctaaggctggggtctcagcctggggtcataggtcatcctagggtcaaactttaacctgaggccagctttaggcctctctgtggaccaggaagattaggaaaacaggtcaggcctgaacagatgcgtgtgtttaccaaaagcctcagctctggctgggagccacatccctggctcaagaagaggaagtccgtccttggggatactgggaaaggtagtttatttaatgctttgtggcccttgtctgctcccgctgcattctgggtaatgtagtcccggacagttaagagtgggtggagaaattccgctttaagggccggatatcagatccatgacaattggttagataaactgctcattaaatcacatccggacaatctttatagcgattggtgagagtgagctgggggttaagcgttatcggctctcccattcggaaccggtgctgtccgtcggtgacgcaagcaggcgggcttgcggagaggcaattgctgattggttggcggact

SEQ ID NO: 34494 - DNA, 1767 bp, Artificial sequence
  DNA replication origin
gattgtccggatgtgatttaatgagcagtttatctaaccaattgtcatggatctgatatccggcccttaaagcggaatttctccacccactcttaactgtccgggactacattacccagaatgcagcgggagcagacaagggccacaaagcattaaataaactacctttcccagtatccccaaggacggacttcctcttcttgagccagggatgtggctcccagccagagctgaggcttttggtaaacacacgcatctgttcaggcctgacctgttttcctaatcttcctggtccacagagaggcctaaagctggcctcaggttaaagtttgaccctaggatgacctatgaccccaggctgagaccccagccttaggctaagccttttattccagagtgaggcaattggagccccacccccagattccaggctagaccggactccgggctgaactctgaccccaggtgaactccctctctgcaagttgagtcctaacttcagcctgaaactctgacaccccctcgtcccccacaccacacactgaggcttaatctctggtttaggccaccgatctggactagccctgactccagattggacctgaccccttaccgggttgctaatccttctggttaagcctctggcctctatcccctatccccacggtggtgctgacctggactgaaccccaattccagtttgagtctctgagcagaggtgaactcagaactttgctaggctgagcccccatttgagactagccacagaactcactgggttcaattgcccaactgcaatcagacattttctagctcagaagccaccagcaggtggggccaggtctcagcagagacatcagtcccagtgtgggctcccaaggctctcctcctgggctcagctgtatctctctgttctgggagcctgggtgctctgtgtaaggggaacgtatacccaagggcccccctgcaagacgcccagccttgtctgaggctgcagagaaagcgccaaagcccggagagaatgggagtgggaatccccagtgcctcctctcctctttcattccagcacctcaaagggatttacaaggtgtgaacagacttttatgggagaggtgacagacttcccttctccagggcccagatggcccagatgtctgggggaggggcggagtcggaatctcaggggcagtactgagaatgaaaccaggttaaactggaaaatgggcagatgcaggcgcgaactggaaggcagctggggaaaggcctgggcctggcgccccaaggacggcctgtcttcagtttcccagcggagactctgggggagggaaggcaggatgcggtgcgggagttaatggacctggccttggcgaaggcgcgtcctgggttggatcgaaaccctctcatccgccctgtggccggagggaccagaccattagtgggacgaacctagacgcctggagccgggccggctcgcaagaacggggtgacctcaggttgcccctgcaatggggttgaggaaggacttcttgagtttggggttttagtgtcttggccctttaaggaataattgcggggaaaggggaaaaggagatgggaagaaccgtttggagcggggaaggaagatgagaggacgagagggaccccggggatttggaaaaaatgggtgggggttctttaaggggtcggtccagcggcgtcgagtggcaacgttgctttaaaagggggcggagcgtccgttgggccccgcccccgaatcgcagtgcttgg

SEQ ID NO: 34495 - DNA, 1403 bp, Artificial sequence
  DNA replication origin
gtgggacgaacctagacgcctggagccgggccggctcgcaagaacggggtgacctcaggttgcccctgcaatggggttgaggaaggacttcttgagtttggggttttagtgtcttggccctttaaggaataattgcggggaaaggggaaaaggagatgggaagaaccgtttggagcggggaaggaagatgagaggacgagagggaccccggggatttggaaaaaatgggtgggggttctttaaggggtcggtccagcggcgtcgagtggcaacgttgctttaaaagggggcggagcgtccgttgggccccgcccccgaatcgcagtgcttgggctccgcgcgggtgggggcgtggcagagcgtgcaggggggcggggaagagtctggggtgggcggggccgggcggggcggggcggggccaggcgcaccgccctcggctgagtctccccggggagggcggcgggcggcgggcggcggggaccgggtgcggtggtggctgcggcggcggcggcgggagcagcatggattggggcactgagctgtgggtaagtccaatcggcccgcctctaagttcccctttgctggggtccaggcaccccccttttgtccccaatgtatcttagagggggctccgcgcctttcccttccaccgacccctgggtccccgccctccaccctccgctctctctcgaagtttatctgggagtctcagcacgctcaggggcgaagggcgactttgccggaccggagtggggaaactgaggcacagggttgcgaatgaggcgggcagaaggaatcctggggccaggccggggcggctgagagaggtcacctattttgggcgccctggccgggcaggcggcttatcttacggcccctgggtccctgcccgtcgtccgcctgtccggctaggaggggggaggggaccctctggtcaccctcatccccacccacgtgggacctagaagtcctgaccgccctttccctcgcctttaatcaacacctaggggctggggacgctcatggaggggaagggggatgctaagctcggcctgatccccctccctggcttccccctgctcaccccaggcccagggcgggaccgccccctggtcgcctataacctcagccctggaagccccagaaatttccccctatcctagccggacctctgacccctccccttgctgggggcggtggaatccctgagttcttagtgcagcgggggtaaccagactgccaccccctcctccaattctgcgatttcttttggatgtgtagtggggtcagtggggtaaattgagtcacccatcgggggatccctggaagcagggagattcagggaacctggtgcctgccccctggccactcaggggcccccagtctgccaggaaccctgcccc

SEQ ID NO: 34496 - DNA, 762 bp, Artificial sequence
  DNA replication origin
ggtatattaaaatccaaaaacccaagaaagcaagacatgcagggcggctcccagagtcccatcagcaggatggagagagaaactcggggagtccccagggatggtgtcaccagccctcaggccagccctgaattccaccagcaggttttctcccagcatcccgagaagcagcagacaaacgccacggacctccccacctccccaccctgcccccgccttcgcctcgggggactcccaggccaatcggccgccttccttccctccagtccgggctggcagccaagaggaaaattcctgcccgagactcggcgttcaggcggctggggctgactcaataggggccccactgtccccacttcactgtccttctcccccaccatcccaagggtcccggcccccaccttgttcttcttgccaaaaggccagcgcttggtgcggctgcgacccgggcctcggagttcaggccgtccatccgagggggtgcccagactgctgtcggagggtgcacggttcatgggctggctgaagtcctcgaattccacgtcgcccgggcgggcaaaacctgacttgtgcagctctataaggacgtgggagtcctgggggagggggacagtggatgagcagtcgagtgcctagcctatgggtacctccctctgcccttcccgtagcccagtggacccagaccaggcacccacgttcttgggatccacagcatttgcagccaccttcatgccctccaagcacttggctattatgggcacc

SEQ ID NO: 34497 - DNA, 1263 bp, Artificial sequence
  DNA replication origin
aacgtgggtgcctggtctgggtccactgggctacgggaagggcagagggaggtacccataggctaggcactcgactgctcatccactgtccccctcccccaggactcccacgtccttatagagctgcacaagtcaggttttgcccgcccgggcgacgtggaattcgaggacttcagccagcccatgaaccgtgcaccctccgacagcagtctgggcaccccctcggatggacggcctgaactccgaggcccgggtcgcagccgcaccaagcgctggccttttggcaagaagaacaaggtgggggccgggacccttgggatggtgggggagaaggacagtgaagtggggacagtggggcccctattgagtcagccccagccgcctgaacgccgagtctcgggcaggaattttcctcttggctgccagcccggactggagggaaggaaggcggccgattggcctgggagtcccccgaggcgaaggcgggggcagggtggggaggtggggaggtccgtggcgtttgtctgctgcttctcgggatgctgggagaaaacctgctggtggaattcagggctggcctgagggctggtgacaccatccctggggactccccgagtttctctctccatcctgctgatgggactctgggagccgccctgcatgtcttgctttcttgggtttttggattttaatataccttagcacccttggtttatacctttgatttatactttgggtccctcttcacttacactctcatacctctccttgacttaacacctgtgatccccgagcttaaacttctgatgcccctaacccctctcattttcctgccttccactccctctcggcttgtggttttatttttgtttatttatttttgtcctctgtggcctcttacctgtctgagaccttgattcctgcatgcgtcttctagactgtcagcccagaaagctaagtggacagagagacatgggcctccctgcctcctggacccatgcttgctcccggacataacattccagagacctaggagataccgggggagtgagagttctggctttcgggcttacagttcaacatcctccccgccaccttccagatttttttgtgtcgctcctgcatgcgttttctctgtgtggttgtgcatcttgagttgtggttttcttaccgttttttttctttctccattttgtttttcctttttcctttttttgcgtccatccgtccatccgtgcgtccatccctccgtccattcgtcct

SEQ ID NO: 34498 - DNA, 1500 bp, Artificial sequence
  DNA replication origin
tcctcggggcagccccacgtccaggcacagcccctaaggcgggacctccaggatctggcacctggaacaggccaccccattgcactgcggtagagcccctcaggcaccccacccccattcctgcagagagctggaagccccctcccctctgaccccgcctagtcatcccgcaggtggggcaggtccctcccgggcccctgttgggtcaaagtcctctggggaaaggaaggtgccgggaggttgggaggggcgaggcgggcgcctgggccccgcccccagcccacctgaccttgcttccaggattccggcctaacccggagctgagggaggccctgaccaccggcttcgtgcggaggctgctctggggtagccggggcgcgggagctccgcgcgctgaacgctttgagaagttccagcgcgtcctcggcgtcctgtcgcagcgcctggagcctgaccgctgagagcgcagacacccttcttcacacccgggacccccaggtttttgcgaaccccagaagagaccaaaggagtcgtcccaggctcctcgcgcctcaggtggaatcctgccctgtgcctcacagaagaggtggggaccgcagtcagggtcacctggaccatggtgaacatgtgacctgcagatctggcatcagaggccagagttcaaatgtgactccacctcttaaaagccgtgatttctagcagttgacttcacctctgtgtcggcctttaacaaaatcatagccatacagcagctcaggcctgtaatctcagcactttgggaggccgaggcggaaggaaggcttgaggccaggagttcaagaccagccagggcaacatggtgagacctcatctctacaaaaactgaaaaataaaaaacttttaaaaaatgtaaaagttgaggctgtgtactttctaagaattgtggccaggaatgagaccccaggtggagaatgcctggcacacagtaggtcttcaataagtgctacccattctcagaagctgcagtgcattcagaagggatgaaacttgggtgtcctggccaggtgcggtggctcacgccataatcccagcactttaggaggccgaggcagatggatcacttgaggtcaggagttcaagaccagcctggccaacatggcaaaaccctgtctctacaaaaaatacaaaaattagctgggcatgatggtgtgtgcctgtaatcccagctacttgggaggctgaggcagaattgcttgaactcgggagatggagtctgcagtgagctgagatcacgtacgccactgcactccagcctgggcaactgggtgagactgtctcaaaaagaaaaaaaaaagaaacttggtatccttctccctacctgagtcacaagcagacacccactgacaatgacataggccaacttccagaaaggggcagggttgacccaaggtgtgcccaagatcacctccccttcctcattccctgtgtggcctgtaagaaacgtggtgttagatacttcca

SEQ ID NO: 34499 - DNA, 1833 bp, Artificial sequence
  DNA replication origin
atgttcaccatggtccaggtgaccctgactgcggtccccacctcttctgtgaggcacagggcaggattccacctgaggcgcgaggagcctgggacgactcctttggtctcttctggggttcgcaaaaacctgggggtcccgggtgtgaagaagggtgtctgcgctctcagcggtcaggctccaggcgctgcgacaggacgccgaggacgcgctggaacttctcaaagcgttcagcgcgcggagctcccgcgccccggctaccccagagcagcctccgcacgaagccggtggtcagggcctccctcagctccgggttaggccggaatcctggaagcaaggtcaggtgggctgggggcggggcccaggcgcccgcctcgcccctcccaacctcccggcaccttcctttccccagaggactttgacccaacaggggcccgggagggacctgccccacctgcgggatgactaggcggggtcagaggggagggggcttccagctctctgcaggaatgggggtggggtgcctgaggggctctaccgcagtgcaatggggtggcctgttccaggtgccagatcctggaggtcccgccttaggggctgtgcctggacgtggggctgccccgaggacgggatcccaggttgtcggggaaggtggggggatcttgccgggtgggctgccctaggataggacggaggagtcgttttggagggagcagggcgttcttggggatcgagatccctgggggacgggatcgtcttaggtgggaagggggagtggggacccgcggaggtggctctgggggcaggacagcccgttttgaggtggacggccctgttcctatcaataccgctggatgcagcgtttgcttggggtgagaaccttcctggagtggagccgtcccagtttgggtggggctccgggaggcgtggcgagaggctcccctcctgggacaggctgggtttgggggatccggttagaacctgcagggtgctctgaagtctgcagtccagcgcagagggaacgctcacctcgcaggcgctgggctgccaccttgcggaatttgggtgcgtcccggaccatgtgacgcgccccgtgcagggtgcgcaacagccgctcacagctctcgtccagcggccccgcgacttcctcgccctccagtaggcgaaccatgggtgccacgtgcggcagcgccacctcgccggggtcgcagggtcctgcggagggggagggtctgatcagggtttggggctgtagatggggcatagggcagaggtggaacctaggacaaatgcaggggcggggcttaggactgagcgacagcggggtctgtggagaggggccaggaccacacgccccgtatggagggcggggcctatggcgaaggggcgtagcctagggaaaggggctgggaccaaggctggtgggggcgtggcctaggaacaagtctcgtgtggagggcggggcctagggaaagggccaggaccaaccctcatgtggagggcggggcctatggtgaagggaccgggcctagaacagatgcagggactgggcataggactagattgagtcctgttaaatttggtctgggcccccaggggatgctaagccccagaccttcacttaccagcgccctcatccagagcccgcatcagcggcttcagctcctgctcaaaggccagcgcagcctccgtgtggctccttcggagctggcgccacgtgtgctccaaccgggacacctgggagaagagatctgagcacgcctcctctccagtcttcccagtcacccgcactccagcttcctccagtccctgctccccacgaacctggggcat

SEQ ID NO: 34500 - DNA, 1521 bp, Artificial sequence
  DNA replication origin
ctcatgtggagggcggggcctatggtgaagggaccgggcctagaacagatgcagggactgggcataggactagattgagtcctgttaaatttggtctgggcccccaggggatgctaagccccagaccttcacttaccagcgccctcatccagagcccgcatcagcggcttcagctcctgctcaaaggccagcgcagcctccgtgtggctccttcggagctggcgccacgtgtgctccaaccgggacacctgggagaagagatctgagcacgcctcctctccagtcttcccagtcacccgcactccagcttcctccagtccctgctccccacgaacctggggcatgagcagggcgcccatgactgcagccagcccgggcaggtcccccgccgcccctggccgcagcgccagcgccagctctaccagtcccctcagtgcggctgcgcgctcctccagcggccccgagcagcccagcaccgccagcgccccggccagcgccagtgtctgatgcctgcagaggtggagggcaagggtctgggggaagtggggaggtttgtaatgcaggggtgaggggggacaggaggtggcattgccccatctcccttcttccctggggaaccatgagtggggagctgtttggagatcttgggaagtggggggaattggcctcccccaaccaagattacaagctgctggctcacctctccagcagttccaacctcaagtggtgtccatggggaagagtgagcagctccaggccagatgagactcccatgttgccccgctgatctctggtcactcccaggaggcctgtggcctgcagaagggaatggggaagtcaggtgaagcgtgattatgtaggcatggttgggtcttgccctgggcctggggaggagcatcccaggaggtgacccacctggcagtctaccaatagcaggtgaagggcggtgctcccaggatggtgctccaggaacaggccacggagggtatgcaggacttggggttccaggggccgattctgggggcccagcaggcaggagggggcatcatgggggcagaaagagatctcagcctgtggtcttgtaaaacatctattctcttcctcctcatcctcctcggcctcccaccatggggcctctggctctgggcagctttggctcggggatgttccctggacactgggcactcggggcaccagctcgcagtacgtcgggggacgttcagaggcatcaggcagttcgaaggagggtgtccgggggggcttcgttggtgccttggcttgaagctgcccatcggaggccctgagactgtcggcaacagttcccaggggagcaggggccttcagcaacaccgggtcactgctcgttcggggcaaggcagatatgggcatggtggaggcttctagaggtcatacaagaggggtcaatgggaatacacagggaagattgctgaatgggcgggggtgagagcttcatcggctaccacccacctgatccatccactcattccaataatggggtat

SEQ ID NO: 34501 - DNA, 847 bp, Artificial sequence
  DNA replication origin
ctgatgttaatatgaggaactcatcaataaacgtggccaaagagtcctctctcttgcactaggtccctgtcaccttttctcttgttcgtctccaggcatcacgatggaagtcccccccacccttcttcccacctgggaaaccacctgaatgatttgccttccacctccaccaaagtcccgccccgctccagcgtgctgtcactgaaggaagctgtcgcgttttcccggacgtctctccacaaaacccgccacctaaatggggcttctttccggaaaatccgggagggcggtctggaggaagcgtacccctccttacgtcacagctgccgcagctaccccagcctggcgtaagagcccgagggagttgccctgccctgacccggagccttggcggggaggggagagaggcaccccactccaccccgccctggtcccaaagggccatgggtgcttggggccgcctgggtggaagggaggggcagggttctaaggggcgggaacgttgggatgaaatttcttctattgccctaaggggcggggctgagaaggaggtggctgcgggtgggcgtagtcattcggcggtggtcgtggctatatacaaggggaggggccactggcaggaaaggatgcgtggtgctcccctagtgggcggggtctatggagaaagcggtgcgatgcagaaggaggcgtggctagtagcaaaaaaaatggttttaagggggcggagcaagggcctgggaagttagtttgaggcggggcccgcagggggcggggtctgcaggaggtgtggtcaggtaactgggctgagttcccactaggtgtggtctgggaaggctggggcggtggc

SEQ ID NO: 34502 - DNA, 1273 bp, Artificial sequence
  DNA replication origin
gctgggcgtggtgatgcatgcccgtaatctcagctacttgggaagctgagacaggagaatcgcttgaacccaggaggcagaggttgtggtgagctgatcacaccactgcactctagcctgggcaacgagagtgaaactccgtctcaaaagaaaaaaaaagaagaaagaagcctggcgcggtggctcacgcctgtaatcccagcactttgggaggctgaggcgggcggatcatgagatcgggagatcgagaccacgatgaaaccctgtctctactaaaaatacaaaaaattagccagacgcggtggcggacgcctgtagtcccagctactcaggaggctgaggcaggagaatggcgtgaacccgggaagcggagcttgcagtgaactgagattgcgccaccgcactccagcctgggtgacagagtgagactccgtctcaaaaaaaaaaaaagaagaaagaaacaaagagagaaagaaaggaaagaaagaaaggaaggaaggaaggaaggaaggaaggaaggaagaaaggaagggagggaaagagggagagaaaggaaggaaggaaaaaaataacttaaaaaatcagatttgttggacaaagatcagggcttaacctagggaggtgggtagagctaatggaatgcggaaaaggctgtgatttgaaatgaggggatttaggaagacctcatgagaaggtagcatttgagcaaagacatgtaggggtgagggagctagccatgaagttgcttaaggtggaggacacagcccgtgcaaaggccctggggcagggccgtatgttcctggcatgttggaggaagagcgaagaggcccgtgtggctggagcacagtgaagagggggagagagggagtggggagggcagggagggaactgggcaattcaagcagggttttgtgggccttggggaggacttgggcttgtccctggaggaaagtgggagccatagagagttgtgggcagaagaagggtgtgccctgactcagatgctcacaggcaacctctggtggtggctgcagggaggacagactgtggggtacgggggctggagtcagaagaccagctgagtgatgacggggctggaccagacagaggagggggtgagaagtgggtgaattctgggtatatttcagagtgtcactgccgccgtctgcatatggaggaagctcacccatctcatagtctagctggcctgactcccccagccccccaactccccatgcccaggcctgtgtcgagtgggcggaagaaagagatg

SEQ ID NO: 34503 - DNA, 1745 bp, Artificial sequence
  DNA replication origin
actcaggaggctgaggcaggagaattgcttgaacctaggaagcagacgttgcagtgagccgagatcatgcccctgcactccagcctgggtgacagagtgagacgccgtaaataaataaacaaataaataaaaaagacagattagtggatggatggatccatggatagatgggtgggtggataggtgaatgggtgggtgggtggatgggtggatacatggatggaaaagtagatggatggatagactgatagatggataaatgagtggatggatggatggatggatggatgagtggatggacggatgagtgggtgaatgagtgggtggttgaatggatggatggatggatggatggatggatggatgagaggatggatggatagatgagtggatggatgaatggatgaatggatggatggatgggtgggtggatgggtgggtggatggatggatggatggatggatggatggatggatggatagatgggtgggtggatgggtagatggatggatggatggatggatggatggatagatgagtggatggatgaatggatgagcagatggatggatggatggatggatggatggatggatggatgagtggatagatgaatggatgagcagatggatggatggatggatggatagatgagtggatggataaatggatgagcagatggatggaggagtggatggatggatggatggatggatggatggatgggtggatagatgagcagatggatgaatggatgagcagatggatggatggatggatggatggatggatggatggatggatggataaatggatggatggatgggtagatggatggataattggagggatagatgagtggatgaatgagtggatgggtggatgaacggatggatgaatatgttctttccaccctcttcccaagaaacaactgagaaaaaagagaaggactccgaagagaaatgacagaaactgggaagaattctcattccagcctgcacacctttatttatgccatttcctccacaggagcacctttcctttttccctctaccctttcacatcccatggggcattcacagctctgcttcaatctgtggacagttaggcacccagaaacccagagaggttgttcctgtggcagcttcctctggcttcttgtcaagacctcttaccttccctcacacgtccccactacataccagacacacggccgggcttcaaagggcaacaaaatgggtaggggcaggaatgtgccccctcgaagagggaaagggtctgggtacaccgatgcccagcctggagcctgatacagctgggcacaggaagccagaacaatgagaaaaactcctatttactcttcaaaaccccagcacaaatgtcccctcttgcataaagcctgaccccatctgggttcccgttgttccctgttacagaggattaggactgtatttggagtgcagctgctctcccagggattagcatcatgcaccctcgtccttcatccaaaaactagctttagctaagacatacacaagaatggaagttcatccttaagtctatccactttcccattagctgctattgaagcatcacagagagcttgactccctgccaggtctaacagatggggcctaacagatcccatgactacttcctcatgccctagaaaccagaagattaagcaaatgtaggcaaagctgggatgggctgtggccagaggatggatgcttaggttggtggg

SEQ ID NO: 34504 - DNA, 1410 bp, Artificial sequence
  DNA replication origin
atatatactttgtatatatttatatattttctatttatgtatatgtttaatatatttatatatttttgattttgtatttattttgtttgtttttggttttttgactgctcctgcaggcagtgtcctatattttatatatattttttaatatatatatacgtcagactcatatttatatatacatatgtaagtcagagaaactcagagacggagacagtcacagaaaggaaaagcgatgggagcaggaaatcctcagctgcccagagcggccggacaggtggacgtgcacctgccggcccagctcccgcgcatgcgcccggcaggcgctgggtgggaggcgcccacctgctggatggagcccagcgtgtcagtgtacttctcctccgtctgctggatctcccgcaggcagcagcagcgcttgtcatactctgtcatcttgggctgagagcgaggggagaggccggtgttggggggcctggggctgccccccgcccacgccctccccaggcccgaccctccacgtcacgcaccggcatggacacgggctccgagcgcatgaggtcctcatagatctcgtcgccttccgcctcctcattctccacgcagtcatacaggtcctcatcctcctccaccgtgtcgctgtgggttgtgaggtcagggatcccttggacctctcccagatcacagcagggtccccgcagaccccagcgcagggctttgtccccccaagactccaagggtgggacctcagactccaagggcaggccatgtccctccaagctccagggcagggccatgtcccccaagaccccaggacagtgccatgtcccccaagaccccagggcagggctgtgtctccccagactctcaggcaaggttgtgtgccccagacaccagggtatgaccttatttcccggagggcaaggccatgtccccccacaccctccacccccaggacggtgctccagtgagctgtgcggccacaggcctgagcactcactcgatctggtcggacaggccactgtagatgtcttcatcacctacactctcctcctcggtggggaagggcctggggggtcaggagggtgtgagccaggggcctgggggctgggtagaagtggggcttcagggagggggaggactggggctaaatggcccaaggcccaggtggttactcacatgatccccctgttctgggcgatcggggtccaggacagagcagacagggtgtagatgacctgtgacggggcagtggccactcagtgagccccttgtacacccccacggcagaacacagcttccagctgcaaggctctgtctgaggcgctagatcccatgcctcttggaagcctaattcaggattttctctacctcctattccccataccatcgttctctcaaatgagcccc

SEQ ID NO: 34505 - DNA, 2013 bp, Artificial sequence
  DNA replication origin
tcagtttccccattgttctctgattccccaggaatgttctcagagagccaacaacgggaggttcaccctgcgggacctgctgatggtgcctatgcagcgagttctcaaatatcacctccttctccaggtgccaggcacatctctaggcgtgggctccacgtacctactctcctgtgtctataaaagtggggacggggctggcttctgggggttgggtctctaggacgctcggggatgggtcactggggtcatgtctcagcctccagggtcagcagtacgatggaggagctggtgagctagcattgtttggaaggccctccccgcagggagaaggggaggggcccaggtgacgtctgacgtcttggttctctcaggagctggtgaaacacacgcaggaggcgatggagaaggagaacctgcggctggccctggatgccatgagggtgagtgggtgtagggtgctggtgactcacctgctgcagacaccctcctggtaggggctgatcctctagccgggattaggtaggagcctgggtcggctgttggggggccaggttcacccctgccccctccccaggacctggctcagtgcgtgaacgaggtcaagcgagacaacgagacactgcgacagatcaccaatttccagctgtccattgagaacctggtgaggcggtggagccgggtgggccaggggtgtggccacgtggggagagtgtgtgtctggctcctttcttgggagacccttgctagaccccctgcctactgcataggaccagtctctggctcactatggccggcccaagatcgacggggaactcaagatcacctcggtggaacggcgctccaagatggacaggtgggtggagtcaacatggatctgggatggagcctgggcaaaggggtgggaccaggctcctagatgggcaggtgggtggagtcaacacagatctgggtggagcctgggcaggggcggggccgggcttctagatggacaggtgggtggagtcgacatagatctggagcagagcctgggcaggggcagagccaggcttctagataggcagatgggtggagtcaacacagatctgggaggagcctgggcagggatggtgccaggctcctagatgagcaggtgggtggagtcaacacagatctgggtggagcctgggcaaggtgggggccaggctcctagatgggtaggtgagtggagcaaaccatatctgtggtggagcctgggtagggatggggccaggtttctagataggcagttgggtggagtcaacataggtctggggaagagcctggataggggcgtggccaggctcctagatggacaggtgggtggagccaacacagatctggggtggagcctgggtaggggtggggccaggttcttatgtagacttgtaggtggaattaagatgaatttggggagggacctgagtgggggtgaggcaagatttctagacagacaggtggtagacccatccagagaaggcggtggagccttgatggacaggcaggacagggccagcgaggggtatgggtggagcgaagactgacaggcagtagggccaatgcggatcacgtgggtgaagtcaggatggacaggtgggcatggccaagttggccaaggaggaggagaagggcagggtgggaccaggatgtggaggaactggtcagagggctgatggggacagttgggaagagccagacaggaatgcgttatccatccttccaggtatgccttcctgctcgacaaagctctactcatctgtaagcgcaggggagactcctatgacctcaaggactttgtaaacctgcacagcttccaggttcgggatgactcttcaggagaccgagacaacaagaaggtggggctttgacgccggaactatggggtcctccacgcagtcggcagcttagccctctccacttgggcatgtgcctgtttgccagactacatctacatggaagtgtgtgttaatccactcaacaggtgttttttgtttg

SEQ ID NO: 34506 - DNA, 1501 bp, Artificial sequence
  DNA replication origin
tggctcaccgcaacctccacctcccaggttcaagcaattctcctgcctcagcctcccaagcagctgggattacaggcacttaccatcaaacccagctaatttttgtatttttagtagagaacgggtttcaccatgttggccaggcaggtctcgaactcctgacctcaagtgatccacccacctcattatcccaaagtgttgggattacaggcgtgagccaccgcacccggccacaaaattactttaaaaactcttcttgggaggtctatactcctgctttgatatattcatgctgctttgatctctgagtttggaatctgttggggctgcctgtgtgtttatgtgacagttctccctccatgcttcacgcacagttacttgctggccatacactgtcagatggctttagaatttggtgcacaggcaaacctgggtttgaatcccaaatctacaactactagttaagtggccctgaggttgtgactttacctccaagcctctcgtctgcaaaacgtagctaagaaagagcacatattttacagtttcatgctgattcagtgagatgacccttcagacctgccggcacatggtaagtcctgaataaagctacctgtgaagagaagtgggaaggatgatgatggtggtagtggtggtggtggtcgtggtggatgtgatagtagtggtcatgatggtgatggtagtgatgggagtggagatcataatgatggtggaggtagtgatgaaggtggcagtggtggtgatggtactgacagtggttatgatggtggacatgatagtaatggtgatagtgatggtggcaaaagtggtggtgatggtgatggtggtgacagtgatggtggtgatggtgatggtggtgacagtgatggtggcaagggtgatggtagtaatcagggtgatggtggtgatggtgtcaatggtgatggtggtggtaataatggtgatggtagtgataggaatggtggcaatggtgatggtggtactaatggtgatggtggtaatggtgatagtggtgatggtgatgatgatggtcttggtggtggtgatgccagtggtagtaacggtgatggtggtgacgatgacgatagtgatggtggtgctgatagtgacggtgatgacagtggtggtgatggcagtgatggtaatagcgaagagggactgcatggttgtggtgatggtggcaaggatggtggaagtgacagtaatgctgatgctgatgatggtgatgaaagcggtcatggagatctctcatgtcccttccctggtgccaattgtaatcacaactttgcatgctaaggactgaccttttacccagtggtaatgagaattaacgagggtcctgtgaagtccccacaggaacacagtagtggcctaagaagacccatcccatggaaccccctattcccaagcaggcagctgcacatcatgcactggaatcctcttgcaagtcaaattttgctgcagatgcttctctcaccccttc

SEQ ID NO: 34507 - DNA, 1445 bp, Artificial sequence
  DNA replication origin
gcttaactgagcgcacagcccgaggcctcaggggcggaaacccggctcccgggagggacgcaggcccgcggctggggcccctctctggactcggactcacggaatgaagcacctctcgcggagaccgaaagattctcccagacgctgcaagcgcggctcttctcacaagacacaagcgcgcttccgcttccggtctccggctagccacactgcacctccgcttccggctccagctggtcccagcccaaaatgcggcgtgtcaggacccccgggttcaggctgcaggtgcagcagccgcgcaccccagcctccggctgaggtgttctagtttgcttagttattaatagaaccaggttgggccctggctagggacagccgcggaggcagggtcgtcctggcgcgggtctgtggcagggttgggggcggaactagctcttgagcggggctgtgggcggtaccaggcctggaggcgggcctgagtgttgacggggaccagttccgggggcggggaccaactctggagcggggctgtgggcggtaccaggcctggaggcagggctgagtgtgggtggagatcagctccgggggtggggagaagttctggggcgggaccgtgggcggtaccaggcatgggggcggggctgtcaggacagagactaagttccggggcgaggttgtgggcgggcattaggtttgatgggcggatcttgctgtgggttaataccaggtttggtgggcgagtatgtggacaagataaggcagtggtggggcatggaatggggttgagctagtaggctgagaggacaagacttggtggaggtcagtttttgggtgtagggctttttgtggattttaaaactgttcaggtagcaggatgcaaaatgaactctttaaagttttcttcagtcatttctccacattcaccgcctgttaaaatgatatagccacacatttagggcgtgtgtgtgtgtgtgtgtgtgtgtggcttttcgtttgtttgttttgagacagggtctcactctgtggcccaggctggagtgcagtggtgcaatcatagctcactgcagcctcgacctcctgagctcaagccatccttccacccgggcctcccacactaccaagcctgactatttttgtatttgtttgtagagaggaggtctgtgttgcccaggatggtctagaactcatggcctcaagtcataccccacttcggcctcccaaagtgctgagattacaggtgtgagccacaccacacccagcctttttgtgtgattttgagcttcctaatttctttcaaaaatgggatcatgtatgcatatttctcccatccagagggggacgaggggagggaggactagggagggatgtctccaagtgaaagccaaagctgattaattgtctagtgcacatctggatctactgaaaagagaactacatttctggtg

SEQ ID NO: 34508 - DNA, 982 bp, Artificial sequence
  DNA replication origin
acatctgagctgggtgaggtggaaaccaggaggagggggtggtcaaggcagatcacaggctggagagggggtgaccgaggcagggcacgggctggaggggggtgaccgaggcagggcacggactggagggggggtgtgaccgaggcagggcacgggctggagagggggtgaccgaggcagggcacgggcaggagggggggtgaccgaggcagggcacgggcaggagacggggtgaccgaggcagggcacgggcaggagacggggtgaccgacgcagggcacgggctggagggggtgaccgaggcagagtgttccccccatttcttccagggtgctgtcctgagagcgctgcgggataaaggaggagcgtcctgcttcccggctgccctgttgctgtcggagtcacaggatggcggctgtcgtcctgcccccaactgccggtgagtcatggggtcctggcagttctcagagtccaggcttgaaaggtcctgacccacagcatgggatgggagggggttgggcagagcaggtgaggcaggagtggagccccaggggcccagaggtcctccgtgtctgatcgggcggctcttgggacttgggacttaggcatttgggtgtctgtggatgtcacctgtgtggtgaatgtgctggagcttttgaattctcccttcagttctttctgtgaacctgataaaaacacagtgacgccctcggaacttcagtttcctcatctgtgaagtgggaataatcccttccccaagtgcagtcagaccttaagccctgtttcctggcgtggatgcggcagggccatgctctggtttccttggattgctgtgggttggtgtttgcttggagtagaggtggatgctttgtgggtgactgtgtatgcatggggacctggtcgatcgcaggcaggtggggaagcctccagatgtgtgagtggacacagggcaggtgtggattcctggtactcatttctcctc

SEQ ID NO: 34509 - DNA, 1163 bp, Artificial sequence
  DNA replication origin
actgaagcggcgaaatcggagaaaactgaagccgggcggagaaagccgaactgaacgaactgagccgaggagcggcggagaagccaaggctgggcgaggggagccaaagacgggtggtgggagccgaggtcggccgagaggaaccggaaaagccaaggccaatgggaggagccgaggccaggcgggaggagccgagcagggccgaaaagcagcgggaagggcggcggagaagccgagccatggccaggacggagggaggggaagtttcaggtcggagacagagagggacaggcagcgccatggtaggacgccaggcgaggacggatggggaagccgaagctgggcggaaagagccgaagccaggcgcgaaggaagccgaagctgggcgggggaagccgaggctcggcggaagagccgaggccgggcgggaggatccgagctggaccgaaaagcggtggcactggcgccaagcgcgggaggtcgcggggcagagagggcgaagggagggtagcacctggggtgagggcgggcgggagagtcgagctgggcagaaagagcggaagccgagagcaagtgcggggttgagggcgggcgaaccgaggcagggccctggaagccgaggtccagcgggtggcggagagggtaaccgaggctgcgtgggaggagccgaggtcgggtgggagaagtcgaagccccggtcgaaggagctgatgccaagtgggaggagccagtgccgggtgggaggagctaagcgggcgaaaagcgctgaggttgagccgggacccatcttcttgggagcaggggaagggaggtcaggggactgcagtggggaaggggccgtggatggttgagcccgaagctgtcaacatggccagagtcatctgcagggcctcaaactgcctctgcaaaaattaataacagtgagaaaattatgacagtgaaagacacctgacccactccatctcgcctttaacctccaaactctcctcggtcattcctaggtgtgggccaagctaaccttgggagaaatttagttacagtttaaataacaatagcctttcctaaaactaaaccgccttataaaaataagagatcaccaagttatgattagagcagggcctgaattctgctcagatgtagacttcgttaaggattaccagccc

SEQ ID NO: 34510 - DNA, 1524 bp, Artificial sequence
  DNA replication origin
tgtttgcctcccttttaaagttcaaattagtttgggtttttcttaattaagaaggtatgtgataaaaaacaaaacagaaaatacagaaaccaccattaaatgattcgatagctccacatatgttaataacattttgttacattctttccaaagcttaaaactttccgaagtttaaaaaaaacttaaaaaaaaaaagtttaaaaacctttccaaagtttaaaaaaaaaatactcaagatttatgattccaaaaattactgctttccagaaatttccaaacggaacagttgcgtcatgggcctgctggtacattgaccacagggccccgcggctctccctataagtgtgagttttataaactccttaaagtaatttattttgtttccattcaaggcctttctctcccacactggccccagaccctgacctcagaggttcgagtccccggagccaaattcctctagttggaatctagtaaatgatttaatggcaaaggggcaggggttgggggcagccaaggaggtgaacttttgacagcttcgtggtcagcagcgacgaccgcaggagcgcgtgtccttgaagcggggaagcgccccttttccttgcctgacaataccgccccacacgcgatgacgcctttggaatagaactgcgcagctctttggagacatacggcgcatatagaggctagaaagggaacagagtaccagagggccttcccgcttcgggagccgcaggcttcttctcttcggagagagagtgagtgagtgagtaagcgagtgagtgagtgagtggggagggagtgagtccgtccacgggggcgggccctctccatgctgcggatctcttaggagatatactgcgcacgcagaggcccggaaggaggcggggtcccaggggtctcctcgctagagcagccccaggattggcaggttccagagtgggagtgggggtgtgtgtgtgtgtgtgtgtgtgtgtgtgtcaggttccagagtgggagtgtgtgtgtttgggtgtgtgtgtgtgtgtgtgtgtcagattccagagtgggagtgtgtgtgtgtttggcaggttccagagtgggagtgtgtgtgtgtgtttggcaggttccagagtgggagtgtgtgtgtgtgtttggcaggttccagagtgggagtgtgtgtgtgtgtgtgattggcaggttccagagtgggagtgtgtgtgtgtgtgtgtgtgtgtccccaggattggtcggttccagagtgggagagagagcgagagagagagagaacgagagagagagagagagaacgagagagagtgtgtgcgcgtgtgtgtctgtgcagccccaggattggtcggttccagagtgagagtgtgtgtgtgtgtgtgtgtgtgtgtgtgtccccatggtgggagtgtgtgtgtgtccccatggtgggagtgtgtgtgtgtccatggtgggcgagcgtgtgtgtgtgtccatgatgggcgtgtgtgtgtgtctgcgtgtgtgcccgtgtctgcgtgtgtgcccatgggggcg

SEQ ID NO: 34511 - DNA, 1468 bp, Artificial sequence
  DNA replication origin
cccccagcgcctcttgggtggccgcctcggagcatgacccccgcgggccagcgccgcgcgctctgatccgaggagaccccgcgctcccgcagccatggccaccgggggccggcggggggcggcggccgcgccgctgctggtggcggtggccgcgctgctactgggcgccgcgggccacctgtaccccggagagggtgagtctgggggcgcgggcgtgggcggggagcgccgcgatggggagaggaccccacccaagccaaaatcgagcccccgcttgtggactgagaaccctccccaggggcggggggcggtggccaggacggtagctcctgcatcgcgtagggggagcgggaagcctctgaccttggcctttgcccgcccgggctcgcgcctccgcgccctgcgtgcccgacctgagcccgaggaaccttgccccggtgcccgccccgccgcgggctcctctctggagcgcgcctccgacccgtgccccggcccctccgagcccaagtcgctccggagacacgacacgcgtcatctttgggtcgcggccgggaagtggggtcactgggtctggacagccccgaacagccaagtcccccgagcgcatatggtgtaggtagagccaagcgccctgagtgcctcaccggtgggtgacgctgcctggggtcagggactgcagagcccccctctacccaactaccttggatctaggcccgtggccaccccggactctaggtccatgtttacccttttgggttctgtttccagatgtccggaggcaaattctaaagccttagcaacagcagcaattgtagcagaagtagtggcggttttttaccctatttattgtaattggtatcaccgcacgccacagcctagtctatcttatctctctggactgtcacagtggcccccggaggcagatacagttatgcacccatttcacagaggagtaaactgaggctcatgtaggacgcataactcccttgccctaaagtcagtgccagagccaggacttgagcctctgtgtgtcccgttctgcccaagaatctggactactgtcccttgtctgctgtctccttgacccctcctctcccctcagccctgcgcttcatgaaggagcctttgaccttgagtgagcctttcgttccccctgaccccatgggcccctctcccacgtgtgggcagcatcttccttgggcttgacaataggcacctttggggttgtaagatgaagatggcgcaatcatttaaggaatatagcctgggtttcccactgtggggtctgaggccctgctttaaaaatatctgttgggttactgtttcagatttctccataaaaggaaatcagtcgtgatgaggaaggggtcagggagggaaggaattgaagctcttaaatgtattgatggggaaacgggtgcatgtaaaatcaggtgctagagtggaccaaccgggtttgctgagtcga

SEQ ID NO: 34512 - DNA, 1016 bp, Artificial sequence
  DNA replication origin
aggaaaaaaaaagaaagaaaagaaaaaaaaaaaacaaacaattgcaggtagtggggtaaacatgctatgaaaatgagagagaaggggccaggcgcagtggctcaggcctgtaatcccagcactttgggaggccaaggccggtggatcacctgaggtcaggagtttgagaccggccaggccaacatggtgaaatcctgtctctactaaaaatacagaaaattagctgggtgtgctggcgcatgcctgtaatccaagttacttgggaggttgaggcaggagaatcacttgaacccaggcaggtgatgttgcagtgaactgagatctggccattgcactccagcctgggcaacagagaaaaactccatctaaaaaaaaaaaaaaaaaaaaaaaaaaaaaaaaaaaaaaaaaaacagagagagagagagagagaaggaaacggaactggggggaggatttgcaaaaatatggttagggatggcacttcagagatgaagccatcctggagtgttacgggcaagggaaatgctggggcaaaggcccagaggcaggaataggtttggcctgttgcatgaacagtgggtccagctcctagcaaactgtttattgaatgaaagaagaatgaatgccttgggtctagggttgtgctgggcgctttcttaagttttctttcccgggtacctccccagaactggcatgcaggtattattaaacccattacacaagtgaaactggcccagagacagaaaagtccctggtccaagaccacacaggagtgaggggtggaggaaccctcctcccattgagttctggctttcctatactgaaagccccttcctctcctgcagtaaggtaggtggaaccgctgtcccgccttgttggtgaatgtcgttgctagacttcagacacatacaggctggtctgctgaaaatcagagatgtccacctgcgccctattcgaggtctccggcgtcttctttggcgtcgtctttgccctttcagaagcgtctgcacattttt

SEQ ID NO: 34513 - DNA, 995 bp, Artificial sequence
  DNA replication origin
aactcccgtgttagagtttctgacctcagctgcagtagggtgcctggtgaattacgtcttgcatttctgggacatccaattccctgaacatgctcccttcctctggaccatgaaggttggacttgaactgaaggctagtccacctggggacgcaaccctccagcttctgaactggggactctcaacaacatattgtgcatgttttgaagtgattgggtttggggaaatctttttttctaaaatagagactgggtcatgcgaggtttcccaggctgatctcaaagctcctggactcaagtgatcctccctcctcagactcccaaagtgttaggattacaggcatgagccgtcttgcctggccatggggagatcttctaggcctggctgaccagccaaccttggtgagagctgttctgctcgactcctggttactgttcaactgcctcccctgtggcaggacttggattagacaggcaacctcaagactggggtgtctgatggcaattgagaggttgctggtgctgggggaagcatctggcctatccacatctgccaaatagcacctgtgtggaagtggataggggagggtatggtatgtgtttcagactctgagcacctgtttgagggtatctgacagcatctgtattggggttatctagtatgtgtttgggggtatctgctggacctatgtggagtgtctgacatatttgggggttacctggaagcctgttttgggtatctgatggcacctgcctgggtgcctgtgtttaggggatctgatggtatctatgttggggtgtctgagaccactggagaggtatatgattcatttttcccagacccacctttctgaagtctatgctgcctctttttttgttgttgttattttgagacagagtcttgctctgttgtccaggctggagtgcagtggcatgattatagctcactgcagcctggacctcccaggctcaagtcatcctcccacctcagcctct

SEQ ID NO: 34514 - DNA, 1206 bp, Artificial sequence
  DNA replication origin
caccccagcacccgttcgcctgcctggagaagtcccccaggagccggcgggaggcccgaggcagccccgggggtcccgcgccccaggccaccccctgaagagaccgagggccccctcctgagccccgttttcctcgggaccgccccgccgccgtcctcacctcggcccgatcgcccgcaggccgctctccgccagctcctctgccactctcgcagccgcctccgatgcctccgtccggcccccccagatccacagtagctagcagctgggagccggaagcgggaagccgcgcgaggagagcagcgcatgcgcgatcccgcctcggaggcggggcagagggcgtgacccggaaggaggcgtgccctcgagggcggggcgctcccggggacctggggctgctgctccccgagccgtggtgagggggcgtcggctcggccttgagaggggcgcgggcaccgaagtgggagggtgctcgcggcgagggtgagggcgacttttgaggggcgggtcagcggggttggggggctttttgaaggagagcaatgcgagcctggctgtcagtagggccgggggctctgaggggacagctgggttgcggggatccagagggagagcagcagggttaggtgggcgttttgtggggttaacggaagcctgggtgattagcgcggctggggagggagtcctgaggaggacagcggtttggagaatctcaaggggggtacagcacagttagggggaccctgagggaggacagcggggttgggggaccccaagggaggacagcggggttggggggaccccgagggaggacagcggagttgggggaccccgagggaggatagcggggttaaggggaccccaagggaggacagtggagctgggggtgttttggaagaatcaacggatgcctggaggggttgtcagtgggctcctacgggctcgttaggattggaagtacctaaggggggcactcccagtggtggggagtcctagcggggagagtccaagaaatggagagggcagggtctgtcacctgagaaaaaagaagcagcatcagggagtggtggggggatcacttcatcccaggagttcaggaccaccagtctgggcaacatagcaagaccccatctctacaaaacattttttaaaatgagcagggcatggaggcgcctgcctgtggtcccaactcctccagaggctgag

SEQ ID NO: 34515 - DNA, 1430 bp, Artificial sequence
  DNA replication origin
tctgtgatgcaccttacacagattacttcatagaaaccccaaccaacccttattcccattttaaagatgggaagacggaaacttagtgaagttacacggctaacaggtggtggaactgggaccagaacccagctcggatctgacctcaagcctgtgctcctgacacttctttttttttttttttagacagtcttgctctgtcgccaggctggagtgcagtggcccgatcgcggctcactgcaacttctgcctcccgagttcaagtgattcccctgcctcagcctccagagtagctggaactacaggcgcccgctaccatgcccggctaatttttgtattttagtagagatggggtttcaccatgttggccaggatggtctcgatctcctgacctcgtgatccacccaccttggcctcccaaagtgctgggattacaggcttgagccaccgcgcccagcctctcctgacacctcttacagctggaggattaatcattcactcagacacctgcaaaactcatcccttggccactgggctgtctatactgtcctgaactctctctctggtcaatgggaagagaatggggcccttcaaagctactggctggagcttcatctccgcgaaaacaaggcaaaggggaaaaggtgtgttggccgcttcgcttccgtggtaaaactttaagaatgttttttaatcctgtggtccaggctttaatctcaacagagcaagagataaggggcagatagccacagcaaaacactcaagtgctagtagaattaacgcaggaaaagaaaaccaaatactgcactttcccacttgtaagtggagctaaaccttgggtactcatggacaccaagaagacaacagaaactgggctctactagagcgggaagggaaggaggaggtcaagggttgaaactatctattgagtactatgctcagtacctgggtgacgagatcagtcacaccccaaacctcagcatcacgcaatatatccaggtaacaaacctgtacatgtaccccctcaatctcaaataaaagttgaaatttaaaaacgtaaaacaaaacgaaacatgtaaggaccaggggaaagcttctcgttcccgtccgcaatgaaagcaccaactgagttcttatacaagaaactaaaacccatggcacagatagttctcacggttttgcacccaaacgctccctgccagggagggctgtctgctccggggtgtgagggttctcccgggaggcctgaaatacgacggtgctgggtattgtggtgggttccattccatccctggtcctgccccgggcgctcctgaacgaggagcagaggctggggcccaagtgacccctcctctcctctcctggaggagagtaagccgtagcaccccaggactggctggggctcggacggagcgggcgggcatcgtctg

SEQ ID NO: 34516 - DNA, 1156 bp, Artificial sequence
  DNA replication origin
gacaccttcccaagtgactgcaacacaccctacgcaactcagtgctcaagacggcaggtctggagtgtgtgggagaatcctccgtgaggtttaggctagggtggcctgatggagaaaaggaaacccttcaagagaaaagggttttgagggagggtgggtttcagggcaagactagggtggtgcctgtcctgcagcaggcaagggtagggagagaggggtccttctgagacaggctggaggccgggagttcccttcacagtgggatgggctgcccaggctgtggtgaaggagctgcaggtgcacctggggtgtggggggactaagtgtgggtacatctgggttgtaggggctgagtgtgggtgcatctgggtgcagggggcaagtgtgggcgcatctggggtgcgggggccaagtgtgggcacacccgggtgtgggggccaagtgtgggcacacccaggtgcgggggccgagtgtgggcacacctggggtgcggaggccgagtgtgggtacatcggggtacagaggccgagtgtgggtacatcggggtacagaggccgagtgtgggtacatctggggtacagaggctgagggtgggtacatctggggtacagaggccgagtgtgggtacatctggggtacagaggccaagtgtgggtacatcagggtacagaggccgagtgtgggtacatctggggtacagaggccgagtgtgggtacatctggggtacagaggccgagtgcgggtgcacctggggtgaggggctgctggggggctggagagcagacacacctgcaatgcagaaatgaagggagaggcccttccattccctggtgcttactgaacaggcgccaggtggactagcagatgtctgaaaggaaagactctccaggaaacaagtatttgtggaaactcaaaagagccgtcaatgagtgccaccttcacctcctctcctccctctctcccccttgaatccacaccgacaactccatcagccacatgggccggggcagagagggcaggtgtgctaggaacagacatcgcagccacgctgcccgggctcaaacccccacctccgagatccagagccagggacctaactgcaccctgcctccatttcccccatctgtaggatggggataatcgtagtgcctgctg

SEQ ID NO: 34517 - DNA, 714 bp, Artificial sequence
  DNA replication origin
agcgtgagtgtgggggctgagtgtgggtgcacctggggtgcaggggccgagtgtgggtgtggaggccgagtgtgggcgcacctggggtatgagggccgagtgtgagtacacctggggtacagaggccgagtgtgggtgtatctggggtacagagcccaagtgtgggtgcaccccaggtgcttccactccaggcagctttctatggtggagggtgtgtattcaaaacacagatgaagaagaggtaagggccacctgcatgggcttggggttcagaagtctgtcctggggaaaagtgccctgcccgacaccttcccaagtgactgcaacacaccctacgcaactcagtgctcaagacggcaggtctggagtgtgtgggagaatcctccgtgaggtttaggctagggtggcctgatggagaaaaggaaacccttcaagagaaaagggttttgagggagggtgggtttcagggcaagactagggtggtgcctgtcctgcagcaggcaagggtagggagagaggggtccttctgagacaggctggaggccgggagttcccttcacagtgggatgggctgcccaggctgtggtgaaggagctgcaggtgcacctggggtgtggggggactaagtgtgggtacatctgggttgtaggggctgagtgtgggtgcatctgggtgcagggggcaagtgtgggcgcatctggggtgcgggggcca

SEQ ID NO: 34518 - DNA, 909 bp, Artificial sequence
  DNA replication origin
cctgtagtctcagctactcgggaggctgaggcagtaggattgcttgagcccaggagttcaaggctgcagtgagctatgattgtgccactgcactccagcctgggtgacagagcgggaccttctcgaaaagaagaggggaggagaagggaggagaggggaagggaggggaggggaggggagaagagaagagagaagagaggagagaagaggagaggggaagggaagggaggggaggggaggggaggggaggagagaggagaggagaggagcttagagaagagaaatagaaatctgatttgtcagatcaggtgcagtggctcatgcctgtaatcccagcactttggaaggccgacgcgggtggatcacctgaggtcaggattttgagaccagcctggccaacatgatgaaaccccatctctactaaaaatacaaaattagctgggcatggtggcgggcacctgtaatcccagctactcgggaggctgaggcaggagaatcgcttgaacccgggaggcagaggttgccgtgagctgacatcatgccaccgcactccagcctgaacaacaaagtgagactccatctcacaaaaaaaaagaaaaaaaaaagaaatctgatctgtcctgtggcctcctggctcctaggtcccgatacaccattgccttgtctatgttacaggaagagagcagctagaagtctctttcttgggaacacggagttataaaccatggggtgggcagagcttaccctagggaaaacgtactcgcagcagctctcctgggagaggattcagcattctctgagcaactttttttttttttttttgagacggatttccgcttttgttgcccaggctggagtgcaatggcgtgatctcagctcaccgcaacctctgcctcccaggttcaagcg

SEQ ID NO: 34519 - DNA, 1305 bp, Artificial sequence
  DNA replication origin
catctgatctagattaattatcatcatgtgcgaggttttggcatgaagcacgccaggctcaccgtttcatgatcttagactatttacagcaaactcaaacagctcacttgctttttacaccctgcaaagaccaagggagagcctggaggggttgttttttttttctgttttattctatcaaagcagcaaatactgcaatttccacagtaaatggtcacagtggggaccaatatcctgccctccagacccgctgcttcagccaatacagcaagggaagacgcagctctgttttctagaaggatcccaccgaggcataaaaacggcgcagcccagcctggcgccgcgccgggtcccggagccccgggcgcgaacatggggaatgcgcactccaaaagcggggacaggcacagcgcgctccccggccgccccgagctgtctttttacggctctttccccaggaaatggagcgagaacgtcttcttggataacgagctgctgacctccaagatcctgtctgtgctgcggccgcagtcggagcggggcttccgcgccggggacctccgctacccgacccactttctcagcaccaactctgtccttgcctctgtcacagcctcgctcaaggagcacccccggggcaccctcctgtccgatggcagcccggccctgtccaggaatgtcggtatgacggtctctcagaaagggggtccccagccaacaccgagcccggctggccctgggacgcaactcgggtaagccagggtcccctctgtgccctcgggtgggtggtggcattccccggggagctgttgacagcctcttcggagggagaccccgacttagatctgtgtgaatccacacggcagcccccgtgctaagcagagaaattcccattaacgcttgcttccaggatccacgccttttttgcaaaaacgatgtgtcccggggtgtattcggcccctggtggagccagtttgcttagtgccctcgagggatccttggactcgctccttaggccgggctcctgacttactcaaggcgatgctcaaagtcctgctgggtgtgtggaggcggcgtcccattatctgtgccttacctcgttttataggacttcaaagtggttcccttgataatgcctgcagcggtgtccgggtagaaagtgatgctagaagctgatatgtttgtggtgactattccatgagttcgtgggaaagggagtaaattatcattttcctctgagtaaggactgccctcccaccttgaccatgaaaccatttccacttaactcctggtagacaggatccc

SEQ ID NO: 34520 - DNA, 968 bp, Artificial sequence
  DNA replication origin
aaaccccatctctactaaaaacacaaaaattagtggggcgtggtggcgggtgcctatagtcccagctactcgggaggctgagggaggagaatctcttggacctgataggcagagcttgcagtaagccgagatcacgccactgcattccagcctggtgacagagcgaggctctgtttaaaaaaaaaaaagaagataaaataaaaaaaaatacagacagtgaaagggaagaagggagcttgccgcaggctacagggcaccaggaattgttcttgacaaagtgctcactgagcgcgggcgaaccttaataccacacctcgagaggagccagacccaaaaggccgcgcggtgtgactccatttatgtggaatgtccagggcaggccaatctacagggacaggaagtagattcctgttgccagggttggggcatggggtggggagtgactgttaagggggacggggcttctttctggggtggtgggatgttctaaagttaacatgattctggctgcataattggaaatgcactgaaatgcccctgaaccccacgcttgggagggtgagtgctgtggtgtgtgaattacatctcaatcgtgtaattaaacagggaggaggaagctctggaaggaggctgtggggaccctgtgctattccttcgtatgggactgggatgccctgttgagctcctggctgcacgaggatggggtggtggtggcgtgtgtggctgtgtggtcggctctggaaggggctcaggtcctctgggctctcctccctccctctcccacatacccccaaagggctaagtgacctctggagatcgctatgtcatggcacagcccgttctaatgcttcacagagctgcaggacatggcacagcccacgggaaaacaccgggtcacctggggggcagttcaccctctgtggccagtcctgatggagggcccagggctcaccacacaaggggtgtgc

SEQ ID NO: 34521 - DNA, 1802 bp, Artificial sequence
  DNA replication origin
cggtgttctgcttcttgaggcggcgcagcagctccaggcgctcccgctcgcgctccacggcacgctgggcctcgcgcagccgctccaggtcgtgctggtaggcctggcgctggcgctccagctcggcccgctcctgctccagccgctcgcgtagctgccgcgcctcgccctcgcgctcctgcagccgcgcgcccgcacgctccagctcctggtgctgccactggcgctcgcgctcccagcgctgctgctcgtgccgcagctggctctgcagcttctccagggccgcgcgctcctcccgctgcttctcgaagttgcgttgccgctcctgctccagcagcaggttcccacgcgtcgactgcagccggaactgcttctcccgctcctggatggcagcccgctgcgtctccacatagctgtcctggtgggcgattaccgcctgcggagggccagggccaggcgagtgagagccgcacctgcgccccagccaaccaggaaagggcacgcgtggccggccccaccccgcccctgtacctgaaggttcaggagcagctgggacagtgtctggatccgctggacaagctgcggagaggagagggagattgatgctagttatcgggctgaggccacacgcgcgtgcacaaggccctggggagatggagacccgcgggcgcctacctccgactccaggacggtgggcagacggggatcggattccgtgcctggcgcctccacctgggaagaggacaccgtcaaaccagagagagtggctcaagacccatccgactagactcaagccttcttcttcttcttctttttttttaacttttttttttttttttttttttgagacggaattctgctcttgttgcccaagctggagtgcagtggcgcgatcttggctcactgcaccctccagctcccgggttcaagcaattctcctgcctcaacctcccgagtaattgggattataggctcaagcctccacgcctggctaattttgtgtatttttagtagaaacggagtttcaccatgttggccaggctggttgcaaactcctgacctcaggtgatccgcccgcctcggcctcccaaagtgctgggattacaggcatgagccaccatgcctggcttcttttttttttttttgagacagggccttgctctagagtgtagtggcctgatcctcccacctcggcctcctgagtagctgggactacaggtgtgcaccaccaggatcagctatttttaattttttttttttttttttttgagatggagttttgctcgttgcccaggctggagtgcaatggcacgatctcagctcactgaaaccaccaccttcctggttcaagtgattctcctgcctcagcctcccaaatagctgggattactcgaatgtgccaccacgcctggctaattttgtatatttggtagaggcggggtttcaccatgttggtcaggctggtctcgaattcctgacctcaggtgatccacctgccttggcttcccaaagtgctgggattacaggcgtgagccaccacacccagcagctatttttaacttttttgaaacaaagtcttgcttggtcgcccaggctagagtgcagtggtgcaatctcggctcactgcaacctccacctcctaggttcaagcgattctcccaccttagcctcctgagtagctgggattacaggtatccaccaccacgtccagctaatttttatatttttagtagagacagggtttcaccatgttggccaggctggtctcaaaccctggactcaagtgatcacccgagtcggcc

SEQ ID NO: 34522 - DNA, 1730 bp, Artificial sequence
  DNA replication origin
gctcctgaaccttcaggtacaggggcggggtggggccggccacgcgtgccctttcctggttggctggggcgcaggtgcggctctcactcgcctggccctggccctccgcaggcggtaatcgcccaccaggacagctatgtggagacgcagcgggctgccatccaggagcgggagaagcagttccggctgcagtcgacgcgtgggaacctgctgctggagcaggagcggcaacgcaacttcgagaagcagcgggaggagcgcgcggccctggagaagctgcagagccagctgcggcacgagcagcagcgctgggagcgcgagcgccagtggcagcaccaggagctggagcgtgcgggcgcgcggctgcaggagcgcgagggcgaggcgcggcagctacgcgagcggctggagcaggagcgggccgagctggagcgccagcgccaggcctaccagcacgacctggagcggctgcgcgaggcccagcgtgccgtggagcgcgagcgggagcgcctggagctgctgcgccgcctcaagaagcagaacaccgcgccaggcgcgctgccgcccgacacactggccgaggtgagcgcgcagcagccagtgtgcgcaggttgggggtgaccggtttgcacgtgcatttgcacgagtgcatgcaggtgacagggttcgcgggtgcatgcgtgcaggagtgtaagagcaaacggcacaagatacccttgcattaacagctcatgccgcagtacagacctttctcggagctggctaaatgcttaacagaacgctgttgctcaaaacatgccataaatgttagaaacttcttaaaaaaaaaatgcactcctgtaatcccagcactttgggtggtggaggcaggcggattgcttgagggcaggagttccaggccagcctgggtaacatggcgaaactccatctctacaaaaaaatacaaaaatgagctaggcatggtggcatgcacctgtggtccccgctacttggaatgctgaggtgggaggatcacttgagcccgggagaatgaggctgccatgagccgtgatcacgccactgcactccagcctgggcaacagagtgagacatgagccgtgatcatgccactgcactccagcctgggcaacagagtgagaccccgtctcaaaaaaaaaaaaaaaatgaagctgggtgccatggtgtgcaccctagctactcgggaggctgaggccggaggattgcttgaggctaggtatttgagaccagcctgggccacgtagtgagacctcatctctaaaaaaaaaatgcaaaaattagcagggcgtggtggcacatacctgtaatccaaactacttgggaggctgaggcagggggatcatttgagcccaagaggctcaagagctatgattgtgccactgcattctagcctgggtgacagagcaagaccgtgtctctgaaaacaaatctataaaccatgggttctgtgaacagatgtggacacggatgtgtgagatgtttgtatatgagtgtgtgacagtatgggtgccactgagtgtcaccacaagtctgcacatttagcaggggttggggacgggcaatgaccagcagctccttcaggctgcacctggctctgtccagaacaggagaggtcgagggtctcctgtgcacgaccctcgggggctctccagaggccgcacagcaggaacctcacattggatgtatctgctgttgtcccctcaggcccagcc

SEQ ID NO: 34523 - DNA, 1833 bp, Artificial sequence
  DNA replication origin
acccacagaacctgactggagggccactgatgttccctcagtgggccctgccccgtggccctctctgcccatgcccccgtgcctggctcattccctgaccctgaggttcatggtgaacctgcgtggggctctgtttgggaagtggattctgcctgattctggggacagatgctgccgacgccacctggcccctcctggtgccctaacccttggctccactgtcgcgcggcggctgtggagcgtggccccggccggcagctccttctcaaagcaaggtctgtcctgtcctcagctccgtgcagagccggcaccgttcctcactgcctcggaaaaacagctcggagttgatctccccgccacccggatggggtgctatgatttcagacagctccctggtttagttctggctcaactttccattaaaaactttcctttttgaaaaaaaaaaaaagagattcagaaagtgaccccggcaccaccgctaaccctacagaaacagctgcaaggcccagagcaccgacaggctggcccctgccaggcggtcatcagtggtttgctagggaagaggaggggacagctgggtgggcatggtgaccccatgggggtccccagagagcaggaagggtgggcagggcagggaggggccttgcaccttgagtcacggcccttttagaagaagatgacgtcttctttgctggcgtcctccttggcgctgagtggtgtggccggcagtggcgagggagctgggggcccgggcaggagggctgtgcccccggccttgagagagaagccctcggaggggctgtcagctggcggtgggctcggggcggggaagccagggtctggaacagagagagggttcagactgagcagtcgccgggtggtgccgcagccccgctgccctgggactgggctcatgtcagggggtgggggctcacctggtgggggcgcaggactgtgtctgccgggcaggatagggctcagcgagcggcggttccgtgaggtgctctcatctttccccatgagcttgttgagcagcagctgctgcttcaggtcgaaggacgctggaagagagaaggtatttgggccagctccaggctggccagctgtccccacccgccagggcagcctccgagagcagaggggcctggccacccccacctgacacttcccacgggcggcctggatcccgtgacctgagctgctcagatgctaagccccagattcagggagaacggccccaacctccctgcggaaggacctgcagagtcacccggcatctggagaggaggctgagcctcctgtggaaatagcacaggccctagtgaccacgggacacacccttaatcttcagagaacatcccagaacatccctggttgtcccccagggaggtgtcccccagaggagctcctggacatcctccgtggaaacactggggctgctctgggctccgtgtcccactctgtggaacggctctgtggaactgggacaatgagcagaggcgcctgcacctgtccctgtcccggctgtgctgatcccacgtggccagggatctctgccttcttgcccgtgtccctttctaaggctcctggtccccatcccactgttttgagggttgaggtggagaagatgcagggtggatcatctcagttttgggcctggagaccaaacacggccctgtgtggggtggcctcagccacgatgccagctgtgccttctggttttcctctccagaggatggcacaggtgtcccgaatttcctggctcccagcgagccgctagagcctgaccagttgcaccttccaggcccaggcgaaggggtggggccggct

SEQ ID NO: 34524 - DNA, 1347 bp, Artificial sequence
  DNA replication origin
acgctccacagccgccgcgcgacagtggagccaagggttagggcaccaggaggggccaggtggcgtcggcagcatctgtccccagaatcaggcagaatccacttcccaaacagagccccacgcaggttcaccatgaacctcagggtcagggaatgagccaggcacgggggcatgggcagagagggccacggggcagggcccactgagggaacatcagtggccctccagtcaggttctgtgggtttggaagcccatcgtgaaaggggctgacctttgcccctttttacttggcattggttttgaaaccagctgtttcccaaactctgcttcccaagggcaaccgttgctgttcacacgctcagcctgtctgggggagcgggcctctagcttcagccagggcgggtacacaccctgggcacagggtcctcagcccccgggaaatgagctcccagggctggcgtcccaccttccaggtgggggctggcacatcacagactgtcgagagcgccatgtcccagggcatgcagaggatgcacctagagacgttgcagcaagtggacaagtggccgctgtgcgggcccctcgcttgtagtgagctgttgcagcttacggtccgttccctggaggggtggaggaaggaggtgttgggcagcatcaaaggtgctgggacatcccagggtggtgagatccatccacgatccagctccggtggagaaagggcccatgtcaagccttgttctgcaccccaagcattggtggtaggactgggtcctggctgatcgtccttgttcccagtggggtacatgtgagcccctgccagggccaagtccttctcccgaacccagggtcctgggaactgcagatcccggggggattcagcccttctcccactgtgctggcagaggcactcctgtgacgctgaatacagtgaacagggacattcccgccactcggggacagatgggcacaagggaggggaaactccatcaggaagtgctcccctgggcagaggcgcccactgggtgctgtgggctcaggagggggcggggcaggagctggtgccaaccgggaaccagagccccacagccatacagcccattggtgacaaggtcctgagaacacagtggccaggtgtccccaggctcctggcccctccgacgacctcaactctgcccagcccggtccctggccatcagcgacgctgtccgccccccgtcagatcccatgtgtgccatgtttatcatcagtgttttgtatttttgtactgagtatcggagcactttacagaagctgactgtacattcctgttctgttgtgaagagaacattcccagaccctggcaccctc

SEQ ID NO: 34525 - DNA, 2324 bp, Artificial sequence
  DNA replication origin
ttcgtgcttgggtcgggggggtgatggggactcagtctctgtggatggtcagggaggccacctcagtcctgccagctcctcccactcacaggcaggggctcagggctgccaggccacacagggcattcaggggcttgggaagggcaggcaggtgtgagcgtgagtgtaagcggcccctctctgccccacagcccgctgccccggggcaagcggagggccatggaggcgcagatgcagtcggaggcgctgtcacttctcagcaacctggccgacctggccaacgccgtgcactggctgccccggggcgtgctgtgggccggccgcttcccgccgtggctagtgggcctcatgggcaccatctcctcaatcctcagcatgtaccaggcggcccgggccggcggccaggccgaggccactaccccctgacactgccggaagagcacagggacacagccagagcccacggagggcccttcccgcaaagcagaagccgccagggcaggggccggggctctcatggagctgcctgtggtgaaacccatgggcagggtgggtggagggactgatgcgaggtcccccaggcctcagcctggagctcctgagccgtgacagttttcaggggccgtgcagggcttcagcagcacctcctgcctgccagctggcgtcttgtatccaaatcaagatgaggaagagggggcctgtcgtgccttgagaaagctggaacgggaatcaattaaacattgtggtgctggcgcctggctcaggggtgaaggttattacactgctggctcctggccccttaccctccacaggacggacccaaagttggaaaccacactaccccagcccaccttcaggaatgccctcagcccggtgggtcctctccatctttgagcaagcgttgcccacggaccccaagtggcctccagccattgagggctgttctctactccccagagtcctgggcacacaggccagaggcgccacctctcatcaggccacccgagggcgtggcctcatgccactgtgctgccgacgcagggccactgtgagcattttaagggctccaggctgagactgggcaacacacactggcatcgctgaagatacttggggctcccacctcagccaatgtgtggtgggatgggatgagggcactgcttagtctgctggctgagaacaacccttcagagtctgtgcacatgtggcctctggcagacattgttgcacagcctggcccaggaacacacaacagccagtgtgtgtgcgcccttgggcctcatgtgatatcaattgcactgccttgatttttatctttttgacccaggatctctgtcacccaggctggagtgcagtggtgcgatcatagcctcactgcagcctcaaactcctgggctcaagggatcctcctacctcagcctcctgaatagcaggaactacaggtgtttatcaccaaatccagctaatttttaaactttttgtagagacagggtctcaccacattgcccaggctggtcttgaactcctggcttcaagtgagctgcctgcctcggcctcccagagtacatttgtggtttgttttttacaaggaagataccaggtggctctgagcagctgggaggccggggactgctcagggtcacacgggtgcgggagaccccatctgtgggggctccttctgcccaggactcacgagtgggccaggcttggtgggtttcccccttctttcccttgtcgggggtgcaggcctgtcctggccctcagcagaggcctccttcccagcccctagcagcacctgcatgattagggcatctcattgtctacctggagacccaactacttactagctcataccagtggggcccttggagcagcgcctctgtgtggggaagccacatgaccacctggtcacaggtgccaggaggaaaagcaagccaccttcagggatacagcctgggctgggaaggccttggacactgaccatgtggagcccaggcacagagcagacaggttggatgcttccagaaagggaggccgctctcccactctctcagctggtccagtggttgtgtgtgtgtgtggttgtgtgtgtgtgtgtgtgtttaaacagttttatggaaatataattcacatataaaatttatccacagaagggggacagttcagtggcttttagtacattcacagtcgtgcaagcagagccacagtcaaccttagaacattccatcaccccagagagaaacctcacacccctcagctgttacccacccgcagcccccaggcttggtgaccactactctgtccctgggttgcccattctggtc

SEQ ID NO: 34526 - DNA, 2054 bp, Artificial sequence
  DNA replication origin
ccagctttctcaaggcacgacaggccccctcttcctcatcttgatttggatacaagacgccagctggcaggcaggaggtgctgctgaagccctgcacggcccctgaaaactgtcacggctcaggagctccaggctgaggcctgggggacctcgcatcagtccctccacccaccctgcccatgggtttcaccacaggcagctccatgagagccccggcccctgccctggcggcttctgctttgcgggaagggccctccgtgggctctggctgtgtccctgtgctcttccggcagtgtcagggggtagtggcctcggcctggccgccggcccgggccgcctggtacatgctgaggattgaggagatggtgcccatgaggcccactagccacggcgggaagcggccggcccacagcacgccccggggcagccagtgcacggcgttggccaggtcggccaggttgctgagaagtgacagcgcctccgactgcatctgcgcctccatggccctccgcttgccccggggcagcgggctgtggggcagagaggggccgcttacactcacgctcacacctgcctgcccttcccaagcccctgaatgccctgtgtggcctggcagccctgagcccctgcctgtgagtgggaggagctggcaggactgaggtggcctccctgaccatccacagagactgagtccccatcacccccccgacccaagcacgaacagggcaggaacccgggtccaagtcctcaaatccacacctcactcctcgtcctgaacacccagagatggggattccttgtgaaaaacagaaagcacaaatgcactttgggaggtgtggagggaagggggaacccccaggagcgtggcctgtgcctgcccggcctttctttatcaggatgacacagtgacgataagcctggccaatatggcgagaccccatctccaccaaaaaataaaaaacaaaattagccaggcgtgctggcccgtgcctgtagtcccagctactcgggaagctgaaacaggaggatcagttgagcccaggaggcagaggctgcagtgagccaagatggcaccactgtgctccagcctgggcaacagagcaagaccctgtctcaaaaaacaaaaagaaaaagcaacagtaacaatggccatggccttcgggaaattgatcattctctcctgctgggggcgcagccatgaaggctcagccctggagtccccgctcaagcaagcctcagtttctccatctgtaaaaggtaccgccacccaccagaggctgtgatgactcccccatgacctgagcacaacagtccccagcatgggcctgcacaggggtggctgcgagccgggatcccacgcctgctggagggagtgggcctccctgctgggtgatcacgggctcctacctggtgaagggcgccgtggggctccgcagcctctgtctcagtttcagcagcatccacagggacctgcagcaccagagcccgagggaggatgccccggcggggagcaggagggttagctccacaacgctggccccggacatacagtctgggacaggtgctgcatctcggataaacggcctgccctctccctgcccccacagtcccacaccctcctggctgtgcctcatgctcccggggactcatctctaacacggccccgtcccacccgggacatcgtcctgcacttctgacgtggccatccagggcctggcccagcctctgcaaaccactggcaagtgctcaaaggaacatcaagccccgtgaggtgttcacagcctggcagggagtcctacacagaaaaggatgccaagaggcccgcagttggacaggcgtggggacgccgtttcccctccgggcctcagctgccttgtctgctctgtgtggaaaggtccaaatcagtgccatgccagcaccccctgcacacacaccccggacattggctggacctgtctggatgatcccctgggcccccagggctggcatctgcaggctgaggaaggggctacccagtgggcagcctctgtgctcccagcaggctctgcagccgt

SEQ ID NO: 34527 - DNA, 1107 bp, Artificial sequence
  DNA replication origin
acattgaggttgcagtgagggtgcagtgagctatgattccgccactgcactccagcctgggtgacagagtgagactctgtctcagaaacaacacaaaacaaaagagcagctagggagagaagtaactattattcagcatcttaatcatctgtatgaagaagtcagaaggaaggaaggagagagggagggaaggaaggaagggagggagcgagggagggagggagggagggatttgggatctgcagttctgttaggtgttttgggggcacggttttgttttttgtgcaaatcctgcctccttagagctccagggaagctgggagctggaaggaaggaaggaaggacgaagggaaggaaggagggaggaagggagggaaaggaaggaagaaggaaagaaggagggaaggagggagggagagaaggagggaaggaagcagggagggagggaaaggaaggaagaaggaaggaaggagggagggaggggaaggagggaaggaaggaaggaaagaaagaaagaaagaagtcagaagactaaagctgtgcttggtaaggaacagccgttgctggtattagctagtagcagaggaggtccagttactctgatagtgtggacagtgttcgtgttttgcctgtgttcagacatgattatggagcaggcttgttttgtcttgctctgccgcggtcacagagtggccttgtctgatgtcggcgtcatgtgagattgtttatgtccagcaggaggacaccagggccctgctttgactgccaggccagctcctagcaacaccaaggccagctgtgaacaccaggccagctcctgtgtctttttcaaaggtcgagctcagacctagccagatgggggacgctgggagggctgggctgtgtctgcaaagctcactgctgtatctctgttgcctagagcgggacccggcacacaggaagcattcgggcaaatgcattgcgctgttccaaggctcttgggcctgagaggagggatctgcttattcatgcagcagcaggctttgcggccagtgacctctttcctctgcatgtctggaccttggctttggatttttttttgttttacttttttagagatgggtcttg

SEQ ID NO: 34528 - DNA, 864 bp, Artificial sequence
  DNA replication origin
acacacacacacccttcatccatgttttctttctatttttgtgatggggtttcgctctgtcacccaggctggagtgcggtagcgtggtctcggatcactgcaacctctgccacccaggttcaagcggttctcccgcctcagccttctgagtagctgggatgacaggtgcatactaccatgcccagctaatttttgtatttttttcttttttttttttttttttttgagacagagtttcgctcttgttgcccaggctggagtgcaatggcgcaatcttggctcaccacgacttctgcctcctgggttcaagctattctcctgcctcagcctctggagtagctgggattacaggcatgcgccaccacgcctgactaattttgtatttttagtagagatggggtttctccatgttggtcaggctggtcttgaactccgacctcaggagatctgcccacctcggcctcccaaagtgctgggattataggcctgagccactgcacccgtctgatccatgttttctaaataggtagaggtaagcaggttttgtgggttgaagtgatctgggaggtcttcctgcaagaggtgagcctgagaacttggaatgctggtctccaagggagacagagaggagagcatgggagacacttgtgatctaagcaaaggcaagaaagtcccaggtgactgagcagaggcggagggtcaggggaggcttggagtctgaagctgaaggtcagaggagagagctaactctcagaaggtgtgaagacaggaagagattgagaataggcaggacctaggacaactgcagagcaggggaaaaccagtaagaaagtgcgtggcaggccgggcacagtggctcacacc

SEQ ID NO: 34529 - DNA, 1983 bp, Artificial sequence
  DNA replication origin
aggaagagattgagaataggcaggacctaggacaactgcagagcaggggaaaaccagtaagaaagtgcgtggcaggccgggcacagtggctcacacctgtcatcccagcactttgggaggccaaggcagacagatcacttgaggtcaggagttcgagaccagcctgaccaatgtggtgaaaccccgtctctaccaaaaatacaaaacttagacgggcatggtggcaggtacctgttatcccagctacttgggaggctgaggcaggagagtcagttgaatccaggaggtggaggttgcagtgagctgagatcgtgccactgtactccagcctgggggacagagtgagactctgtcacaaaaagaaaaggaaagaaagaaagagagagaaggtagggaagtgaaaggagcggaggggaggggggaggggcgggggagggggagagaagggagaaaaagtgtggcagaaacggagatggccagtggctggggtgcagggctggagttaggcagaggaacaaaaatgggtcccccagaggggaagaaggagaaaaccgtggccttgacaactgactgagggtgagaagacgcggttcttgtatcagacatacagtagaatgcagtggttaattctccaagttctagaatcagagtcgccctgggttcaaatctcaagcaaatgaccacctccctgagcctcaatgtcttttgtgaagcagtggttaaaacctacccttggccaggcatggtggctaacacctgtaatcccagcactttgggaggctgaggcagaagggttgcttgagcccaggagtttgagaccagcctgagcaacatagccagacccctgtctctaaaaaaaaaaatagaaagaattagccatgcatggtggtgcacacctatagtcccagatgctcagaagactgaggtgagaggaccgtttgagcccaagaggttgagcccaccacacttgtctaatttgtgtgtgtgtgtgtgtgtgtgtgtgtgtgtgtggagacggggtcccactatattgcccaggctggtcctgaactcccgggctcaagcagtcctcttgctctgacctctcactgtgcctggatacaggtgtgagtcacagtacccagctattaccttctaacctactcttcaatttttgttgttatattttttattattgtctgtcatctcccgccccattatcaattccacaaaggcagggatctaggtctattttgtgaactaatgttagttccccacccctgctggcctccaggcctagagtagggacagaaatcatttatgtggtgcctactgtgtgccaggcctacagtaggcaccacatgaaagatttttttttatgttttgagacggagtctcgctctgtcgtccaggctggagtgcaatggcacaatctcggctcactgcaacctctgcctcccgggttcaagcgattctcctgcctcagcctcccgagtagctgggactacgggcgcccaccaccactccaggctaattttttttaaaaattatttttagtacagacagggtttcaccacgttggccaggctggtctcgaactcctgacctcaggtgatccaccggcctcggcctcccaaagtgctgagattacaggcgtgagcccccgcgcccagccatgattatttctgtctctgctctcgctgggggaaggcacagaagctgtaccagtttcccgtgatgtccccagcctccagctcagtgcttggcgaacagaaaggagtcaaaggcagcagaaaggagtcaaaagcaggagtcaaaggcaagtgccccaatgggcacttgctcagtccctcatctccaccctctcgcaggtggctggtgtcccgcgatggccacaggcgccctcctgccgtgctcgcgcccgtgcccgatgtcccggctggacttcctcaaggcctcgcacttctcgctggggcctgacctgcggctgcacgagggcaccat

SEQ ID NO: 34530 - DNA, 1033 bp, Artificial sequence
  DNA replication origin
cctgcggctgcacgagggcaccatgcgcaccacgtcgcaccgggactttgcctacccggctgccacccgggagccgccgagcctgcagccgccgcccgcgctgcttttcccaatggacccgcgctgggaccgggaagagcgcgtgtcggaggcgcaccgcgcgttcccgccgccatccacgccgccgtgggagctgctgcaagcgcaggcgcgggaacgcacgctcgccatgcaggccggcaacctgcacctgcacgaggacgcgcacgccgggatcggcctctccaacgcgcacgccgcctacggctggcccgagctgccggcgcgcacccgagagcggatccgcggcgcgcgcctcatcttcgaccgcgactccctgcctcctggcgaccgcgacaagttgcgcatcccgcccaccacgcaccaggcgctctttccaccccacgacgcgcgcccgcagcctcgcgcgcccagttgccacctcggtgagcgcgcgcccgggctgagtgggcgatttgcttcacattgtggttctcaaacaggggcaagggctcttcattccccttcccccagggaacatttggcaatgtctggaaacgcttttggtggtcaggacttggggggtggccgggcgcggtggctcaagcctgtaacctcagcactttgggagttggaggcggggggatcgcttgaggtcaagagttcgagaccagcctggccaatatggaggaaccccgcctctactaaaatacaaaaattagtagggcgcggtgaagggtgcctgtaatcccagctacttgagaggctgaggcaggagaatcgcttgaacccagggggcagaggttgtggtgagctgagattgtgccaccgcattccaacctgggagacagagcaaggctccgtctcaaaaaaaggaaagaaagaaaggaagaagagaaagaagaaagagagagagagagagaggaaggaaggaagaaggaaggaaggaaaacaagacagagaggaagggagggagggagggaggaagacttgg

SEQ ID NO: 34531 - DNA, 1233 bp, Artificial sequence
  DNA replication origin
taaaacaaaaaaaccccaataatatctaccaaggactatattgagccacacataggttaagtgcattgcatctttttccaggactgagtatctctctctccgtctctcttttattttggagatggagtctcgctctgtggcccatgctggagtgcagtggcacaatcttgactcactgcaacctgctcctcccaggttcaagcgattctcctgcctcagcctcccaagtagctagctgggattacaggaacgcaccaccaggtcaggctgaattttgtatttttagtagagatgtggtttcaccacattggccaggctggtctccaactcctggccgcaagtgatccgcctgcctcagcctcccaaagtgctgggatcacaggcatgagccattgcacccggccgcaacttcttcttggacctggtatcatttctcttgttacagcctccttgaggctcagagaggttaagcaacttgccagaaatcacagaaactaggaatcacaactaaatgtcaaatcagggtttgacaatccctgagcccatcttaggggcctctgaccagtaatgttcacccaaagggtccctggagtcacagaattggaaaattacacgaatgctggctactctttgttaagtgctctctgcaccagacacaccatacacattcagctttactagctcctgtgaattgggccctgtgattgcacccattttgtagacggggaaactgaggcttggagaggttaactccctcagactcacacagctactaaggtggtaaggctggggggtgtggggaggagggtgtacagctggggaacttagctgatttgtctgaccccaaactggcattcatgacttctgccaaccatgcaccactctggacagattcagaggatatgtccaccctcctgatgctgaaactgatgctcaaggtggttccagggtttctgaggcttggtgtaattgacatttggggctggctgggaggatacttggcagcatctctggcctctacccgctgtctgctggtagcacctctgcccatctttttaaatttttattttgtaagggctgggctcagtggctcatgcctataatcccagcactttgggaggtcgaggcagatggattgcttgagcccaggagttcaagacctgccagggcaacatagtaagactgcatctctacaaataagtacaaaaaattagctgggcctggtgacatgcg

SEQ ID NO: 34532 - DNA, 1019 bp, Artificial sequence
  DNA replication origin
gcatagggctaagaaggtcaggggcggggccgggccagatgagtctgtgggcagggccaggcagggcaggctagcgggtcaggggcggagccagagtctgacaatggaagaggagttaagactggataagagaggatggagaaggggcagggccgtgtccagaaggatggagttatgaaggggagaggcatggccatgaaggggcgggattatccaggagcagagttggggttctggtcaattgggggtgggatttagcctttcaggggatgaagccgggggaggggagggctggttaggggcggggccagagcagtggcaagggcgaggcttccagggctgggcttcccgggacggggctccgtgggggcggggctccatggggaggggctccatgggggcggggctttcgggggtggggcttcccggggcggggctccatggggcggggcttcccgggagcgctcaccgcccgtgccccgcggcaggtagctttgctgcaagtggaggttgggcgctttctgcacctgtctccactctgaagggcagtagtccgagcccatggtggtcttgaagaagcgtttgagtagctttggctcccctagggtcacatgactctgcaatttctcatgaggcacgtggcggctgggtggctgggtcgggggtggcggctgtaggaccacatggcatttgaaagctccggcgtccgagaggtccccgggcccgggggggagggaggaggtgggctctgtgtgaccttggacagctccctcaccccttctgggccccacctggtagcactgggagttggtactcttatctcattttacagaaggagccacggaggaggatcggagtggttaagtgactcgccctagatcactcaagtacatccaggagattcctgcatacatatcaagctcactcccactttgggacttctgcacctgctatttgctctgtctgggaagcccttttccctgccgccttttcgctcttcctgctcacctggccgtaga

SEQ ID NO: 34533 - DNA, 1498 bp, Artificial sequence
  DNA replication origin
gagctggataagaagatggagagaaaccaggggtgtccctggaaggactccagggctggggtgatcctgggtggctctgaattaaccctcgtcttgggtataacagtggtggtggtgcaaagatgcccctgagctgaccttgacatgaccctggggggtgagctagagatgacctctatttttttttttcctttttttgaggcagagtcttgctctgttgcccagcccagagtgcaatggtgcgatcttggctcactgaaacctctgcctccctggttcaagcaattctgtctcagcctccctagtagctgggattacaggcatgcgccaccatgcctgactaatttttgtatttttagtagagacggggtttcaccatgttggccaggctggtctcgaactcctgacttcaggtgatccgcctgcttcggcctcccaaagcgctgggattacaagcgtgaaccactgcacccggccaagctagggatgatcttcaggctgaagggatattaagatgcccccgagcctgggtgatcactaactctgagacagggtgacagcatagtcgtcctgagataactctacaccaatgtgggggttgcctaatgatgggtggctcccctccgcctcccttacccgctgtagcatctcttcagtcaccggggccggaggtgttctgtgtggcttcagcatcttctggttcatggttaaaaaatcgaattctggagattcaggttggggaggctgagtgagggctgtgggccgaggcggggctgagggtgtggtgaagttcaagggaagggttcaagagccaagcccaggccagcgctgaagttgaccaggggagaaaaatggattaggagaggggggagggaggagccaaagaaggagggagaagccagaggaagggggaggagctgggaaagagggaggagctgggaaagaggtaggcgctggggaagagggaggaggtgggggaggaggaaggagccaggggaggagagaggagctggggaagagggaggaactgggaaagagggaggagctgggacaaaggaaggagccagagaaagggggaggagcttgggaagagggaggagctggaggaggacggaggagctaggggaggaacccagagctagggcatagggctaagaaggtcaggggcggggccgggccagatgagtctgtgggcagggccaggcagggcaggctagcgggtcaggggcggagccagagtctgacaatggaagaggagttaagactggataagagaggatggagaaggggcagggccgtgtccagaaggatggagttatgaaggggagaggcatggccatgaaggggcgggattatccaggagcagagttggggttctggtcaattgggggtgggatttagcctttcaggggatgaagccgggggaggggagggctggttaggggcggggccagagcagtggcaagggcgaggcttccagggctgggcttcccgggac

SEQ ID NO: 34534 - DNA, 1216 bp, Artificial sequence
  DNA replication origin
cagtctcccaaagtgctggggttacaggtgtgagccaccgcgcccagccttgactccatactcttcatggcaacgcagcaacagtggagtcatcctttcccgtgcagtcccttcctccagcccccacccacccaagcatcctctggatgggctgactgatgggaaagagtggaatgttgccaagatggcatttattgctggctggggcacaggtacatagggggctgggggaccagagggtctatcttctccctgcagccgcgctggtgaggcgtgcccaggggcacgaagccctcctgaggatttttcagtctcagggctgctgggccctggtacttgaaaggaaactcgtccttgtattgtgttgagaagaagcgcagtccacccagagggggctccatgtggctgtacttgcactgtggagacagggtggacagcctggcagggcagcctgggaggtggccgatccaccctgtccaccccaggatctccaggcctgatgagtcagggggcggggccaggcagggcaggctagctggtcggggcggagccagtgtctgaccaaggaggatggttaagactgggtaagagaggatagggaaaggggcgaggctatggccagaagggtggagttatgcaggggcggggcttggccacgaaggggcgggattgtccaggggcggagttggggttctggtcaatttggggtgggatttagcccttcagaaggtgaagcctggggtaaggtggggccgcctagggacagagccagagcatcaaaggctggggaggttgaactctggggagaggtgggcaaaaagggccccaggctgggctgaatgaggagctggataagaagatggagagaaaccaggggtgtccctggaaggactccagggctggggtgatcctgggtggctctgaattaaccctcgtcttgggtataacagtggtggtggtgcaaagatgcccctgagctgaccttgacatgaccctggggggtgagctagagatgacctctatttttttttttcctttttttgaggcagagtcttgctctgttgcccagcccagagtgcaatggtgcgatcttggctcactgaaacctctgcctccctggttcaagcaattctgtctcagcctccctagtagctgggattacaggcatgcgccaccatgcctgactaatttttgtatttttagtagagacggggtt

SEQ ID NO: 34535 - DNA, 878 bp, Artificial sequence
  DNA replication origin
aattgtcgtcggtaagaagtggcagtcatttgtgttcacttggagagggggatgagaactcatttttgtggttgcacagggcccatgtctctatcttggttcagacatggtcacagagtggccttgcctcatcattgtttatattctgtgaccattgtttatatttagtggagaacatcgcggcccagccatcaggagctgatttccactctctctcctggctggcagcggggatctgtgtctccaaggaaagtttgccccgagcccttcccggcccggcgtagggttctccggaaaccatcactcacatctagcacttggaggcctccagggacagcggtgacccaccatctgggtaggaggctgaaaacactagaggaggaatatcccaaatctgtgccttggcgggtgttacccagaaagggtgacgggtttcaccatgcaaaaaggaaaaattggaggaaggccaggttaagcaaaaatagacatgtttttagattgcagagctgagaggcttggctgtgcctatgtgcgctgcaagtctccaagaacaacatgtgtagagttttacgaacaaagatagagtcagagacatgggcaggaggcagagacagagagagagagacagacagacacagagagagatagaggcagagaaagcaacagaggcaaagagattggaacacagagaaagagatggggacagagacacagagaaaggaacagagatgggaagacagggacagagacagagaatgaacagagatagagagatagggacggagagagacagagagagggacagggatggagagaaagagatagggccagggccacagagggactgagacaggcccaggaggagactagggatgggg

SEQ ID NO: 34536 - DNA, 1426 bp, Artificial sequence
  DNA replication origin
cccccctccagcagcagcattctgagctctagaacccatgtctgggggataagaatatggaacaaataacatcaggtatccctcccaagtcactggggaaagacaagaagactctggcttgccctctggggaaaagaaaacctgaattccagagctcacagctccaggtgggagtcagtgtcaaatcctctctcttagacagatcggaaatgccctttcctacagccagatagtgagcatggtagagtgatatttgggacccctcctggtgaggagggatgggtagggagactcatgaaccccataggcaggatggtggggacagttgttagtatacctgttttatttatttatttatgtttgagatggggtcttggtatgttgcccaggctggactcaaactcctgggctcaaatgatcctcccacctcagcctcccaaagtatggtgattacaggcatgagccaccatgcccggccagtatacctgttttccctattggctagaaggtcctgcattttaacttctagctggaggataggcaaaaataatacctggggaccctctgaagttaatgggggaacgcctgagtcatctcctcccatggctgggacatggcgggtagtgtcagcacacttgtagcccttcctgcaggaaggatcctgaactgaattgccagcttgtggctaggggcagactgggaggtagagggacaaaagctggaaccacttctggggagcaatgggagcccaggatgacctgccgggaggatgccttgagctccccaccccatggctgggtgttgaggtgtcaacaatgaatgatctgctcctgggagaagctgtggggggacctgtggctccccttctggggaaaggaatacactgagccacaaccccatagctgggagtgtgcaggcaaacagagccgagttcctggacggcggtcctcaacccagaccccatagttggagagtgggggaaacaagacctgggacccctcctgcatcaggggcagaggaacccttagattgcctccaggggaaggagccccctgaattcccatctcttaactggaaggtgggaggagaaatcacttaagtctttcctgagttcccaggggtgagggcaggtggacccctggatcacctccagggaaaggagcttccagaactgcagaccccaagactggaggggcaagggaacaatcgctgggacccttcctagggtcctgggggaagagggaacccctaggtcccccttttgaggacagggcctcctgaactccagaccccaggcgggaggtgggaacaatacctcgaatcaggaggggagggggtcctggatcgcctcctagggagggggcgtcctgagctccagaccccagagctggcgggcgccccccaccccgcccgattgaaggctccc

SEQ ID NO: 34537 - DNA, 1493 bp, Artificial sequence
  DNA replication origin
cagcagcgccgagctctgcccgaaggccttgccgcactgcggacacgggtagggccgctcgcccgtgtgcgtgcgcaggtgtttgagcagcgcagagccctggccgaagcccttggcgcacaccgggcacttgtggggccgcgggccgccgtgcgtgcgcaggtgctgtgccaggagcgagccgtgcccgaaggccttgccacacaccgggcagtggtgcggcttctccccgctgtggctgctgcgatgtttcagcagcgtggagcgccagccgaaggccttgccgcaggccgcgcactggtacggccgcgccccagtgtggatgccacggtgctgagccagggtggcaccgtggctgaaggacttcccgcagtcggggcagcggtacggcttctcgccgctgtgcgtgcggcgatgctggctcagcccggagctgcggcggaaggctcgcccgcaatccgggcaggagaagggccggggcgggctggcgggggcggggagcaccgcggggctggtggccaagacctggggggtggcagtgaggccagaggagatggggtccacttttggatcgccggggctgagggtgtcgctgttaggatcgagaatcaggggtacggggccaatcacatctggatcgaggtcgaaactcgaagacatggggtcgggatcttggggttccgagcccggagcttcggcgtcggggtccagatcctccgagacgggctccagatcttcatagctggggtccacgtcttccgggacagtgttgaggtcttcaggatcaggctctgggtcttcagaaaccgggtccagatcttcaggattggggtctaggtcctcggagtcagagtcgagctcttcataaacgggtctcaggcctttgtggcctgggttcctgaccaggactgagcgccgcatttcaggcgtggatgtgcccgcagcttctggggcaagacctgcaagggcaaggatagagggtagagggtaggtgggttctgtgggagcgggggtgtcttttggagtctggttagggatgagagacgggacccgattgtgcccccagaacccacttctttttttttttttttttttttttgagatggggtctcgttctgttgccaaggctggagtgcaaaggtaccatctcggctcactgcaacctccgcctcccaggttcaaacaactctcctgcctcagcctcctgagtagctgggattacaggtgtccaccaccatgcctggctaatttttgtatttttagtagagatgggatttcagcatgttagacaggctggtctcaaactcctgacctcaggtgatctgcatgcctcagcctcccaaagtgctgggattacaggcgtgagccaccgcgcccagccccacttctttatttttatttttttgagatggggtctcactctgtcacccaggctagagtgcagtgatgtgatcatacatagctcactgcagactggaactcccgggctcaag

SEQ ID NO: 34538 - DNA, 1494 bp, Artificial sequence
  DNA replication origin
gtgtgcgccaagggcttcggccagggctctgcgctgctcaaacacctgcgcacgcacacgggcgagcggccctacccgtgtccgcagtgcggcaaggccttcgggcagagctcggcgctgctgcagcaccagcgcacacacacggccgagcgcccctaccgctgcccccactgcggcaaagccttcgggcagagctccaacttgcaacaccacctgcgcatccacacgggcgagcggccctacgcctgcccgcactgctccaaggccttcggccagagctcagcgctgctccagcacctgcacgtgcattcgggcgagcgtccctatcgctgtcagctctgcgggaaggccttcggccaggcctccagcctcaccaagcacaaacgggtgcatgagggtgcagccgctgctgcagctgccgcggccgctgcagctgcagcagcggccgccggcctgggcctcgggcctggcctaagccctgcatccatgatgaggccggggcaggtctccctcctgggtcctgatgctgtttctgtgctcggctctggcttgggcctcagccctggcaccagctctggccgcaaccctgaccctggctctgggccgggcactctgccggatcccagctccaaacccctccccggctccagatccacccccagccctactcctgtggaatcttctgacccaaaggctgggcacgacgctggtcccgaccttgtgcccagcccagaccttgatcctgtgcccagcccagaccctgatcctgtgcccagccctgatcccaaccctgtgtcctgccctgacccctgttctcccactcgtggcactgtcagcccagccctccctaccggcgagagtccagagtgggtacaggagcaaggggcactgctggggcctgatggctgaaggagacgccggcatcctcgggggcctggggaagttgtgtgttgtgcagtcagtaaaatcctcccactgcctccgggctctgtgtcgtggcttgccttttgtgctttctttctgagcacagccccttgctccggagatgggacattgtggccagggccagccacaatctggagctccagtgtcctggcttccttcttgggcccaccagctagactttccagcttaacccacagtgtctcatcctggtccatcccactagtcaccactctctgttcctctcacttaccccttgctcttcaaagcccatacagtaggtatacaagtggacaaaaaaagttgctcatttatgcaatcaacaaacatctctggattgctggggtctcagcagggaacaagataaatatggcctcgacctgcatggagctcatagatactaaattcagaatacttaaaaaataattacggggtatagtacattctaggagaagcataacaagacttctgatataaatggcaggcagctttctcaatgaaggattttgtaatcccaataatcactaatttaataatcagtactgtttgccc

SEQ ID NO: 34539 - DNA, 1086 bp, Artificial sequence
  DNA replication origin
acctgcatggagctcatagatactaaattcagaatacttaaaaaataattacggggtatagtacattctaggagaagcataacaagacttctgatataaatggcaggcagctttctcaatgaaggattttgtaatcccaataatcactaatttaataatcagtactgtttgcccagccttatgcgatagtttttgcattctctcatttaatcctctcaacagccccagtaggtagatgactttgaatatccccattttgcaaatgagaaaattgaggcacatttttttttttttttttagacagtcttgctctgttgcccaggctggagtgcagtggtgtgatcatagctcactgcagcctcgacctcctgggctcaagcgatcctcccaccttagcctcccgagtagctgggattgccggtgcatgccaccgcccactgcgctcagcttggagttgaagggactctggaagatgtagaagtggcattgtcagtgcctagatttaaatcccaattgccctccagggtccaaattcttaaccattacgctccagggcaaaagtatgcaaaggctctggggctatagaaagatgagctttggatggaggtaggagccagatcagagggccctgatagacgagagtggggactctgcctgtcattacagagcaatgggaagccgagggcaggttctcgcaggaaggataggaattattctttgaagatgcttgtggctgctgggtagagagtggagtggagggaggctgagatcggggaggaggttgctgcaaagatccaggccaggaatgttggaagactctgggctgggggccatggggtggggataagtggttctatttgatacataattaggaaatcgtgtttgctgaagatgcgcaggagaagggtaaaaggagtttctgggagaaagaggaagacagcgttgagatagtaggcagggtcatcaccaggcaccaaggaggataaggggtcaagctctggacatggaagtcacaagcctggcaccggattcggggcatggccgggagccagggcagagctcgtcgttgccaaactcagagtcagc

SEQ ID NO: 34540 - DNA, 858 bp, Artificial sequence
  DNA replication origin
caagcaatccttcctcctcagcctcccaaagtgctggtattataggcgtgagccaccgtgcccagccacagctgttgattttaatcccagcagctcaggctcccaacagtgaagcctcgtcctgcccactcaccagtaaccaccatcggatcaatgtcaaatgtgtcgttggccgggtccacgtggcctcggtggtagtaccgctggcagagagcaagccctgagccattggtccaagggtcacccccaccacggacatacgcataccggcccagtgacacgtcaggcaacgccaggtactgtgggcagagaaggggagggcctgtgagtccggcccgctctctgcagcccacccacctgcacctgcccgcccaccagcacctgcccgcccaactgcacctgcccgcccacctgcacctgcctgcccaccagcacctgcccgcccaccagcacctggtccacagcatggaagatggcctggtacagctgctcccgcgtgtaggctgcgaaggtgtcatccgctccgtccgagtagcccagcaggaagaggtgtcggaaggcgatggtgttctcttcccggaatgtcacagccagctgattactgagcccaaacaggatgagctggggagagggtagtagaggttggcatggctaggatgggggttggggtgtatctccctcagggcacaggccctggaagaggacagggagggccctgcagatgtccactggggtggggcagggccctgctaacttgggccacaaacacggatttcacttgtgcatttctttgctttgattaatttcaccccacctcctggcataagctccatgccacgcccaccactgtgtcctccc

SEQ ID NO: 34541 - DNA, 1516 bp, Artificial sequence
  DNA replication origin
ggtcatcaacaactgtgacaacaataatggcacagggtcagtgtcagggtcaccaaggaccacaggggacagtggacagactcccagcagtcaccaaggggtcatctgggggtcacagtgtcaatgacaaggtcacagggtcaatgtcagggacatcaggggttagatgtaccttcacatgatagggccccagcacgatccagccacagaagcagtagcccaggtagatgacagccacgcagcagcagaagcgcatgacgctgggcagggccacccgcagtgtggcgatgaggatctgggttggggcagagggagcctcgttgagggtgtggccacaactcaggtcagctgtgggcacccagatgggggtgggaggggcggggccttgccgagggcacagccggtgtggtcatgggagccagtgggtgcctagagggggcgtggccacgtctgagggggtccgagggcaacgcacggctagactcagctgggtgggcacaaaggagcaggctcccggggccccgcgcaggtgcagtgacagatatatctggtgtgggcaggtaggaggaggaggcttgcaaggggccattggccggggctggtgagggctgcgtgtgtagggatttatttggagggtgtggagtaaccatgtggaaggcccagctgcatgtgcaaaactcacattgtagttgtggaagaaggtcaggtagcggatcacgcccacccacaccagcagcgtcgaggtgcccaggaggatgctgcagacgtcgtagctcgccaagttctgcgggtgggagctgcgtcaacctatctggcccagcccttcctttggggggcctgggggaggatatggccccggataggcactgacagcagggatgggacctggggcccagggtgttggcaggacgcaccttggcctcgatgccgatcttcatgatggtgcccgagatggtgagcacatcgctggtgacgagcaggatgtaccagccattgacaaattccagccgctcccacaggctgatgacccgtccccgctgccgccacatgaaccccacaaactcctgcagaaggcaggcggggtgagggcctgaccaggcacaggaccctcaaagccctggcttttatcgccccagggccaggcggggaggacaccagcacacatgacgcagaagcctcacgttctgcagcaggaagcctcgaaggagtgagcgggcgcagaggaggaaggacagggagcaggtgaggatgaccaccacgtcaaacaggagccggaagctgttgtctcctgcggggagggcagagcgggtagggccaaggatggcatggagccttgggaggctagcattggtgccaggccaggctggagacctagggggctgcacggctggttttggttggtcagtgggctcagggcttgcttggggtgagtcaagaaccccggtcagtgctggtctggggcttgggggatctcagcacaggacggggtccctggtctgtgctgatctgaggctca

SEQ ID NO: 34542 - DNA, 969 bp, Artificial sequence
  DNA replication origin
ggaagctccatggccctccccgcagacccagtgctccaaacctgagatgtcccctggcatggagacgcagcggctcagcagaggggccgagggggtttccagggatgtgggcttcacagggtcccctgggggagacacatgttcaggctcctgcccctcagagccactaggaggattagcaggttgggagataaggagatgctggcgactgattaactagttaaagcaattccaatgggcccttggggacgaggccacagcttcctcggtaccagataggagtcagacctgggtaccccgctatggagtccctgtggggctggacaaggtcaggttgactctatgcagaactgaaaaaggggctggcggctgagacggggcttcctgggagattgggctcggctggcctcgggtccctgggtacctgtaggtccaggcagcggggccccggtgggatcgggtggccgccctggggtctccctgggctcgtctgtagctgaggtgctgaccattctcttggagccccgcacagggctggtgcgagttgggaggccggggctggggaacagacgcaggggctggatctcctgggggcagagaacagcttgtggcctgtcctgggagggagacctcgcccccatcccccctgtgctcgctccccgccacccactcacgtggctgaagagctcattggtcagacccaggtagttgtgcagtgccaggaaggtgactcgctgcagccgcaccatgatgatctgcagggctcgaggggcgtggccataagatggggcggggtaaggggcagggccagatggtgggccgggctagttcgcagcataaggggtcgggcgggaaccagggagagacccacagtctggggaaatggggcgaggcagctaagggaggagtccgcggctgcagacatctggctgctccaggccgataaccacagctccagcgcctgctggc

SEQ ID NO: 34543 - DNA, 906 bp, Artificial sequence
  DNA replication origin
ccgggaggcggagcttgcagtgagccaccgtcacgccactgcagcactccagcctgggtgacagagcgagactccgtctcaaaaaaaaaaaaaaagaaaaaaaagaagtcttactggggttctgcgaactaggcatctcttctttattacctcattccactgatgaggaagcagagaactttctagatcatctgccacactctggggacagagtgtgggtttcaactttcctcttcttcttcctcctcctcctcctaccctgaggcttcctgactttcagctggtagtcgggtcactaacccttgatgggcctcagtttccccatatggacagtggacagaatggtaggatacattttcctacacatcctgggtgccgccacaaggccctgaaaccccgacccagggctggttcatggccttccgaggccagatggcgatttgtagccatttattgagcccctatcctggcagcggtcagcatgagaagcagacatgttagtgaatactgcaggatcagaagttcagaaaacagaattacaggaagagccagggcaggcaggagagatctaggagttggagtcctagggcaaaaggttcaggggtcacaggtgaagggttgacaggtccagaggacatagggtggggttagggggtgggggtcacaggacccaagggttagaggttggaaatgataggatgagagaggtctgcttctatgggagaaggtgctggtcttacagtcaaagggcagggatcagaggtcacagaagtcatagggaatgatctcaggtggcatggttacaggtcaggggtcagcctcacctggtctccctggcgggcaatgatggtgccagctttggcgtggtgcagcaagactctgctgttcaggagggaggggtcctgg

SEQ ID NO: 34544 - DNA, 1218 bp, Artificial sequence
  DNA replication origin
tagagctctggggagagggagaggacagggatccacgacaggcggaatcccctttttccaacgaaatgaggtctgggcggggagtggactgggtgacctcagaggtcgggagctgcattcaccactccctggattacccgggatgatgtgtgtgagttgtcgagggactggcctggaaaaggccagaggtcagtgggtgggggtcgcgctcaccacgccgatgaggtcgccgcggccgtactcgcccaccagctccttcttgccactgcctcgctggatcacgctacgcagccgcccattgagcacgatgtaagtgcagtcggagcggtcgccctgcctgagtgggcgtggaggtcagcaaggtctgaccacccccaggtccccacccctaggccgggcctgagcagcgcggtgggagctgcacctgtacagcgcgcgtcccgcctccactgcagtccagtcgatggcgaagtccatctggcgcacgaagggcgacatcctggctgccaccgtgtgcgccgcactcagcaccacactgggctgtgcgcgcatgatcctgcaggaacagacttgggatgaaagaggaaggcctcaaaaccgtcctacaccggcgctgggaggccagatctgggggctcccttctgctcttccaggagtgaggttgagggatggggttctggccactcccacgggttggggtcctccgagtgccacccacactccaacttcgggctgtcatactcatagaagtcggacttggagatccgcaggaaggtgcagtcgcgttgggctcgcagtgtgaagatgagaggttcgccagtgagcaccgccagctgccccaccagttccccgggctgcgctacgaacaggcacacgtcctccgccttgtcgatcatgcgctggtacacgtgcaggcagccccagagcacgaagtgcaggctcacgtcctgtgcgggcaggggatgtgatgaacacagaacccggacagcgtggaccccagctcaggtcaacatgcccccacaggaaaaaattaaagaagaaaggaagggttaagaaaaatatgaaggcgcagggcgcggtggctcacggctgtaatcccagcgctttgggaggccaggcaggggggatcacttgaggccaggagttcggcaccagcctggccaacgtggcgaaacctgtctctactaaaataaaaaaattagctgggcgtcgtggcac

SEQ ID NO: 34545 - DNA, 918 bp, Artificial sequence
  DNA replication origin
ctctggacgccggactacatctcccagcacgctctgggccggccggctctcacctgggaagggtccttgcagctgctgcaaattccctagaattttctggctcagtaggtggataaggcgggtcacgacctgggggcgttggaggccggcatttcagtgagacctgggaagcggctgtccaggtcccacctctccctcctatgccggggctcctgggtgcccgttacctgggtcccacccccgagagcccccgccctcactctctcgcttcggcccctccctcgaccccgcccctctgtaagccccgcccacacactaggcccggcccccacccccccggagtcccgcctccgcctctctgccccgcccacaacaggccgcacctgcgggtaccggcgtttgatgtgacccaaggtgccctcgggaagcttggccagctccgtgtcgcgcaccgcgtgcaccgtcgtggctcgcggctgccgggtcagtgcctccacctggggggccgcgtgcatgattggggctgcttgggtggggaatgaggaggccgaagatgggtggaaagggggctgtactgccccatctagggctcccctgcaatgggggtgtagggaagcaagcctcgctcgctacccattagagctctggggagagggagaggacagggatccacgacaggcggaatcccctttttccaacgaaatgaggtctgggcggggagtggactgggtgacctcagaggtcgggagctgcattcaccactccctggattacccgggatgatgtgtgtgagttgtcgagggactggcctggaaaaggccagaggtcagtgggtgggggtcgcgctcaccacgccgatgaggtcgccgcggccgtactcgcccaccagctccttcttgccactgcctcgctggatca

SEQ ID NO: 34546 - DNA, 2004 bp, Artificial sequence
  DNA replication origin
gagtggtgaatgcagctcccgacctctgaggtcacccagtccactccccgcccagacctcatttcgttggaaaaaggggattccgcctgtcgtggatccctgtcctctccctctccccagagctctaatgggtagcgagcgaggcttgcttccctacacccccattgcaggggagccctagatggggcagtacagccccctttccacccatcttcggcctcctcattccccacccaagcagccccaatcatgcacgcggccccccaggtggaggcactgacccggcagccgcgagccacgacggtgcacgcggtgcgcgacacggagctggccaagcttcccgagggcaccttgggtcacatcaaacgccggtacccgcaggtgcggcctgttgtgggcggggcagagaggcggaggcgggactccgggggggtgggggccgggcctagtgtgtgggcggggcttacagaggggcggggtcgagggaggggccgaagcgagagagtgagggcgggggctctcgggggtgggacccaggtaacgggcacccaggagccccggcataggagggagaggtgggacctggacagccgcttcccaggtctcactgaaatgccggcctccaacgcccccaggtcgtgacccgccttatccacctactgagccagaaaattctagggaatttgcagcagctgcaaggacccttcccaggtgagagccggccggcccagagcgtgctgggagatgtagtccggcgtccagagcatgctgggagggaagccttctttcctgagggatgctgggaaatggagttccgcgaagaaatcgtgcccctgagggtttcaaaccctaagtaggacccaggtgcagagcattctggggaatggagttcgtgttcctgagcatgctgggaaacgaagtcctcgacccctggcgtgctagttaatgggctcgaaagtaaatcagtggtgccggggagggagtcttaggcggtggacttggcgtagtctgcccgggagtcagggcttgctggggaagtccacggcctggacgttgagagaaagggagtcctagatcagaatatgatggcagggccgtcatggtggctcatgcctgtaatctcagcactttgggaggctgaggcaggaggatcgcttgagcccaggagattgagtttgaaaccagcctgggcaacatagtaggacccccgtctctacaaaaatttcaaacattagctgggcttggtgacacatgcctgtagtctcagccactcaggaggctgaggcgggaggattgattgcttgagcccggaggtcgaggctgcagtgagccgtgatcgtgccactgtactccagccgggatgacagagctagaacctgtttcagaaaaaataaaacagcaaacaaacaaaactccccataccatgatggaaaatagtctgtggattgttgtttaggactctgggcacctcgccttctgaagttacagcttgctgggagatgtagccccctgtttcagcctgtggcttcagtgagctagaacagaatggggcgtgcggtggggttggaggcctgctgaaatgagggcctgagtttctacattgtggtggccagattctgggccagcccagcaacctagataccccttttccctccaggggttctacccaattggccctgagccctagatcccccaaggcgggggcagggcggtagtggcagaaaagacatcattaagaaattacagaggcctggggcggtgggtcacgcctgtaatctcagcactttgtgaggctgaggcaggtgaatcacttgaggtcaggggttcgagaccagcctggccaacgtggtgaaactcatctctactaaaagtacaaaaattagtcgggtgtggtggtgggtgcctgtaatcccagctacttggacggctgaggcaggagaatcgcttgaaccggggaggcagaggttgcagtgagccgagcctacgccattgcactccagcctg

SEQ ID NO: 34547 - DNA, 2010 bp, Artificial sequence
  DNA replication origin
gacttgacaactaagatggggccagacatgaaagagaaaccaggggtgctgcacaggaggctggtggttttgaagcactgaggaggaaagcgatcaaggggagaggtgatgggggttggggggtaagtcacataggggctaggggctgtggacaggcacttgagcttatttagattgttattgttagattggggaggaaggattccaccagtaaggaggcaacaagaggtctaggcaagatatgggagttgacagctggtctaggctgttagtggagaaactgggaagcaacagctgggtcaaaagtagcttttcttttcttgtctttgtcttttcttttattttctttttaagacagggtctcgctctgtagcccaggctggagtgcagtggcacgatctcggctcactgcaacctctgcctcccaggttcaagtgattctcctgcctcagcctcccaagtagctgggattacaggtgtatgccaccatgcctggctaattgttgtgtatttttagtagagcagtgtttctccatgttggctaggctaaaaatagctttatttctgcctcgttttatgttcaggtcccccattagacagaggaaccaaggccagaatgaggcaggggcactggccaattgatctcccaagcacagtgaatctgaatggttgtagagttgtgtaatggatcccactgaggtgatcagggcccaaagtggagggtagatggccaggttttaacaaaagagggaatagtagttgaggctgagggtccaggaccagagccatggctttctgtatggtagagtcaagactttgggcaactgggggctgcagtctgggagcacaggagcaagaatttcagataaggaggaagaggaagaagaggaggaggagggttcatctctctggacacaggttcgcaccacaaatctcatccattgggttcttagcaggctctgggttgggtgtgcccccacactcggaactcaccaacccagccagcaacctggcaactgtggcaatcctgcctgtgtgtgctgaggtccccatggtggccttcacgctggagctgcagcacgccctgcaggccatcggtcagtggggtgagggtcatgggtgggggctggcggtgggtgggacattagtgagtgagagatgttagggtaggtcatttggggggtggaggggaacagggccacaggggcggggtaatgggtattcttttctgagttaggccccagccctgtggaccatggttcccagcctcccttccccacctacccctaggtccgacgctactccttaacagtgacatcatccgggcacgcctgggggcctccgcactggataggtgtgtgttgcagaagggagtggggagggtggtgggtgggcctggagcctcaaattctttcagacctgagttcaagttcttggcttccaaccacggagcctgcgtcttacccataggtcaatggggagattcgcagtggtgtgaatctgcccaccggagcacggacttccgtggtgggggtttgggtgtctaagttcctcccagcaacggagctatgtggtctcggggagcacactgaccccaggccaaccccaggatgacgctgcccccttcccaccctagcatccaagagttccggctgtcagggtggctggcccagcaggaggatgcacaccgtatcgtactctaccagacggacgcctcgctgacgccctggaccgtgcgctgcctgcgacaggccgactgcatcctcattgtgggcctgggggaccaggagcctaccctcggccaggtcggaagcccgtgccccctgatctcacccacctcgggtcccgtcctttgccctcccgtgcctgcaccaggccacgtgcaccctcgccatgggggtaggcgatcagggacccaggtgtggccaggtggtggtggggcggctggtgacctcagccgtccgtattccgcagctggagcagatgctggagaacacggctgtgcgcgcc

SEQ ID NO: 34548 - DNA, 1364 bp, Artificial sequence
  DNA replication origin
gacgcctcgctgacgccctggaccgtgcgctgcctgcgacaggccgactgcatcctcattgtgggcctgggggaccaggagcctaccctcggccaggtcggaagcccgtgccccctgatctcacccacctcgggtcccgtcctttgccctcccgtgcctgcaccaggccacgtgcaccctcgccatgggggtaggcgatcagggacccaggtgtggccaggtggtggtggggcggctggtgacctcagccgtccgtattccgcagctggagcagatgctggagaacacggctgtgcgcgcccttaagcagctagtcctgctccaccgagaggagggcgcgggccccacgcgcaccgtggagtggctaaatatgcgcagctggtgctcggggcacctgcacctgcgctgtccgcgccgcctcttttcgcgccgcagccctgccaagctggtgaggagcgggccggcccccaccttctaggggcgtggctggtgggcgaggcttgggagactggggcggggcctgggagggctgaggacaggctcgaaggtcagggtacccctgggggatccgccggaccccgccctcatgctcctgggtcgcgactatctcccccatcccagcatgagctctacgagaaggttttctccaggcgcgcggaccggcacagcgacttctcccgcttggcgagggtgctcacggggaacaccattgcccttgtgctaggcgggggcggggccaggtgagggcggggcttgctctctgggggcggggcctggatgtccgagggtggagcttcctgggagaaaccgtgggggcggggcctgggtgttcgagggtggagcttcccctccgggagagaccccgtgggtaggggcgggtcctttgttccttagcagtgcgggaggtgggaggaggtaggggcaggggagttcctgcaggtggggcctagcgggtcactggggcccattttcccggcaggggctgctcgcacatcggagtactaaaggcattagaggaggcgggggtccccgtggacctggtgggcggcacgtccattggctctttcatcggagcgttgtacgcggaggagcgcagcgccagccgcacgaagcagcgggcccgggagtgggccaaggtgtgtgttgcgaggagggattgctgcaccccaggagtgccataaaacccgtggttccaacctaacctgatcccatgggggagcctccggggtcagggtgacccttcctgattaaatctatgatccccagctgtccggacttttatagataagcttctaggactctgggtaaccactttgggacctcctgtctactgaccctaacccataacccccaacgagagcacc

SEQ ID NO: 34549 - DNA, 1356 bp, Artificial sequence
  DNA replication origin
ctcccaaagtgctgggattccaggctgagccaccgcgcctggccagaatgtagatctcaactgcacatgtcgctgtccacaggcacattcatgtatcattttgtgcaagtgatcgtatgtgtgcgcatgtgtgtctgcacccctgcatgggcagcttgggcatgtgtcccgtcatcgagcctgtctgtgtgtgcccacgcgtgtgcgtgtgtgtggtgcgggaggtgcttgcgtgtgcgggtggtgcgggcggccacttgcctggcagattgttgatgtagccgccatccatgagtaggtgcccgtccttggggtcgcacagcgggggcaggtagcccgacagcgtcatgctggcgcgcacgtaccgccacagggagcctgcgcggtgggacacacagacacaaacacgcacagacacgctcagacacgccggaggcccagccggcccgatgggctcgctgacctgggacgttgttaacgtagcacccgtccaccagcaggtgcccgtccttggggtcgcacagtgggggcaggtaggggcagtaggaggcgctggcccggacgtaacgccacacacagcctgcggggatggcgtgaggggggtaaggcgtccgacgagtctccctgctcccctcccccaaggacggacgtacctggggtctccggggcattagtgggtggcggttagtggtcggtgatcgggccagggtggacggtcactcgtgttaacaacgtcccagaagctcagcggccctcccggaagcatccccccaaccccacgtggcgtcagcggttgctgcaggctgggcggggacacccaccatctttgtggactcgcatggctgaggcggtgatatctgtggtcacgttgaagtaaggcagccacaggtcctgcggggacagggatcgaggtgggggaggagcagggggctcctccggggaggggtaggcagggcaggggatgaggtgggcctacctcaatctgcttatcctggaagacccgatggatgctgcggttaaaggcagacccagtgaacatggaggtgactgggtacgtgaggtccaacacaggttccagcaccgaagtcatgctctagggacaaggggccagacagggtcaaataggagttacatggggtcacagataaggttcatcaatagggggtgagcaagcagcacttaggggccaggtgcagcggctcacactggtaatcccagcactttggaggccaaggcgggcagatcacttgaggccaggagttcaaaagcagcctagccaacatggtgaaaccccatctctactaaaatacaaaaaaatttgccgggctggtggggcgtgcctgtaatcccagctac

SEQ ID NO: 34550 - DNA, 1042 bp, Artificial sequence
  DNA replication origin
cgcccggcccgccgcccccgaccccggtcccccgagccccggtacctgcgcccccgaacgcggcccgcagcacccacgccaggctggccgccgccttggcccgcgagaaatcgtactggtccagcgacttgatctcgggcactagaaaggtcctccgcagcggcccgggcccggggggcgccgcctccaccatggcggcgccggggctgcgggcgccgggtccgcgctcggactgggctgggctgggctgcgccgcgctcgcgccccagccgggcccgctgctgctaccgccgctgccgccgccgccgccgccgccgctgctgagccaggtgcggccgcttgcgctggcgacgctgcgtcgggcccgccccggggaggagcccaggtgcgccccgcccccgaacccggacccggaccctggcgcgcccctgcgccccgcccgggcccctcactgcagtgtgcacggagcagcaggggcggggcggaggggggcggcctggactgcggcgatggtggagggagcttgcggaggactgagtgtgtatgtgtgcgcgcgcgcgtgtgtgagtgtgtgcgcgcgcgcctagcttactggaaaggattagggaccctctgtgtgtgccagccccagtgtctacccttaggcgtaggagctcctgcaagtgcttgcaataaacgccggccctcaggcagagagtggttgggtgcacctgtttctgattatgttagtgaaggcacaagaatatgagtgtcttcgtatctgtgtatctctgaatacatttgggtggtgaccaagtgtattggggggtgtctaggggtgtgtgtgtgtggggtatgtatctgggcacgtgtaagtgtgtgtttaatttgttgtgtgtacaaggatatgtattatatagatgtctgtatcctgaggatggatggaagtgatgagtgtgtgtctgttttttgtttttgtttttgtttttgtttttgagacagggtctcactcactctgtctcccaggctggagtgcagtggcgcgatctcgactcactgcaac

SEQ ID NO: 34551 - DNA, 757 bp, Artificial sequence
  DNA replication origin
agcagcgggcccggctggggcgcgagcgcggcgcagcccagcccagcccagtccgagcgcggacccggcgcccgcagccccggcgccgccatggtggaggcggcgccccccgggcccgggccgctgcggaggacctttctagtgcccgagatcaagtcgctggaccagtacgatttctcgcgggccaaggcggcggccagcctggcgtgggtgctgcgggccgcgttcgggggcgcaggtaccggggctcgggggaccggggtcgggggcggcgggccgggcgcggcaggtgctgggggggggcggggcgccgggccgggaaggcagggggccgtgggaacaatagcgccggccgccgggggtccccgggctcgggcccctgccgcgccggggcctccgagcttcctgctcggcccgggcggtggactttgccccgccggctgcgggagcgcggtgggggtggggcccgcggcccagctccgcgcgggggtccccggcgtccaagcctccaggtgagccgggcggggtctgcgggccgggtggggtctccccgtgcggacctctcgttcccgcctcccgcacccccaaggccttcccttgcacgccttcttctcttttacacacatcacgcccctgcgaggatctcctctcggtctcttcccccgccacacaccctggagacccagaccccgacctcgctggggggtctcgagcgctccggtctccaccaccgcacgacccccaggccccaacacac

SEQ ID NO: 34552 - DNA, 1648 bp, Artificial sequence
  DNA replication origin
ggggccgtgggaacaatagcgccggccgccgggggtccccgggctcgggcccctgccgcgccggggcctccgagcttcctgctcggcccgggcggtggactttgccccgccggctgcgggagcgcggtgggggtggggcccgcggcccagctccgcgcgggggtccccggcgtccaagcctccaggtgagccgggcggggtctgcgggccgggtggggtctccccgtgcggacctctcgttcccgcctcccgcacccccaaggccttcccttgcacgccttcttctcttttacacacatcacgcccctgcgaggatctcctctcggtctcttcccccgccacacaccctggagacccagaccccgacctcgctggggggtctcgagcgctccggtctccaccaccgcacgacccccaggccccaacacacaccccgcgtcggccctggccgcgctgcgggcggcgaccggggagctctgggaaccccctttcgcctccatagccccctccagcgcctggcagctgcgacttatggccccattttactggggaggttggcgagcccagctgaagggaaatgggtagtacaagatcgcctggggtgggccccccgctcctcccggctgcggggccttctcccattagagcagatccttcactccctcccccaggcccgcttgcctgagagcccgagccaccctaatggggaggatgccgtaatcccgggtccccgggattagaggccctggaaacactcagtctcggctttgggcagcttcacaaccccaggccagagctaggagtcagggcctggccagagaagacaggggttaattaaggtctgggctttccagcggggagctgtgggggtacatccttttctcccactggttctgcccactggtgttggcacagcccatcccccctctccctggccttcccagatcaacctgttctgggtgtgggtctcagtgacagctgtccgtctcctggttccgccccagcctgtccctctttctcccagacagtctctgtctgcgtcgttccatgcatgcatttcccactctggggtctacctccctgcagatatttgcttgaggaagaaagagattgggcattggacagccaggacagccccagctcctcacttccaaggttaccaggctgtagagaactcaacgtggagtgtcagaattgaatgtgaagtccagctgcaccagaatgcgaattatcccaattatctgagcttctgtttccccttctataaaagaaggcgttcattcacagacttatctgttttgcgaatgtttgtggggcaggggcacttgctatgtgtagggcactgctccagtgatggagaccccccgttacctctttgcaaggttgctgggaggcgtaaaagctgtagtgaccacagaattcttcgcgtggcacggggcgcgtgatacatgcgaaacggttgctcgctgctggtgtgattggcggtggtatattttgatgaataatattaacgttatccattatcccctggccaggaatcagagtagaaattatcccattttgaagacagcaaagcaaacttctgatgaggggtgttggtgagctcccagtgccctgactcacccagttctgttcttgttgacccagc

SEQ ID NO: 34553 - DNA, 1136 bp, Artificial sequence
  DNA replication origin
tgagcttctgtttccccttctataaaagaaggcgttcattcacagacttatctgttttgcgaatgtttgtggggcaggggcacttgctatgtgtagggcactgctccagtgatggagaccccccgttacctctttgcaaggttgctgggaggcgtaaaagctgtagtgaccacagaattcttcgcgtggcacggggcgcgtgatacatgcgaaacggttgctcgctgctggtgtgattggcggtggtatattttgatgaataatattaacgttatccattatcccctggccaggaatcagagtagaaattatcccattttgaagacagcaaagcaaacttctgatgaggggtgttggtgagctcccagtgccctgactcacccagttctgttcttgttgacccagctccctctgctgtgtgacacacggcagtggctgcctctaccgtgagggtcaagttcaatctgttccctgttccactcccctaaaaagaggagaagggctgaaggaaatgggagcagagttctacaagattcatgagctctggggactcttgacggtatgatacctatcaggtgctgggctgggcgctcagggtgtagaggagacggcaggggatggatatggggcagagggggatgggcaggaaaccagatcatagggaagctggccagcggggcctggggaaagaaattcttgaaatcttccagggagggaagagatcccacaggtggaaagatttgagtctggaaggatgcatggaagtttgacacggagaagagatgtgtgggcagtgggcaaaggctcggagtgtggaccagcagggagttctcagagaataagatgcaggtccccggggtggcggtgggagataagggaggctggtcagactgaggaaggcccttcaggcccctggttatggatccaagggtactggggagccacggacagtgttgggaactgacaagatcaggtatgcagtggccccgtgggagtagtgatggctcagaggaagggatagttctggcaactccaaggcacaggtgtgagaaggctgtgcagaaataaaagcagaacacaagcttggagattagataagaaagggttccaagcctggccaacacgatgaatccccg

SEQ ID NO: 34554 - DNA, 938 bp, Artificial sequence
  DNA replication origin
acaaagaattttccagccccaagtaccaatgaaccaaggtggaagaacatcggtgtataataagtgtctgataaatgtcagtgtagccctagcttaaggttttggtgttttttgtttcttgtttttcatcttaaaggccctgaaaagtcctgtaggaaagaaacacgtgtgattttgctggtgggagcaagacgtgcccaaggccggggctggggaggtagagaggagggtttggatttgggagatatcaggaagttgaaagccaaggacgcattaaatgtggggtgagggcgtaaagaaagggagggagggtgatttctcactgccttgggggcagggaggaggggaggtgtgggtgagatgttgagaattgtgggagatgcccagggtgcagtggggcccgtggcagccgctgttgcagtcttcaggtggccctggaagccgtcacggggtagggtggcctggggtgggggtggggcatgtccatttacaaggagacgcctgtgggaggaaggtttctggaagaaggaggcactgggcacagagcccaggcgagatacgggcccacagatatgctttggaggtccctgctggccttggggagaccggaagccatgagggcagcatcgagctcagggaaattgagggagaggtggaggggggctgggagggcagggaggaagtgagcctgaaatacctcttctttcaaggagccaagatgagaggggcaaaaagaaggtccaagtctacatgcgggtggcgcgttaagtgggacggtccagtgtggttttagaaggtgggaaaggagccaggacagggagggacagaaggcagccaagagtgcctgggtcctcacaggtggagaagtcccgttcaaatatgttctgaagcactagaaccccttaccctgttctttcttttctttttttttctttctt

SEQ ID NO: 34555 - DNA, 961 bp, Artificial sequence
  DNA replication origin
tggaccagggaggatggcattgggaaaggagaaaggggatctgggctgagagtgcagatgtgcaggagtttgctggaggaaggggtgatggcgttgtaggcagaggggcctgcagatgcaaagcccagcaggtgggagagaacacggtgcctcagggagctgatgggcacttagagtggaaaggaggggaggctacccccaataccaggccagctggactggctcttgtaggtcccaggaaagacaataacatcggcaatcctaagagccttcctgctcttgccaatgtagactcactgagccttacatcaacgctaggaggcagccagggcccaattggcaacccccatgttacagaggaggaaactgaggcacagagaaggaaagtcccttgccccaggccaaataactcttcaacaccaggactggggttagacccagcaaactggacgccctctcttagcttgcaggcagggggggatgagtggggggcacacaggcgagcaggggaggtgggcacaccacaggcacatcgagggagttgagtgatgtaaacctggtgattgaagggaggaggcaagggacagagagggaggtagccaggaccttgctgggtctgagggggaagagggaagagaggggtaatgactgagcttgggtgcaggaggaatgggaggtgaaggggtgaaattgaatgtgaggggctttgaggacatccttgaggcagattatgtgaaaggctggggcttagagagatggtgaggtcacatcatagagacagcctgaggtccctaaataggacaatgggaagaggcgtgaggaagccccaggtggacagtgggctgggggcagaaatccacgtaggaccaagagtggagaggagaaggccaggaaggcttggcaggggtcggggaagaggtgactgaaatcaacagcagggaatctgtccagctcttgttct

SEQ ID NO: 34556 - DNA, 1038 bp, Artificial sequence
  DNA replication origin
cttaagggacagagccaagactgatgataggaggagctaggtttgatggacatagcttaagggaaggagccaagactgataggagctaggcttaatggatagcgcttgaggggaggagccagacctcgtgggaggaactaggcttaatagcgcttgaggggaggagccaggcctggtgggaggaacctgggggaggagccaagcctgatgggaggagctaggcttaatcgacaaagcttgaaaggagccaagactgatagagggaacttgggaggagccaggactggcgggaggagcttgaggggaggagctgagcatggtaggcgtggtctaacaggcagtggcggggcctaccatgagaatgggctggtgcctcaggtcggcctcgcgcaccgggcgctcgggcaaagcaggcactgtgcccctccgcgccagcagggccagcagtgcagaggggttggggggtgtttcaagctgtggcagtgcctggcgccaggctctgcagtagagctcggctgagagcagcagccgtgtcaccgggggcttcacatgctcctgcgcgtactggtcggtatagaagggctcccacagctccgggggcacgtgctctgtgggggcatagaggggaaacacgggggtcagggtcaccagatacaacacacacacacacacacacacacacacaccacatggcccggattaagagtgtgtctggaccagggaggatggcattgggaaaggagaaaggggatctgggctgagagtgcagatgtgcaggagtttgctggaggaaggggtgatggcgttgtaggcagaggggcctgcagatgcaaagcccagcaggtgggagagaacacggtgcctcagggagctgatgggcacttagagtggaaaggaggggaggctacccccaataccaggccagctggactggctcttgtaggtcccaggaaagacaataacatcggcaatcctaagagccttcctgctcttgccaatgtagactcactgagccttacatcaacgctaggaggcagc

SEQ ID NO: 34557 - DNA, 1140 bp, Artificial sequence
  DNA replication origin
ctcccagatctccggtcccccatccttctgacggttctatgccctggcctcaccgagggctgcgccggggccgccccgtctgcaggggctgctggagaggctcgctgggccgcttcctgctcggtcttctcctgcagccgccggacggtctggagggcagggagggggtcagtggtctggccactggacgatgctggtccccgaacccaccccaggcccaaccccacctaccgtgtccacccagaaaagcagcttgtgctccaagctggtcagggccaagggacctggcagggtctttgtccactcgaaggcaaaggcagccatgagggcatcaatgacagctaggtgggctccctgtgggggcaagcgctagagggtgagacctgagagctgcaggaggcgcacctcggcccccaagggcctgggaaaaggaagaacctgcagatgggagggacttgacggggggggtggggcttgagggggcggggccagtggttcatgggtggggccttaagggaaggaacaagaaatggggtcccggaaaagccacgcacgatgggtgggactttgaggtcagatgctaggcgttaggatagggtgggctgtgtacacaaatcctcaagggccagagtagcgcctttttggggagctgggtttgatgggaggggccaggcttgatgggaagagcttgaggggaggagccagggctggggggaagagctaggcttaatgaacagagcttgaggggaggagcctggactggtgggaggagctaggtttgatggacagagcttaagggacagagccaagactgatgataggaggagctaggtttgatggacatagcttaagggaaggagccaagactgataggagctaggcttaatggatagcgcttgaggggaggagccagacctcgtgggaggaactaggcttaatagcgcttgaggggaggagccaggcctggtgggaggaacctgggggaggagccaagcctgatgggaggagctaggcttaatcgacaaagcttgaaaggagccaagactgatagagggaacttgggaggagccaggactggcgggaggagcttgaggggaggagctgagcatggtaggcgtggtctaacaggcagtggcgggg

SEQ ID NO: 34558 - DNA, 837 bp, Artificial sequence
  DNA replication origin
aaacctcccccacttcctccttgtttatctactatgggagtaatttatatgaagcacagagaggtttagatacttctgcaaggtcacacagctcattcagggaagagagaaatttcaacttccagcttcagggatgggcctcctcctccttttcaaagctgggatttttctctagggaagctgggggtctcagttaggaaagttattctatcttcttctgcattggagggtcttccccttggccagagggtgccctgcctgctagggtcaggatccacgtttgtgatgggctgcaggtccccccttcagaaatttatgtggtctccccacctcggctaagggggacaggttcagggggtcccaccctcttcattaatgggaacggggagggcttgcccttctgaataacgggaggggaagttcgtccccacccatcagttcgctgggggaggggtctgccctctcagttaatggccgagattctacccttctcttggttcacagaggggttctccctgtctcccaggactggggtccaacctcctttgctcacagcttggggaggtatgagagggcgcgcagacaggcaggcagaaacagacatacagacagacagagctacaagcagggcaggcagacggggcggacagacagccccacttacaggaaccagcttccagtaccagcgcgtagggcactgaggccagagaggcagagaggagggcagcgggtaccggcacaggggacgggcagggcacagagagattgagagaggggggaagaaagagagagtgtgtcacctctagccccctccccacttcaggagtgtccaggaag

SEQ ID NO: 34559 - DNA, 1086 bp, Artificial sequence
  DNA replication origin
cggcacaagatctgttccacatccatttactcaccctcaagtcgaagcagctggggacaatagcagtggatggtggcggccagcgcggccccactggccaggtcctggaggctggtcaccgtcgggaagcagggggcacgtcgcgccaccacacggtccttgcggtatcggatctgcagatgggagccaggtcaggtgagtggccaggctggcccccagggtcagcggtcatgcaggctgggcagggaggcctggggtttccgccatgagggggcgggaagctgggggtcccagagacagagttggggggccagcctggagcaggggaggggcagcagcaagaggcagaggagatgtcttcgagcagccaggccagcagcgggggctggggacagggactcctgggaccccggggcgggggatacattaccatggggggtttgctccccgactccttcaaacagaaggcaattgcgtgctggggggagaggagcagccatcagcaagggggaggggtgctgacctgctgggcccccaagcccaccttgggggggagggggtagccctgaccctggtcctgagccccggccgtccagctccctgactgctctggccggcttcgcgaaccccagctcctcccagccccaagggaccccacagagtaggaaccccctcttatgcggggaatcctcctcccacaaaagacccaggcccccagcttggggagaggatgcagaggaagcgggtaggcaggaagggaacctcccaacccaggccccagggtgggggaaggagtgagcaaaggtggggacgccagccagcccaaaacctcccccacttcctccttgtttatctactatgggagtaatttatatgaagcacagagaggtttagatacttctgcaaggtcacacagctcattcagggaagagagaaatttcaacttccagcttcagggatgggcctcctcctccttttcaaagctgggatttttctctagggaagctgggggtctcagttaggaaagttattctatcttcttctgcattggagggtcttccccttggccagagggtgccctgcctg

SEQ ID NO: 34560 - DNA, 1252 bp, Artificial sequence
  DNA replication origin
ctcggatggggctggcggtttcgatgcctcccccaccagacagggagatggtttcgagggggtctcggggtgtggcatgtacactggtgctttggtgggcctgtcggacagtggtttggaggtcccctcgggcaggtagggggaggccagggatggcttggagggcccctcaggggagtggaggtagaagctgccgtcggccgccccatctgggaggagccggggctcggcactgtggatgatctgcagagcttcctcgatggtgggcaggtcaccaggctccgggggtggctgggtgggggtcctggccggcgcgggacgcggggggcccaggctgtccgagctcacagagcggaggagcacagggtctcccatgacgacatccacgtcgctgtccaggccaaagggggtgctgaatgacacagcctgggagaggggacggctgggcggccggagggaggggtcagcccctgggaccagcctcggccccaacccgccctagcctgctccaccccctaccctggcctgtgaggtctactcacctgagctgccggttccaggccttgcccagggcctccatatgggacatggacggggaagacttcagggagcctgggggaggcgatgagtggtcactatggggaccctgggaaccctgagtggggtcagccagcatctggggacaacctctgcaaggtcattgggtgagtcactgatggctcattatgtggtctagtgagaccagaggtttccagaaacagatacccggggccatttactgtcactacggggtactgtggggccactggggaggccattctgggggtcactttgggatgcccaagggggatctgatggagaggctattggaaggctcacgaggagacaacatgaggcccactggggcagtctgtgagtgggggggtcccccgtgacagaagccacctaccccctcctcacctgtggatcctcggagtggggactgggggccaccagatgacagaagcgggtggcggaaggtgaagacaggagaactgtacggagagacgtacttcagcctcaggacccccacctcctcctccgcctctccccggggggagacaacagcatcacccagctgcgtcccagtgctcagcaaggcagacatggagccccacacccacaatgccagagactcgcccagtgtggggagcgtacctactgccgctgttgttctgaggtggggaggcctcagtgccccggggggaggcag

SEQ ID NO: 34561 - DNA, 1142 bp, Artificial sequence
  DNA replication origin
caccccgcagcccgaaacacacgcggccagcggagctgcggctggcacccttgaccagggtgcttacgccaccccacgacgtagacagcctcccccacctgcgcaagttctcgccgagccaggtgcccgtgcagacgcgctcttccatcctcctggcggaggagacgccccccgaggagccagccgcccggccgggcctcatcgagatcccgctgggcagcctggcagatcccgccgccgaggacgagggagacgggagccccgctggtgctgaggattccttggaggaggaggcgtcttcggagggggagccccgggtggggctggggttcttctacaaggtgagtccccgagcaggtggctggagggtcctgggcctggggcgggggcgggtgggggcggggggaggtggacaaacccactattggatgaatagggctttactgaaggatgggtgggcgggtgggggatagatggggagccaggtatgaatggacagaacaggtgtgagtggctgggtaaggcctccatgggtgggagaggggggaaagggacatttgcacggtggggggcaggtatgtggggtgacaggggcctcagatgggatttgaccctgtctgttgggtaaggacttccacaaggggctgtgggggtgcagtggggtgagaggtcctccccctgtggcttaatgagtgaggccctcgggtatgtttgggggtgaggggtttccagtgggggctgacccagtcatgtccctcccaaacaaggtatgggtggccggacaagggggatagatagatgtggggaggggtggagaaacagggaggagtcatggatagacagatggatgaatggctggttgcatgggtgggtgggtgatggacagatagacggacaggaccaggatcttcagcgcacctccttgctcatcctctccttcaccccctcgcccccagcacgctcctaccacccctttcctggccctgccctgtgtccactgtctctccattcccatggctttcccagccggggacacctagggttacctgactggcctctgctgcctgcctccatcccgggccattttgcactgagtggtcggggattttgactgctccccttacccttgcttttagaatgaa

SEQ ID NO: 34562 - DNA, 1227 bp, Artificial sequence
  DNA replication origin
ggccgcagcaccttatcgaggtcgtccatcagcttcagctgggcccggcgctcgtactcctgccgcgtgaagtcccccttccgggggcccacctcctcctcggctggagcccgggcagcaggggctggagtcgccatcgggactgcggacacaagcggggctgggcccggggcctcctcttgggccagcctgcagatcacagggaatcggcatcagaaccgctcacggggtccgcggtggcagacaggccaaggagcgggcgtcccgggcaggcccggcctcacctcgcggcctcctccctccgctgttccttctccacctcctgccactgcttgcgccgccgcgcctcctctgctcgccgctgctgccgctccagcaggctggcccgcttttgggccatctcgtcctcaggcttgtcttcatcctggggacagacgccgagtccagccagccaccccctcccccaacatggctggaggcccatcttccctccacccagcctgcccgccacccacctgtgcttttgttttcatcattgttctaaatgcacttagttggtgcctactgtatgcacagccccacactaagtactgggacacaacagggatgggatacactgggtgccgctcacacacacactgcttaacccaacggggaagacaaaagcagcagacagcagtgagtgccagcaaaagctcgtgttgggcacagacactctacactgcgggaggaccccggcctggcctggagacacccaggaaggcttcccagaggaagtaccctgtagaatgatcaggatttaactaggtgggcgtacagagcagagcgttccaggcagaggggacagctagtgccgaggccctgaggctggagcaaacctactggggggcacggaagtacaagggggccagtgtggctgggacacagagctgaggacagtggcgcaggactaagtcagaagtgagtacaggccagacgcggtggctcacacctgtaatcccagcagtttgggaggccaaggcaggtggatcacttgaggtcaggggttcgagaccagcctggagaaaccctgtctctactaaaaatgcaaaaatcagctgggcgtggtggcatgctcttgtagtcccagctactcaggagggtgagacaagagaatcacttaaacccaggaggtggaggttgcagtgaaccgagatcatgccactgcactccagcctgggccacaga

SEQ ID NO: 34563 - DNA, 1561 bp, Artificial sequence
  DNA replication origin
cccgggacgcccgctccttggcctgtctgccaccgcggaccccgtgagcggttctgatgccgattccctgtgatctgcaggctggcccaagaggaggccccgggcccagccccgcttgtgtccgcagtcccgatggcgactccagcccctgctgcccgggctccagccgaggaggaggtgggcccccggaagggggacttcacgcggcaggagtacgagcgccgggcccagctgaagctgatggacgacctcgataaggtgctgcggccccgggctgcggggtccgggggtccaggtcggggcgggcggagggccacccggcctcgctcgggttgctgtgacgactcagccctggcacgaagcccagcccgcggcctgctgggtgaggacccttgggggacggggcctgcccagtgccctttccggggctcactgggtgaggcccccatgggtaaggggggagggggagggagatgtaagcaggggtgccgggagggggcgggtatgtggggtgacagggggcctcaggtggggttggacactgtctcttgggtaaagacttccatagggggccgggcgcggtggctcacgcctgtaatcccagcactttgggaggctgaggcgggcggatcacctgaggtcaggagtttgagaccagcctggccaacatggtgaaagcccatctctattaaaaatacaaaaattagccgggcatatggcatgcctgtagtcccagctacttgggagactgaggcaggagaatcgcttgagcctgggaggtggaggttgcggtgagccaagattgcaccactgtactccagcctgggcaacagagcgagactccgtctcagaaataagacaaaaaaaaaaaaaaaagacttccatagggatgtggggtgcagtgggatgaggggtctttcttctgtggcttcatggataggaacctttgggagtatgtttggggtgaggcgttgccagtaggggctgacccagtgctgctccccacttgcctgctgggcaaagcatcctccctcatagaggggtccccccataggggtgctgcagagggccgaggggtcttgggcaggactgactcctcctgtgttccccccacagcctgctggaccgggtgttgtggagggcaggggcttctggtgggcactgacctgcaatctctgtccccaggctctcggctgagcaaaatctattcccagtccaccctgtcactgtccactgtggccaacgaggcccacaataacctcggggtgaagaggcccacgtctcggtgagtttagcccgcacaggcggggttcgtatgccgggtggcttcccagagcctgggaggtgtgtgggcatctgggtgaacctagagggcggtatggctcgagtttatggatacgccatgaagagatggagggacgcgtgtgggcacgtgtgcatggggcatagtctgtacctggcagacaggactcaagcatgtgcctcagtgcacttgagtgccaggtgttcctgtgggaggaggacagcacggggcactgcatggacttgggagggtgtgcag

SEQ ID NO: 34564 - DNA, 1154 bp, Artificial sequence
  DNA replication origin
caaagtcagagggtggagactccagccccacccagacacggttggggacagacaggacccaggaataccgactgactgtcctccaggggatggcggccgcagcacacagggcccggcccgtggaccgcccgggtggggctatttgggggtgccgccgcccttcttgggagtggtgggtttcttgccctgccagaggtgtccctggatggtgaaggcatcgacgctcatggacatggtcttggcggggatctgggtgaagcgcttgcggtccgagttgtacttgtagatgccttccaccatggcgggcgtgacggtccggggcccataccctgccagccgcgacagctcctctgtctcccccgacagcgtgtagagcgcccggaactggcagctcgagtcgcgaaagaggatcaggaagtggttggccttgcttttctcaatttcctgggcaggagtgctggaaatggtcagctggccaagtcaggccacccacccacccaccagcccccaactcccacgtgtgggcgggctcacctccagaatgcgattcttctgcggttcgttcaccttgcccgccaggcagcagtgtgatagggcattgtggatgatgaacttgttggacttggcgctgggttctttgtacagccgtggacctagagggtgaggcagtgggagggggtggggggcagcaggaatgagcaggggctgtggaggagggtgcctgttgctcctcacatcacccagagcccctgcttacctgtgtactcgggcactgacgctggggaggaggcattgctgccattttcccagtcccgttcgcggcttccaggcaggcggcttggggacatgagacctgacggggagggagccctgcagtgggagaaggatgggatggaggtggggtcaggatgggatggaggtggggtcagagatgggaagcttccctatgtgcagaggggccaaggaaaataagggccacggctgggcatcgtggctcatgcctgtaatcccagcacttcgggaggccaaagcgggcagatcacttgaggtcgggagttcgaggccagcctggccaacatggtgaaacaccgtctctacaggcacgggtaaccccagctactcaggaggctgaggcacgagaatcacttgcaccc

SEQ ID NO: 34565 - DNA, 1165 bp, Artificial sequence
  DNA replication origin
aggagtgcctggccctgggccgggattggctgctgtgggaggtggggcggctgggccccaggccagatactgcccggcctcaccccgcagagccagttctggactcgagaggccagtccctccgctgcctggggccttggagtgggtcctgcccggaaacttccttgagcctctgtagcctgggaagggcaatccagcccctggctgcccaggtctcgccagcccctgcctctcagagcccttctgtggccccaggcagctgccgcctccctggggtggcacccactgtctgttccccactagggactggcccttgccctcaagtcttggagtcaggcaggctctggcccagctctgggaactgattagtaacgcgtttctgtgcctggacgggggccaggcgccagaccttgtgcacggcccaggaccagggcgtggtccttagtcctaagcctgggaagccattagcgggctgtaggctattaaggggttttaagtatcaagggatataatcagatttgtgcttcgaacgggtcacacaggctgctgtgtgggcaggaggcagctggggacatggggaggcccaggccattggcttggactttgcagggaggtgacagggctggagagaagcgagtgagacaggaggggagggctgagctgtgtagaactgggcggcagctgggaagccagtgccagcctgggttgcagggcaggccttgcatctgagagagacacccaggcaatggcagggggcaactggattgtcaaacacagatctcagagaaacctggaatcactggcccagaggtagatgccaggcctggaaacaccaggctggccaggggagacaagatcaagttagaagttggccccatgccaaacgctggttagggccagtaacaacagccacacagaccaggagaatccagcaagcgggggtggccaaggccacaggaagggccagtgggacacctcgagcctgagagatcagttcagaggcagcttcgaaacagccctggctgggggctgggagtgccctggctgaagctgcattaggggattatgggggttgaagacaggagttggtttgagaaagaacaggagactaaaaacacagccagggagtgtgggaccccggccagcctcggagggggggacaagg

SEQ ID NO: 34566 - DNA, 1283 bp, Artificial sequence
  DNA replication origin
ctctccctctggtaacaggcgtacgagcgcggcatctcgctgttcaagtggcccaacgtgtccgacatctggagcacctacctgaccaaattcattgcccgctatgggggccgcaagctggagcgggcacgggacctgtttgaacaggctctggacggctgccccccaaaatatgccaagagtgaggcgggcagagggcatggggggggtggcgggcgggctgggtttctgactggccccggctgaccgtgctcccctctccccgcctaccccgcccagccttgtacctgctgtacgcacagctggaggaggagtggggcctggcccggcatgccatggccgtgtacgagcgtgccaccagggccgtggagcccgcccagcagtatgacatgttcaacatctacatcaagcgggcggccgagatctatggggtcacccacacccgcggcatctaccagaaggccattgaggtacccaccgtggggggctgggccggggccagaggtccctgagcagacggaaggggtccaggcaggtgggaggggctgaggaggagccttctggaagcacagggatggccatggtgtgttgggagcccccgagctaccccggcctcactcccggcctccccaaccccggtgtccaggtgctgtcggacgagcacgcgcgtgagatgtgcctgcggtttgcagacatggagtgcaagctcggggagattgaccgcgcccgggccatctacagcttctgctcccagatctgtgacccccgggtagggctgtggggagggacgggtatcagggttgggggctgcggcggagtcagccagctcacgggcacacacacccacccctgccctgccccccacgcagacgaccggcgcgttctggcagacgtggaaggactttgaggtccggcatggcaatgaggacaccatcaaggaaatgctgcgtatccggcgcagcgtgcaggccacgtacaacacgcaggtcaacttcatggcctcgcagatgctcaaggtctcgggcagtgccacgggcaccggtgagccgtcccagctggctgagttcctgatccagggcatctcagcccggcctgacctgggctttccgggtctgggagcctcggatcctgatggcaatctccttgagggctgggccatcacctgggggactgggatagtgcaacgtccgatgtgtgggaggggcccccgtggcgctgaccccctgctcccaccccctagtgtctgacctggcccctgggcagagtggcatggacgacatgaa

SEQ ID NO: 34567 - DNA, 985 bp, Artificial sequence
  DNA replication origin
acgtcagccttggagtcagccacatttgcgttcagggttcaccctctggctctgcggccttggccccactaaggtggggtgtcttcatttgtaaaatcagggtgacagttactgcctgtcaccaatcagctcagtgacgcaggcacagcactgaggaggtacgtggtgtgagggccactccctcaggggttagctgactgtggctcttggcaggcagtggagtggcaagctcaggggatggcctgggggcaggtgggtgcagagggggccagagccgagagcggggaggctcaggaacccagggaagataggttgggagcctcgaaagccaaacgggctggccatgctcctggctgggggagccgccagtggggtgtgggcggtatgcgcttcgcagcgccccttccaggggcacgtgtaggccaaggctgtcggaggcagcagggcaagacccgtcagggctgggtagagagaggggacctgagctggggtgggcgagccaggtggaggacaggcgggctggggaagagggtcaggcaagcgagagggacgctttggagcaaattctgaggcctcggaggatgagctgaggcgagggtccctgcagggtggacccataggcgctggggggtttttggccacctattgggtgccaagtgcttcacacatgtgtctcagtcgagccctgaggtcactgtgtgcaaagggcagtcacccagtttactgaggaggtcctgaagctcccaagaccaccctggcagtgcagggcagggcgggggtgagaaggctccacggaggctctgtcctggggtcactacccagaggtgctggatgcgtcactacccagaaggcccccaggggttccacattgaggctggtgctaagagtgctgctgcctgtcccctgcgccactttcctctcacctccccttccctgggtccccacaggctcgggacgtgtacgaggaggccatccggacagtgat

SEQ ID NO: 34568 - DNA, 1685 bp, Artificial sequence
  DNA replication origin
ctgcccagcctcccaacccactcctgtgtccactgacccgaaatatctccagcttcacccccatctcgtttctcccggtcaacaaagccagttccgcccaaagccgaccctccagcaagacagaagctcactggtgttttgcacgctccattgctgaagctgattggccaatgtgtatcctgatggcgcatcttctggcgcctctattctgcttccggtcgctggcgtcgtcgaaaagaagtcaataacgtgggcctgtccgtcaaaaatgatttaaccaatagaaaacgggtctggctcggaggggcgggccgtcagtggtagacgtcataagcgcgcgactctctcctgtacctgggcatccagaaaaatggtggtgatggcgcgactctcgcggcccgagcggccggaccttgtcttcgtgagtccacagaggagccgggggtggcctgcgttggggcattgggacctggacgccgcaggggatcgaggctgggtcggcaaggagatttaggccgaaactgccaggccaaggtctgggaaccctaatgggccagagaccggatcgtcatgtccgcaccgaactgtccaggagtaaaaatatggtgttgtatcttcgggtctgagtagaaaaccactgtcgaagggaagcgtctagcctcccgaaccaggggcggaaatgggggcgtgcagggaatgggagaggaggaagatcgcataactgaaccttgagaggtgaagatcggtgtctgaagtaaaggcttgcttacgaggccagggttctggtttctgggatgaaggcttggttttctggatagcggtctctaggcctggactgcagcatgacagtttctggggtggtggccaggctagaagaaccctggtgatgtggagcttgtcaggcgatggccagtgaaatacttactctctggagtagaggcgtgacatcttcaccagattcttggtgtgcagagttaaaggcttggcttctggtgtataactcctcctgtgagataaaggcctagcttttaatttctggggcagagttgagctagacgctggctagtgggatcctgggggcggggctagtggcttggaatctggacctgagagccctggtggctggggtaaagatctggtcatctgggcctggggtggagatgggtcagatggtgacagtgggagtctgaggggccaaaggcctggtgtctgggaagaggcacgttttgaagaagtggggtctggtgtccaggactggcatctgggccagggccttggtatctaaggagtctgaccatctggggcagaaagcgagtggtgatgcggactcattcctggcccagagccctaatgactgagaagtctgatgatttgggttcgattttgggtagttgaattctgaggggtaaaggtctgggccactgtcttggtgtcgggcatctggtttggtgcctgggcatctggtgacctgacttccttggtgggtggtgggatctaggtaaaagtccggagtttggacctgagccccagcagtgggatggtgctgcacacaggctctgagggtaggcctctcttcttcccattccctggccctggcaggaggaagaggacctcccctatgaggaggaaatcatgcggaaccaattctctgtcaaatgctggcttcgctacatcgagttcaaaca

SEQ ID NO: 34569 - DNA, 1936 bp, Artificial sequence
  DNA replication origin
aggttcagttatgcgatcttcctcctctcccattccctgcacgcccccatttccgcccctggttcgggaggctagacgcttcccttcgacagtggttttctactcagacccgaagatacaacaccatatttttactcctggacagttcggtgcggacatgacgatccggtctctggcccattagggttcccagaccttggcctggcagtttcggcctaaatctccttgccgacccagcctcgatcccctgcggcgtccaggtcccaatgccccaacgcaggccacccccggctcctctgtggactcacgaagacaaggtccggccgctcgggccgcgagagtcgcgccatcaccaccatttttctggatgcccaggtacaggagagagtcgcgcgcttatgacgtctaccactgacggcccgcccctccgagccagacccgttttctattggttaaatcatttttgacggacaggcccacgttattgacttcttttcgacgacgccagcgaccggaagcagaatagaggcgccagaagatgcgccatcaggatacacattggccaatcagcttcagcaatggagcgtgcaaaacaccagtgagcttctgtcttgctggagggtcggctttgggcggaactggctttgttgaccgggagaaacgagatgggggtgaagctggagatatttcgggtcagtggacacaggagtgggttgggaggctgggcaggggatcttcctggatctgaagatgaggttggaaatggggggacttcaaaggaagagggagctccaaggagaaagctcttaagatttgagaggaacctttctggttggaaatccaggagaggggacgctgggctgggggggttctcggatttgggcttctgggtttgggggctgtgagagggctggtccgaggaaggacctcagagaggggtgagctgagaagggggctctaaagaaggaagacttaagatcctgggggagctctcgggctcgtggtgggtgggtgtctatgacagggagattcctagacttcgagaagtggagttgaagagtgacgcctcctgggtttgggggtgctcccgggatcttaagtggggatgggtaatgaggtctcgaggagatgcttttgattgtagctggggcgtctgtgtgtctgtctgtgtttgagaggaagactccagctcagagggaactttcaggaatgaggcctcctggattataggagttaggttttagggtgcgaggtttctgtacccttggtgggagttctgggattcttgggtcggccgtaacgaggcgcttctggactctgcagtaggatgggtcccccaggctctgaggagcctctgcacattgcttggggggagctcacctcacccaccctctgccattccagatgataatctacctcactttccctgtggctatgttctgggtttccaatcaggccgagtggtttgaggacgatgtcatacagcgcaaggtgggcataagaggagtgtttgagggttcattccaggggtgggagagggtgtggggcagcagtctgctggggactaatgtctgcctcccataagccgaccctgccctgatgtggggctctggaggcctttggctcgtgtcccatttgtgacttttccttacagagggagctgtggccacctgagaaggtaagtgatctcttcttcctgccagagggatggaggaggctggattcttgtatccgggatgggttttagatgaaaattttaggccaggcgcagtggctcatgcttgtaatcccagggcatgggaggctgaggtgggtagatcacttgaggtcaggagttcaaaaccagcctggccaacatggcgaaaccccatgtctacagaaatacaaaacttagccaggcatggtggcaggcgcctataattccagctgcttggga

SEQ ID NO: 34570 - DNA, 946 bp, Artificial sequence
  DNA replication origin
ctctcagccatgagtaaggaaccgagagcagaggagtagatggtttccttattgccttctcctggaagagtgaagcggatcccacgcggacccctttgtaattggcagggggcttccagtgaagacactgaaccctgaagccgtggtctggggcagggtggtgggagaggtgggcgggggggggtggtcccggctctgaggtgtgtgcccctccccccttcctgtcccacccgcttctccacccctagcttcaagagatagaggaattcaaagagaggttacggaagcggcgggaggagaagctccttcgcgacgcccagcagaactcctgaggcctccaagtgggagtcctagcccctcccctgatgaaatatacatatactcagttccttgttattcatttaagtgttttattcttttatcagtttttgggggccgagtgagacccaggatgcctcaggccctcagggggcttgtgtcgggggctgggggctgctgttccgacggaagccgagagcggtcgggtcctgaggggtgagcaggggttggggactgagggtcccagctcgtttctgtgctccgtcctgtggatgaagaggggtcagccagggggagggctcaagggcagtgccggccacaggtggcgaacaatggagagagggtgcaggtagccaccgtgtcccacctcattgtgagcactggtctatgtttaccctcaatatctgccatttagggtggcatttgagtgtgaggtggcaggtcttggggccctcgctgggatcttgatcagaacccaagcttcgtgtatgtgtgaagtcaacagatgtgagtatacagatgtatatatcctatgtgtgagcttacgtgacttcctccctgggatactttcctaggaaggggtcctattttctccctttggcctccccagaaccttcagacttggggg

SEQ ID NO: 34571 - DNA, 1140 bp, Artificial sequence
  DNA replication origin
cccctgtgccgaggtgagagggccctgcccccaccccacccccagctcaaggtctcagagcccatgattgacaagactagtttgtagggcacctaattaacgagtgagtctcctaggaccccctgacccagttgtggctgtagaaaggggctggtgggcttgggggtctgagtgccaggccccagggcagagggcagggctctccgtgtggacccctattgatgggagatgctgggacctgggggtagctcctgggccatgtttccctgattcgtgtcccagctcccaggccacactcatcaggccccaatctaggacggcgggacacgcatcggagcctgtcccttgaagcggtaccacgtgaagtggcactgctggccagggcccctggggcgggggccgggattgggaaggagactcatgtctcattcagaacagctctgcagagaggatcggcggggaccatggtgagagctgaggaagtggggacggcaggccccggggtcagggtgtgagcaagctggctaggaagtttggggaggggcccccaagctgaagggccaaccagactgagcgagtctgtccccaggcgggctccccagaccaggagggcttcttcaatctgctgagccacgtgcagggcgaccggatggagggacagcgctgttcactgcaagccgggccgggccagaccaccaagagccgtgagcatgggcacgggggtgctgtccatggggcgtgaacggggtgggagtgcagggcaagtggtcatctggagggcctgggggcacgggatgtgggaggtggttgtgcaccctgaagcatctgtgtgggggtgaaggggtagggttgggggcccccactccggctgtgtcctcccaagtctgtgaacgtccacgcagagagcgaccccacccccgagatggacagcctcatggacatgctggccagtacccagggccgccgcatggatgaccaacgtgtgacagtcagcagcctgcccggcttccagcccgtggggtccaaggtaggtgatgttctggcgatgtcgaggagaaacccgccaggcagtgctctccgatcctgccctccaccccagccaggagggaacagggcctgccccatctctgtccatccgct

SEQ ID NO: 34572 - DNA, 1740 bp, Artificial sequence
  DNA replication origin
gaggcccaggagtccgggccccagcctccgccacactctacccgtcccctttgggtccccggagtccggccccccaattttgttctgttctggcaccggagagcaggggcgtccagctgggaacccgtccccgcccgccccctcgagggtcaggtgctcggacgcccagcccggcccccaactcccagccgccatgaaacccaggatcccagagcccgtgcgtccccgacccccgtcccacaccggacgccagagcccggccccggagaggcactcactttcccccaccaccgccttcagccccgagggcgccatcttccccgaggggcgccgccgccgcttccgggtgtgtcccaaggtgggggcgtggccccgcgcgtcacccacgtggaccccgccccgcgggccctgtccccgccccctgcgcacctggcccctccccgccgtcggttctcgcccaggcccaggaagttgagtccctggcggggaggacgggcaggtgcgtccgcgctgccgagcacgaagtcgctggaggtgcacacctcgacgacacgctcacagatgggagttcagacacacacttcctggcttgcgtgcgaagcaggatcgcagggcaataatccctccatcttccccgggaggttctgtgcctgcaagatacacggcacccactcgatgccaccgggccgccactgtctgggcctgggatcttgacccacttgccttctgtacttcagggtttagaggcagcagcagcagcagcagccgtcttggataacttttgatggattcaggaggcctggagacctcttgtgtgcaggcacctggacataattttcattcagtcctgcccaatgttccgacctggactgcggtgccgacgaggaaaccgaggcttagcgggatccctaatccaaggccacgacgagtgagcctgctgggttcaagccaggagcctgtccccagggggcatttgtcacagccttaccctcttccgggaggcgcaacgcttaccctcgtggaccaacaatcgaattaacatgctgatacacacatggggtgagtgacgccctcaaatgcttgcaaacacagacacacactcggaatttcagaagctgcttctgctgtgtgtcctgtcgcttggaaggcacagccccagcagcacccatacaaaatgaggtctccgatttaaggtgcgaggtatgtgtgcaaacagactcttgctggtctgagctggttccttcgctcggccgtgttgatgaaggtaccaagccccctgccacttacatgggacatagggagtgaatcagacccgaaggtctgggggagataggaaaggatccatgctgccctaaaggaaataaactaatgtgacaacaagtgccacagaaggtaggggtgggaggggactttactgaggatgacccccgagggcctctctgaagaagcagccttttgacattatccctaaatggattctagaagcagccacacagcatgtccaggtagagaagggaggagccccgagcttaagaaggctggagggtgggggcagcaggggccagacttctgtaggacaaggtcagactgacccatcccagtgccaggatgcaggactttcagtgctaaaaataggacagtcacaggcaaaccaggacggttggcaaccgtaggtaggagtttgagctatttcttcctttcctttccttttcccttcctttcttccttcttctccctcct

SEQ ID NO: 34573 - DNA, 1820 bp, Artificial sequence
  DNA replication origin
caagacggctgctgctgctgctgctgcctctaaaccctgaagtacagaaggcaagtgggtcaagatcccaggcccagacagtggcggcccggtggcatcgagtgggtgccgtgtatcttgcaggcacagaacctcccggggaagatggagggattattgccctgcgatcctgcttcgcacgcaagccaggaagtgtgtgtctgaactcccatctgtgagcgtgtcgtcgaggtgtgcacctccagcgacttcgtgctcggcagcgcggacgcacctgcccgtcctccccgccagggactcaacttcctgggcctgggcgagaaccgacggcggggaggggccaggtgcgcagggggcggggacagggcccgcggggcggggtccacgtgggtgacgcgcggggccacgcccccaccttgggacacacccggaagcggcggcggcgcccctcggggaagatggcgccctcggggctgaaggcggtggtgggggaaagtgagtgcctctccggggccgggctctggcgtccggtgtgggacgggggtcggggacgcacgggctctgggatcctgggtttcatggcggctgggagttgggggccgggctgggcgtccgagcacctgaccctcgagggggcgggcggggacgggttcccagctggacgcccctgctctccggtgccagaacagaacaaaattggggggccggactccggggacccaaaggggacgggtagagtgtggcggaggctggggcccggactcctgggcctcctagggtgcctgccgggggaggagggcacagctggatgcccacactctaggatctcttaagccgggcaaagttcaggggctggattcttggggcctcctagggctctggtcagcgaccctaggtgctgtgagcgctcaggggacgtgtccaggccccacaggggtggtgtaggggatgtcttcctccttgccccatttccaggagcgccttgcagctggaggacgcaggcgtccaggcctcaccggccccggttcttgggggaagggtggagggcgcctcttcctccaccccggggagttccggcctcagctgctccttccgccctggccgtcttgataacagtggacatgacacagtggacgtggctgggcggggccaccccgttacttctctccactctctcctctaggcagggcggtctgtagctcaaacccctttaattgggggagattagaaaaaagtgattccattttacagatgaggaaactgagaccggaggtcagtgggatagcctcagctaggcatgcctcagagctgggaaccaggggtcctacattttagaccaggttggggggactggctgaaaccctcacagcaggaatacttgaggtagcaggtggggaagccgagagcctggcgctagaggcagatagagctgtagatgatcccggttctcctcttttcattcacctaaaacatgtttatcgagtggcaccttttgccccagcactctgccacttagacactcaggatgcgtaggtgagttacatgttgcctaagaatctgtttccctgtctgtaaattgggggtgaccccagaagccaatttgcagaactgggggctaaaaataaatgattcctgtgccgtgtctcacacctgtaatcccagcactttgggaggccgaggcaggaggactgcttgaggccaaaagtttgagaccagcttgggcaacatagcgagaccccatctatacagaaataaaaataaattagctgtgggtggtacatgcacctgtagtcccagctactcgggaggctgaggcaaga

SEQ ID NO: 34574 - DNA, 873 bp, Artificial sequence
  DNA replication origin
ataggtctttgatgttcgcctggggaagtagggggaagagggtagggattggggggcgaagccaggcagtgcccacctgggtctcagtccaggctcgaaatccaggctgtggccctgcgcccatggggaggggggcttccttccaccagcgcctttggtgacctgggtccgcccctaccttgtccgtggtcagcctcttgctctcacagaaggtcctcaggagctccgtgaccttcctggccatgagggtgggcgggggtgagagtgaggggagaggagccacaggccatgggtgagcccactcaggggggacagggagaggtggggtgaaattggaggccagtctggagtcacacgaggggtgctcatgagggccaaagacttggcagcagccagggatcccaaggccgctaccaggcccacagtgggcggtgggggggggatccggtccccgtgtgcacgcacttggacacatctgcgatatgcatgtggcgaagctccacccacaagtcatcgtcctcgtccagcaagacggccttctcccgcgcctcgctcagcccggtggtctcatacctggggaggaaggagggagcctgggggtcaggggagctgaggactggggaaccaggtcagtggcaagggtggggacgggttccaagtctgcagacctgtatgtgtcctgctctatgtccagcagatcatacgccatggcctggaacgtgagctcatgcagtagtggggacacggggtcagctgcccggtccattatcagcagctgggagcgggttttctctgggccctggggtggggtttagggcaggaatgaggcactgaccctgagccggttggggctgcccctcacctcccaagcac

SEQ ID NO: 34575 - DNA, 2119 bp, Artificial sequence
  DNA replication origin
catggccaggaaggtcacggagctcctgaggaccttctgtgagagcaagaggctgaccacggacaaggtaggggcggacccaggtcaccaaaggcgctggtggaaggaagcccccctccccatgggcgcagggccacagcctggatttcgagcctggactgagacccaggtgggcactgcctggcttcgccccccaatccctaccctcttccccctacttccccaggcgaacatcaaagacctatcccagatcctgaaaaagatgccgcagtaccagaaggagctgaataaggtgtgctcgggtgggcagggagcggggacacctcggcccctcaaccccatgctctgtctgcgttctgccttgactcagcctttgttatcccccaacccccaccctgcaccctgcagtattctacgcacctgcatctagcagatgattgtatgaagcacttcaagggctcggtggagaagctgtgtagtgtggagcaggtggggcagggcttgcggggggcaggggtgatggtcctgccaaggcggggtattggggaggggctgaactgtagagatggggggttctgggggaggggcagggcttgtggagaggtggaggggccttggagagaggtgggacctggtggggaaggagtgggtcttgtggagaaacggtcctaggatgagggtgtggcctgtgcataggtggatggggcttggagaggtcagacttgggtgaggggcagagccttggacaggtggtcccaggacaggaatgtggcctattcataggtgggtgggaccttggagaggtaggcagggccttggagaggtgcgacctgggagaggaatggagccttggagaggtgggacctgggtgaggggcagagccttggagaggtgggacctgggagaggaatggagccttggagaggtgggccctgggagaggggcggagccttggagaggtgggacctgggtgaggggcggagccttggagaggtgggacctgggtgaggggtggaaccttggagaggtgggacctggatgaggggtggaaccttggaggggtgggacctgggagaggggtggagccttaagagaggtgggacctgggagaggggcggagccttggagaggtgggacctgagtgaggggtggggccttggagaggtaggagctgggagacaggtagagccatggagaggtgggatctgggtgaggcacggggccttggagaggtgggacctgggtgaggggtggaacctcggagaggtgggacctgggtgaggggtggagccttggagaggtgggacctgggtgaggggtggagccttggagagctgggacctgggtgaggggtggagccttggagaggtgggacttgggtgaggggtggagccttggagaggtgggacctgggtgaggggtggagcctcggagaggtgggacctgggtgaggtgtggaacctcggagaggtgggacctgggtgaggggtggaacctcggagaggtgggacctgggtgaggggtggagcctcggagagctgggacctgggtgaggggtggagccttggagagctgggacctgggtgaggggtggagccttggagaggtagtctcaggatagtggtgtgacctgtgtgtaggtgggtggggcactggaaaggtgggacctgggtgaggagcagggcctgtggagagactgtccctggacaggggtgggaccttgagagacctggtgctgagatgaggtaggacccaaatgtcctcttgccgaggatcctggggatgtccttggcccgcctctcccatccccttccctgacacatagcggccggtggacggctgaccccatgcccgcaggacctggccatgggctccgacgcagagggggagaagatcaaggactccatgaagctgatcgttccggtgctgctggacgcggcggtgcccgcctacgacaagatccgggtcctgctgctctacatcctccttcggaatggtgggtgggggctgcagggagttggaacgtccccatttgccagcgtctcccacgatcctgggaactgctgaaccccacagctctccttgggtcatttgcactcaccgggctcaccaaccccca

SEQ ID NO: 34576 - DNA, 1386 bp, Artificial sequence
  DNA replication origin
tagagggacaaggaggaagccaggaagccgccccaggcccattgccattggatggtgctgccctgggatcctgggaaggccagggctggggctcaggggcactcctgcgggacaggggaacagactagagagatatagcggaggcagccggcaggtggggaggaagtgaggctccccagcacaggccccgctgtcaccccaattcctcagctgcgggcttggcgtgcccccctcagcagagcagatcggtgccaagggaatgccagcaatgagcattttcccctaagccctgaggcttagcacctcagcaggagggaggctgagccgccagccgatgcggagggctggcccccaccctgacctgccacccagtacctccattacatccttgatgaccggggtccagcgggacagctgataggtgggctccatgcgttctctcggctccagccggctggaggtccccgagccctacaggcagggcagggagggcagcagggggattgaggggaaggaggctggtcacagaggggctgcgcctggtgtggctggtagggtgggggatggcaggcaaagatggggaagtggaacagagagcgagagagagcgagagacagcaagaaagcgagagagagaaacagtgagccagagagagacggagagagaaagccaaagggagagagagcgagccagagaaagacaaagacagaggcagagataggcaaagagataagaagcagtgagacaaagtatgaaggcaaagagagagacaagagatgaagcaggaaacagagagaggaagatggggacagaagggggacggagaggggaggggagcaagacagagaacagagagaaaggggaaggcagagagaagggtgagagagagagatatggagaaacagtgcacagcgagatggatgagggatgggggagagatggggacggggtgagggcaccctggagggggacgcacagggccagagagagacaggagaggctgacccaagagtcaagcacacacatggctgtgtgtgggtgctggatgggtgcgggggaccctcagagacccctgggagcccagatagacaatgtggtgtagcccccatgctggggaccctactccctgcctctagcactcagaccacccgctcccaactgcaccactgccaggaccagcctggcagcgaccatgtctcacttcccctgcctattgtgtaagctgggactgggagaggccccagtgtcctctgggccccagaccagacccgaaacactgcttttggcctcccagcaaccacaccacgccaggaaccacaccgtgcctgtgcaccaatggccctctgccttgcagagccccggctgtgatccgcaccctctcccagg

SEQ ID NO: 34577 - DNA, 860 bp, Artificial sequence
  DNA replication origin
gactagaggcctagactcctgggtcccccagaggcaggaggtggagatgctggttcctgtctgccaggatcttggcccctgaataccccgtggggggcactcctgaccccggaccccatgcctggggttcctcccctaacctgcctctcggccgccaggacgccgtggaggaccggctggacaggaacctgtggcccttcgtatccgaccccgcccccacggccagctcccaggccgctgtcaggtgaggccccggggccgcccccgcccacgcctgggtctgtgttaggtgggcggcctggcggcggtgagggcctcctgcctggactttctgcccctgccctgcacagtgcccgcttcggtcactggcacaagaacaaggctggcatagaagcccgggcgggcccccggctcatcgtgtatgtcatgggcggtgtggccatgtcagagatgagggccgcctacgaggtgaccagggccaccgagggcaagtgggaggtgctcattggtaagtcaccaggactgggaccctggggtctggggcttgggttcccggggcctgggcttgtaccttctaggtgtctggactccagagtccttggagtcagggacctggtttgctgagggacagggacagccccacaccagccgggaccgggagcctgtcaaagacgaaggcagcgccccccaacatcttccccaaacctctgcccctgcacaggctcctcacacatcctcaccccgacccgcttcctggatgacctgaaggcactggacaagaagctggaggacattgccctgccctgacccctggccccgccccctacccctccctttccagagaaataaactcttcccgt

SEQ ID NO: 34578 - DNA, 1364 bp, Artificial sequence
  DNA replication origin
gaccccataggaggaagggcgatggggcagtagaaagtcgcggtgtccccgccccctccagcagctacgcgccccactctcttggagacgctagatcagtccctccgggcctactaaagaaaccacgcagggctcagatccgctccatcatcatcatcatcatcatcatcatcatctccaggtttatttccagctcccccgcaacccctccggacctggagccgcctccgcccgcgctgtgcacgcgctgcgcgcgacctcagggctgcacacgacagcagcgcgctccggtccagtccatgcccgcgcactggcagtgacatgtggtctcggcgcgcacatcccacgagccacaggcggagccacaagtgcagccggtgacggcgaagcctgcagcccggaacacaggagcgtggactctgagctgggaggctgagggtgggagcgggaggggggtggggagcgcggaggggggttgggggggcgggggtggggacggggacggctggaggctccaaccactgaatgggcactggaggcagggagtgagggtggacaccagtgtccagatggtgggcggagaaggctgggagtcaggaccaagatcctaggggagtagaggctggacacggggaacgtggcggggagggggcattcccaggggacttggaacagaaatgggcgcctggacaacagtctcctgcactcacctcgggggcaagtagccaggtcccccctggaggtgacgctctggcactccaggccaatgctgcttattgccctaaatactggggggcaggaggaaaggagacagggggagctgtgagaccaaacggtccctcccccatcctcccctagccctgttggtttggagctaggtccctgtgggcataggagctcactggcctccaggaccctgtcttgagttgggtgttttggagtaagggaaggtttggagtgagagcggggattgggtttggagccgtggataaggtggggacagtcggaggggttgggagtggagttggggttgaatttatgatctggttggatttgaggatgagatttggtgagcgctggggctgggttggagtcaggtctgtgccagggatcagtgaggtctctgagacccttggggagcttgcccaagtggggggtcctcacttagggagccggcgacctcctggatcctctcattgatggcttcttccatggagcacagggtcttgctagacaccaacagccccaggacagggaggaggaggagacagagagctttcatcctgcaggcgctgaaagagggaaccaagagacccacagctggatcagccctgccctgtggggaagatccggcccatggaggg

SEQ ID NO: 34579 - DNA, 827 bp, Artificial sequence
  DNA replication origin
aaagaaagaaagaaaagagaagaggggagaggaggggaggggaggggaggggaggggaggggaggggaagggaagggaagaaacgaaaccctgggggggatctaggagcagacaagtcccctgctctgtgttttcataatctagtatccaggaaggggtaagcaccctgcgtgtatctggttgtaactaactactcacaactgcacttgcctgtgtgaaaacgtgagcttgtgatgatgcgtgacgtcaggtaggcgtccctgactctccgtaacccaactttgcctgtgccttggggattcctccttgcaggtaggaagtgaggggtacaggttccagctctgggctgagacatgattcagggttccaccctgacctggggctcctggagtcttggggccctggagggtcccgtccactgcccagactgacccaggtcctcgatgaagcctcattatgaggactgggggaaaaggacccagccacttcctggggaggtcggagaccccagggtgagcgtcaaggtagcctcaaagatgagacgtcacctcttgaaggcagccatgagccttgggtggggacgtcactagaggaagttcaggccctattttcggaggaagcagttggagaccccataggaggaagggcgatggggcagtagaaagtcgcggtgtccccgccccctccagcagctacgcgccccactctcttggagacgctagatcagtccctccgggcctactaaagaaaccacgcagggctcagatccgctccatcatcatcatcatcatcatcatcatcatctccaggtttatttccagctcccc

SEQ ID NO: 34580 - DNA, 1469 bp, Artificial sequence
  DNA replication origin
gcccctcgtcccacgtatagaaaaacctcgagtcatggtgaatgagtgtctcggagttgctcgtgtgtgtgtacacctgcgtgcgtgtgtgtgcgtgtgtgcgcgtgtgttcgtgtatgtgcgtgtgtgcgtgcgcgtgtgtgtgcattttgcaaagggtggacatttcagtgtatctcccagaaaggtgatgaatgaataggactgagagtcacagtgaatgtggcatgcatgcctgtgtcatgtgacatatgtgagtctcggcatgtcacggtgggtggctgtgtctgagcacctccagcagatgtcactctgagtgtgggtgttggtgacatgcattgcacgggcctgtctccctgtttgtgtaaacatactagagtatactgcggcgtgttttctgtctacccatgtcatggtgggggagatttatctccgtacatgtgggtgtcgccatgtgtgccctgtcactatctgtggctgggtgaacggctgtgtcattatgagtgtgccgagttatgccaccctgtgtgctcagggcacatgcacacagacatttatctctgcactcacattttgtgacttatgaagataaataaagtcaagggaaaacagcgtcgctatgggacctgttactggggcaaggggaggggttttgggacctggggagagggagagtctgcacgtgacaatgaccccggggcaccagggtgggcgagactgagtgccctgcgtgagtacctgtgcatctgtgaatgagtaactcattccctgtgtcttccctgtgtcccagagtgggtgcccctgagcatacaacatctccctgagtgtacctgggaccacggatatatacaagccctaagcgtgtacccacgtgtgtaattgtgcccgtgagtgtatctatgccattgagcatgtatccatgagtgtacatgaccctaaggtactatgtccaccgctcatgcatgcacttgatttgttgttgttgttgtttgtttttgtttttttgagacagggtctcgctctatcacccaggctggagggcagtggtacgatcatgactcattgcagcctcgacctcctgggctcaggcgatcctcttgcctccgcctcccgagtagatgggattacaggttcacaccaccacacctggctaattttttttaaagaagtgggagtctagctatgttgtccaggctggtctcaaactcctggcctcaagtgattctcccacctccgcctccgaaaatgctggggttacaggcgggagccaccgcgggccacatggatgcacttgagacaattgaacccatccccaaggacataggagtgcctggaaaagccaacaggtgtgtccatgtgcaagggtatacattggcccattgtcatacgtgcgccctgagcaggtgactaggcctgcaagcgtcccctccagcgtgggccacccagagccagcgagaccctggccacgc

SEQ ID NO: 34581 - DNA, 1696 bp, Artificial sequence
  DNA replication origin
agggaagccgctgtgtgtgagcaccgcctccacgatgcccgccgtgaagctggcgcagttgagcgtgctgttctccttgggcacggagatgtaggtgttgatgagcggctcgcgctcgatgatgtagaaggtgcgcgcgtcatcgttggcctgctccagcttgtccgcctccttgccgaagagcgccttccacacggcgcccttgacgaagagcaacgcgcctagcaccttggtctcacgccgggcacccttttcgcgcgccaccagcgcatccagcacgcgcgcgcccacctggcggcccagcgcggccaggcgcgactgcagctcggccacggagaagacgcggctctggcagtgctgtaccagctcggagaacagcagtgcgaaggcgctcaggctcacctcggtgcgcggccgcgccagcgcgcgctccagcagcgccgacttcccgcgcgtgaagcgcgcctccatgccgccgccaccctgcggggagaccaggaagtgcaggtgtcaggggcaatgggaaggggagcaggccgggaggaaaggagggagaaccgcgaggggccctgggacaccctcgacccatgccactgttgtgtgctccagtgccgacttcccacttgcaaagagatgcgcgtaaaacacgcctcgattacacgtaaccagataaatcaagggaggggggagtcttataccctcggcaggcagcgggctagcgggagtggggacaaggtgggaggagagacacgagggggaacagaagaggaggccgaaaccacccaaccctcgggcatgcagacggttcaattgcgaaagcgccttcctgcccgctccgccacctacaggagtaactagaaaactagtgtatggggggaggggcgtcagatctagggcagggaggtgacaaagatgaggcaccacgaggggatatgggcagtcgctcctgccccgccctgcgctccagcacagacgaccctcgggaactttcctgccggccccctgcggaaagccagagtaaagggggtggagggtgggagtggggtaggagcgtgtcaagaccaaaagccaggagggttgggggctttaacaggggggatccgtggggccaggcaggaggggcgggtaacccccaaccccaagccctcaggcaggcagctccgatgtgtcacgcaggaacccttcgtcctttgagacgcggatgggcctgggttctgaaggctgggaggaggggcccagaggtgttgggagcctcccacccccgtgctctccagaaaggaagctggatgctgagcaactgtggtcctcccatcagctgtcggtgcggggagagggagatggggtagggggctcctgaagagaaatggggtggggagcgggcgccgagacgggatcggaggggcagctgagaacccgcccccaccatgcatggggaggtgtgtggatgctaagccgaccccaacgaggtctgcgtgggaggtgggagaaccagcggggaggggtgtcccaggggctccgggccgcccccgccccagcatgcagatccgtccgtggcgagggccctgggcgcgcgagatgggagagggatcgttaagaccccaccaccgggctgcgatgggggctgaagtgagctgaactgccgtagggtcagggccccgcgaccctcgccccgtacctctacactggggagaaaccc

SEQ ID NO: 34582 - DNA, 1779 bp, Artificial sequence
  DNA replication origin
gtataagactcccccctcccttgatttatctggttacgtgtaatcgaggcgtgttttacgcgcatctctttgcaagtgggaagtcggcactggagcacacaacagtggcatgggtcgagggtgtcccagggcccctcgcggttctccctcctttcctcccggcctgctccccttcccattgcccctgacacctgcacttcctggtctccccgcagggtggcggcggcatggaggcgcgcttcacgcgcgggaagtcggcgctgctggagcgcgcgctggcgcggccgcgcaccgaggtgagcctgagcgccttcgcactgctgttctccgagctggtacagcactgccagagccgcgtcttctccgtggccgagctgcagtcgcgcctggccgcgctgggccgccaggtgggcgcgcgcgtgctggatgcgctggtggcgcgcgaaaagggtgcccggcgtgagaccaaggtgctaggcgcgttgctcttcgtcaagggcgccgtgtggaaggcgctcttcggcaaggaggcggacaagctggagcaggccaacgatgacgcgcgcaccttctacatcatcgagcgcgagccgctcatcaacacctacatctccgtgcccaaggagaacagcacgctcaactgcgccagcttcacggcgggcatcgtggaggcggtgctcacacacagcggcttccctgccaaggtcacggcgcactggcacaagggcaccacgctcatgatcaagttcgaggaggcagtcatcgctcgagaccgggccctggagggccgctgaccctgccggagataaaggatacagagagcccctccccacgtgtgtcttgtgtcttgtgtggcggccttagatccactcagtaccttgagccacagccctgccccaggctggggagggaggccaggtccgaatgtgtttacagtagagtgggggcgggtctggccatagggttggggggttgagtgagaccaggagtggtggggagaaataaacccggcaaaaggagttggtgggaaatgctggcaggttctggaatcacggttggaggctgtctgcaggctggagggggcatggggtcctgggagacgcatcaggctgagacagacgcctttagactgggggtgggcaaactgcgcaaagtgccagatgggcaatattttatgccatgtggtctttattattattttttttatttgttgagatagagtcttgctctgtcgcccaggctggagtgcagtggcaccatctcacctcactgcaaacctccaccttgggttcacgtgattctcctgcctcagcttcccaagtagctgggattacaggtgcctcccaccacacccggctaatttttgtatttttagtagagatggggtttcaccatgttggtcaggctggtctcgaactcctcatctcaggtgatccgcccacttcagcctcccaaagtgctgggattacaggcgtgagccactgctgtgccgccatgtgctcttgccccattactccgctgatgtactgaatgcaaccacagacaacatgtaaaggagtgggtgtcaccgtgtgcctagaaaacaggcagagggagattgtttgccttcttccctcatttattatatttttcagagacagggttttgttctgtcgcccaggctggagtgcagtggcagcatctcggcttcggctcactgcaagctccgcctcccgggttcatgtcattctcctgccccagcctcccgagtagctggaactacaggtgcccaccaccaca

SEQ ID NO: 34583 - DNA, 898 bp, Artificial sequence
  DNA replication origin
gttcacgccattctcctgcctcagcctccccagcagctgggactacaggcacacgccgccacgcccggctaattttttgtatttttagtagagacggagtttcaccgtgttagccaggatggtctcgatctcctgaccttgtgatccgcctgccttggcctcccaaagtgctgggattacaggcgtgagccaccgtgcccggctgaatttttgtatttttaatagagacggggttttgccatgttggccaggctggtcttgaactcctgacctcagatgattcgcctgccttgacttcccaaagtgctggaattacaggcatgggccaccacacccggccaaagatctgatgtcccaactttcaaaggtggtctcaggcatcagactctggaattcccagctcccatgtgccacacccagagaccagacccagccaggcctccaagaaggggacaaatgtgggaggccatcactgccccattttattgatgcaggctggacaggaggactcaccacctgagctggggatactcaggtcctggggtgctgaggagatggggctgcatctggagagggtgctgttggggtgtactctcatctggagagggtgctgttggggtgtactctcatctggagagggtgctgttggggtgtactctcatctggagagggtgctgttgggggcactcccatctggagagggtgctgttggggtgtactcctgggaaggcaggggccatagaggagcgggagatgtgtcagctgcctccgtttgggtggcagaaaatgtcacagggacctttcagccacaaagaggcttttaggccgtggttgggggtcttcagggtcttgctctgggcctggctgtatccatgctcaagagtggagaggggcagag

SEQ ID NO: 34584 - DNA, 863 bp, Artificial sequence
  DNA replication origin
ggtgggtctgcttttagccgggaccccaggagtggccctaggaggggtgctgccacctagtctgcccagggtgcccaaggcacttccattggccccacccccgagcctctcctccaccccaggctttgtgtgcaacacgtgccctgaaaagtggatcaatttccaacggaagtgctactacttcggcaagggcaccaagcagtgggtccacgcccggtatgcctgtgacgacatggaagggcagctggtcagcatccacagcccggaggagcaggtgggctggggctctgcagaggtggtgggcagcatggcgagggtggggggacccccaccccactctacccaacctctcgaagtgggctggaaggccccgggcacatgtctccagtcctccagccctgtcctgtcccccaggacttcctgaccaagcatgccagccacaccggctcctggattggccttcggaacttggacctgaagggggagtttatctgggtggatgggagccacgtggactacaggtgaggagggggcctctgggatccaggggaggagatggaaataccgtggagggaggagctccctagataaactgcatcggaaagcggatgagggctcagagataagggtctctagggtgcaggggagaaggacgccagtgggggctgggggacctggccaaggcttctctgacctggaggaggggatatagaggaaggggctcagggaggaagttccatgcacagattagaagggtgagtcttggccgggcagggtggctcgtgcctgtcatcccagcgctgtaggaggccgaggtgggtggatcacctgccaggagtttaagaccatcctggtcaacatgg

SEQ ID NO: 34585 - DNA, 3076 bp, Artificial sequence
  DNA replication origin
actgtactctggcctgggagacagagcaagactctgtctcaaaacaaaacaaaacaaaacaaaaaacatctgaccacgtgtagtggaaccttccctgcatatcactataggaaaacctacttacttaaagcgggtttttgctatgttgcccaggctggtctcaaactcctgggctcaagcgatcctcctgcctcagcctcccaagtagctgggattacaggtgcacaccactgctgaaaatctattttgaagcaagaaagatttgatccagtaagagtgggtttaaccttccacctgggaggcgatagcaacaatgtctgggagtttcactgcggtggggggaaggggagaaagagaccatattgagggattgtgggacctagtcttgcaatcccattggctctcctgaccaaagcctcccactggaagaaaatcatcacaatttcccagacattggctaggagtgctggtttggcgggttctgccagtgatgatgaccagggctgttggtagggatggtgcttggggaaagtaatcgctggtggacctggccacagcactggttttgctgtcggtgccagtgatgaagacacggctggtgtggttggtaaagatggtgttggctgtggtgtgggtggtggagataagctgctgctggtggtgggtacctctgttaatgatgtcggtgatgaaggtgttgctgaccttggaggggtttgttggtggttgaagtgctgctggccatgaggtgtttgtcatgatggggttggtggctgaggcactgttggctatgaggtgtttgtggtgatgatggtggttgaagtgttattggatatgaaggtgtttgtggtgacagtgatggccgctgacgtgctgctggtcatggtgttggtgattgaagtattgctggccatggatgtatttatggtaatggtgtcagcagttgaagcattgatggtcaagaatgtatttataataacggtgttggtggttgagctgcttctggccatgaggtgtttgtggtgacattggcgtcagctgaggtgttgctaaccacgaagtgctgatggcgatggtgttagtgactggcgttctgctggctgtaaggtgtttgtggtgacagtgttaggggtttacgtgttgttgggcatgaatgtgttcatggtgctggtgttggtagttgatgtgttattggatgtgaatgtgctcgtgctgatggtgttggtggttgatgtgttgatggacgtgaatgtgttcgtggcgctggtgttggtaattgatgtgttgttagacatgaatgtgtttgtggcaaaggtgttggtggttgatgtgttgttgggcatgaatgtgctcgtggtgatggtgttggtagttgatgtgttgttggacgtgaatgtattcgtgctgatggtgttggtggttgatgtgttgatggacgtgaatgtgttcatgacagtggtgttggtagttgatttgttgttggacatgaatgtgctcgtggtgatggtgttggtagttgatgtgttgttggacgtgaatgtattcgtgctgatggtgttggtggttgatgtgttgatggacgtgaatgtgttcatgacaatggtgttggtagttgatgtgttgttggacatgaatgtgctcgtggtgatggtgttggtagttgatgtgttgttggacgtgaatgtattcgtgctgatggtgttggtggttgatgtgttgatggacgtgaatgtgaatgtgtgacaatggtgttggtagttgatgtgttgttggacatgaatgtatttgtggtgatagtgctggtggttgaggtgcttctagttgggaggtgtttgtggtgacagtgtttgcagttgcagtgttgctggctgtggaactggcaatgtagtcatggtgttggtgactgaggtgttgctggccatgggtgtatttatgatgatgtaatggtggttgaggagttgtttgtggagatgatgttggtgactgatattcagctgcctgtaaggcatttgtgatgatggtgttggtggcatttttggccatgaggtatttgtggtgctggtgttggtggttgaagtgctgctggcatgaggtgtttgaggtgatgagggtggtgaaagtgctgttggtgatggtgcttgtggctgaggtgctgctggctgtggaactggtgatgtgggtgataatgttggtgattgaagtgttgctagccatggatggatttatggtgatgttggtggctattgaggcacttctatgagctgtcgatggcgatggtgttggtgattgatgctctgctcgctgtgaagcatttgtgatgatgggatttgtggctgaggtgctgctggctgtggagccggtgatgtggtcatggctttggtgactgaagagttcccaagccgtggtggatttaaggtgattataatgacaactgaagtgcttctggccatggtggtgcttgtagcgatgatgctggtggttgaagtgttgttggacatgaatgcatttctggtcatggtgttgacggttgaggggcttctacctgtggggtgtctgtggttatgacgatggttgaaatattattggacatgagtgtgtttgtggtcatggtgttgatggttgaggggcctctagctgtgaggtgtctgtggtgataatggtggttgaagcgttgttggacgtgaatgcatttgtggtcatggtgctggtggttgagggacctctagccgtgaggtgtctgtggtgatggtggttgaagtgttgttggacatgagtgtgtttgtggtcatggtgttgaccatattggacatgaatgtgtggtggcagtgttggtgcttgtggtgcttctggccatgaggtgtttgtggagatgctgatggtagttgaggtgttgatggtcgacaccgtgctctgctaaccatgaaggtgtttgtggccatggtggctgaggtgcttctactatggatctggtcagcatcatagctccagcagagaacacagcccgtgaggctgtctgttaggccctggggtgggtctgcttttagccgggaccccaggagtggccctaggaggggtg

SEQ ID NO: 34586 - DNA, 1067 bp, Artificial sequence
  DNA replication origin
gaatgactgactctggtggtctgaggctgttcattttgggtcccaaaatgtcccctccaccttgatctggggtaatggccgaggaccaagatggtaaagaagtgagggagggtccgggtgcggtggctcatgcctgtaatcccaacacttcgggaagccgacgtgggtggatcacttgagaccaggagttcaagaccagcctggtcaacttggtgaaaccccatctctactacaaatacaaaaaattagccaggtgtagtggcgcgtgcctgtaatcccaggtacttgggaggctgaggcaggagaatcacttgaatccggggaggcagaggttatggggagctgagatcatgccactgtactccagcctggatgacacagcaagactctgtctcaaaaaaagaaaaaaaatcaaaaaggaagggaaagagttggccgctgagcattggagaggtggctgggggctgctgagtggacatagggacagcatttgaggccaagccagggtggggtcactgggggattagtcttgagggcaggtcgggttggggatcctaagggggggtctgccgtggtggccaggtgggagtgaggaccctggagggtctgttttggggggcaagacaggaggtagagccccagggaaggctgtcatgggggcaggatgagagtggggaggccatggaggaggcagtcccagggacaaggcaaaccaggcagggggaaccctaagagggggatgtcacctggtccagggggaagagggagcagctgtggggatggggagaagcaggttatttttttgagacgagccaggcgcgggtgctgggtgagcggtggggtggaagatcgggaagtgcttggacaaggcctggacctgggccggggtgtctgggtggatggacggactgtcccaccaatggggacacacgaggagaaggaggaggaagcttgggaataagtccagctgggccatgttgtgaggacatggggatgaagtcttagttccaggatggggctgggatggagtttggtgtttcttttctgtttttctttcttttttcttt

SEQ ID NO: 34587 - DNA, 2186 bp, Artificial sequence
  DNA replication origin
cggggcgtgaggggcgggagtttctgagaccccggagatggagtctcgagtgcgtgggggccctatggtccctgaggctggaagggggtcccctgagtcctcccaagtgacccgaggggcatgcattttggggcgggggtcgttccagcctcgaagcagacggcggcgctgggtgccctgaaggaggaggtcggagactgccacagctgctgtgagggggcgcggtcgaggctgtgggcgcagggatggggtcttgcggccgcgatgggaggggggccggggcggaggcctgcggcgggtggtgcggggcgggggctggtctccgaagtcccgccccatcctcgccgccctcgcccctctcaccctgcggctcccaggctcggggacgcaggcgcagctgcagaccacgcgcgcggagcttggggaggcgcaggcgaagctgatggagcaggagagcgccctgcgggaactgcgtgagcgcggtgagggcccgacgcgaccccggccctgagccctggccgcgtcccccgaccccgaccccgtcctgagtgctgacccccgaccccgatcatgcaccccgtcctgaccctgacgctgcactctgaccttgactgccactcctagcgccggccacacccggaccctgcccagttgtaaccgcccttgaccctgtgccatcctggacgctggcaccgagggtacaatgaccacagacaggggtcctgacctttagctagtcatgaccctggtcctggccctgaccccagccataatccccgctcccttgaccccgcagtgacccagggcttggctgaagccggcaggggccgtgaggacgtccgcactgagctgttccgggcgctggaggccgtgaggctccagaacagtgagcgagacggggggtcgggggcgggctgtgagggcgtaagcggaccctgtcactcctggaccttggcctggttctgtgtctccacccctgagcccgcggggccgaacccctacccactgcatcctctcggtgcgttgcccctggaagcacgcgacctctctgaccctcgccaccccgcagactcctgcgagccgtgccccacgtcgtggctgtccttcgagggctcctgctactttttctctgtgccaaagacgacgtgggcggcggcgcaggatcactgcgcagatgccagcgcgcacctggtgatcgttgggggcctggatgagcaggtgcgcagggggagggggcgtggtcaggcggtggggcagggcggggcggactctgcaggctcagatgtcccctcctttctagggcttcctcactcggaacacgcgtggccgtggttactggctgggcctgagggctgtgcgccatctgggcaaggttcagggctaccagtgggtggacggagtctctctcagcttcaggtgagggaaaggctcctggtgagacctggggagggagacaggttaggctctagaggacatgctttggctagatctcagggacccctcggctggggctccatacttagggatgggcaggctggaccccaggaactgtcctcaggttaaattctgggcgttaaaaagttatataccaggtgtatactcaggttagacagttggggtgtctagagtagacccaagcaataaacaggctagagcctgaagaggaaggcgggaccccgagttcatcctctgtctagattcccagcaacacccccactcaacccccctgtagccactggaaccagggagagcccaatgacgcttgggggcgcgagaactgtgtcatgatgctgcacacggggctgtggaacgacgcaccgtgtgacagcgagaaggacggctggatctgtgagaaaaggcacaactgctgaccccgcccagtgccctggagccgcgcccattgcagcatgtcgtatcctgggggctgctcacctccctggctcctggagctgattgccaaagagttttttcttcctcatccaccgctgctgagtctcagaaacacttggcccaacatagccctgtccagcccagtgcctgggctctgggacctccatgccgacctcatcctaactccactcacgcagacccaacctaacctccactagctccaaaatccctgctcctgcgtccccgtgatatgcctccacttctctccctaaccaaggttaggtgactgaggactg

SEQ ID NO: 34588 - DNA, 1627 bp, Artificial sequence
  DNA replication origin
aatggtgctaggtagacatgtataacctcattgtctttatttttttattttttcaatttttgttttcatatatatatatatatatatatttttttttttttttcagaaatgagggtcttgttatattgcccaggctggtctggtctggaactcctgggctcagtgatccttccatgtcggcctcccaaagtgctgggattacaggtgtgagccagcaagactgtcttgtttctttatcatagcatctttgtgagagaggcccatcgctatctcctttacagtggggaaaactaaggcttctagaagctacctagaacccatacagtggtagagtcctgcagctccgccggctacctccctaacaaaactgtttgttcccttctggtacagagggactggatcaaggtcaggttcaaacccagcctctgcaggcacctgcaggggagttgagaagggacctgaactggcctggggggctatgcctgagggggctttctcaggagccagcaggggttacaatttggtcgggttcagtgtgtccctcgcgggataaaacccagccccaggcccataagagatggtgactaagctccaaagagaagcctccagccccaggcccataagagatggtgactaagctccaaagagaagcctccagcaccagcctggggatggagctgcagtggccagaaccaggaggctggaaccgcccggcctcactccagcccagcccagcccagccttgaaagggcccaatcctgtgattggtccatgggttcccgttgccaggaattaaggccaagaaaatgggaaggaaggaagggagtgcgtaggtccagtgagaacaggcgtgaaatttatatctctgcccaggactgggtgcctgcatcgccatggacaccaccaggtacagcaagtggggcggcagctccgaggaggtccccggaggtatgagcaaggagactgccccatccctgccccagtgtctggggtttgatgggggaggggagggaagagtcgagacaggccagggttgtgggtgcaggagagacaccacaggccatagagccagttggaccagggtccaattccaactctgccgcttagaagctgtgtgaccataggcaagttacttaacttctctgaatctcagtttcctgggagtaactcaggcctccagggctcagttctgggggacccagcatgccgtccttgttatgccagggccctggggacgctgggtgcactggagcaggagacccctcttcttggccctggctgtcctggtcaccacagtcctttgggctgtgattctgagtatcctattgtccaagggtgagtgactctcaatggggaggtgttgcatccggcccccctggggacagaaaacccccactgcatggcgcaccagctgcatcctggggtcctgttcgcgtctgagtgtgagcagagtgtgtgtacatctttgggccgtgtgcactcacgcgtgtgcacatggcgtgctcgtatgtgcgcgagtccccgcgcgtttgtctcccatcggcgtgtgtgcacatcgtgtgagctgtatgcctgcccgcccgctccgtgctcccgagttgggggacgctgcaccccccgggcgagg

SEQ ID NO: 34589 - DNA, 898 bp, Artificial sequence
  DNA replication origin
catcgtaatgtgttctggggaaaggatttacatggaagtgtttcatcagcccttatggaggagatagaattagttcatttgggaaatcggaggttttctggaagagatagcatgagacgtgtggctttgacgacatgtgtattgtggacagagaaaggaaggacacaccaggcacagggcacagccaagacaaaggcaagggggcaggaaagtggggctcagctggatacacctgtggctgaagctgccttggcgagccagggcggagctgtccagtttagcgaggaagccagaaggctgcccatccatgtcccgtgcccagacctcgctgtgggataactgagaggggaagagaggtcctagaaggaggcagcagacctccactctctacccctggcctaggacagggaagggaggcctgtttctcggggaggggggcagggaacatgtaaccaggcaatttgaaggcaatatgatgagtctgggaagtataggagactgtgaggaccactggagacactggctgagccgggagggcttcctggaggaggtgatgcctggggaaggagtcagaattattccagaggagatggatacattaaagaatggccccaacatggttatcagcacatgcaaagattgggagagtaagggaacaggacttgttggagaagctgagagtaattcaggggcagtcatctggggctagggtgtcagctggggtcacatcatacaaggacctgaagagcagggacaagaggtttgggcgaatgtgggaagaaggtgaaaatcacaggattcagccccaaggccatgaccactctggtttccattctctgcagagatgagagggttgctgtaaccagggaagccagcccactgcaaagggcatatggtg

SEQ ID NO: 34590 - DNA, 877 bp, Artificial sequence
  DNA replication origin
gctggggcctggactcttgggtcctggggatgtggggctaggggcctggactcctgggacctgaggaggttgagtttggggcctgaattcctggttcctgggaaggtggaggctggggccaagactcctgggttctggggaggtagaagttgaagcctgggttcctgggtcctggggaggtggggtcaggggcctagactcctgggtcctggagaggtgggggcctgggcctggactcctgggtcatggggaggtggggacttgggcctgggttcctgggacctggggatgtaggggctgggacccagattcttgggtcttggggaggtgggagcaggtacctgggttactgggacctggggaaggggaggctgggtcctgggtccctgggtcctggggaggtgggagctgggggcctgggttccagggacctgggaatgtagaggctggggcctggattcctgggtcctggggaggtggaagcaggtacctggttcctgggacctggggaaggggaggctggggacggggtccctgggtcctggggaggttagagctagggcctggattcccaggtgttggagtggagggggctggggctggggttcctgggtcctggggtgctgagggatttagaccaggctctccctgggccaggctccggtggggacactggcaggctgacgcatgtatcctctctcagggtgtcttggccatggtcccctggtgctgcaactcctctccttcacgctcttggctgggctccttgtccaaggtcaggggcaggttctgagggtctggggtccccacgcctggcttttggctgtggacacagcctggggctgccagatctgggagggaggtgggactgagagcc

SEQ ID NO: 34591 - DNA, 1283 bp, Artificial sequence
  DNA replication origin
tacgtagggaggcataacaaagtcgctttccattagaatgaattgaattttattaaaagcatcccatcgctcaaccatgtcatgagtggaggagtccttctccctgtcaaccccagaccatcccccaacacctccctgaaattcctgcaaggtcaggccgatctcaggctctgactcctttcactagcctttctggtgatgtgatcttacccagcttcctgtttgtcttcctgagagacagtagatttagaaagtgaggatcagagggtggaaaataaaagctgtggtccccaggagtcctgaacatctggggacagcgggaaaacatgagtgactccaaggaaccaagggtgcagcagctgggcctcctgggtaaggctgggttggaactctgggatcctgggtaaggggaagggatggcccaggctctgagctgatgtctgtcaattcagaagaagatccaacaaccagtggcatcagactttttccaagagactttcaattccagcagatacatggccacaagagctctacaggtaggcaagagttagggagcagatagtggaagacagagcctcccagacccctgggtcctggggaggtaggtgttggggtctggaatcctgggttctggggaaggaaggtctgagacctgggttcctgggtcctgaagaggacggggtagggatctgaactcctcacacctggggaggtgggggttgaggcttgggttcctggggcctggggaggtgggagaggggttctggactcctgggacctacagaggtgggggttggaagctggacacctgggtccatgggaggtagggactggagcctggactcctggaaccagaggaggtgggagaaggggcctggattcctgggtcctggggcaggtgagaactggggactggaatcctgggtcctggggaggtgggagctgggaccagattactgggtcctggggaaggtgagaactggggcctgaattcgtgggtcctggggaggtagaagcaggtatctgggttcctaggacctggggaggtgggagcttgggcctgggttcctcctgggacctggagatgtggaggctgggacctggatgcctgagtcctggtgttgcaggataatttaggaatcacagagatcaaggggttgaggaggatttattattattattattatttaggtgcaccagcccagtcagattaacatccaaaaagactgagccccaaacaaagagtcaagttaccttttaagcatttcatggggtagggggag

SEQ ID NO: 34592 - DNA, 1174 bp, Artificial sequence
  DNA replication origin
tttttttgagacagagtcttgctctgtcacccaggctggaatgcagtggcgccatctcggctcactgcaagatctgcctcccaggttcatgccattctcttgcctcaccctcccgagtagctgggactacaggcgcccaccaccaccacgcccggctaattttttgtatttttagtagagatagggtttcactgtgttagccaggatggtcttgatctcctgaccttgtgatctgcctgcctcagcctcccaaagtgctgggattacaagtgtgagccaccatgcctggccaaaaaggcagttaatttttaaaggattccacctctttctcttcctcagggggaattgggttttcttacatacaactgagtttttgcttacacattctttaatttcttttcattcctgttccactggggaggtggacgcaggtacctgggttcctgggacctggggaggtgggggttgggacctaaactcctgggacttggggagggagaggctggggatggggttcctgggtcctggggaggttagagctagggcctggattcccaggtgttggagtggagggggctggggctggggttcctgggtcctggggtgctgagggattaggccaggctctccctgggccaggctcaggtgggaacactggcaggctgacgcatgtatcctctctcagggtgtcttggccatggcgccctggtgctgcaactcctctccttcatgctcttggctggggtcctggtggccatccttgtccaaggtcaggggcaggttctgagggtctggggtccccaggcctggccttttggctatgaacagagcctggagtggccaggtctgggagggaggtgggactgagagccaagatgttgtccctgggggtctgtaggggcctctcccacagcccctccccactctagagcaggacaggagagggaggaggaggaggggaagaacctggctctccttggccttctgtgctgccttctccaggtgtcagttttcctcatcttcaaaggggattaactgagaccttggctctcacaaatgatgtctctatggggctcagttcagggcttggcacacagtaggtgtttaataattgcagttccttttcttcttggcccagtgtccaaggtccccagctccctaagtcaggaacaat

SEQ ID NO: 34593 - DNA, 1828 bp, Artificial sequence
  DNA replication origin
cctcagcctcccaaagtgctgggattacaggcgtcagccaccgcgcccggctggttataatattttaaaatacctggcacatggcaggtattcaatgtttgttgaaagaatgcatgaacattgagagtttttgatgaacctgagatggttctgggtagacatgcgtaacttcattgtttctcggtgtttctttgagagaagccccgtcactgtactcttttcagggttggtaaaagaaaactggggcttctaggctggccgccgtggctcacacctgtaatcccagcactttgggaggtcaaggaaggcggatcatctgaggtcacgaattcgagaccagcctgtccaacacggtgaaaccccatctctactaaaaatacaaaaattagccaagcgtggtggcacgcacctgtaatcccagctacttgggaggctgaggcaggagaatcgcttgaacttgggaggcggaggttgcagtgagccgagattgcatcactgcactccagcctggacaacaaagggagactctgtctcaaaagaaaaaaagaaaaagaaagttgaggcttcctgaagctacacactgcacagccccatccgccacccaccaagtggtagagtcctgcagctcagcagaccacctcctcaacaaaacctctgtttgctctcttctggcacagagggagtgaatcaaggtcaggttcagacccagcctctgaggagggacctgaactggcctggggagctacgccttgggggctttctcaggagccagcaggggttacaatttggtcgggtccagtgtgtccctctcaggcggaaacccagccccaggcccataagagaggggtccaagctccaaagagaagcctccagcaccagcctggggatggagctgcagcgacgaggaccgggaagctggaactacctcaccccgagcccagctcagcccagcccagcccagaaagggcccaaccctgtgattggtccaaccctgtgatttgtccttgggtccctgttgccaggaatccaggccaagaaaatgagaaggaaggaagggagtgcgtaggtccagtgaggacgagggtgaaatttatatctctgcccaggtctcggtgcctgcaccgccatagacaccaccaggtacagcaactggggcgggagctacgaggaggtccccggaggtatgagcaaggagactgccccatccctgccccggtgtctggggtttgatgggggaggggagggaagagccaagacgggccagagtcgtgggtgcaaaaaaaacaacacagagccagttggaccaggggccaattccaactctgccacttagaagctgtgtgaccataggcaagttacttaacctctctgaaactcagtttcctgagaggaacccaggcctctagggctcagtcctgggggacccagcatgccgtccttgttctgccagggcactggggacgctgggtgcactggagcccgagacccctcttcctggccatggctgtcctggtcgccagtactgtgggctgtgattctgagtatcctattgtccaagggtgagtgaccctcaatggggaggggttgcgtctggcccccctggggacacaaaacccccactgcatggcgcaccaactgcgccctggcgtcttgctcgcgtctgagcgtgagcagagtgtgtgtacatctttgggccgtttgcagtcacgcgtgtgcacatggcgtgcacgtatgtgtgcgagtccccacgcgtttgtctcccatcggcgtgtgtgcacatagtgtgcgctatatgcctgcctgcccgcccgctctgtggtcccgagtc

SEQ ID NO: 34594 - DNA, 1286 bp, Artificial sequence
  DNA replication origin
cggcgctgctcggctgccaggacctgctgaggacaaacggtgtgtgcagagccgggcgcctgggcgcccggggcgtgtgcggcgggagcgtctgagaccccagagatggagtcctgggtgcgtgggggccctgtggtccctgagtctggccacggggtgtggaagggagtcccctgagtcctcccaagtgacccggcgggcatgcgttttgggatgggggtcgttccagcctcgaagcagacggcggcgctgggtgccctggaggaggaggtgggagcctgccacagctgctgtgagggggcgcggcccagactatgggcgcaagggtggggtcttgtggccgggatgggaggggggccggaggcgaggcctgcggcgagtggggcggcggggggctggtctccgaagtcccgccccatcctcgcctccctcgcccctctcaccccgcggctcccaggctcggggacgcaggcgctgctgcagaccacgagcgcggagcttggggaggcgcaggcgaagctgatggagcaggagagagccctgcgggaactgcgtgagcgcggtgagggcccgacgcgaccccagccctgagccctggccgcgtcccccgaccccgaccccgaccccgtcctgagtgctgacccctgacactgatcatgcaccccgtcctgaccctgacgctgcactctgaccttgactgccactcctagcgccggccacacccggaccctgcccaggtgtaaccgtccttgaccctgtgccatcctggtggctggcaccgagggtacaatgaccacggacaggggtcctgacctttagctagtcctgaccttgagcccaaccaaaatccccattcccttgaccccgcagtgacccatggcttggctgaagccggcagggaccgcgaggacgtcagcaccgagctgtaccgggcgctggaggccgtgaggctgcagaacagtgagggtgagggggggtaggagggggtgcggtgtaagtggaccctgcccgtgtgcgtcgccggaccccctctttgaccttggcctggtcctgtggctccacccctgagcccgtggggccaaacccctaccccctgcatcctcttggtgcgctctccctggaagcactcgacctctctgacccttgccaccctacaggttcctgtgagccgtgccctacgtcgtggctgcccttcgggggctcctgctactatttctctgtgccgaagaccacgtgggcagaggcgcagggccactgcgccgatgccagcgcacatctggcgatgt

SEQ ID NO: 34595 - DNA, 905 bp, Artificial sequence
  DNA replication origin
ccccgcagtgacccatggcttggctgaagccggcagggaccgcgaggacgtcagcaccgagctgtaccgggcgctggaggccgtgaggctgcagaacagtgagggtgagggggggtaggagggggtgcggtgtaagtggaccctgcccgtgtgcgtcgccggaccccctctttgaccttggcctggtcctgtggctccacccctgagcccgtggggccaaacccctaccccctgcatcctcttggtgcgctctccctggaagcactcgacctctctgacccttgccaccctacaggttcctgtgagccgtgccctacgtcgtggctgcccttcgggggctcctgctactatttctctgtgccgaagaccacgtgggcagaggcgcagggccactgcgccgatgccagcgcacatctggcgatgtagggggcctgggggagcaggtgcgcaggaggaggcggcgttcacccgagggggcgtggccgggcggtggggcggcgccgggggagggggcaggacgggtctgactctgcaggctcaggtgtctcctcctttctaggacttcctgagtcgtgacactagtgcccgtgaatactggatcggccgcagggccgtgcaacacctgcgcaaggttcagggctactcgtgggtggactgagtcccactcagcttcaggtaggggaagggctcctggtgaaacctgggggccacaggttagactctagaggacatgttttgaggccgaggtgggcggatcacctgaggtcaggagttcaagaccagcatgggaaacgtggcgaaaccccatctctactaaaaatacaaaaaattagccgggcgtggtggcacacgcctgtaatcccagctaaccctggatgctgaggcacgagaatcacttgaaccca

SEQ ID NO: 34596 - DNA, 1177 bp, Artificial sequence
  DNA replication origin
gaccagcatggggaacatggtgaaaccccatctctataaaaaatacaaaattgagccaggtggggtcgtgcatgcctctaatcccagctacttgggaggctgaggcagacagatcacttgagtccaggagttcgagaccagcctgggcaacatggtgaaatcctgtctctactaaaaaataaaaagttagccaggcatggtgacacacgcctgtaatcccaggtgcttgggaggctgaggcacgagaatcccttgaacctgggaggcggaggttacagtgagctgagattgtgccactgcactccagcctgggtgacagagtgagactccatctctacataaataaataaataaatacatacataaataaataagagctcaccagagccaggagcctggatccatttctcaaacctttattgatgctcccccaggctgcaaagagagctttgcaggaagtaccattttcccctttgcgggaaagtgcaggaaaaccaaatagctccattcctcagttgcctgaccttggctaggaggagaggtggggtcagaccactgggatccagaaatggagattttggagccagtgaaggttaggttaggtttgcatgaagtcagagcagaggtcccagagtgcaggcaccggacagggctgggcctggccgattggttctcagcagtggtggatggggaaaagaaaatccttggcagtgggttccagtagccgggatggtgcacagcacccctttgggcactgggcacggctctggggcaccgggcggggtcagcaccgtgcctctgctgacagatccggccagccttctcatcacgtggtgggtctatccacagccccatgcccagaatcatgacacaggcctcgcacccccaaaattcattgcgttccccctgtaaccagtggctgcagtggttgaatggccgggcggggggtgatgctgggaatctaagctagggatggacccggggcccccacttccttcccaggctctagcctgtttattgcctgggtctacgctagacaccccaagtgtctaacctgagtatacacctgggatataacttactaacgcccagaatttaacccaaggacacttcctagggtccagcctgcccatccctaagcatggagccccagccaaggggtccctgagatctggcc

SEQ ID NO: 34597 - DNA, 2170 bp, Artificial sequence
  DNA replication origin
cggagtgggggagggggatcctgcaggagctcctggggaggggtccggagggatcggcaacgagggtgggcaggggccagggtcctccgaaggtcccgggctggggatgccgaggctcccagcgcgggttccggggcacgacggcccgagttgcggtcctgccggttccccgcgggccgcatcacggagccgccggcctgagcaggcgcccgggaggcccggcccgcgccgccctacctgcgccgagcgcgccgccatctccgtgccgagcctcgccgccccgggctgagccgccggatcctagccgcgccgttcgccccgcagccccggcccggccccctcagccgccccccgggaccgcggccgccgccggctccgccgctgccatttcacccgctgacaggagccgctgccccgcccccgaggccccatccgccaattcgccgcccccaggcgccctggccccgcccaccagccaggagtgacggggtgtctgaccattccgtggccattccgtgaggcgggccctggctacgttcagaaggttgccgcctctgaggagagagcgaattgaaatgagggaagcggtgaaggacaggtagttttgcgtatcggaatgaggaatcctattgatcaacacctgataagaccaatagcaaggaaagtgggggtgtgtccgtgaggaaaggctgcggccctgaggaacaccaggcagacgcggccaagcgtttggcactaagccccgcccagagccgggctttctgcccaataacgagacgccccgagacgtccattattatctgcccctcaaacctgggccctggcaactgctgggggcgccataaagaagattgacacctagggaaccaatgctactgaaggagggcgggaaagtgacactctctgaccaatgggtatgtgagattggtgggagcattggcgtcctgggcggtggggcttgaggcctgggttgaatgaaatgggggtggggctaagaggagggcgtggcctaggccagagatggggcggggtcaagcaagggaggggctcgggggttgggtctgagaaggggcgtggccagaaatcctgaagactcactggggacgtgatggcaccgtgtcgtctaggagcccagttctgtgctggggacggggcggttgatattgggggcgggtcccataaaagattcaggcccgtcccctgtcttactccaggccaggttaaatgtgttctctaaagctcacagagccgcgtgtttctccatcaaagctcggttcgcgccgtgatcgtggggagggataggccctcccattccccatcctcccaggctgatagatcctcggggagtcgggatgcagggcctaggtcgggtctcttccaggtccccagcatggaaactgcttataaacatttgatgaatgaatgaatgaaaatgggcccgtgactcttttaacagagaagggagaggtggagaatccttcaagctagagaggaattcgtagggacagttactgacagcgggcaagactgaccaaaatggacttatttcctccccaagatgtagggatgggccctggagggggtggggcagggaaggaccttgtcatagcagagagggtgacgtcataagtgtgtttttatttatttatttttcagagacagggtctcgctctgtgtcccagtttgcagtgcagtgatgcgaacatagctcaatgcagcctcgaactcttggactccaatgatcctcccgcctcaacctccccagtagctgggactacaggtgcgtgcacaccatgcccggctaatttttttggtagaggctggggtcttggtatgttgctcaggctagtcggaaactcctggtgccaggttctcccacttcagcctcccaaagtgctgggattacaggcatgagccacctcgcccagctagatgtcctaagttcagaatggggaagggaaggctggacccagggaggggcacgtcaggacttcctaaggtctgagagctcaaccttctctgtagtaggagactctgtgtggccttgcaagcagtgactgacatccacgtatggtcccggcctctgtccagctctctctgcctctccctccctcttcctgtctattttgcatctgccaacgttctggaactgttaataaacctccccagg

SEQ ID NO: 34598 - DNA, 2200 bp, Artificial sequence
  DNA replication origin
aagtcctgcagcagaccatctctcatctccattcttccagctctgattcgagctggctccctgcaatacagctcagccctaggaagatggccacttttcaatgaagtgtcaactaagaccctcgcagggacctgggtggccagtgattcacaggagcccataggactcccctccgagaccttgctgtccccttccacacggcactgggggaacacacagggccacaccctagccttcctgcagttccaagttctgttctaaaaatttagccgctctccccgcaccccagtttccgatggggaagttgaggtactgagccgcaatgagctttttcctggatggtccacaatccgctagtgaatatccacaaggaagcctgggccttttatctcagggtttctgagcacagttatgttgtcagaaggaccccagacgcacagtgcccaggctgcgcgggactggaccggcccggctcctcgccccctgcagtcctggccacagtgtcgcgccagcatctcctctcctgtcttgtctcatccctgtgccagggccaagccacctgcgatcccttccaaaccaccctccgctgaccacagaagcccagaggaacctacaggttggaccctgaggccagagctgggagtggggagggcggcgggatggatgggaagagccacaaaagacggaaagacacagggacacgggtcctctagctcaatcacatcccggccgagggggaataaaacgaagcagacaactcattcatgttccactcgagcctcttcagcacatttttcccttctgaaaatattccttaacaaagagctgcctgcttctggcaggccccgacccaggtctcaaatgccaagatagaaggaagctgttttgttttggccaaacacactagttgtgggtgaaagaactctcgggctgtcaggggccagctctgaggagcaacctggaccgccctgctggctctggcatttgaggccagtaggcgtgatggggtcaggaggctgggggcagacttcaggacggaagccaggagctgtgaatcctctcccttcccgccagggggtggcataaatcagggggcgggcagtggttccttcgggacactagtgtaggagagaaagtgagcgtccttccctttgaaagggcacagcagggaaggatggataacttggcagaggcctggggcaggttcccacaggggtaggtgctgggggattctggggccctgtcaccctccaaggctccagtgtgggcgctggtttggtggaggggcaagttggcttcctggggtgcggcaggcacctcatggtctctggaatctctgcttgagctgggggagctgtcggggactctgggagggcctggacaggtgggatctgaggaggggtgcagaagtgttgagtgggtgggggcaggggcagatatgcctggggtctatgttggagctcttaagtttttctgtgtgtgctgggggatctaagtgactgtgtgtgtgtgtgtgtgtgtgtgtgtgtgtgtgtgtgtgtgtgtgtttggggttttcagaaagatgggtggctctggatggggagtggggtggttcagaatatccaacgggaggtcttgagcatgggtggatttttcaggatccaggagccaggatccagatggggcaggatcagtggagctaccacagtgtgctgggtggacgccggggagtggtgtttaggggtgcccttgggcatgtggcagctggggtgggagatgggctagcaggctgagctgagggctgtgggcaggggtaggaaatccgacttacagaggccagagaggggtcctgtggggtcagcatggggggcgggtaggccctgaggctggtctccttggggagaggtgggggcagttctgggcccaagataggaggacgtgaagtgagggggtgcggggagggggtggcaagtgttgtccagaagggaggggtcctgagagatcagggcagaaggtggacgggggttcttgggcttggggggcgcttctgaggggctgatcggcggagtggggggatggggagccctgagggggttcccggagaggagtcctgagggtcactgcaaagggtggacgggggtcctgggcctgcggggtcctcatggggaggggacggagtgggggagggggatcctgcaggagctcctggggaggggtc

SEQ ID NO: 34599 - DNA, 906 bp, Artificial sequence
  DNA replication origin
tgtgcatgtctgtgagaatgtgagtgtgtgtgtatcaagtgtgtgcatgtgtgtgcatgtctgtgagaatgtgtgaatgtgtgtgtatcaagtgtgtgcatgtgtgtggggatgtgtgaaagtgtgtgtatcaagtgtgtgcatgtctgtgaattggggtgtatcaagtgtgtgtatgtgtgtgaattgtgtgtgtgcatgtatcaagcatgtgtgaatgtgcatgggtgtgtatcaagtgtgtgcgtgtgtgaaaatatgtgaatgtgggtgtttatgtatcaagtgtgtgcatggatgtgtgtgcaaattgtgtatcaagtgtgtggatgtgcacgagtatgtgtgtattgtgtgcatgtgtgtgaaggtactgggtgtgtgtgtatatgagtgtgcgtgcacaaatatgcataagcatgtgtatatcgagtgtgcacatgtgtgtgtgaaggtatataggtgtgtgtatctgagtgtgtccatgtgtatgtgtgaatgtgcatgggtatgtgtgtattgagtgtgtgcatgtgtgtgtgaaggtaccgggtgtgcgtgtatccgaatgtgtgcatatgtgtaaacgtgtgactatggatgagcacgtgtgttgagtgtgtgcatgtgtgtataggtgtgtgagcgtgtgtgtgagagaataggcatggctgtgtgtcgagtatgtgcatgtgtgtgtataggtgtgtgagtgtgtgagaataggcatgggtgtgtgtgtcatgtgcatgtgtgtgtataggtgtgtgagcgaataggcatgggtgtgtgtgttgagtatgtgcatgtgtgtgtataggggtgtgtgtgtgagaataagcatgggtgtgtgtcgagtgtgtgcatgtgtgtataggtgtgtgtgagaataggcatgggtgtgtg

SEQ ID NO: 34600 - DNA, 1321 bp, Artificial sequence
  DNA replication origin
ctccatctgtggttctgaggctccagcctcacctccaccacctcctccccattctcccagctctgaagctaccctcccagcccctccctgcccagagaggtccttctgatcagcacttcttgtccacagcccccgtctctgtccgggcagactttgactctgtgggaggccccaaagtggcccccactgtccctgcctcgggaatgattaactcctgattaggtggtgcccagcagcttggtctttagggcaggtggccctggcccacttggcaatgagagttccttccactccccaaaatccaaaaccctcagcacccggcagactaggggaacgcttgagggcccaaggtagaaccagtagccttggggagccacagaggcctggagaaagagggttctgggtccccatacagtgaaaaaagaatggcgcacctcccccaaccctattccaggaggactggggtggccagggtcaagtccatccaacctgtaggccctcaggggttggttgggggctgagtttgggctgtgggaaggtgcccagtgacccaacggtagtcaggcaggtatagagtggtctgctatggtcccgccaatgtccccctgctgcctggggatccagatatccccactccaaggacccagcgaggccctctctgtaggtggagctgtcagccaggtcaggtggggtcaagtggcacacggcagactcctgctacagagcgtgccgggcagtgggcgggcatgaggagccgtgcaaataaggaggcaggaggcagggtttccttcctgccatcaggaccctaggtatccccatcttctcagacgctggaggtgagcctgggctcaccaggaagaagcatgaaggaacaccatccccagccgctgcctccactcccatagccgtccctttcctctagggccccctgctaggggtcccctggccatcagtccccacacaggccacagcagaacccaggagccctggctccaggatggacagtgatagccgatgtccgtggggccatcactgagtgtcaggctctgttctgaccaggttatgtgcagtcatgtgctcagtttccacagccacccttgaggctaggtcctgtatgatctcagtgtacggaggctcagagacaccaagtgactggcccaaggtcacacagctggttgaggggagccatgcttcagacgcagatccatttgagcccagtacctttgtttttgacatggcattgatctgcctccaccagggtggcagaaggcgagaggccagtgtccttgaagcccccagaagggtcgggccagatgacacg

SEQ ID NO: 34601 - DNA, 1915 bp, Artificial sequence
  DNA replication origin
acccttgaggctaggtcctgtatgatctcagtgtacggaggctcagagacaccaagtgactggcccaaggtcacacagctggttgaggggagccatgcttcagacgcagatccatttgagcccagtacctttgtttttgacatggcattgatctgcctccaccagggtggcagaaggcgagaggccagtgtccttgaagcccccagaagggtcgggccagatgacacggcaaaaagataggagagatgtgcctgggactcacctggcacgtggcaggccaagatctggatacggatcggagcccacagctctggctctgtgtctgccagggcacagattcccagcactctgccacgtccctggcttctcaacccaaggggagtcgactcttctggccattggcagcgccagacaattaacagtcgaaagtaattgctcttggccgtgccagcagcccactttggttgatgagatggggaagtcagacactgatatggggctcccagggcaggccgtggcggggacggggacaaagctattaggaagggccagaaaagcagggggctcctgcaccccgaggtcccagcagggtccatggagccccgagtgacagggagcctctgctccgggccctgctccagcctcaggggtgtcgagttgagccttggccttcatgcccagggacagcaggacggctcacatcctggcaacagtcctcccatctccatccagacatccggcctgatgacacaggcagggatcccaatcgccagggtctcgaacagaaggggcagcatggctgtcagctgggctggggcgcatggggatgaggggtgcacggacgggggtggaccagaggcaggaagcccagggtgaggaaatgtcccgagggtgggcaggcaggatggagtgggctcccacccaatgccgaccacgcatgtctctggcccccagacagagctgtgaaccaaccccgctcacggctaacaagcccacccaccatggcgagccccactctgagccccgactcctcatcccaggaggccctgtcggcccccacctgctccccaacctctgactccgagaacctcagccccgatgagctggagctgctggccaagctcgaagagcagaaccggtgagttgggggctgggggatggggtgaaatcttggggtgcagtctgggcccccacaggagttcccaggtgccctcacattcagagccaggcccagtgtgtgcaatgtgacagccacctccagatgctggatgagggacagacacctcctttcatcctcccaaccctggctgaatatatgtgtccccaccctgttcagatgagactgaaggtttgagaggtcaagtgaatctgtgaatccgccgcggttaatggagccaggactggaggaagagtcgattcgggccttcctgctttcttcctctgaccctacccccatttaaaatgcaggttttaggctggacgtggtggctcacaccaccgaacactttgggaggccgaggcagacggatcacttgaggtcaggtgtttgagaccagcctggccaacatggtgaaatcctgtctctactaaaaacacaaaaattagctgggcatggtggtgggtgcctgtaatctcagctacttgggagcctgaggcaggagaatcacttgaacccgggaggcggacgctgcagtgagccaagatcacgccactgcactccagtctgggcaacaagagcaaaactccgtctcaaaaaaaagggggcgctgagggcagtggctcaagcctgtaatcccagcagtttaggaggctgaggcaggtggatcacctgaggtcaggagttcgagaccagcccgaccaacatggtgaaaccccatatttactacaaatataaagttagccaggtgtggtggca

SEQ ID NO: 34602 - DNA, 1330 bp, Artificial sequence
  DNA replication origin
tgagatcacaccactgcactccagcctgggcgacagagcaagactccatctcaaagaagaagaaaaaaaaaagaacaagagggacctaatccctggtgtcctctaagacccccaggagggggaggatgggctgggctcgccaaggatccctgtccccagggagtcactggttcccctctgtcggcccttcctgcccaggctcctggaggccgactccaagtccatgcgctccatgaatggctcgcggcggaacagtggctcctcgctagtgtccagctcctcggcctcctccaacctgagccacctggaggaggacacgtggatcctgtggggccggatcgccaacgagtgggaggagtggcggcgcaggaaggagaagctgctcaaggtggggggcggccaggcaggcagggctgggccgacggcgtgggcaggtggtgcggtcactcagccaccaggcagcgccagggtctgcggggccccagcctgggcacagcggcagcagtggagatgtgcaggcactttcagggtgtcctgccagagcacagggacaggagagagtgagtcagggtggtgctggacaggccctgcaccctcgagtgcccatgtgcttgctgccctgtagtgcccatgaaggatgggggtgtggtggctcacgcctggaatctcagcactttgggcggccaaggtgggaggatcgcttgaggccaggagttcgaggccagcctgggcaacgtaatgagactccgactctataaaaagtttaaaaattagccaggtaggccgggcgcagtggctcacgcctgtaatcccagttcgttggaaggtcgaggcaggcagatcacctaaggtcaggagttcaagaccagcctggccaacatggcgaaactccgactctactaaaaatacaaaaattagctgggcgtggtggcgtgcacctgtaatcccagctacttgggaggctgaggcaggagaatcacttgaacctgggaggcaagaggtagcagtgagccaagatcacgccactgcactccggcgtgggcaacagagtgagactccatctcaaaaaaaaaaaaagtttaaaaattagccaggcgtggtggtgcacaactgtagtcccagctactcaggaagctgaggcaggaggatcgcttgagcccaggagttcaaggctgcagggagctatgatcgcaccactgcactccagcctgggtgacagagggagaccctgtctctgaaaaaagggggtaaaaaaaggattggggaccatgagttctgtgccatgcttgaggcctggatgagccacgcctgaggagctgggctgggtggc

SEQ ID NO: 34603 - DNA, 1534 bp, Artificial sequence
  DNA replication origin
acaaaaattagctgggcgtggtggcgtgcacctgtaatcccagctacttgggaggctgaggcaggagaatcacttgaacctgggaggcaagaggtagcagtgagccaagatcacgccactgcactccggcgtgggcaacagagtgagactccatctcaaaaaaaaaaaaagtttaaaaattagccaggcgtggtggtgcacaactgtagtcccagctactcaggaagctgaggcaggaggatcgcttgagcccaggagttcaaggctgcagggagctatgatcgcaccactgcactccagcctgggtgacagagggagaccctgtctctgaaaaaagggggtaaaaaaaggattggggaccatgagttctgtgccatgcttgaggcctggatgagccacgcctgaggagctgggctgggtggccacggggaggctgcgctgggaccgagtccagcccccgcttcccgctcccgtggccaggagctgatccgcaagggcatcccccaccacttccgggccatcgtgtggcagcttctgtgcagcgccacggacatgcccgtcaagaaccagtactccgagctgctcaagatgtcctcgccgtgcgagaagctgatccgcagggacatcgcccgcacctacccggaacatgagttcttcaagggccaggacagcctgggccaggaggtcctcttcaacgtcatgaaggtgaggcccagggctccccgctccctcggtcccaaaggaaggagaagttccccagttcaccggctgtgctggacggcgggaccctgctctcaggacttgttcccttctaggcatactcgctggtagaccgggaggtgggctactgccagggaagcgccttcatcgtgggcctgctcctcatgcaggtaggtggctggggggtggctgggctcctgccagacaacagcccaccctgggctcggcccccaagagatggacagaagtggcgtgtcctccacccagcgtcttgctaggggtagatcctccttctccatccacacccgtgacctctgccaatcgccaggccaaggcccagtgagtggcacctgtctggttgggtcctgtctgctgtaccatccaggacagagaccgggtttggagggataggctgtctctctctgccacatctcagggttggacaggaacctcaggctggggacttaagccatccagcgtggtgtttatggggcttgggggtctcctccagagaaatcgggaggctgacagggagagaggacgcagctgggacaggaggtatcctaaccagggggatgctggcagtggccagccctgggttcaggtccagctcccctgtttcctgccgagtggcccttggcaggtgacctcagcctcaggtcttccatcagtaaaacagcttgtgaggacacagggaccaacagtgtgtcatgagagtctagggagccaggtaccgacatggacatgggcccctgtaccccagggccctgatgagcagcgagatgcccctccccgctgcgctgccctgagcccc

SEQ ID NO: 34604 - DNA, 1569 bp, Artificial sequence
  DNA replication origin
ggcaaaggcagtgggaggtggagggcagggaggctcctgttccaaccacccccaaggggctctcttccctccccaggcaccatcggtcctcacctcatacatgaagatgtcaaagacccgggtggcgacggggagtgggaaggtggtcaggaacagtgtgaggaaccaggacgaggcatacatggatgtgtggaagctttgggaacggaagtgggtgttgaggtctgggagctgctcctgcaggggtgggaggccgggtgggcacagtgagggggacgccctcccaccggggggtgctgggcctcagtgtccccgcctccagggagccttcctggacctgcgctgggcagcctgaggctcccttcctggtgctccctcagcactctgtctgagggaggccgaagcacccccgagctttgagtagcacggggtgggggacaggcagggatggcaagatctgtagccgcctgtgttgggggcccaccctgggtaggtgatgcgcccgtggcagctcatggggtcctcacgacagcctgagagggtgtgtctgaggctgggggagttgggtcactccccacagacaccctgagacccagaggtggagcatgggcaagtggcagcctctggccctggggggagccccccccccaccttgttacgtgacctgccagccactgtacctcccttggaccccagcataaagctttgtgcaagctgtgttggattggcctgaactctagacagccagaaagtggcagacggctggggaaactgaggccggagaaggcgttaggatcccgggcttcctcccagcgccaggggctctctgcgccctgagtttgcaagcttggctgtgggagggctctgctacccagcctgaggtggggtggtgccttctctgcagcccaggcctcctgcttgtggcactaccaggccccctaaggctacagcaccgtccatgatccaggcccagggagtggggctgtcacatccagggatgactgcacagccccacctgccatggcagctgaggcgggccggtgtgtgtgtgtgtgtctgcgtgtgtgtgtatgcatgcgggtgtgtgtatgttcgcaaacggccttggcggctctgcctgccagccgggagcaggccctgcgggggctgctatttataaacagacgtctgcggctctccagtaatcaggcaggcagacaacactccctccttccaccacactctggagcagacagggaggtggctgtggctgtgtccgatgtgagcctgccccacccctctgcctcagcagccctgggagccccccttcagtggtggctctcctgttcctccaagcatccttcagggcagtgctgcatggaaagaggagtgccttttggagttggaacgtccaggtgtgatttcacaggcttggaattttcagtccaagaggtgcccgggtatggtctagggtgccagccctgcccttctgcgatcctgctcccttgcggccctgcccacctgtggccctgccctcctgcagccctgctctcctgcggccctgctcacctgcagcatgtactcgaactg

SEQ ID NO: 34605 - DNA, 1229 bp, Artificial sequence
  DNA replication origin
ggactgcaccactgtactccagcctgggccacagagcaactccgacttaaaaaaaaaaagaaaaaggtaaaagaaaaaaagaaaagcaggccaaggaggctctcctgggagtgaaggctgagggtcggggggtctgacagaggggaccttcgtgggggaaggaggatgggtatgccgggggcctcgggcctgtgcaaagggttaaggtaagcccaggggggacacagctcctgcacccggcccagctggccccctctggtagctgtggacaatgcctgcccatgttcacggacacaaccgtggcctttgtgcattcttccctgaagcaccagctggaggacgcggggagggggcaggggcccgcacagcagagaagtagcggtgggaggcaggctggccagcagcagggcctccaggcaggccgggctggggcggggcaaggcgtgaggttgcctagacccccaaactccctcctgtgccctcaccaggctgggcggcagggtggggatgccctcatggtcagtcagtcatgatctgccatcaggctttggggcatctgcggggttgggggcaggaggtgggcagtggggctcccagggctcagcctgggcctcctgtctccctgcggccaggctgctggcccctgactgtgtctggcagagcctagggggtcctctggtcccttagggagacctcaggggaacagagtggatgggaacagatcagggatgtcaggcacaccaccttccaccctcgaagccgggccctctctgtcacttgtgagggcatcctgtgactcgaagcccctgattgggggcagccccaccggccctggccctcccggcccacctgggacatcccctccatgtccagctgcatcagctctgcctggttcacctgcagcagggcgaggcccactcggaacacgatctccagcccctgcaaaggcggcaaaggcagtgggaggtggagggcagggaggctcctgttccaaccacccccaaggggctctcttccctccccaggcaccatcggtcctcacctcatacatgaagatgtcaaagacccgggtggcgacggggagtgggaaggtggtcaggaacagtgtgaggaaccaggacgaggcatacatggatgtgtggaagctttgggaacggaagtgggtgttgaggtctgggagctgctcctgcaggggtgggaggccgggtgggcacagtgagggggacgcc

SEQ ID NO: 34606 - DNA, 1813 bp, Artificial sequence
  DNA replication origin
ctgctccatgcatggcgccaggcctgcccgcagaatggcagggaagaggcggttactggctgtcatgtgcagggtgcagggaaggggccaggaaggaatccggagaggggataaaaagctacagtacctggattaacctatcagccagagcagcgctctcctacccggcgaagggggttcccagcgacagggggaggaggcagagcggaaggcgcggggacaggagaggggagacagacaagaaccacttgtcactaacgcagtggactatctctagaagcgggggagagaggagggaagaccagagaaccagcaggagaggacccggaggaagaccaaagctagagccagctccgtcctggagaggggttcggtgtgagcggggaggtcgggggtgcccgcggctgtgggggaggccgcagggctgggaaacccactgtcccaccctccagggtcagccgggccgctgctggctggaaaaactgtggggggcagggggacttttggcttcgtgcggacctcctggagagtgggagaggagggggtgcgttgtaattttaaggcagaacaaggctttggggtgagggcaaccaaatccggctgccaacccacttcctgtggccagtggagggtcaagtgaggacgagtgaggagcaggaattgggggctcccggggctggggctcagtgagcccccaattccacccccatctttagcatgttggggagcagagtccgggctgtggctccccaccatggcgccacgcttctcctccactgggtttcctttcctttcttttgagggcaagacttccaaattacagggtggggtggcttgtggcccaattacggggctcgtccatcaaagtggcagttctccctcctcctcacccctccccgtctgtgcagccggggagggcacagaacacaaatggattcccgtggctgcaggccactgggttgtaactcgcccccactccaggattaatcaccatacgagtcgcccccagttgcagggcactccaaatcgggttcaggtcgggtcctggggcaggaaggtagggctgcttagtcctccagagaggagaagacttggaggagtccaccccaggttagcggccatgccccgcatggtgggtcacaccccatggcgaccatgtcctcacagtggccacgcccctcaccttctctagggtttcaatccgctgtttcaggagccggttctccgtccgaagtctctatgggggtggggggagatcacgtcatagcccgccccccacgcctgtctacatgcacccctcatttacccactgccggggtcagtccccttagggccaggccacttttccgggcagggcacagccagcatcttacgttctgggtcagcgatttcagaaaacagggccaattcctgttcagactggcttgattacaaaaaaataaagttttaaaacaaacctgggttcagtaaaaataacgtcagtgccttcgtggctgtgtgtgtgtttgggggccagtcagtacccacgccccctcagaagactccttcccacacgtgggtcagtctgccaagggttgtgcgggaatcagtgggggaagcagctgtcgagcagccaccacccacccctcgctgctttgccccaagcacccgggttcaattccgggggcaggctcctctttgagtctgggtccagcgtgctgatcatgcatcctttctcgacaactacattcccatgacctgctgagagcaacctgtccccagtggttttctctgttccctggctggggtttcgaagacgtctcccttgctcctg

SEQ ID NO: 34607 - DNA, 797 bp, Artificial sequence
  DNA replication origin
tacccaacttgggccccccattccaggctcaaagccaccaggtggcgggtggcagcttccagataaagccattcaagatgaggtggcagcaggagcaggtgagctagagaaggtggtagcaggcattgcaggtaggagcagagagcagcagcgtgagggccgggcgtgtgtgtgcgtgtgtgtgtgtgcatgtgttgtgtgtgtgtgtgaccgcagcactgcacacaccagggccttatgtgaatatggttttaggttccccagccctcctgggtccccaccctgtgtcgcccggaggaagctttctgtacatgcatgtggacattcacacccaaacgcactcacagcccctccacacacacccttctccccacttcacatgccccgcccccccgggaagcctctgtgtcccccagaagcggtccccagctgctccatgcatggcgccaggcctgcccgcagaatggcagggaagaggcggttactggctgtcatgtgcagggtgcagggaaggggccaggaaggaatccggagaggggataaaaagctacagtacctggattaacctatcagccagagcagcgctctcctacccggcgaagggggttcccagcgacagggggaggaggcagagcggaaggcgcggggacaggagaggggagacagacaagaaccacttgtcactaacgcagtggactatctctagaagcgggggagagaggagggaagaccagagaaccagcaggagaggacccggaggaagaccaaagctagagccagctccgtcctggagaggg

SEQ ID NO: 34608 - DNA, 1345 bp, Artificial sequence
  DNA replication origin
gcccggtcttcagaggcctccgtgctgaggctgggggttgggaagtcagatactgcagacacactatgaggtggcaagaaatggatatcaggatgtctcagaatgtggagctgctgggggagaatctgcgcttgtctctgggttccccttaccccagaaaggaacaggagggccaggtgctgaggcggggcagattatgagccctgaaagaaaaccgttgggcgggggcgggggcgcgggtcatggccccgcccagcagccccgcacacccgcccctacctgctgctcctgtagctgccggatggtgctctgtgccttctgcaggtcctcggccgccgagctgcactgctgccgcaccaccgccagctcccgcttgatgacgtagttctcctccgcctcctgcgcccgtgtcacttgcccctgagaacagcgaggacagggggcagggggaggccgtgaccctcggctcccacccaaggccctgcctcccgccacagggggaggcccagagagtggaggtggggggaagtgaggtgggggcctcccgtactcagagcctgggatgagcgtcccactgggcctggggacgtgggtgggtgacaggcaggaataggacacctggaggagcccgggaggaacagagctagccctgggcttggaaagctccatctccttccccactctggctctcagtctctgccccagttgggatccttatccaggggcacagcgaggccacctgtgcctattcatgccagactctgccggtgagggtgaggatctggggacagctgaggccccggcaggagagggctgggctccccagggcattcacctctcccagcggcatcttctctagtcctgggctctggggcctccacctgcctggagctaagacccccttttttcccccacctcatctttgtcccctacccaacttgggccccccattccaggctcaaagccaccaggtggcgggtggcagcttccagataaagccattcaagatgaggtggcagcaggagcaggtgagctagagaaggtggtagcaggcattgcaggtaggagcagagagcagcagcgtgagggccgggcgtgtgtgtgcgtgtgtgtgtgtgcatgtgttgtgtgtgtgtgtgaccgcagcactgcacacaccagggccttatgtgaatatggttttaggttccccagccctcctgggtccccaccctgtgtcgcccggaggaagctttctgtacatgcatgtggacattcacacccaaacgcactcacagcccctccacacacacccttctccccacttcacatgccccgcccccccgggaagcctctgtgtccccca

SEQ ID NO: 34609 - DNA, 1149 bp, Artificial sequence
  DNA replication origin
cctcgctgtgcccctggataaggatcccaactggggcagagactgagagccagagtggggaaggagatggagctttccaagcccagggctagctctgttcctcccgggctcctccaggtgtcctattcctgcctgtcacccacccacgtccccaggcccagtgggacgctcatcccaggctctgagtacgggaggcccccacctcacttccccccacctccactctctgggcctccccctgtggcgggaggcagggccttgggtgggagccgagggtcacggcctccccctgccccctgtcctcgctgttctcaggggcaagtgacacgggcgcaggaggcggaggagaactacgtcatcaagcgggagctggcggtggtgcggcagcagtgcagctcggcggccgaggacctgcagaaggcacagagcaccatccggcagctacaggagcagcaggtaggggcgggtgtgcggggctgctgggcggggccatgacccgcgcccccgcccccgcccaacggttttctttcagggctcataatctgccccgcctcagcacctggccctcctgttcctttctggggtaaggggaacccagagacaagcgcagattctcccccagcagctccacattctgagacatcctgatatccatttcttgccacctcatagtgtgtctgcagtatctgacttcccaacccccagcctcagcacggaggcctctgaagaccgggctgtccctgcagggtttcctctgtgtcacaggcagcagacagggctgtgactccttacggaggctcttgcctgtccccagggtctgaaggattgttaggtgtccctggggggccagccatggagaatgggagcagggcagtccgggactgtttggggagctctgagccagcagggtggggctgagggggcaccttgagtgtcttgagggccatgaactttgggtcccatgatgggcaggcccatgagtggggccccaccccaagattttcttctcctgaaagcttttagaacttaactgcgacctggtgcagtggctcacgccttaatctcagcactttgggaggctgaggcaggtggatcacctgaggttaggagttcgagaccagcctggccaacatgatgaagccccatctc

SEQ ID NO: 34610 - DNA, 1924 bp, Artificial sequence
  DNA replication origin
gtgcagccaggtactgcagcttctcctgcagcgccgcgcgctccgcctccacgcggttcagaaggttgcggtggatgtggtcctgggatagggaggaagggaggacggaggacggcggcggtcagggcctaactcaggggctggccacggacaccacgccccttccccaacgagcaggccccccgagtccacctgcgtctcaagttccaccacgcgctgccgcagctcgcggccctcggccagggcctgggcctcgcgcagacgcacgctcatcagctcgtcctgcagctcgcccacgaccagcttccgtggggactccttccagcggccgccgcgggccagatgggcctggggggtgaagccgagaagccggcggtcagcctccgcccaagaaccccgaggggatggccctagggggcgctctgcccgccggcgcccacccggccctcacctgccaggtgtccgagagctcctgcagctgcagtttaagctctcgcgtcgaggccaccgcctggccttcccgcaccttgagcgccttcagctcctcctgcagctgcgccacattgttctcgtcgggcagcgagctgttcctctgcgggaagagtggggtcagggcctgggggagcagcgcagccgcatggcccttcctgcaggacaaacgcccccagccacgtttcctcctgagctctgccttgggcggctcagatgggggagggcgacccccttgacaaggcccacggggagcggactcgcctgtggaacccggttggagttcctcagctataaaatgggtgtagtaacagcacctactctcacagggtgtcctagggcaacccccataaacgccgcgctgcacacactgactccccgaggtctgagatccatcccctcagggacatgatcaggtggaggacctgccccagcagaaacaccctgtctgccctctggcccccaggccaggccacaccaggccaggcagtccctctccctgggaacaggctgagtgccagccttggccctgtcctggtgtcccagggctcattgatggaggatttgtgctccaggacccaaatccagctttctggatgaggtccgcactgacccgtgtttgggtctagggctgggacagatctagcagcatgtcctggaggcacacttccctatgaagtggagggaggcgggagcggagcccagctcttggctggtgatgagggcctggaagcagatggcctctcagtcctccatttgggaggactcccaaaatagtgcaggctcgagggggtggggaatggctcctgctgaatgtgtgaatgggtccctgggtgctttccttcctctgggagctccgtgggagagtggagtcgatgccaagtcagagagcagttggggaggaacccagaagccctgggatggtgtctgcatgggaatgtgtagggaggcagccacaatgggcctgggccttcctttctctccttcctgtccccctcccccatccccctctctcctcccttccttcctggaacccagtactgggggaaacacacacaggtgggatgcaggtatccgggaagctcatagaagctgccacgctgctggagtttgcctcatacaggagcgtgggcatgccccgcgtggggttgtgctgtgtgtgtgcatatgtatggttgtgtgtgcatgggggtgggggattctgacctggggtcactcccaaagcttatccaggacccctcctgtgccccagggtccccccgacacctgcccgtctgcctccccattgcaccttttccatgtcgagaaccttgtcctgcatctcccgaagggcccccagtgtctccgtctcccgcagcctcgactgctccagctcggtctccaggtgggacacgaagtcttctgtgaggcgggggttctcctgggggaggcagag

SEQ ID NO: 34611 - DNA, 873 bp, Artificial sequence
  DNA replication origin
ctcctgccccgggccctgcccccgcccccgccccccgaccccggccccgccgatcacctggatctccagctcggcaatgcgctgccgcatctcggccaccgcagccatgctgtccgcctcccgcagtcgcacagccatcacctcctccttgctctggggtcgggggattggggggaaaggagggcgggtcagggggcgcggcgcatcagggggcgggaccgcgggcaggggcgaatgaggaggcggggccgcgggcggaggcgggtcaggaggcaggaccgcgggcaggggcgggaccgcgggcaagggaggtgcgggcgggggcgggtcaggaggcgtggccgcgggcgggggcggatcaggaggcgggaccgcgggggggggtggtcaggaggcggggccggatcaggaggcggggtcgcgggcaggagcaggtcaggaggcggggccgcgggcgggggcgggaggaccgcgggcaggggcagatcgggaggcaggacgccggcagaggcggattgggggcggggcctcatgtaggggcgcgtccgggggcggtgccacgggcagggcggggccgcgggggtctgcaccttgcactcggcctcggcctgcttgcggcggctttcgctgagctgcgtctgcagccccttgttctgtgcagccaggtactgcagcttctcctgcagcgccgcgcgctccgcctccacgcggttcagaaggttgcggtggatgtggtcctgggatagggaggaagggaggacggaggacggcggcggtcagggcctaactcaggggctggccacggacaccacgccccttccccaacgagcaggccccccgagtccacctgcgtctcaagttccaccacgcgct

SEQ ID NO: 34612 - DNA, 2644 bp, Artificial sequence
  DNA replication origin
ggcgcggggatgccggggacaggcctgggtgtcgtcggcctgggacgagccgagcgcaggtgccttgcggaggatgcggctgggagggcggggcagaaggccggtccacgcctgcagcgccggtcccccgccccaggtgcggctgctgaagggcccgccgcccttcgaggacccgctggctttcgatgggctgagcctggcgcggcacttggacgaggactcgctgccgtcgtcggacgaggagctacttggcgtaggcgtgggcgctgccctgcaggacgcattgtaccctctgtccccgcgcgatgcgcgcttcttccgccgtctggagcggccggccaaggacagcgagggcagctcagacagcgacgccgatgagctggccgcgccctacagccagggtctggacaactgaggccatgcccagcgcgcccggagtcaggaggccgcagccgcggggggcgcccgggcagtccgcgttctgctccccacctgccgcacttgacaaactacgcgccctctgtggctcggccacccctaaagcgaggcccggcgaggcagcgcagagggtagggtccgacctgggctcctcagggccccggggcaggctctctatccccagcagtgtttacccatcttggtctgtacccctccgggccctctggcgttccaggggtgcctggaggggctgactgctctcttaacaggagggcagagggcaggggacagacgacccagaggtcccagcactgaatgagcaggcagctcccacctcctggcaggcttccttctgggacaggggcgacattgctgggaagtgctcaggaggtagccgaggcctgaggaaggagagcgccagctctgggctggacatcagcaccccacaacactcctcgggatgaagtgacccttgactagcccctggccatctctaggggagtcaggccgctggggacagatggccaggccggcctctcctgcctggcgcaggcaccgtggcccctgcagcggaaaccaaagtccccctactatgtgcggggcgcctggggactgagtggctaacgggaagcctccctgcttctctggggccagagcagcttccaggaagtgaagagacccctctccccagtgccccacatctttctctgggagacactcgcgccccctatcctggccagtgatggaggggtatctctacaggggtcctcggtctccatctacttccctttcttcatgtgtttccagccccaccctcagccagagccaggcccccaggcaggagcttcccagcgagcggcctcccctcacttcctcctggtggtcccgttgtctctgctgaatcagagctgagaacggtgccaaaatccaacgatgccccccaggccccttcctcccttcccccggccccccgggcctcatgaccctgggggctgcccccctcggtgctcccggagcctccagtagagtagcgtcacaagcaatctccctggcgcttcctgggtggggacccctgctccgtccccgcttcctagctgcccacttttcagtgttacgaagcctggggaccggggcaggcacccacggggctctccacacgccccctacactgcccgccaccattttgcacactgcctgttcacatgtcgcccaggcgggaaaaatggaaaataaagtgtatttacacagtcacggactggcctgcgggctgggaggagaatcacaagcagcggtgggtgcccagcccagggaccaaaaaccgtgctgagggaaggtggggctgtccttgcccttaggagctccccacagtctcatagaatgggggtgggagaggatagaagggcattcagtttgggggcagggcatgatttcccacctgggtgaatcaacttgggcctcccctgaaggagagaggcatgccgaatcgctgggcttcaggaagcacaggacccggttgcattcattctgctcacgcctccaggggtaatgtggggtactctgccctgtgcctggctctgagggggtctccagtggagcagaggagacaggcactgggcagggggaagcctgcactaatgtggtaggtgctcaatagacaaatgtgcagggagatcagggaaggcttcctgggggaggtggtgtcagggcctcttcgaggggtaaaagcataaagatcagaccaacaggaggcataccatacctaggaaggaagaacaggaaagcctgggcgtggtcagactaagaagggactgcttacgtcaggtgagggagtttgggctttgaactgggggccattgggagcccatggagggcttaggtaagagagccccatcagatggaccacagagtctgtgagggggccagtgcagggaggacagtgagtagggggcagaaatagtcctttgtggggttccccacagagctgaggcagagtcccagctgctgggtggcggtgggtggcggggtggaggacagagccaggagtggcaaagcaaagcttcctagaggaactcaaggcagtcgactcactgaaacgtccatctcctgggttccagtgattcccctgcctcagcctcgagagtagctgaaactgtaggcacctacgaccgtgcctggctaatttgtttcgttttgttttttgagaggg

SEQ ID NO: 34613 - DNA, 1177 bp, Artificial sequence
  DNA replication origin
atggtaattccacccccgctggctgcccaggtcagggcaggaccgcagaggaattgtctgaggttctgccctgtccttcccggcagctggccttgagccccagctccccagcatgtcaggagtcggccttgggcttgtcccagagtctggaaacaaagacacccaggtccccaaccccaccagggcccagcttgagaggacacctctatggtttgccacaaaactctgaccgaaggactgtgctggcgtcctcctcctccacctcccaggggtgcaggtggcagtgcccctccaggccagagcccatttctcctcagaccccaggctaggaggtgccttgtctgggatggggacaggcaggacttgctggtctgtgactgacaggaacctggtcacaggatggtgtgagggtactgggtccaggggcagaggcagggctgagggcccaaggccagatcctactctgtcttcttacccacttggggatgtcaccatcattcttggtgccatgcaggagacccgggggaggaaaggcctagcaggggagctctctgcaggggcactgggaacagggagagactggctagggtttgagaggctccagagctgggggttagggttagggttcattgggggaggaagggcaggaaactctgattggagggggcctgtgaagatgtttgggaatctgataaggacgcctgaggaaggggttagggcaaggatgccatgggggtgggatgcaccaagtggcacttgtgtaaggacacttggagacagggtgcagtgtgaggactcccccatctcccacctagacctgggagaggccacttcttcctgcaatcccctaccagggcagttggcccgggaccctgcaccagccgaagggccatgggaaggggtcccccatccttgcctcagtgccctccaatcttcccacctgttccccaggagtgctagttccccgcatcgagtttgaaaagtgtgtcaggccaggcgcggtggctcacgcctgtaatcccaggactttgggaggctgagggcagatcacctgaggtcaggagttcaagactagcctagccaacatggtgaaaccgtgtctctactaaaaatacaaaaattagccgggtgtggtggcgcgcacctgtaatcccagctactcgaaagactgaggcag

SEQ ID NO: 34614 - DNA, 970 bp, Artificial sequence
  DNA replication origin
gcggagccccaggtaaggggcaccccagacccggcctggctgtgggcggggtcggaggcgaggcttcgcagctcaggggcgggacagctgggtccggggcggagcttagacaaggaggcgggaccttgaggcaggggcggggcttatcacccccacggcccacctggcgtctctccccgcaggtgcgcccctgccgtggcctcccgctaccggaccgggctctgctgacggtctgtgcaccatctacgagactgaagggcccgagtcggcgacccccgcccctggcgcactggatccggggcccagtcccggcacgagcggtgggaaggcggcggctggggccggggccggggcgtcctcgcggagcccgaagcaggcgcgcctgggcgagctgccactgggggcgctgcaggcgagcgtcgtgcagcacctgctgagccggacgctgctgctggcggctgccgagggtgccgcgggcggcagcggcgggggcccaggaggtgcggagggtggtggcgtcacagggggcgcccgggctgcactcagcgacgccgaactcggccgctgggccgaactactgtctcccctggacgagtcccgtgccagcatcacctcggtcaccagcttctctccggacgacgtggcctccccgcagggtgactggaccgtggtggaggtggagaccttccactgagccagaccacagccccgcctgctacaccccacccctgccttaggatccgcccctccgggtacgccgtttgttttagaccccgcctccactgccctggagccccgctgggtggattagtcttagctccctagagcctgagcctttggcctcggaggctcgggacctacccacagctttgacctaggcccgcccctcgagctccgcccctttggcctaggacacgccccgtttccccgagtcccgccccgtgtgcagtgtattgcccaccccgcacag

SEQ ID NO: 34615 - DNA, 2992 bp, Artificial sequence
  DNA replication origin
tagcgggaggccacggcaggggcgcacctgcggggagagacgccaggtgggccgtgggggtgataagccccgcccctgcctcaaggtcccgcctccttgtctaagctccgccccggacccagctgtcccgcccctgagctgcgaagcctcgcctccgaccccgcccacagccaggccgggtctggggtgccccttacctggggctccgcggaaagccagcggcggagcggggcctcgactccaggcagccgggtggcaagcggcgagctctgcgtcggggggcggggaggctgcggcaccgccctcgggcccgctgtcgtagccacgcagctcctctggcgtgctcgtggcgctgctgctgtggccggccaggtctgggccgctcagcgtgctggacgggctgcgcgagggcggcggcggcgggccgggggccaacgccagggtcagccgtgggcccgagacggaggtatccggacccggggtcggggggcggcgtggggcctgcagggtgggtgaggcagggggagagggagggacctgcagaaggggcgctgccagaacaggtggggcctgtggaggaggcgtggccaaaggagacattgggagtgaggcagagggtgagaaaggggcctgcccagggaatgaggcaggcggagagggaagggcctgcagaggaggtgtggccagagcaggtggggcctgtggagggggcttagccaaaggagacattgggagtgaggcagggggagagggcgggacctgcagaggaggagcggcaagaaggggtgggacccgtggagggggcgtggccgaaggagacattgggggagaggcagggggagagggtgggacctgcagaggaggcgcagcgagagggggtggggcctgtggagggggcgtggctgaaggagacattgggggagaggcagggggagagggtgggacctgcagaggaggtgcggctagagagggtggggcctgtgaagggggcgtggccgaaggagacactgggggtgaggcagggggagagaaaggggcctgcactgggggtgagggagggggagagaaaggggcctgcagaaggtgcactgccagagcatttggggcctgtggagagggtgtggccaaaggagacagagggggtgaggcagggggagagggaggggcctgcagaggaggcaaggccagggcaggtggggcctgtggagggggcgtggccaaaggagacagagggggagagggcaggccctgcaaagggggtgaggccagagcaggtggggcctgtggaggaggcgtggctatggaagagggcgtctccggagggggcgtggtcaatggcgaaggtggtgcttgcagagggcatggggctggacaaggtggagtctccagatggggtgtggtcaggggagcagaagctgtctgcagaggaggcggggctagagaaggtaggttctccagagggggtgtggtcaggggagcagaagctgtctgcagaggaggcggggctagagaaggtaggttctccagagggggtgtggtcagggaagcaggaggtgtctgcagagagggtggggctagggaagattgggtctccagagggggcatgatcagggaagagagaggtgcctgaggagagtgggaggccagagaagatagcgcctgcagagggtgtatggtcaggggtgagcttaggggtgagacagcaggagagagagaagtctgcagagggggtgaggcaggaagggaaagaggggcctgcagagggggtgaatcagggggagtagaggccggccgagaaggtgagatcaaagaagcttgggtttgcctaggggacattgtcaggaaagaatgtgtggcctgcagagtgggtgagcccaaagaagttgtggcctgcagagaggacaaagccagaggagagggaggtgcctgcagagacggtgaggtcagagaatgtgggacctgtattgggggaatggtctggagagagggcggggcctgcatagggggcgtagtcatagaaggtggggcctgtgggtggggcggagcctgcagaggcggtgaggccaaaagagagggagaaactagaggaggatcctgcagagagactgtggtcaaaggagagggagaggcctgcagaggcaatgtggccagaagaggagagtcctgcagaggaagagtggccagagtgtggggcgtggcctggagagagggcggagacggggaaggactggcctgcggagggggcgtggtcagagcagaaaggcctggctgagggagtgcggccaggggaaaagccgaattccccagagatgttgccggagaaacagggccttgtagaggagacatggctgacagaggaggtgtggccaagggagagaggagagtcggaagagagggcaacgctggattagcttgggtggggggcatactctgcagaggggatgaaactgatggagagactgaagccacaaaagcggctgtggccagggaagagacgcctgcttctggaaaggacataatcagctgtgtgggtggaacttgcgaggggggcgtggctggtggagaggggagggtctgcagagaaggtggagcagagggagaaggaggggctagaggaaggggcgtggccaactgacaggtaaggctcgacgagtggggcgtggccggcagggtgggcggggcctgactttggagagcggctggcggagggggcgttaccggtggagagggagggagcgtggctggcaggggagtggctgcattgtcgggaggcggtacgggtcttgccttggtacccgatggagagggtgtggccaaaggagaggaagaaagcggtcctagtgctggggctgcgtccttccttgggggtgtgacctgagggggtcgcagagcctgcagtcctttcggcttgggctgcgagggatgcgcaggagccctgggtgttccgcgggctgagggcccagaacgggctggggaggagagaggggtggcg

SEQ ID NO: 34616 - DNA, 1341 bp, Artificial sequence
  DNA replication origin
tccgggtctggagggatgcgacatcctgagcccgtggcagtcccccgctctcgaggctggcggtctgagtccctgaaggggcaaggggcaggggcgtggagatcggtcctgaattggagccgaggcgggggaggcggtgggctggggcgggcagggcctcttcgctttagggaaaagcggtggggggtgggacttggggacagcgaggagcagtggggctggcgagtgggtgtaggtgcgtgggagccgagcggatggaagccgaggccgaggtttgagtgtccatgggtggcgatgctgcgaaagggcagtgaggtagcagggtccaggtctctggaggcggcgtagctgtccagaacctgggatgcggaccggtttgtctcttcaggtgcaagatggacaacaagagagacaaggcgaaggcaggggccgccgcgcggacgccggctgctcgcgctcctggacttctgacccccaggcccccaggctctcctcgaccccctcccccagtaactcccgcagccctccgagttctgggagctgcgggagcagtggggcgaaagcctctggcagagcgagcggggggcatcggcggggccactattcccgagtctgctccccgagcgggaccaacgcggagtgctgggacaagttcccgaaaccctggtaccccagcctccttcctcagctccgcccccatcttccctcccccttccaatacctgtccagtctcacctccactgccacctctccggggcacctgtgactcggccttctccccgcagcctccaggcccccagcctctgggagaggggagagagctcctcctgccaagaacaccagcccaggccctgtttctagcccagggcgtgccagcgggaccaccaggtaacctgctccctctcccccagtctcctaagccagggttagcgtcacagagtctggaaccttttattttacacgagttggggcgcgggagcacttgcaggtcactgggcacaaattgggtgaaagccattattggtcctcagagagggcacatgcccatttcacagatgggaaaatagagacttgggaagccaaacaaagacctaggcctgagcgtggccccttctgtctccaggccaggccctcttggccagaagggactccggatctcagcggaggaaactgtggccagaggaaaagctacagaggctcccaaaaggagtgccctcagcgctggggcacggagaggtacgtgacctggagaagagtggggttcctgggcagcaaggggagccgcctcagaggtatcggtgacccttggccttctactttttctccagacacttccgggcc

SEQ ID NO: 34617 - DNA, 986 bp, Artificial sequence
  DNA replication origin
tcaggcgcagctggggaaacaggcttcccccggaccgcagagaagccacccttctctccaaagcgcgcttctcccccatccccctcggcgcgcttccgccggccgcgctcccgggtccggatcgagcgcgcgcccccggctctcccgcccgcggccgaggggcgggaccggctcggctcccccggcgccgcagcccgcagccccctcccctcgcctcctcgccgctggcggccaccgcgtcgctccggcccgggccccaccccaggcgactctgtgaggagcggccggaggccggaggcggaggtgagcgcgacgcgagcaggtggagaggctgggcgcgggccaggcccggctgggggaggggtcgggcccgggacgcggctctttgtctcccggagcccgttcgcgggcagcggggccgctctgcctcccggcaggtgcaggcatccctcggggaggccaggggaggccgatgggggctggcggggagacccgggcgtgcgctccgggtctggagggatgcgacatcctgagcccgtggcagtcccccgctctcgaggctggcggtctgagtccctgaaggggcaaggggcaggggcgtggagatcggtcctgaattggagccgaggcgggggaggcggtgggctggggcgggcagggcctcttcgctttagggaaaagcggtggggggtgggacttggggacagcgaggagcagtggggctggcgagtgggtgtaggtgcgtgggagccgagcggatggaagccgaggccgaggtttgagtgtccatgggtggcgatgctgcgaaagggcagtgaggtagcagggtccaggtctctggaggcggcgtagctgtccagaacctgggatgcggaccggtttgtctcttcaggtgcaagatggacaacaagagagacaaggcgaaggcaggggccgccgcgcggacgccggctgctcgcgctcctggacttctgacccccaggccc

SEQ ID NO: 34618 - DNA, 1319 bp, Artificial sequence
  DNA replication origin
gaccgccagcctcgagagcgggggactgccacgggctcaggatgtcgcatccctccagacccggagcgcacgcccgggtctccccgccagcccccatcggcctcccctggcctccccgagggatgcctgcacctgccgggaggcagagcggccccgctgcccgcgaacgggctccgggagacaaagagccgcgtcccgggcccgacccctcccccagccgggcctggcccgcgcccagcctctccacctgctcgcgtcgcgctcacctccgcctccggcctccggccgctcctcacagagtcgcctggggtggggcccgggccggagcgacgcggtggccgccagcggcgaggaggcgaggggagggggctgcgggctgcggcgccgggggagccgagccggtcccgcccctcggccgcgggcgggagagccgggggcgcgcgctcgatccggacccgggagcgcggccggcggaagcgcgccgagggggatgggggagaagcgcgctttggagagaagggtggcttctctgcggtccgggggaagcctgtttccccagctgcgcctgaggaacccagatagtcaacggttgggactgggggagcaaatccctggggtcctccactgtccttcccaacacatacacctgccccgacccccaccacaaccacctggcaccaaggaccgcctggacgcggataggctgggccctggcaaccaggaggcgggaccaccgcgcctctggcccacacaccaatccggccgctcggtggccctggcactatccagtccttcgcgtctgcgaaagctaggccgcccagggtctctggggggcagccgccctccgccccacacccgaaggtgttccccagacgccaggaaaccccttatctggttggggggtcgagggactgctaagagaatgctgccctgggaatttcaggatgcaaggtagaccccagattttggggaagataaagaaaggaataggagggagagcgacaggagacacagtatattctgtgagaggtgacccagccgtctgcagggtagagcacgcccaccctccacaccctcccagctaacgggatgtcaagtcagcccagacttcctggcagagctgggcttccgggggacaaggttctgtcgacctagcaggtgtcaaaacaagtgcataaggccgggcgcggtggctcacacctgtaatcccactgctttgggaggctgaggcgggcggatcacttgagctcaggagttcgagaccagtctggccaacatggcgaaaccctgtctctaccaaaaaatacaaaaattagccg

SEQ ID NO: 34619 - DNA, 1058 bp, Artificial sequence
  DNA replication origin
tgtggtctgccctccaggtggggagtggggcacaagcagctccgaagtcctggggggcccagcttctctgcctccccacccccaccctggccgccccacttgggaggcctgagctgggtcttagatgagcaaatctgtggaggtggaccttgatctgttctccgtctgaaaaaccttggaggccgggtgcagtggctcacgcctgtaatcccagctctttgggaggctgaggcgggtggatcacgaggtcaggagatcgagaccatcgtggctaacacagtgaaacacagtctctacaaaaatacaaaaaaattagcagggcgtggtggcgggcgcctgtagtcccagctactcaggaggctgaggcaggagaatggcgtgaacccaggaggcagagcttgcagtgagccgagattgcgccactgcactccagcctgggcgaagagtgagactccatctcaaaaaaaaaaaaaaaaaaaaagataaaaaaagaaaagaaaagaaaaaccttggatgtatctatggccataccaccctaaaagcatctgatcctcgtctcacctcgcaagctaagcagtgtcggacctggttagtacttggatgggagaccacctaggaataccgggtgctgtaggcttgggctggtcacagtggcttacacctgtaatctagcactttcggaggctgaggagggtggatcacctgaggtcaggcgtttgagaccagcctggccaacatggtgaaaccctgtctctactaaaaatacaaaaattagctgggtgtggtggcttgtgctacttgggaggctgagacaagagaatcgcttgagcctgggaggtggaggttacagtgaactgagattgcaccaccccactccagcctgggcgacagaacaggattccatctcaaaacaaaacaaaacaaaaccaaaccatccatggaaatgttcctacctggacttaggatgggagacggagagttctccctgacagggtaaaagaagccttgacttggccgggcgcggtggctcatgcctagaatctcagcactttgggagg

SEQ ID NO: 34620 - DNA, 1610 bp, Artificial sequence
  DNA replication origin
aaagtggttgagacccccaaagtcaagtttatcttcagcctgtttatcttcactctgagacttggccgcgtctgcctggctcccaggacgggcacctcgtgggccaggtttccctttgcaccggccggcacccccaccccagctcctggtgtgtcgggacggcctgccccggccacagggccggcgcacctggagcggctctgccccttgtccagacccggggactcccagcccgacccccaccctgccacctcgtggggtgtccagaggcaaagagccacctactcaccgttccgggagggacgctgggcccaactcctgggtctctgggagcggagctgccgcgactcccgcagagttcccgggcgggccgcgagggtgagtcagggcaggcggggacaggagacccggagccgccccgccccgcccccggacgactcggccccgcctcgccgcaggcgcgcccaggtcgaccctactccaggcgccgcgcgatcagcagggttgggggaagacagccgtcttaggctgctttgccctggtgggctcggggctggcgggagatgcaggggtcttagaactttgcaactttgcagtctggctggaccctggcagctggggaaactgagggagctggggacgctgaactcccaaagccattctacggccacctttctgggaaccaggtcttacggaccctgtcgagaaaatgtggaggccgggctctgtgactcacgcctgtaatccaacactttgggaggccgaggcaggaggataccttgggcctaggagtttgaaaccagcctgagcaatatagtgggaccacatctctacaaaaaattttaaaacctacaaaaacaaaattttaaaaattagccaggtgtggtggtgtgtgcctgtagtcccagctactctggaggccgaggtggaaggatcacctgaatctgggaagttgagaggctgcagcgagctacgatcatgccactgcactccagcctgggccaccaagaaggaccctgtctccaaaagaaaaaaaagaaaaagaggaagtgcggaagggctccttctaaccccgcaaggcccagtcacctggccttaaagcccagccaaggcacaggtgactgcagttttcaggtgctgggagtggagttgcgggaggagaggacggggaggggacggcttctcccttcaagctctggccatgggcgggaactgggctgaaccaacggaagttgagtagagtggggatgccctcctgtctgtccctgcccaacactgtggtctgccctccaggtggggagtggggcacaagcagctccgaagtcctggggggcccagcttctctgcctccccacccccaccctggccgccccacttgggaggcctgagctgggtcttagatgagcaaatctgtggaggtggaccttgatctgttctccgtctgaaaaaccttggaggccgggtgcagtggctcacgcctgtaatcccagctctttgggaggctgaggcgggtggatcacgaggtcaggagatcgagaccatcgtggctaacacagtgaaacacagtctctacaaaaatacaaaaaaattagcagggcgtggtggcgggc

SEQ ID NO: 34621 - DNA, 913 bp, Artificial sequence
  DNA replication origin
gctgccagggtccagccagactgcaaagttgcaaagttctaagacccctgcatctcccgccagccccgagcccaccagggcaaagcagcctaagacggctgtcttcccccaaccctgctgatcgcgcggcgcctggagtagggtcgacctgggcgcgcctgcggcgaggcggggccgagtcgtccgggggcggggcggggcggctccgggtctcctgtccccgcctgccctgactcaccctcgcggcccgcccgggaactctgcgggagtcgcggcagctccgctcccagagacccaggagttgggcccagcgtccctcccggaacggtgagtaggtggctctttgcctctggacaccccacgaggtggcagggtgggggtcgggctgggagtccccgggtctggacaaggggcagagccgctccaggtgcgccggccctgtggccggggcaggccgtcccgacacaccaggagctggggtgggggtgccggccggtgcaaagggaaacctggcccacgaggtgcccgtcctgggagccaggcagacgcggccaagtctcagagtgaagataaacaggctgaagataaacttgactttgggggtctcaaccactttcccctccccttggcatctgggaagacattgacaactcatccccgggagactctcagagctccagaacctaccacttggggtgggttcaaccaagcctgacctctggtgctcttgaacttacacatgtcccagatcttcaagtctgctggcagaggcggcttggaaaaccactcggctgggaatccgcaggcctggggcctgacccaggacgggctacaaagatgccaccctcccccaccctagaccctcagtttctcccttgcataaatggttgaggctcagccggacaccgtgcct

SEQ ID NO: 34622 - DNA, 1119 bp, Artificial sequence
  DNA replication origin
gcgtgaaccaccatgcccgtaaccttttatttcatgtgaccaagtaacacccgtgtgccagaatcaaggatgagtctcatgttctcagagcagaggcacagaaggctgcctggaagacggaaaggtaaagacctcagctataactctacacttgtgtgtgctccacccacaaatcgtcaccagaggagttccgacaagccggtaactctcatcccaaagtgttccctcgttggaccagaagctggaagggcacttggcagagtctgcctggccctggccacctcccgggtgtccgcaaaatcagaacttccttctcgcatctaagagcagagggaagccgctcttggggggatccctgggttccagatgggacatttccccagcacccgtcggaccacttaaaggagtggtttaggctgccgggggcccaagcactggcacctaaccccagcgcccctcctcagataggaattctccacgtccaggcgctgggctcacgttccgggtgcgagagagataaggggggtgtcttgaggttctatgtgggtctggccaacaactctggccttgaccttggccccgtcgccgagggcaggggtcacaccgctgggttcccatggccgtcccctcccccctggcttcggccaactctgagcctgctggggctggcaagaagggaaagggctctcgacggagcctaattacggtgaggaggcggcaccccgctgccagcaggaggctaggaggtaattaagcacaagaggaatcctaataaagcaccatcagtgaggaaggcattccgaagggacgcccaagccgaccgtgaaaagcgaggaggctgaggctgcaccgccgtggagaccagggatcgactgccgctttgggaacgaggttccaggaatgcgcatgcgcaaaagccacgcgggcgaacacggcttcgcctcgctaagcatgcgcgccgttttccccgcccaccgtcctcagaagaatggtgtttcctcgcagcgcctctctcaggagcgatcgggaattggcgcatgcgcactacggtggtggtggcgacgaaggcgggggttgcacgttgcctgcctcgagctctaggtggcgtcatccttcggg

SEQ ID NO: 34623 - DNA, 1527 bp, Artificial sequence
  DNA replication origin
agggcttagagtgatcacaataactggatggggaaaaggaagaaaaaaacaacaccacgataaatcacaacagaaacgactgattcgtccaaaagaaaagaaatcaaatcataaacgaggaggagggggaggcaccgaactgcagagatggctaggaaccgacagagatggggagggcggggaggatgggatggagttgacacagacagagacgcctggaggggactcctcgggggcctgcctgccaccggcctcctagctctgcatgggaacggccacccctgaaggcacccgggatcctggactcaaccctgtctcatccactcaggggccagggagggcggcccccaggggctagcagggacccgtgtcttggctgggcttcttgtctcaggcagtgtcctgcaccagaatccccacctccatgatttctctggacccccaagagactccccaaggaggaacccacgctgactcaggtcaggagagggagggacaggagggtgtcaggctgtgaaggtcaggctgggtgaccagggaatgggtggggtgcccagatacgggggtacctttctcgcctgccataatgactccatagagagaactaaataaactacgaaggtcacatcagaggagacaagagagaattttactgggtcaagaaagacacaaaaaggatcatgggtcaggggtggtgttcacagggtttgaaaatctaatttcctccagcccagaggatttagagaccaggatcttggggaaaaagccgggagactagatatggtcagtgttcccaggccaggtgtgtgtgaagcgagaggtactgatctaggatgacaaggtgtcagggaggtaggtaccgaggtggtgggactgatcagaaagcaggtggatgtatgctggggcgcggcgggagcaggcctagagtcacactggccccaggtgtccccaggtcaggtgggtgtgggtgtgaagggaaggggagccatcacttgaacacaggtgacaaagtcaccgggctggctgggggtcgatgtgcatttctggaggtcagacaccacacgctcaccaagatggtggcagtgaaactggtcacagggatttgcggggcctggtgtatgtgggagggggtctgctgagcccaatgccatggtcactgtcgccaagagggggagaagggaccccctcccgtccccccacctcagacacggtcacagggagagcgagagggagaatcctcgggtcagaagagatggggaggggctctatgtggtcaagtaacctcaggtgtccccgagccaggcgtgcgcgtgtgcgtagatcgtcgctgcacggggctgacaagcccccaggccgggggaggggggcgccagacagtccctgagatgacgagagtggtagcatcaggtcaacagggacgtgtctgtgttttcggggcgacctggatgtggtcactgtcgcgtggagtcggggaagcccgacccagaggatcacggcgatgggggcgggtcatcagctgggggcctc

SEQ ID NO: 34624 - DNA, 935 bp, Artificial sequence
  DNA replication origin
ggctttgttcaattcccaccgtctccagaggttcccccaggctggccccctgcagggccgctcacccagctagaatgttctctctggtgggaatgtgctccttgtccagtgggcccccctattgcagccccccgctacagaggagaggggctccatctgttctattcactgctgtgtccctggcgcccagggctggtatggaacccggggggtgctatgtgttcacctagttgttgagagagatccataggcacaggccacccacccaccaggcccaactttctcgttctctcagttacacacacacaggcgtgcaccccccccacccccggaggccacagactcccattcagtgggggagcccacctcctcctccagggagtccaaagtggagctgggagtaagggagggggaggaggagggaggacgcagaggaggctgggctgggctgaccgctgcttgagtggagtgagagagaaagtgagagtgaggggaagggacatggggacacacacagagcatgggggctgggggacgccattctgcggccggggcagcggttaggtcaatggtgcagatgtccaagcagcgatgataaaaaggctggtacctgctcgttgggacggggcaggagcagggcttagagtgatcacaataactggatggggaaaaggaagaaaaaaacaacaccacgataaatcacaacagaaacgactgattcgtccaaaagaaaagaaatcaaatcataaacgaggaggagggggaggcaccgaactgcagagatggctaggaaccgacagagatggggagggcggggaggatgggatggagttgacacagacagagacgcctggaggggactcctcgggggcctgcctgccaccggcctcctagctctgcatgggaacggccacccctgaaggcacccgggatcc

SEQ ID NO: 34625 - DNA, 969 bp, Artificial sequence
  DNA replication origin
ttcctcccacttctgcccaggaagcaggcccagggccacagcacccacaggatggataggccagggcggagtgcctgccagggctggcccaggctgtggctctgctggtagcactgaagttggctcccagacaagagcgagcagggccacgctggggaggcagcgggcacgagacccaggcttcaggctgccttgccctatcttctgttccggggtcagggagggcccccctcgggccagtgggctgacatgagggcctcctggcctggcctgcagagctggggcccatgggggcaggacaggacctcagggggcctgcatcctctgggaggagagctcgggggcacagctcctgcaggggctggcgggaccaggtggggccaatgctgggccaggcgggggttggctcatccagcagcctgcatgcgggcagctcgggcatgctacagcgggtgggcaggcggcgggcaggcagcaggcaccctggggtgggcaggcggcattaggggtgggagggcaggagacagacagacagacaggaaccaagactagggcccaggtgcccagaggaggcgctgcagagacaggccagagaggggcctgggacaggagggcagcttcccggaggagctagggtctccctggctgggctggcaacagggtgcaggaacagaggccgggatgctaacgtggcctccagaggagccaatcctgacacgtcacatcctagaggccctgacaacggctacacacacctaccaaggtgcccctcccacaggagctggggcctgccgctctccaaagccctcagccaacaagcccctctcccctcttttcctcctgcctcgtccaccttttctccccacagttctgcaggctcctggtgactggtgcccagggactaatatgaacagacaaacccgctccatgctggcagctaaaccccgtccctcccgtgtgcccaggacc

SEQ ID NO: 34626 - DNA, 1082 bp, Artificial sequence
  DNA replication origin
gcccatgtgtccgggcagaagcgggggctcttcctgtaggactttggtgaggacctcaaagtccgtcttgcagttcttgtagggaaactgtcctgttgccagctccacctgggagggagacgggcagggctggacaggtttatgttctcctccctccgagtcccccagaagccctcactcctggctggagaacaggggagggccccaactcaccaacgagatgcccaggctccatacgtcggcccggatgtcatagtccggcttggtggggtctggggggtcaatgcgctcgggctgcaggggggggaggagaagacgtatctccaaggctggggccggcctcccagcccccaccccctcccccgctggggggcccccactcactgccatgtaggcggcacagccggcgctccgcgtcttggctttggagtccaccaggcggccgctgatgccgaagtcgcagagcttgatctggccccgctcgtccagcaggatgttggagggcttgacgtcgcggtggatgacaccgtgcttctccttcaggtagtacagcgccttcacaatctgcaggcacgcagaggggggtgcatgtggcagggggcacagacccaaggccacctgcccggtgcacgccccacctggccactcaccgccactgtcatcttgcccagtgcacgccccgcctggtcactcaccgcctctgtcatcctgcccagtgcaagccccgcctggtcactcaccgccactgtcatcttgcccagaatgcgctcggggatggggccctgcatccgcttcttgagcttctcagcgcaggtgcccatgagctccatggcgatgaagacgtccgtctgcagggagaggggcacccgggggagctgtgtcttccggcccaccccccagaggctctgctccctaggaaggggcaggggtgagggaggaggagacgctgcagggcgcggccaggtactcacgttggtgatgaacgtcccaaagcactgcacgatgtaggggcagtcgtggctcttcagcaccacatccaggtccatgaggatgcgcttgttctcctccttgttcccggagcg

SEQ ID NO: 34627 - DNA, 1695 bp, Artificial sequence
  DNA replication origin
gaggtggctgggcccaggctcaggccagaagagagacagaggcagggagggtgacgggagagccagacaaggacagagaggtagagcaggggacagagggcgacggaagaggaacgggcgcgtgggagtggcgaaggacacagcacgctgggagcgtgcatggtggctgcgggactccagggctctctcctggcccctgggggccgccccggcccagaggctgcggctgaatgaacagcgactctgatcgcggcctgctgtcttccgttcacagtgtctgtcgggggacgcacacggccggctgaccccggggtgggaagggcgggggcttggtaggcccggggcggggggggtgggtgggcaccccccactctctgtcctcagtcctaggtggccgtccaggtcccaggtctcccctggcaggcagctgggtggccaagtggggaggggggcctgtggccatgcccctggccccctgtggggctggccgccgccaagcagctacctgaagaagggcaggtggggctggctcaggacgccgctagtccgcggtgactcagtcttcgccatgacatccttgaaccaggacgccacgtccacctccagcgtctcgtagcgcttgatgaagctgtgttcctgtgggcccgagggggtggggcttaggaggagacggtcttccctcctggcctcgcgcctccgcagggacaggacggggactgggagggctcaggtactcacaagtagcttattatactttggtctcttcctgtgatctttagtaaggctagagcaagagaagggaagacagatgtgagaacgagggaggaggggatgccggccccacccctgtgctcaggccctccccaaggggccaggggtccccaagatgtgtgtgggggaaggagctgtggatgtcctcaggaccccggctgacagcggggagcaactgtgagtcccggagcctcctggcctagggccaggtggcaagggcctggcttggggggccagagctggctgaggtcccccagaaaggtgggtggggctcccctgagagaatcgaacatggccctcctgaacttgtagctgtgcttgttgcagaagcgtgctcacaatctccaacagccaccccgccaaatgccacagggctggctgtcccctcaggctaggtccaaacccagctcatggctccctgggcaccagctccagctcctgtggcagccgccagccaggagcccgcccacagtcgcatccgcccatcccagggtgcggcctccattcccctcctgccattgcctccccagctgcccagagcagcgggctgtccctgacctcccaagtggagggaggttctcaccagtctttgacgaaggactggaagtcccccgagaagcccatgtgtccgggcagaagcgggggctcttcctgtaggactttggtgaggacctcaaagtccgtcttgcagttcttgtagggaaactgtcctgttgccagctccacctgggagggagacgggcagggctggacaggtttatgttctcctccctccgagtcccccagaagccctcactcctggctggagaacaggggagggccccaactcaccaacgagatgcccaggctccatacgtcggcccggatgtcatagtccggcttggtggggtctggggggtcaatgcgctcgggctgcaggggggg

SEQ ID NO: 34628 - DNA, 783 bp, Artificial sequence
  DNA replication origin
gcacgctcccagcgtgctgtgtccttcgccactcccacgcgcccgttcctcttccgtcgccctctgtcccctgctctacctctctgtccttgtctggctctcccgtcaccctccctgcctctgtctctcttctggcctgagcctgggcccagccacctcctgacgggtcccctgggtctgcataggtctcccatggcgcaatgagtcagtggcccccagccaggcagtgtgggcattgccactgcggctggacggggctgcgcgctcgcgctctctctctctctctctctctctctttgatctcagggggtcctttttggagtttattgtattttattgtacttggtggggtgtttggggtgggggcggaggagagcttgttctcgtggggttgtcggtaccttcagaaacttttaccaaagtcacgattagctgcttgtggtggggccccaaccgccctcgggcactggggagctgggctggggctgctgctctggggtctccgggggccacagcttggggtgagttgaagacctcaggggatgtggaggggtctgcggggccctggccgcacaggatggccttcagggaaggtggtcttggggcatggtgcagagcaggtgaccggagggaatcggtgacggagcggggccaagggaggggtccggagggagtcagggatggagggcagagggagtggatgtgggggtttgaggacgtgtgacaagctccagcaggggtgggggccgggctgagggtgggggtgcgaggtggtcactccca

SEQ ID NO: 34629 - DNA, 793 bp, Artificial sequence
  DNA replication origin
ggggccccaaccgccctcgggcactggggagctgggctggggctgctgctctggggtctccgggggccacagcttggggtgagttgaagacctcaggggatgtggaggggtctgcggggccctggccgcacaggatggccttcagggaaggtggtcttggggcatggtgcagagcaggtgaccggagggaatcggtgacggagcggggccaagggaggggtccggagggagtcagggatggagggcagagggagtggatgtgggggtttgaggacgtgtgacaagctccagcaggggtgggggccgggctgagggtgggggtgcgaggtggtcactcccatcgtgcccctggccgtccctccactcacccacacctggcccagtccacgttgaggtccaggactgggaaggaccgggtgagtgcaccggggacccaggccaggtgccccccggagcctgctggggtggccagagcaggagggggtgtgtttcctttttgtgggtgttgcatgcaaatcaagtggacaagaaaaaataacaaaacaaaaaacaagaaaaaaaaaacacaaaaccccgtaaaatcacaaagaaaatccaacaccaaaggcgcagaagccggctggccgtggtgggggcagcgtaggcgtagcatccctctcctctcacttagcctgttgactcttgttattatcatgatattcacaaaacgccgcatgtttaaaaagtcatagatgtcatcttctctctgcccccagggaggaaagccaccttctcttgccccttggcccctttg

SEQ ID NO: 34630 - DNA, 862 bp, Artificial sequence
  DNA replication origin
tgaaaagttcgaggcgggcggatcgcctgaggtcaggagttcgagaccagcctggccaacatggggaaacgctgtctctactaaaaatacaacaattagccaggcgtggtggtgcgtgcctgtagtcccagctactcaggaggctgaggcaggagaatcacttgaaccggggaggcggaggttgcggtgagtggagattgcgccactgcactccagcctgcgtggcagagcaagactccatctcaaaaaaaataaagagggtgaaacagggatagaagcatgacagacccgtcacctccctgcccatacataccaggtggcccgctgggtaaggtggtgatccctgggagcagggccagcagcagcacggtgcccagcatgctggaccagctgaggtcggagtgtttggggccagagcagacaccagctgggctgcacccaggtcccgcacgtgggcaggcggccctgtccttggcaaggagggaggcagggagcgggggtggcagactgaggggctgacaccagagccaatgcccaaggcctgaggggattaagggatcctctgctgcccgacctgtggccactgggggcagggggtcccttacaccagctgcttgatacccatcggcaagtcactacaaacacctcccgtctagctcccaaacctgcctcagtctcccctcaatgcagaaacctccccccgcaaccacccccttcccacctcgccctgccaggcccatgacacaccacagactcggtggaagaaaaggaaggggtttattctcaagcgtctaagggtttacaaacgagggcattttgttttaaaaaggggcagggcgacactggcggcctgaggaggggt

SEQ ID NO: 34631 - DNA, 1768 bp, Artificial sequence
  DNA replication origin
gccacaggtcgggcagcagaggatcccttaatcccctcaggccttgggcattggctctggtgtcagcccctcagtctgccacccccgctccctgcctccctccttgccaaggacagggccgcctgcccacgtgcgggacctgggtgcagcccagctggtgtctgctctggccccaaacactccgacctcagctggtccagcatgctgggcaccgtgctgctgctggccctgctcccagggatcaccaccttacccagcgggccacctggtatgtatgggcagggaggtgacgggtctgtcatgcttctatccctgtttcaccctctttattttttttgagatggagtcttgctctgccacgcaggctggagtgcagtggcgcaatctccactcaccgcaacctccgcctccccggttcaagtgattctcctgcctcagcctcctgagtagctgggactacaggcacgcaccaccacgcctggctaattgttgtatttttagtagagacagcgtttccccatgttggccaggctggtctcgaactcctgacctcaggcgatccgcccgcctcgaacttttcaaagtgctgggattacaggtgtgagccaccgcgccccaccgatgtcactctctttcaactagacctttggtggtggtcctcatgggggtggggacagggcaggggagtggggtggggtctctgtcccccatcccaagggtggctcacatccccacttcggcaaagctccctgcagccacggagagggccagagttgtgggagggggccagtctacccaggtgctcttcagaagtgggtgtggtgtgcggatggacaagggggctcatgcctgtaatcccagcacttaagagaggctgaggtgagaggatcgcttgaagccaggagttccagaccagcctgggcaacatagaccccgtatggccgtggtagcgagtggctgtggtcatagctactcgagaggctgaagcaggaggatggctggagcccaggaggtggaggctgcagtgagctgtattcgcaccactgcactccagcctgggcgacagagggagaccctgtctcagaaaacaagaaaaatggatgtgcaggcaatctttcgtatttggagattagccgttttaccaggaccccgctcagcacctgaaggcagacatcagcgtgtgtttaggggcacgaagaggggaggggtcccatggctgcctcagcctggacaagtggaagcgtctcagatcttggtggcctggctgggctttggctgtgcccaggagagcctcttgggagggtatcctcttcacttcccttcctcgttggtgacagcacctatctccccttagaaaggggagccgcctgtcctgctgcgtccccaagagcagccctggggaaggtgggggagctctgacttcacccagccggaccccaccatcgggtgctcctcaccgcttctcttccgccccagggagggcttcgccagcttcggaggcttctctaggggcgcatggctctgcaaccggctcagttgctgggctgtgcgagtcccaggggtcgccagggggcacatcaccgtcaggggggaaagtggcgcggagcccatcatgggtgaatcggccgccgcaaccgcatcccttttccaaaggcggcggcgggggcgaggtggtcgggtcacttttcccggaggcctaaagggcagcgcgcgttttctctcctttgggccgcccttccccgccccgccagctcccccgttccccgcg

SEQ ID NO: 34632 - DNA, 986 bp, Artificial sequence
  DNA replication origin
cgctcgaggtcccggccgacagccgcgtgttcgtgcaggtggggaccccggggacaccaggggcggatgggggccggtggggacgggcgatccctgatggcgcctccgtcccccaggcggccttggcccgtccctccccgcgctggggcctggccctgcaccgctgctcagtgacgccgtcctcacgcccggccccggggcccgccctggctctgctgcgtgagggctgccccgccgacacctctgtcgccttcccgccaccgccgccgccgagcccgggtgccgcccgccccgcgcgtttcagcttccgcctgcgcccggtcttcaacgcctcggtgcagttcctgcactgccagctgagccgctgccgccgcctccggggagtccgccgggcgcctgcgcctctgacgccgccgccgccgccgccgccatcgcgggtgcgcgggcgcagagcctggaatccgggcgctggggcccttcgggggctgggcacgggcgactctggcagtggaaagaggatactctcggggtctgaggatctgggggttgggggaggtggggcgcaagggtccatctctgccgacagagtttctccggggacagtgtggacactgggttcccccatggacagctctggaatccttcagggctgggggttggatgcagaaggccactaaggggacacatttctgggaacctggtgctgggcctcacatgctaggtgctgggagacgcggaccatgcgatcttgtggggctgggatttggggtccttaggggctgggcggctagccacttgtatgcgtaggggctgggctcagggcaccctaaggggccggatttccaggggtcccatcttggctgtggtggagagctggactcaggtctctcttgggggccctggggaccagagccacgatcccggtgccctgatgtccccgtctcttccccaccttcctctcccccagtgtctgcctcaggacgagg

SEQ ID NO: 34633 - DNA, 1741 bp, Artificial sequence
  DNA replication origin
cgcggccgccccccagtgagcacgcagtcctcctccgcatggggccgtggggcggcagagcgggtgggaaggacgcctgggagctggacccagtctcagcgtggcacttcccacagggccgcccaagagtgtccccggccgtgcagtgcgccctgagcctcccgcgccggcccccgcggccctggaacccgcgccggtggtggcgctggtgttggcagccttcgtgctgggcgccgcgctggccgccgggctgggtctcgtctgtgcgcactcaggtaccgacgacctccgccaagccgggcccccagtctaatcccgcgcgtcgggacccggggcggccgcgatcccgcctgcggggcctgatcaaccctagctaggcctgcctccgcgatgcccgcagcagcccccaggggccgcccttagcctggcgtggcgcgcagcagcccttctgcagctcgcctctcccttccagcgccccacgcccctggcccgcccgcgagagcctcgcccagcggtccccagcccaggaggtcccagtgaggaaggtaggtatggaggtggagggagctgggtgaggtaggagatctgacagtgacgcttcctagcgcttagttcgtgccaggcactgtggtttttttgtttgtttgtttgtttgtttgtttgttttttgagacggagtttcgctcttgttgcccaggcgggagtgcaatggcgcgatctcggctcaccgcaacctctgcctcccgggttcaagcgattctcctacctcagcctcctgagtagctgggattacaggcatgcgccaccacacccggctaattttgtatttttagtagagacggggtttctccatgttggtcaggctggtctcgcacacccgacctcaggtgatcctaccgcttcggtctcccaaagtgctgagattacaggcgtgagccactgcgcccagcctccaggcactgttgtaaatgttttacgcctatgaactaacttaatccccttaacctctaggcggacactattataatccccattttagagacgagaatgatgaggcattctctgaattaagtaacttgtcaaaagtcacaatactgggtggagcttggattcgaactcaggcagtgggtcacccgcggcaggcgcgggctttgggtcgagccaggggcattaggtgaggagaggcactaggcgaggagaactcagcattcggacccggctcccactctcaccccggcatgcagaccgatggaagaggctagtggtctgctgggaagggaggtggcccgcgtagcgtcccctccctcgctgagcctcagccacccctcccagggatggtgcgcccccaacatggtccggagatacacccagctaccaattcgggaccaggaccaacaggaccggacccgcctccctggacctcggacctgatgaggccacgacccctgcgcttctctcctccccctgtccctcccacctgtgctcaaaataaacctctggactgaccggctaagttctggtgcagtcagtgagcgcgcaacgtgcggggtgggggataggtggggaggcttggggagaaagctgggagcaggacttggggggtattcctgagaaatcgtgacttacaggggtggagcctggggacggggcccatatgcccatatacccgtgtgcactcccaggccatgggagactgtagggcgttttgtctcaaacagaaagcgacacccggccgggcgcg

SEQ ID NO: 34634 - DNA, 1339 bp, Artificial sequence
  DNA replication origin
gcccctcaccccgcccaggctcacccactaacgccccgccactcagccccacgccacgcccccgctcgcttacattcctggccccgccccgctggctcctgccgcagccccgcccactctccgccccaccccagccccgcctccagcctggctccggtcccgagaaccgcatctcacctcagcctcgctccggccccgcagctcccgggccagctcggtggcgtccggctccggctggccctgccgcgcctgcaggagtcgcactagctgccgcttctcgcgagcgctccaggtcgcgggaccggtcacctcgcccagatagcgcgccggggccgctcgccgcctgggaggtggcttcatgccgctcagaaagaggcaggcgctgtaaggtcgcttctccgatgggcggagctacgggggccgccgaggtcagaaagaaccgcgcggaggcggacgcgcgtgggggcgtggcttcgcgtttggaggcccggggaaccgccccaatggaagtgaaggggagatcggcaccggaactggggcggggcgaaggagaccctcagcctgcactttatctcattcatgaagtggagacgacaccttggatcccatgccctccctctgttgctggactaactcatgaagctactactgtgtgctttgcttctcgcagaggggtgggttctggccgaaaggtcaagtccgaagatccagtcggtcaagagcctgggctctggggtcagacaggcctggggactttgggcaagtgatttagccttgccgagcctcagtttcctcctctgtagactggggctgatagtcccactcttgtctgtgtaaggtagagtggagctcgggcaggagggatttaaggagctctagactagactgacaatctaagaggagggcgaagtccagaccaggagggaactggagcagaggcagaaggtcgaagcggagctagggcagggtccgggcgggggtaatggagagcggagaaggcctggcttgagaaagatcgcaggaggcagatgggcaggtgtccgggtaaggagaggagggagggggaaggtttattttaaacttacgcttgtggggttgggtgccgctttttttttttttttagacagatttttgctcttgttgcccaggctgcagtgcaatggcgcgatctcggctcactgcaacctctgcctcctgggttcaagcgattctcctgcctcagcctccccagcagctgggattataagcacgcgccactacgccctgctaattctttttttgttactttttttagtagggacggggtttcaccatgtcggccacgctggtctggaactcc

SEQ ID NO: 34635 - DNA, 2562 bp, Artificial sequence
  DNA replication origin
gagggtctccttcgccccgccccagttccggtgccgatctccccttcacttccattggggcggttccccgggcctccaaacgcgaagccacgcccccacgcgcgtccgcctccgcgcggttctttctgacctcggcggcccccgtagctccgcccatcggagaagcgaccttacagcgcctgcctctttctgagcggcatgaagccacctcccaggcggcgagcggccccggcgcgctatctgggcgaggtgaccggtcccgcgacctggagcgctcgcgagaagcggcagctagtgcgactcctgcaggcgcggcagggccagccggagccggacgccaccgagctggcccgggagctgcggggccggagcgaggctgaggtgagatgcggttctcgggaccggagccaggctggaggcggggctggggtggggcggagagtgggcggggctgcggcaggagccagcggggcggggccaggaatgtaagcgagcgggggcgtggcgtggggctgagtggcggggcgttagtgggtgagcctgggcggggtgaggggcggggcgtggacgggaagagaagacctaggggcggggcgagcttgggagctagacgtgggcggggcataagtgaagcggaggggcggggcgatgccgggggcggggcgtgcgtgccgctgaggtttggagagtgggtgggtgagtttgaggggcaggacgagcctgggggcggggcgtgggcgggttaatagcaagacttaagggcggggccgttttgggagtaaggcgtgggaggggcgtgggcgggatgagggcaagctttaaaggcggggcgagcctcggggtaatgcgtgggtgaggcgagggctaaacgggcggaatgaactgggagtaagatgctgccgagtccgggcgaaaagcaacgcatgctgttggacaggatacgagcttgaagtgagagggaatagagaagaggggacgaagaagggagttgaacggggtagtagtcagcatagggttgggccctggctgcgtgaaggagccggaactggcctgggccttacaacttccttaggtagctggtcacgctctgggtggggtaggggccttggcagtcactgggactcctaacaccgggccagcaggagactaaggcgcagtagcggggcccagagcatacaagggattgggctttggcttctctgctgcagccctgagctcatagaagcctcattccgccgcctctttcctttctagatccgggtcttcctccagcagctcaagggccgcgtagcccgggaggccattcagaaagtgcatccgggtggccttcagggaccaaggcgccgggaggcacagcccccagcccccatagaggtgaggcagatgaacagggtgaggctgtccagggcaggtccctggtgggtaggtgggagttgcgggggataacctgattaggggatccccaggaggagcagggcttggggggccattgcaggctgatccctgggctgaccctgtacctctggcttcactcaggtctggacggatctggctgagaagataacagggccactggaagaagccctggcagtggctttctcgcaggtaccgccattcccccaggcaggtcagggtgtcccagaggacagggtcacatgggccaaatcatgtgaacctgggtcctgggcccttttgccagctctgtggactccgtcagtcactggacacctcgagcctcagtgtccctggctctgaggccatctcttgtctgaggagcatcttagggtggcagggaggatgggggaatgtgtagacggtgagaagacttcccagctcctcttcctccctgattgttctgcctgccaggtgctcaccatcgcggccacggaaccggtcaccctcctgcactccaagccccccaagcccacgcaggcccgtggaaagcctttgctcctgagcgcccctggaggacaggaagaccccgcccctgaaatacctagctctgcccctgctgcacctagctccgcacccaggactcctgaccctgcccctgagaaaccttctgagtcgtcggctggtccctccactgaagaagactttgctgtggactttgagaagatctacaagtacttgtcctctgtctcccgaagtggccgcagccccgagctctcagcagctggtgagaagggtgagggagggggcaggagcagagggatcaagggtccctggcagcaggcaggggtgtccccttacccctctcctccatccatcactagagtccgctgtggtcctcgacctgctcatgtcacttccagaggagctgccactcctgccctgcacagccctggttgagcatatgacggagacgtacctacgcctgacagccccccagcccattcccgctggagggagcctggggcctgcagcagaaggggatggggctggctccaaggcaccagaggagacccccccagccaccgagaaggccgagcacagcgaactgaaatcgccttggcaagcagctgggatctgtcccctgaacccgttcctggtgcccctgga

SEQ ID NO: 34636 - DNA, 2829 bp, Artificial sequence
  DNA replication origin
agggggcaggagcagagggatcaagggtccctggcagcaggcaggggtgtccccttacccctctcctccatccatcactagagtccgctgtggtcctcgacctgctcatgtcacttccagaggagctgccactcctgccctgcacagccctggttgagcatatgacggagacgtacctacgcctgacagccccccagcccattcccgctggagggagcctggggcctgcagcagaaggggatggggctggctccaaggcaccagaggagacccccccagccaccgagaaggccgagcacagcgaactgaaatcgccttggcaagcagctgggatctgtcccctgaacccgttcctggtgcccctggagcttctgggtcgggcagccacccctgccaggtgaggggcatggcgggcaggaggccacaccaggccccccgccctgcccctcggttctgctcggctggccctggctctttctgaggatcccgtcatgggggaaggtccttgagatgatgctcagctgtggggcgggcctctaagatgccccatactttgggggtctcagaaatggaacccccgttgtacaggggttgggtgggggttgcaggactccactcacaagcctcctgatgtcaaggacaggcggacagggctggcctcccccagtccccaagccccactgtgccttgttgtctgctggggggccatagctggcactgcccaccgtaaaggccctcgcacattttcccccttcctgtacacctcggggccagcatcctcaccttcttcaactgaccagtcgtggttactccctgctgccaggtccttccccttcccgggggtattctgtgaccatgaataaagttatcattctctttctctttcacctgtgacttaaagatggaagtgggggccctgaagtgtcagagcttgggggtcacagggctgggggtgtgtgccagggaggagagctgccacctgactggtgtgatgaggcctggggtgaggagccccttggtgactgtgaagctgacaagtgtggatggggagagccggcagggcaccttggggacaggcgtcagggatgggtttcagagtagggcaaaatcacatcgcacaggtggaggggagaaggcagcagagagtgggggtgacccggtggaaggagttgagccccaggctgggcggttagaggaagatagataggggtgggctgccccgagtggcaggaggctagtgggagtggagtgtcccctggggtggctttgggacctcaaggatccctagaaggcggggagggaggggtactggagtcagggctgaccccaaacccctgggggtgctgggaccccgcttgaggccccctccatcagcttcacctgccctgtgggtgtggaccgagggtcgggtcctagagagggaagcagatgtcctcccacggcaccgcgtcccacgcccagctagtaatccaagtcggtaaattctccgttctcggagcctgtgcattcacccagcctgccttttatagaaacgctcattcctccccccacacactgcacacggctcccctggggtgcacatctcttgggagggccttggagcacagccagcccactccgtccgtggtcaccgccccaccgcaccagacccacaaacgctgccaatggtggtgggcagggggaggaggcttaggctgcaggtacggtcggtcgtcggagcctccctccagggctggcagagggtgcgcctcccagttccccacagggctgagtctctctcaccacccccggcgcctccccagatcaacagaattgtgtgtggaggggaggcagctgggggttacacatcagcccccccccccaaagccggtgaaaggtgcttgtgatcttggtgtctttgcagccctgggaagctttaaaaacatgcaaaagccagacctgggttccacttccagccctaccagactctagccatgtgactgtgggcaagtcagtcactggagctgcctggccctcggtctcctggcctgtagaatagggatgctaacagggcctggctcattctcacgatcccgaagaggagacaggctataaacaggaggtgccaactcagcacgctacttggcatgcagtaagcgctcaataatagcttttattatcatgttcggctcagaggcagggaggagtggaacggcatgggagggctgcgggaggcacggcaggggggtcaggggcaagtggcaggagggcggatggggggcagcggtgggcaccggggcagggcgcgctgacctgtcctggggcccgggttgggggcagaaatgagcctgcccacgctgtcccgccacggcaggcgccacgcatcctcgacacagccgccatggcaggccttcgggctccgtctccgggacaggcggtgcagggcaaattggtatgcagcgtccgccccgtgggcccgggagagcctgccccgcagggaccagagcccaaggacgggctcaacactcagtcaaggtggggttgacgacggccagacaacaggggagggaggagggacaagggggtccccacttccagggacgcacaatagcagagccacttacacgctggggagggggcggtgcgggggtcctcctcccgcccgggattcagagtcgggggtgggggccagccgggcgggtgagatgcgcagagaggaagggacagggcggataaaggcacgaggtggggctccggccaggccaggaagggacatgggaggggtctcgagggggaggggctgggcttctcccaactccctccccctctcccccgggctgggggctccgg

SEQ ID NO: 34637 - DNA, 1061 bp, Artificial sequence
  DNA replication origin
tcaacagtgcccttcccaccccaccctgcaggacaaggtgctgcggatgctgtacgtgtgggcgctctgccgagaccaggacgagctcaacccctacgcggcctggcggctcctggacatctcggcctccagcaccgagcagattctctgagtgtggtgccggagccaggtagccccggcctgggtcatcaggcacagaggcaccgcaacaccacctgcggcaactccagacctctgggaacaagactgcgggctctgcccccagctctgccaggacggctgcaagaccagctggcccgggaggggacaacgggctgttgcgggtgcgcggcagctggagacactcccccgcagggccaacccctgccctgttgctctgccctgcaggggtcccggcgcctggtcacctggggtgcacacaggtcacacagtgccaagaggccccagggcccagggactccccccacagcagggtgggacccgggacccgcggctcagtggcccgctagccacgtcagccaagccactttaggtccattttttaattttaacagtgctcttccatcttgtgcataagcctgagatttggaaagaataaaacaccgaattgcagaagagcagctacggagtctgaagtgtcttctctggcgcgggagtggccgaggcgatggtgggggtgggagcaggcggctgctgtgggaggcggtcaaggtcgagtgaggaactgcagccgcagtgggtggacgccttgcccagggctggaccctgagttggaagacgaggccagtgacagacaaaactagggggacttactcatcccagtgacctgcctgagctctctgagaattgaggtccccagggccgggggagcttgagtgcccatatgagtgttttagggccactgaggtccccccacaaacagggagtctcgagtggggtctatcgcggaggagaatgcaggcacagggcaggctggggggcccgaagtgccaggggaggtgggagtggcagctgcccactccccggcgaggtcgtgggtgctcgcgggtcctcggggctgg

SEQ ID NO: 34638 - DNA, 1212 bp, Artificial sequence
  DNA replication origin
tgatctgggccagtaagtgggtggcacctgcctccccacttggacctgggttcttggcctctgccattgctggctggcggcagggcacctgggcgccagggtgtgtgggcagcagctctgtgtggcgtggtgcccaccctgggtggcatcacgcaggcgtgtcggcctctcattgcagacttacagccagctggcccaccccatccagcaggccaaggcactgggtctccagttccattctcgcatcctagacattgacaacgtcgacgtaagcacctcgcagtgggggcccgggccaccatcgggggtgggaactatggcccagacaaggcccaggaggtggccttgccaggggctgggggccatgggctgatccaagaggtcttgggcttgtccaaggggagggtctcgagggaggcctggtcctggcctgagaggcaaggcccacggggagggaccggtgctgggcctggtgctggagccttctcctagcagggcctaggcgcaggggtttcacctccaggggagcagccgggctgtcctctgaggcacatcccccctctcggcccctctgcagctggccatgggcaagatgatggagcaggggccggtgctgatcatcaccttccaggcacagctggtgatggtggtcaggaaccccaaaggcgaggtggtggagggtgacccggtgagtgagggagtgggatggggcaggcacatgacaccgcctgtccccaagatctgtgtgtggccacctggcagagaccccagctcagagccctgaagctctgggactgggtggggatgtggagaaacctctgggccagagtttggggttgagggaggtcggagaccagcagacctgtctgtttttaccaaggctgagtggttcctgagtctaggcaattgtgctggcctctgctcccagcccctggggaagttgccggtggctcctgccccacagagcctggcccccccccagagctgcctgggtcacctcaaccctctcaacagtgcccttcccaccccaccctgcaggacaaggtgctgcggatgctgtacgtgtgggcgctctgccgagaccaggacgagctcaacccctacgcggcctggcggctcctggacatctcggcctccagcaccgagcagattctctgagtgtggtgccggagccaggtagccccggcctgggtcatcaggcacagaggcacc

SEQ ID NO: 34639 - DNA, 1343 bp, Artificial sequence
  DNA replication origin
ctctccagaaatcatggcctaaaaaggaagggaaaataagcaccagaacgagagtgggcttttcaggcagcaggcgaggtcctgggaacattctccagtggtgcggggtggggagtttcctcagacacccccggctgccacctgtggggcgcgggtggagctgtggcactgggtgtcccccccaggcccgtccctgctggtgtcagtgcctggctctggcctaggcacaggcggagggcggcctgcgggcgaccacccaggaggcaccccacagggggacccccctggaacctggtggaggaagagaaaggtggctggggacccagctttcagcctggtcaggaatccaagccagggagatgaggacccaactccggctcccgcagtgagcccatgtcctctgtccccccaggggaccacatttcggactgcaaggcccaccatgggaccggctgcctcctaactgctgggggcagcgagagggaggggtgggctgcagggggcgtgcctgggctgggagctgcttccacaggatcctggagcctgggccggatccgatgagggggagggaggtgcctggagcggggagaagagcgggaaggagccggatgctggtggtgaaagctgtgagcggcagggggcgggtggccagaacacttggcacccatcacccatcccggaaggcactgcggtgctcaggctgctgttttggggcatggcgcccatccgcaccacctcccagccctgcccgaagtggcgggaaggatacgggaaactggaggaggaagaggacgttgggcggaggccggcggggccaaggatggagagtcccatgaagggccttccagaggcctggcccgactgggccgaaggtgtccaggctcctcctgcatcctgggggctgcagagaggcagaggcagcagggaagacaagaggccaccaacctcagggagaggcttatagggggcaggctgcagcatgaccttgagcaagataccctcatctataagcccaacaagggtctggttgccagggacagcaccgtgagggaacctcacggctgcagctctgggtcagacgtggcctggggccagctctgatgtctgaagacagacgcccacttctcccaaggggtgaggggctccaggcacctgagacaatccctagcctccagcagctgctcccagcaacctcaaaggaacaacagcctcaggcaggaggagtgagggaaacagacctggaggtaccggaggtgccggtaaggcccaggaagggcttcgggcacagctcatggggcagctgcagccgggcaggagcccgtgtgcaaccagcctcctcagaa

SEQ ID NO: 34640 - DNA, 871 bp, Artificial sequence
  DNA replication origin
ccggtagctgctgaaggcctggctggggaattctctcccaaatacctgatgcaatcgagtctccgctcagaatttttcagttcatcttaggacttcttgtagaccgtggcctttcaccttcattgcaaggatggcattttgtctgtttggttttcttacagtgagggatgttaatgctgggggatggtggaggaagaggaagaggaggatggggaggagggggaggagaggaaggagaggggagggggaggagagaaggaggaggagggggaaggaggagagggaggagggggatgagaggaaggagggggagaaggaggagaggagggggagggggaggaggagggggaaggaggagagggaggaagaggaggagaaggaggaggaggagaggagggggaggagggggaggaggaggaggagaggagggggaggaggagggggaaggaggtgagggaggaagaataggagagaggaggaggagagggaggaagaggaggaggagagagagaagggggaggaggagaaggagagggaggaggaggtggaggaggagaggtaggaggaatggaatggcagctggccgagggcccgtggagtgagtggggcatgggtaaggagaggaaattgcagctgagagagccagcgcatggtgggaggagaggaagcaggcctgggcaaggccactgaatcaggctcctttccagttgacagaacctaggataagagattgggggaagggtgcacctaggaaggggcagttgacaaggggaggtatgacaggacaggccccagtgccagtttctatcaagtcaagcctcatggagacaggcctgcgggtcctcagcgaaagccacggatcccccaaccc

SEQ ID NO: 34641 - DNA, 1903 bp, Artificial sequence
  DNA replication origin
atgcgttgtatgggtggttttcatattcttcccacacagactgtgtgtgccgcaccttggctgtgatgttgaaataacaccgagtagttgggccacagaaagtcatgctctgaggtgacctctttttgagagaacagcagcactcccccagcagcccagagcctcgcctttcatgtgcacacaggtggggccttcctggcctgcaggctagaggggcatgcacattgtcctgcgtcccctgagctgcgtgctttggggtgggcggccttatcagtctctcttcctcctcctttccggctgtaggaaccccacctggcatgcactggccctgccgctgccggccttcgttcccgctggggcccgaggaggggaagggcccctttgcacttcatgggggccctgggagcttcctgtagcctagcacagactcgcgccctggcaccgggcagtgccgaaggacagggctcactcgcacggccgccgccattctgcctttgctctggggagagggtcgggggatgccagttactcggtgtaaactcccctggtctgcaccagaagagtctcctgtggtccctgaagtcctctcacttaagtgccagctgagcgaatgatcctgtcagtgggccagtgtgtgggtttattgccccccattctgcactggggcatctgagctggctgtgcagggcccagggccgggggaaccaacctcactggcccacagtccactcccctcctcctctagaccccacatgcactgctctgcctcggcctgtctgtgtccagtatggccctgatgagggaagcctgtgctccacttggagcccccaatgcctgagaacatgcctccagccacccaactctcttggggccttccctagtctctcaggcacacacgggccacaggcagggggaactcacctctgcacacagctgctgggggcattgcttcctttccctctgcaagatagtgtctcccagggtgttgggggcaccttagtattgcgcccccagggtcggctgtgaacctcaaggtggcctaaggaacctttgtcatctttgcagagcagtgagggaggcagagagaagggagccaggagggtctcccggctctgcttcccaccccaggatgcagaattggtgggaaggtgaggctcccatcccagggctgtagctccctctgctggagacagagtgtgtgtggcaggccagcctgtgtggagtttgccttcctgtgacgggctttttagtgttaaatagatgaggatggccgggcgcggtggctcacgcctgtaatcctaatactttgggaggccaaggtgggaggattgcttgagcccaggagttcagaacagcctggccaacatagcgagacccccaactctttttttaaaaaaagagaaaaaaaatcccaccctgagctgacagagcttaattttttgtattccttcgcttctatatccaccttaattgtgaactttatagtgtattcatctggagattatgccgtttcttggactctgctgttaaattctaaaaaacacaagggggccgggggccgtggctcacgcctgtaatcccagcattttgggaggccaaggtgggtggatcacctgaggtcagcagttcgagacctgcctggccaacatggcaaaccccatctgtactaaaaataggccgggcacggtggcttatgcctgtaatcccagcactttgggaggccaaggtgggcggatcacgaggtcgagaggtcgagaccatcctggccaacatggtgaaaccccgtctccactaaaaatacaaaaacttagccaggcatggtggcaggcacctgtaatcccagctactggggaggctgaggcaggagtatcgtttgaacctgggaggcggaggttgcagtgag

SEQ ID NO: 34642 - DNA, 1746 bp, Artificial sequence
  DNA replication origin
ggccggagcgggtcgtgcgcgctgaggaggagccgctgccgccgtcgccgtcgccgccaccgccgccaccgctaccgaggccgagcggagccgttagcgccgcgccgccgccgcctcccgcccgccccggagcagccccgggcccgcccgcccgcatccaggtgaggcggtggggggccttcggcggcgcccgacggggtaggccgcggcaggcctgagctcgcctggcctggccgcggggcgcccgcgggcctgcaccggccgaggcccaggccgcgccggaccgggggaggggacgcgcgctggggccgcggcgggcgggtcggggcgggccggtgtgggcgccggctacaggccccggggccggattcctctggcgcctcgagggacgggcgagggggatacggcgtgggcatgcgccggggggccgggctgcacggccgggggccccggtcgccttggaagcccgggctccgggggcgggagagtggggccagctacgggggagcgccgggaacgctttgagcgcgcagaggtcacggcccacgggcttgctcccccgggaaatcccacagattcttttgtggtcgttgtcagagcaccgcggccggtgcgaggtcctttgagaagtgtgcaaacccttcagtagatacacgggagtcctgggggaaaaaaaaaatctaaactgcatctttttttgagcgccatctctaacaaagctgtttgtggggcgtgggacgttaggatttgtaaaatatgtgtgtgtgcctgttggaaacacaagctgcacacagttgaacaatgggggatggatgcccttccttccttttccggtgctctgggctgcggggcttgttaaaatgggttttggtccctactgtgtgcagggcaggtggagaagaacttctgcacaacttctgcatgggcttcccgtggtgggactgagcccccttgctagaaagtgttcatctaagatccggatggccagaaatgggaagatgaggagaatgatctgtctagagcagggtttctcgacgttggccctactgatgtttggggtcagatagtttttggttgtggtggtagtgggggcttccctgtgcaatgtaggaagttgagccgtattcctggcctctacccactagatgccagcagtatccccatgctccaagtcgtgaggatcaaaagtatctccaaacattgccagatggctcgggttgcgggggaggggtctcttccactctcacacgcacaggtgagaaccattactgaactaaatgctcttcctccaaaagttctaatgccctgggagatgctcccaagacctcgaacaagcttgactctgttgagccttagttttcttatctataaaatgggaaggacaaaagtgtggtgcaaattgaagagggtggaaatcccgttgcgttgtgcgtggtctgtgcctggtaggcactgaataaatgatgttgtacatagccaccagtatttattgaggatttactatgtgcttgacactttgtggacgtttgtctgcagtccttgaggcaggtgatgttataatttccattaatttccattttagagatgaagaaactgaggcttagatgggtcacttgatgtgaccagtctcatgcactaaagtggctgcgccagggtttgaactcgggccctctgattcaaaacccttactcttaaccactcgattgtactgctcctataatcacaaggctccagggcactccagtt

SEQ ID NO: 34643 - DNA, 955 bp, Artificial sequence
  DNA replication origin
cggccaggccaggcgagctcaggcctgccgcggcctaccccgtcgggcgccgccgaaggccccccaccgcctcacctggatgcgggcgggcgggcccggggctgctccggggcgggcgggaggcggcggcggcgcggcgctaacggctccgctcggcctcggtagcggtggcggcggtggcggcgacggcgacggcggcagcggctcctcctcagcgcgcacgacccgctccggcccgcggcccggacacgccccccccgcgcgcgagcccattggccgacgtccgccacggcgcgctgctcattggccggcgtagctgtcgcggcgctccggggcgcgcgggagaggcgggacttccggtcggcgccgcctgcgaagtgctccgcggccggcggagacgcgggcagccagcgatggccgcggagggggcgaactgggttccggccctcggaggctgacggaaggcggtggctgaggagcggcgcctctggttgagcgctcgccgtgtgtcccgcacctgtctgtcctgccgccgcccggtaaggtaggaaaggtcagcgcgccggggttacgggtacagaacctgggttcgaatcccggccccgacgtttccgcactacgtgccgttgggcaggagctgacgtcaccttgccgggcctcagtttccttctctggtgcgctgaggaggcggggcatggaacgtggtcagcgcttcatcggtgctggctctttgagcaagccagttcccgaaggctcagcatctcattcattcattaaaatgtcattgagcgcctactgtgtgtcaatcactgtatgggcagtgagcagaaaaaaaatacctggtcttattgggctaacattctaaaccagcgctggcctagaatgccctagtagaaatacatgcaagctacatgtttaatttttttttatgtaaagatgggctctggttctgttg

SEQ ID NO: 34644 - DNA, 1100 bp, Artificial sequence
  DNA replication origin
tgttaggtgcatatatatataattgttttatcctcttgatgaactgacccctttttcattctataatgaccttcttcctctcatgttagagttttgacttaaaaaatattttatctgatacaagtacagctacccctgatctctttcggttttcattttcaaagaatatctttttgcctcccttcactttcagtctatgtgtgtctttaaaccagctgcctcttgctttggtccagatgcatagtggttgcccagcaaccggaggaggagaaggaggaggaggaggaggaagaggaggaggaagaggaggaggaggaggaggaggagaaggaggaggagaaggaggaggagaaggaggatggggaggagaaggaggagggggaagaggaggagggggagaaggaggagggggaggagaaggaggagggggaggagaaggggggggaggagaaggaggagtgggaagagaaggaggaggagggggaggaggaggatggggaggaggaggagaaggaggaggaaggaagaagggtttttccaggatgtcttgcaagcccttggcctgatgttcgagaatttggttaactctaacctgaaccctaagtccctgatgtagctggctctgctggctcctggaaagtcagttctgaggggatccccaccccaggctaacctgaggcctctgtcttccaggggacagctgtagcagtggcctgggcaggggccgtggttctccagagggattcagactactggtattaccgagctcatgaccttggctttcatccttgtacttgtcctgcccctgcaggatgtgcgggggccagacagctgggaagagtgactgcctgatcctggccctgctgccttgggctagaggaggggttgcatggagagagagggtggcaggccttggggagagggtcccatagggtcctgagtccctctttgaacgtgctgagctctactcaccctttccacatctgttttctgagtatcccttatgttccagccacatgcggggccccagggtgccccagggtgacagcagtgagcaagccgacacattgcaactatcaaagatgatgatcgctggctgg

SEQ ID NO: 34645 - DNA, 1250 bp, Artificial sequence
  DNA replication origin
ccgccggcagccttcacggggaggaagggttcccagtaagggggccctccagggaccagcaagcacggagcactggggtgggcgcgctggggacctgggacccaggggttggagcaagaaacgggatgatcccggagttctgaggaccacagttgctttgagtaaaggccagaccttcacagtcggggctggactggcctcttccactcctgcagcagctgggggcattaagagtaatccgctatcggccgggagcagtggttcacacttgtaatcccagcactttgggaggccgaggcgggcggatcacctgaggtcaggagttcgagatcagcctggccaacatggtgaaaccccatctctactaaaaatacaaaaaaaaaaaaaaaatagccgggcatggtggtgcgcacctgtaatcccagctacttgggaggctgaggcaggagaattgcttgaacccaggaagtggaagttgcagtgagccaagatcttgccattgcactccagcctgggcaacaagagcaaaactccatctcataaaaaaataaaagagcagtccgctatcagcaagggtcctcttctccgccagtgtgaaatcagcacagctggggggaacaagtgccccccacaccgacttctgttctgcacctctgatgatgggagcagttgagggtggtctccatcctgtagctcagccaaattcagagaccaataccccagagcctgcagggttgggtgggtaggcaggtgtctttctagacaagcccagttggttgcagtggccaggtggtgggcaggggcgatgagatgttctgggaagcctgcaccagccaccaccacatctgccctacccagtggcaggcacctctagtgggatgaaggatgctcctgggtgctcaccattggcccaactgtgcaaaggaggagattgagggtcagagaagccaagttacttactttttttgttggccaggaaaatctaatttttatttcttaaatactgtgaagaaaaggacagtcccccaatggggaagcgccatagagcagatgactgggaggtcatcggcaaaggctcaggggcactgggagaacactatgggcagaagtgggggtcctcctgtagtcacttttgcatatcagaccccagctgcctgcagctctcctgaactctggtgcctccaggtccctgatgagactcttggcttctgatgggcccccactgccctgcatggtcacgagtcttgtag

SEQ ID NO: 34646 - DNA, 1113 bp, Artificial sequence
  DNA replication origin
accccatctctactaaaattacaaaaattagccgagtgtggtgggggggcacctgtaattccagctactcaggaggctgaggcaggagaatcgcttgaacccgggaggcggaggttgcagtgagccgagattgggccactgcattccagcctgggcgacaagagtgaaactctgtctcaaaaaaaaaaaaaaaaaaaaaaacaaaagaaaaagaaaaaatggaagaaatgttttgtttttggaagaaaagccaggagccccgggtagccatgccctcaggaagcaaagcaacattcaccgagaaggcatgtcttttttttttttcttctgagacggagtcttgctcttttgcccaggctggagtgcggtggcgctgtctcggctcactgcaagctccgtctcccgggttcacgccattctcctgcctcagcctcccgagtagctgggactacaggctcccgccaccacgcctggctaattttttgtatttttagtagagacggggtttcaccatgttagccaggatgggagaaggcatgtcttctttccctggggcagcaggacccagccaggacacagggactgggggagacacgaggtgaagattagggagggcgaaaggagcgctgcagaggccgcacagctgattgctttaaactttttatcgcctgcatccatagctacatctgacctctgtgggtatttatcacatcctaaactcctttctcatttctccccttccactgggagcccagaggcggcggcccctagcctacttccctgtcccaaaccacatggccgggtgagtggggcttagaggtggggccgggcctggtgggtgtggcttctagccggggacgtgactagataaatgacacttagagcccaggggcagggctgggtgggcgtggcttatggctatgggcggggcttgctatatggctccgagtcaggggcagggcagagtgagtgggatttaagacagtgggcggagcctgacagatggcgcttatggtaaggggccgggctttgtaggaggggcttagactggggcggggcttgcacggtcagccccgccccaccagagcagttaagacgcgtcgggggcaggtg

SEQ ID NO: 34647 - DNA, 1407 bp, Artificial sequence
  DNA replication origin
ctgcaacctccgcctcccgggttcaagcgattctcctgcctcagcctcctgagtagctggaattacaggtgcccccccaccacactcggctaatttttgtaattttagtagagatggggttttgccatgttggccaggctggtctcgaactcctgacctcagaggatccgcctgcctcggcctcccaaagtgctggtattacaggtgtgagccactgtgtccggccaccgtttttttttccattttttgagacagggtcttgctctgttgcccaggctggagtgcagtggcatgatcacagctcactgcagcctcaacctccaaggctcaagcaatcctcacacctcagcctcctgagtggctgggactacaggtatgcactactacgtcaggctaattttttaaaaaatttttgtagtgacgcaggtctctctatattgcccggggtggtcttgagctcctgggctcaagcaatcctctggcctcggcctcccaaagtgttgggcttacagacatgagccaccatgcctggcctagagagtttctttcttgttggggttgttcaccggtgggaggtgcaccattgtgccgtgctgactatattcatagagttatgtaaccatcactctcatctaatttcagaacaaaaggaaacccataccctctcacagtcagtccttcattctcccctccccccatcctgtggccaccgctaatttactttctgtttctatggatttgcctgtgatcacaaccagaggatttctgtgacatgctaagttacctaaccatggtgtggaaggagagggaaatggagtgaagttggggacccaccagggaacaggtggcttgagggcggggggagcatgaaggtaagggcttgtttgggggctcaaggcagtctgagccttgttcgcaggcagccagtgtccaccaggtgtgtgcaggtgagggaaacaggggaaaaggccctttctggagacagtaggggtgctggctgggaggcctgggatggggagtggggaggcaagggggcctgtgggtcgaggttggagcttgctgtagaagagggagaattccagaggctgagagtgcaggtggagaggaggaggaagggaggagggcgggcagggggtggctgggtggggctctgtctataaagagtgaagctcagcgtgttggtcctgcagatgggacagcttggcctacagcccggcgggcatcagctcccttgacccagtggatatcggtgagtcttttccttgaacatgactgagatgaacagcttttccctccagcacaacttgttcctactttatacaacctccttcccttgccatatgcctggggcttaagaggggggatgttcccagtacccactcccctcctcttcctcagtccttacca

SEQ ID NO: 34648 - DNA, 1760 bp, Artificial sequence
  DNA replication origin
tgtcccttctgttaaatactggaagagcgggacgctccctccatgcctcctccaacttactggcgccacaccccggaaccaaccttccccagatctcccacttctggggagctaaccccagccggtgacccactagggccatctgtcctgtgtatccaactccctcctggacacccctgtccccaacacccccaaaatacagcttgccccaaagcaagctcagtctttgcccccaaaccagcctcctggagtgaccgttgtctttcccattgttctctgcagacatccggcaggggccctgctttgccgaggtgctgcagaccatgtgccggtctctgtccagcagcagtgaggctgtcaccagggccgagtgctgctgtgggggtggccggggctgggggccccgctgcgagctctgtcccctgcccggcacctctgcctacaggaagctgtgcccccatggctcaggctacactgctgagggccgaggtgggtgcccatgccctcaggacccccagggaggcaagaaacgggggagtttgctcagggtcatgtgtctgtactgcagcaggtgctggaatgtgtgagccacactgtgtgtgtgtgtgtgtgtgtgtgtgtgtgtgtgtgtctttgtgctagcagatatgagaaccagtacgtgtgcaccatatgcatggaagaactcggggggttgagggagcagttgtgtgagccaatgtgtgtgtatgtgttctgagacagagtctcactttgacacccaggctggagtgcagtggtgcaatctcagctcactgcaacctctgcctcccagtagcatacctgtcatcccagcactttgggaggctgaagaaggaggattgcttaagcccaggaatttgaggctgcaatgagctaagatagtgccactgcactccagcctgggtgatagagcaagacctcgtctccaaaagcaataaaaataggccgggcacagtggctcacacttgtaatcccagcactttgggaggctgaggcggccggatcacctgaggtcaggagtttgagaccaccctggtcaacatggtgaaacctcatctctactaaaaatacaaaaaattagctggatttggtggcgtgtgtctgtaatcccagttactcgggaggctgaggcaggagaatcccttgaatccgggaggcagagcttgcagtgagacgagatcacgccattgcactccagcctgggcaacagagagaaactctgtcccaaaaaaataaataaataaaaataaaaagcaagagggccttaacagacccaaaggatctctttggggccgtgggagaggctggctctcccatggccagtaaagatgaggttttgccatgctggccaggctggtctcgaactcctggcctcaagtgatccgcccacctcagcctcccaaaatgctgggattacaggcatgagccaccgcgcccggcccagtgtgtgttctttgtgagtgagagctcgttccggactgcgtgggagctggtgtgtgtctgtgtgtgtcagctgggtgagaagtatacaccatgttcatctgtgaagtagaaggcagtgagagggagccagcggcctgtgtgttgtggacttgggtgagtgtacaagggcaggtatgtgagtgtctgcgtgtgagcgagcataaggacatcagtgcgtctcactgagtgtgtcactgatagtgagatgggttatccatgtgaccagcagtggcatcaacaggactggggagggccgc

SEQ ID NO: 34649 - DNA, 1047 bp, Artificial sequence
  DNA replication origin
aaccccccgagttcttccatgcatatggtgcacacgtactggttctcatatctgctagcacaaagacacacacacacacacacacacacacacacacacacagtgtggctcacacattccagcacctgctgcagtacagacacatgaccctgagcaaactcccccgtttcttgcctccctgggggtcctgagggcatgggcacccacctcggccctcagcagtgtagcctgagccatgggggcacagcttcctgtaggcagaggtgccgggcaggggacagagctcgcagcggggcccccagccccggccacccccacagcagcactcggccctggtgacagcctcactgctgctggacagagaccggcacatggtctgcagcacctcggcaaagcagggcccctgccggatgtctgcagagaacaatgggaaagacaacggtcactccaggaggctggtttgggggcaaagactgagcttgctttggggcaagctgtattttgggggtgttggggacaggggtgtccaggagggagttggatacacaggacagatggccctagtgggtcaccggctggggttagctccccagaagtgggagatctggggaaggttggttccggggtgtggcgccagtaagttggaggaggcatggagggagcgtcccgctcttccagtatttaacagaagggacagagggaagaggggcagcaggggagcactggacatgtgtgtccggattagctcagcaaccccctgggttgcccgtcagtgccgcaggccccgtccctgccttggagggctcccagacagtgggagggacaggcagtgggagggacaggcagtggggggacaggcagtgggagggacaggcagtgggagggacaggcagtggggggaacaggcagtggagggaacaggcagtgggagggacagggagtgaagggggcaggcagtggggggaacaggcagtggggggggacaggcagtgggtgccacatggtaggtggttgcaaccactgtgcgtgtccagccacactcaccgt

SEQ ID NO: 34650 - DNA, 1632 bp, Artificial sequence
  DNA replication origin
atgactgatagacatttaaagggtctatcttgatggctggacacagattctcttgagttaatgttaccctaaattcaactccattcccttcatctgttagtccattctcccatccaccacatagtttcctctagatagagaaatagatagttttcttcctctagatggagaatagtcttctccaaccttgtcactccctatagaaaggatggatgggaggatggatgaatggatggatgagtggatggatgcatggatatgaaacagtggatgggtaaataagcaagtgggtcaatgaataagatgatgagtgagtggatggataggaaggtggatggataggtgagtagacaggcaaatgagtgaatgggtggataagtggatggatggatggatggatgaatggatgaatagatgggagatagaagatggatggaagggtggatgaatgggggaatagaaagggagtagggaacgggtggatgggaaatgggtggatggatgagtggatggatggatgtattgaggatggatgggtgaatgggggatagatggatgggtgaatagatggatagaagaatgagagataggtgggtgggagatggatggatgggagagtgggaaataggttaatggatgggtgaatgcgggctagatgaaggatggggggtggatggatgggtgaatggatggatacaaggatagcagagggatgagtgatgaatggatgaatgggtggatggggcatggttggatggaaggatggagggatggatggaaggatggatgaatggaaggatggatgaatgggtagataaaggatagttggatggaaggaaggatagatgaatgggtagatgggggatggttgggtggaaggatggatggatggaaggatgggtggatggaaggataaatggacagaaggaggggggatggatgaaaggatggaggatagatgaaggatgggggataaatgggtgaatggatggatagaaggataggaggggaataagtggggggatggatgaatgggtagatggagaatggttggatgggtggaaggatgaatggatgaaaggatgagtggaaggatagatgaatggatggatggtcgagtggaaggatggatggatggatggatggatggatgaatggatggaaggatgagtggaaggatggatgaatggatggatggtcgggtggaaggatggatggatggatggatggatggagggatgaatggacagaaagatgggggatagatgaaggatggggaatgaatggttgactagatggatggataaaaggataagagagggatgagtggaggatggatgaatgggtagatggaggatggttgaatggaagtatggaagtatggaaggaagaatggatggaggatggctggatggaaggatgtatggatgtactggatggatggaaaaaatggaaggatggatggatggatggatagatggatgaatggctggatggatgggtagaaggatggatgaatggatggaaggatgggtggatggaaggataaatggacagaaggatggaggatgaatggaaggatgggggacaaatgaaaagatcaataaaccaacaagtggaagaaatggctga

SEQ ID NO: 34651 - DNA, 823 bp, Artificial sequence
  DNA replication origin
gacgcttccttcctggctgccctcctccctggatccagagagactgggtcccctctctggagtccaagagtccagaccacctctcccctccctgtccctgcctcggtcactcgcctcccacccccaagtcagggactgagtccccagggctacttgcctgggactctggctgacagcgaagtgttccagtgactggggcctcctgcccaccctgtgtgggtcctggtccaccggcctccagccctccgaatcttggggcccctcagacagggatgaatgtgccgagaacgtggacctctgtgacaacgggcagtgcctcaatgcgcccggcgggtaccgctgtgaatgtgagatgggctttgaccccaccgaggaccaccgggcctgccagggtaaggttgggcccgccagggcagaggacagagtgggtaggtcccccctgcagactctgggtggggcaggctgacccagggtccccgcagatgtggacgagtgtgcgcaagggaacctctgtgcatttgggagctgtgagaacctgcctggaatgttccgctgcatctgcaatggtggctacgaactggaccgagggggtggcaactgcacaggtgtgaggtcatctgggctggaaggggagaggagagagcaggagttggggcaggggacatggctcactccctcactgccctcagatctcttttcaagcatcctcccctgcagtcttgctggggggtggggggcgccttgcctgatgtccccatcatttcccgttcctgttcgcctgctaaataagttctgtgattgaagtggcccctccacgctagct

SEQ ID NO: 34652 - DNA, 952 bp, Artificial sequence
  DNA replication origin
gtgtgtgtgtgtatctgtgtgtgtaagtgggtttatatgcaagatggcgggagtgtgtttgtgtgtctagatgaacacgcacatgtgtgagtgtctgtacaagggcaagcgtttgtgcatttgtgtgactgtgtgtctgtacaagggggagtgtttgtatgtgaggagtgagtgtgtgtgtgcgtctgtgtgaacacacaagagggtttgagtgtgtatttggctatgaatgtctctaccaagggcaagtgtgtttgcatgtgcgtaggtgtgtttcattttgttttgtttgagacagggtcccagtctgttgtccaggctggggtgcagtggcacaatcacagctcactgcagcctccacctcctgggctcaggtgatcctcccatctcagcctcccaagtaggtgggactacaggcatgcgccactatgcctggctaatttctgagtgggtgtgtttgtacgtaagtctgtgtgtgtgtgtgtaagagaatgtgatgtgtagttggatgcaaatgcatgtttatagaggtgtgtttgtgtgtgagtgggtgtgagaatgtgtttgagtgggtctgtgtgggtgtacctctgggtgtgggtgtctgggtgtggacatgtgtttgcacaaggacaggtatgtttgagggtgtgtttatgtgtgtgtctgtgtgagtgtgcacatgggtgtgtgtgtatgtgtgagtgtgcattgggtgtttgtgtgtctgtgtgtgcacatgggtgtgagtgtgcccctgggtgtggatgtgtatttacacatgggtgagtgtatttgtgtgcaagtggatataaggtgtgttgtgaatttaggagtgtgcacttgagtgtgagtgtgtatctgagtgtgcctgtgtgtgtctgtcaagggtgagtgtgttcacacgtgagtgggtgccagggtgtgtttgtgagtctgtgtgagcgggcac

SEQ ID NO: 34653 - DNA, 1750 bp, Artificial sequence
  DNA replication origin
gcccaggagttcaaggctgcagtgagccgtggtggtgccactgcattccagcctgggtgacagaaccagaccctctgtctcttaaaaaaaaaaaagaaagaaagaaagaaagaaagaaaagaggccaggcactgtggctcatgcctgcaattctagcattttgggaggccgaggcgggcagatcactcgaggccaggagtttgagaccagccatggccaacatggcaaaagccatctctactaaaaatacacaaaaaaatgtaactgggtgtggtagcgcgtgcctgtagtcccagctacttggaaggctgaggcatgagaattttttgaacctgggaggcagtgagccaagatcgcaccactgtactccagcctggaagacagagcgaaaccctgtctcaaaaaaaaaaaaaaaaagaaaagaaaagaaaaaaggagaacggacacagtgatgtctttcttgtgagcagtgaggtgtggcagggacggggagagaagaaggagggagtcaggatgaacccaagacctggtgaaaactggagggaaggtagtggcgcaccctggcagggaggaggaggactctgagctcagtgttggccgagggacttgcaagttgtctgggaagcagctggacactcaggcctggggctgagatggcggcgtgggctgccccatccatggggactgaagcccagggtgccgctgaggatccccgtgagagaaggaagggccagcagagacagccacctgggcatttaagcctggacagaaaaaaccgagcccacaggaggctgagaaagagaaagagaaccggagtgggtggcgtcagggacatccaggcttgtgagattttcagatgcagaggcatctgggtgcctaatgtggtgtttcagcccaggaaggtgaggatgggcacgacccggggactagaagctggaggggctggggaagtgacctgggtttgagggtgggcttctggaaactgcagaattagaacatgggcttgttggaggcgggccaagctctgggtggcagaagagtgagggggagggggagtgggggagctgccaggaattacgttttggcttggggcatcaggacagctggggggtgggggtctctgtgaagcccctcctccttacggggcctgagttgggggtgagtttggcttcttctcttgggagcggctgcccttgtttgagagctaactcctttattggaaacatctgggagaagagagccaagaagtcacatctgggctcatgtactggggttgggggaaccaatgcggtcaccttgggctgggcctgatggggattggggatgtgatgttgggggtccagagaatttaggcagataacagatccttccccaaatctgggcgatatggcagggccaggcgtgtgctcaaggactagacatgctttttagctgggcatccgtgggtccctgcccaggcctgaagggaggataggcctggggaaggagtcccatcagttcagacagggtgttcacacaggccctgagctttattggcttggaggtgctggtctcttggaagttggtcaggaaatgctttgaagaaaaagggttttgaagggtgaataggagttcgttaggtagggaaaggggaggaaagatattctatttagtaagggagcagcataagtaaagcctggtctgtgggtgcaggggccgctgagaaggtgttagagacgcagagatctccagacaggggcagccctcagcc

SEQ ID NO: 34654 - DNA, 1348 bp, Artificial sequence
  DNA replication origin
ctcctgcaacgcctggccccacctggccccacctggccctctctcccctcccttccacttcccactcccgtcttgccttggctgtgcaccctcagccccaagacccttctctaacatcacacctcctccaggaagcctcctctgactgttcaccgcttcccggttggggctggatgcctccttgggctcccagaggccccggggctgccccatttggcaaccaccctgccctcctcgttgtgttgggtcccccatggctagggtggggggctcatctagggctgactctgcttcctctccgcagcctccaggggacacgccatgactctggagggtctgtatttggcaaggggccccctggcccggctcctgctggcctggtcggccctgttgtgcatggcaggtggccaaggccgctgggacggggccttggaggctgcaggtcctggacgtgtgcggaggcggggcagcccaggcatcttgcaggggtgcgtggtacctgggatgctgggagaccccttcggtgtggattgggctgtcctggggccagcggaatacccggggggatgtccacacgggcaggggctcaccagacccatctcgctgtccccgaaggccgaatgtgtgcggctcccggttccatgcctactgctgtccaggctggaggacattccctggcaggagccagtgtgtcgtacgtgagtgctaccgccgtctggaggtgggggggcacaggccggggacactcttacctgcctgcaggttcagctctgtttacacggggacttagccagggacctctggctgaaccacaggaatggcccttgcatctgcgtctgtcctcagggttccaggccaacctgccatgttcatttcctttgccctacaacctccttgtgtctgtctgtctctctggttcccttgctttgtctctgcctctctctattcatctctgctcatgtctctctctgttggtttcttttctttattattattatttttagagatgggggtctctgtgttgctcaggctggtctcaaactctggcctcaagcgattttcccatctcagcctcccaaagtgctaggattccaggtgtgagccactgcacctggcctctctctgttggttactgtctctctatctaactgattctctctctctctgtttctctgagtctctctctgtttgtctctctctggcctcaccctctctttctgtttctgtctctggaatctgactccacttcccaggagacacccaacctcagtatccaggaccccagcacctccagctctgtcctcacagctcagcagctctggcccaaagagcattctctccccatggc

SEQ ID NO: 34655 - DNA, 1145 bp, Artificial sequence
  DNA replication origin
gcctggacagcagtaggcatggaaccgggagccgcacacattcggccttcggggacagcgagatgggtctggtgagcccctgcccgtgtggacatccccccgggtattccgctggccccaggacagcccaatccacaccgaaggggtctcccagcatcccaggtaccacgcacccctgcaagatgcctgggctgccccgcctccgcacacgtccaggacctgcagcctccaaggccccgtcccagcggccttggccacctgccatgcacaacagggccgaccaggccagcaggagccgggccagggggccccttgccaaatacagaccctccagagtcatggcgtgtcccctggaggctgcggagaggaagcagagtcagccctagatgagccccccaccctagccatgggggacccaacacaacgaggagggcagggtggttgccaaatggggcagccccggggcctctgggagcccaaggaggcatccagccccaaccgggaagcggtgaacagtcagaggaggcttcctggaggaggtgtgatgttagagaagggtcttggggctgagggtgcacagccaaggcaagacgggagtgggaagtggaagggaggggagagagggccaggtggggccaggtggggccaggcgttgcaggagtgggcatagcagtgtcatgcagcttttgctcattcgtcaaggacaatgaagagcccttgaaaagctttgagtgggaggagcaaggtcagaaatgcatgttaggtggtgtggggaagggcagcagggtcccgggggggaaacagggtgtcagaaggctgggggctgtccagatgggagagagaggagaggaatgggaggctcatgtcgtgggaggtggagggcattgaggagattcccaaagttctagctgggacggtggagcccagagagcgtccagggtaggaggaagatggtaagtcgtggaaggcaacaaccccactgtccctctgtgacacagatacccccactcctgcaatgcctggccccacctggccctgtgtcccctcgcctccacatcccacgccggtcttgcctgggctgtgcacccttagccgcaagacccttttctaacatcacacctcctccaggaagcctcctctgactg

SEQ ID NO: 34656 - DNA, 1138 bp, Artificial sequence
  DNA replication origin
gcctctcggctttgcgttcccgccccgggtccccggcgccgcaggagcccgccctgcagcgctgagtcccgcgcgtccgcctgccgtgcccgcctccacgcgcgccgcctcgcaggtaggtgaaggcgcggggccagcggcggggcgagatcgcgggcgctgaagggtggagaaggcgggggcgggggggccggcagggggagggggagaggattcctttgttcgcagccgggcagccccgggcccagccccctcccctctccgccttctagtggcgcccgccgcagtggggagtgggggcgcggggacccggcgggaggggctcggccggggcgcggggcccctgaccccacaggtgagggcggagccaagcgtggtcgcggccgggggccctgccgggtggagatcgcgccccgcgggctccgggggcgccccctccccgtcggcgaagcttggtatccctcgctgtttggccctcagcctccacaccccgtgccgggcgcgccttctctgctcattcattccacaaactccagggtgtggctcgcagaagcagcggtgtgtaggggggaccgaggcaaatcaggccagagactccccccacctaattcccccacccgacccgaggcagggggctggggcggagggagtgggggaggagggcttgcaagccccgaggctgcttggagtccacggagcctcagagtgcggactgacccggacaactgagaagaaaaagagggcgcccctctccagccagccaaccctccaacgttgacaggggtctctcccttctccggggcctttggacaaccaggttggcccagagaggggcgtggccaagaccacacagcagggctccccgcccattctccacctagggccggttcctttcctccctggaacctgaatggaacaggaaggccacttggtctggcttctctccctcaagtattttgcctccaccctccaaacggtcgtctcctgtcccggtcttctccctcccgtccttcatggcccaggaaagacccagccaaggggggcaggagcgagttccgttcctgatcttcttcccctccttcttctcttcgtgggcttaagctccggcttagcccctcactcatggtgtgatggcctt

SEQ ID NO: 34657 - DNA, 1225 bp, Artificial sequence
  DNA replication origin
cacctgtggggtcaggggccccgcgccccggccgagcccctcccgccgggtccccgcgcccccactccccactgcggcgggcgccactagaaggcggagaggggagggggctgggcccggggctgcccggctgcgaacaaaggaatcctctccccctccccctgccggcccccccgcccccgccttctccacccttcagcgcccgcgatctcgccccgccgctggccccgcgccttcacctacctgcgaggcggcgcgcgtggaggcgggcacggcaggcggacgcgcgggactcagcgctgcagggcgggctcctgcggcgccggggacccggggcgggaacgcaaagccgagaggccgaccccgccgcgttcccagcccagagctgccactcgggggggagttgggggcgggaggagttggaggagggcgcgtttgcacctcttagctcccggggcggggacggggggctccgatccggggcggggagagaggctgcggctcgggggagggtccggggctccgagtgaaaaactccgatggactggagggatgtgagggcgggctgggggcgcctagtaggggctgccggggccgcgttttcggatcgagactaaggtggaggtggggctctgacttttggagggcctggacgacagcctgggcagagaagtcccgggactcacctgggcggccctctcagggcctcccaagccgccaccccctccctcgagcaaggagaattgcgagagtgacgttggaaactcacctggctcttggagcctggattcttaactaggctgagatcaggggcccctaaatatgttgacaaaacattgggcaaagctgtatttcccagggagaagggcccaggtttttcatctggttctcaaaatgaagaggttaacaattcaaacggtgtaaactttcaaatctctttgaacctgtttgtccacctaccaaagggaccagacaagaattttggctccctatctgttgtcagtactccaaacaaaaatttctaggcttttccactaccttcatacctttgagaatagacccttaacatggggatctgtcagaagctgtgcgttgggcctgaagctgttactccatccagcaaactcctacgcatctgtcaaagtccagttcaaaaattccctccctatccgcaaattgtgagtttactctattgaactcccaaagctgattgtgctgaatatcc

SEQ ID NO: 34658 - DNA, 1235 bp, Artificial sequence
  DNA replication origin
gggcgccgggtcctccaggcgcttgcccccctcgacgcaactaggcctctccctggcccccgaccccgcacccgcaccccatccccgcccccgtccccgcccccccattctcgcccccgcccccgttcccgctccgcccatctctgccccgcggcgcgcctggcccgggtccagcctagcgtttctagtctgcgccttatctctcccctttgaacccagtattgtccgctgcgcgctccgtccggccccggcttcacccctgttcgctgtctgtctccccggccccctcccaggtcccctcttctgcccgagatgctctggctctgctcatctgtccacacccccacactcccggggcgccctgagcctctggggcgcgcagttggatggtgcacaggggaggcccagatttctccaggcctcagcggccaccctgggtaccccgagtctggggccctgttggagggccagtccaggggttcgcccgaggcgcgcgcgggggccaaccgaggcggtgagggcaccgggcaaaggctgcgatttggtggggtgcaggggtcaggcgacagagctggggagataagatgggagataggccgggtgggtggtggcgcagccctggttttggctgagggcagcagcagtgggggctgggtcccccgcttgcctggtagaaccgaaaatgacccagtctcagcagcgcgcaggggcagggagcctgggcgatccctgaacagaggacagccccaggggttttcatagtcgctggcccaccgcatgtactctgggcaagtggcttcgcctttggacaataagcctctgtaaaatggggataataaacctttctctgactcagctcagcagacccaagacccatggggtgaagttggggcctccctgccacagggccctaggcaagctgagatttgatttcctcacacagacaggggcgcggggggcggggcggtcagggaggcaggagacctctgttgcaagtgtggaagaacctgtccctccaagttcagactcctggcgtttgcacttggccttccctctgctacactgtttctcttttcttttttctttttctttttttttttttgagacggagtcttgcattgtggcccgggctggactgcaatggcatgatctcggctcactgcaacttctgcatcctggtttcattcgattctcctgcctcagcctcccgagtagctaggattacaggcgcccac

SEQ ID NO: 34659 - DNA, 2174 bp, Artificial sequence
  DNA replication origin
ccccgccgccggccctcggtgcgcccggccgcctgcacccccaggtaagcgagcaccccgcgccgcgaacaccgccccgaacgccaccctcacggcggtccccggccccgcctccgcggccatggcggccccagcccggcccccactcgcagctgggctccagcccccatcaccccgccggggactgtccccctcggggcttcccatcatggccgtctccccgagctatccgcgctcccccacgagggccggggcgcaacgggtgcccgaggacgcggctgtgaaacgggctggagcgagtaggggcgatcctggcctcgtgacgcgggggaatccggatgtgtgagccgggggagcgccccgtttccccgacgtgccagggctggggacgcagctggggccctggcctcggagtccgcagcccggccgcgtagacggcttctgagaaccgcttaaacacgtcattccaagcccgagctaacccatcaggcggccggggtgaggtggaggtgcccaggcggggataatgtcatttggcctggttggaccagccagcgagggctttttaggcccagggcctagccgggagtgtgtgcggagcagaaaagaggccagcctggctgaaacgcggagagggagggtctgaggtggagagaggttggccggggcctgggaagcggcgaggagagtgtggaacccgttctcggggcggtggggaccagggaggcttggaacagcaggtgcatggcgtgatcggattgtgtcttaagaacatcccgtagccgctgtgggtaggagagatggggatacttggaagggggcttctggcttgacctggctggaaggtgtgataggaagtgggtgaactgaaaattcgctttggcagagtaacatcgtctaattctgtctgtttgcaagtggagcgtgggggaccgatgtttctcctgggtagttaggagtatatagaagaggctttcattgctgggttgggagacttgaggagaagctgctctgggggacacaggaaggtgggcagggggagaggctgttgtggtttgcaaaacctaccagatgggggaatgctcccatcgactccagtctgagctcaggcaaggtctcaggcatctgagcgcagaggccagggtgaccccactggggcgacctgggtctgttatatggggatagggttcctggactgtggaattgtctttgaagccctcggcctcccccagcctcaaatgggtctgccttccaggagcagctgctgtgaataaacacagaagtggagctgggggactgattagaagcctcattcagtgcacctgggccccagcaggcccagccaggcgtggaggaagaggcattgaggactttccttacctgtttttccagctcacccactgccagcagaggtactttgagcctggggtgtggggggtggggggcggccttggtcgttgaactggctgtagggcccccagggaaaggtttctgagcttcagtttacccatctgtaaaatgggtcagtagtatctgagcctgggagtgttcatggatcgatgaaagccgaggctaggcagatctcggtggcagccacacccctaaggaaccggagagggttctaacgcccggtgggagttcagggggatgtatgggcttccatttctcctctgagaaattcacaacagtgtccacctcctgacccagggctgtctgcaggttgaataaagcggttgacccagtgcgtggcacagaatgtcttggctcaggagccactgggatgcctgtagttggcagcagaagtgggcccaggttccctcctcccacccgtgggatggcacagaaaggcaggtgccttgggagctcgctgccctgtccccttctctgagcaccacaagcttctccctttccgactggctgggcttgagcctgaccaccccccagccctgtcctgccactttgagttgagggcctccgggctactgacttcaccacttcctgcttcagtttctccacctgtaaaatgggataatagcagtcatgacctataggtaaagagctgaacacagtgcctggctggttgtgaatacgtgctaaacaggctattaaaatatcacgagaatatcacagagctggaggctattaaaatatcacggaggggctgggcgtggtgg

SEQ ID NO: 34660 - DNA, 830 bp, Artificial sequence
  DNA replication origin
caaacaaacaaaaaacagagtagcatagaagagaccttcccctccctgagtctggactttatacctttgttaataggatgctgtcacacacacacacactgaaccgcctggagctcagctcagctttccctccctaccccctcctggactcccagagacagattttaatccagggtcccatgacactgtgtctgaagagtgatcatttcctatcagctatgccctggggaccccttctgccctgtgcctggccccactttcctcccacccctgtctgtctgtctgtctgtcatttgttcattcagcacagacttaggaagtgtctgcagtgggaggcactggggacagacagccacaggaagccttacggagctgatgtccccgcagggagaaggtgatggggacaaggatgaggcttgaaggagcagctagacatctggaggaagagtgctccgggcagaaggcccagcaggtgcaaaggccctgaggctggaacaggcatggtgtgttggaggaatgcaatgaggctggggtggctggagcaaactaagcaaggagtcatagagtagagagaggagtagatgaagagactgaaggtccttgggaacccccagtccaaccacagcataccctggagagtccttgctcaaggggacttgaggagtgaaaggttatgggaccctactgcttttgcacggttactttgtcgtcctgtatgtgcagtggtcacctgtgctggggtgctcgaaccttgaaggctgaggaagctggcaggaggaaggagaggaggactacgcagtggccaagacttctcctcctcccctccacac

SEQ ID NO: 34661 - DNA, 1438 bp, Artificial sequence
  DNA replication origin
agcaaactaagcaaggagtcatagagtagagagaggagtagatgaagagactgaaggtccttgggaacccccagtccaaccacagcataccctggagagtccttgctcaaggggacttgaggagtgaaaggttatgggaccctactgcttttgcacggttactttgtcgtcctgtatgtgcagtggtcacctgtgctggggtgctcgaaccttgaaggctgaggaagctggcaggaggaaggagaggaggactacgcagtggccaagacttctcctcctcccctccacacaatggggctcagctgaactgggagagggaagtagccagggaagggtactgatgagcgtatggaagcagaggagatgaagggcagtggggaggaggtgggaggggaggaggaagaggaaagggaggaagacgagggggaggagagggaggagggggaggaggagaaaaaggaagaggagggggaggagagggaggaggaggaggagaaaaaggaagaggagggggaggacgaggaggaagaagcaacggcagcagccagtgggcaagcagccagagctggatggaggagccaggacgttctcagataggtgatgggggagccctagggatgcagggatggtagcctcgatcaggggcctagaggacaaacagcaaaagccaagcagcagggccaggcgcggtggctcacacctgtgatcccagcactttgggaggccgatgtgggtggatcgcctgaggtcaagagttcgagaccagcgtggccaacatggcgaaaccctgtctctactaaaaatacaaaaattagccaggtgcagcggtgtgtgcctgtagtcccagctactcaggaggctgaggcaggagaattgcttgaaccaggggggcggaggttgcagtgagcagagatcacaccactgcactccagcctgtgcaacagagcaagactctgtctcaaaaaaaaaaaaacaaaaaacaagcagcgggtgtgtctgggggatgggccagcctctagcctgcagtcgctcccttcccaggcaaaagagagagaactcggtcccctctccctgtaccccacaagagcctgggcaccctccccactcccaccacgaacctgggcttcactgggagggaatttagacacttggatgctggagcctagatctgaggttctgttgagccacggcactgtgacccggactgtcccctccatccccgtccaaactgggagggggcatcccttgtccctggcactcctctgtgatctggcaggtgtgatgagccacagcagggacaggggaataggggctgggctttttagggtgatggcacccagacggtaacaggacgggagggaggtggtcctctgggttttgtttctccatctgggatgttggtgagggcaggcataagccacctctctgtgcctcgagt

SEQ ID NO: 34662 - DNA, 1274 bp, Artificial sequence
  DNA replication origin
actccatccagcctgggtgacagcaagactccgtctttaaaaaaaaaaaaaaaaaaaaaaggccaggcacggtggcccatgcctgtaatcccagcactttgggaggccaaggcgggcggatcacgaggtcaggggttcgagaccagcctgaccaacatggtgaaaccctgtctctactaaaaatacaataattagccgggtgtggtggcacgcgcttgtaatcccagctactcaggaggctgaggcaggagaatcgcttgaacctgggaggcggagattgcggtgagtagagattgtgccactgcactccagcctgggtgacagagcgagactccatcgcaaaaaaaaaaaaaaaaaaattgttgccccaaaagttctgagaaagatgaggtaggagaacccaggaggggagtgtcccctaacccagcccagcggcgattggtcggccctcctagaggaagtgtctgttgaacagagtcgtgaagagctgggaggaatttggcaggctgaagggagggcattactggtagggaatggcatgtgccaaggtccatttgctggggagcaccgtgccaggccagtgggagcacttgcaggattcaaagctgcgggtctgatttgcaggcaagaagaaagacctgggtgctgagtggggaggcggccaccatgattcaatcaagaaatgggagccgtggaaatcgggcagaggagggactgtcgcgggaaagacggacgtaatcgtagggcttaatgaggagctgagtgccgagagggtgtgagatggagtcagagatgactctcagaattttgtccctgaagactgggtggagggtgggatcttggccaagaagccaggggaggaggaaagaaggctctgtgggagatgacttcagccctgacgtgtctggacagcgcgcagacgggaggtattggggcagcaggtttggctttggcgggatggtgacctgggagcagcagaaatctggaaactgacagcatggacgtgctggccgcagcttccaggcaggtgaatttcccagggagagcagatggtgtgaggggatccaggactggcataatttagggagaaaaaccagcacaaattagagaaaacagcagagaggaggggaaccaggaggtcatgattctgggaaggagggatggacaaggggaggagatgctactagagggtcccagtttcatgcttagaggaattgaccacttgggattggccatgggaggctgcgactgatggccaaaagccaaaggctgga

SEQ ID NO: 34663 - DNA, 1034 bp, Artificial sequence
  DNA replication origin
agcctggggctccccccagcccccaggccacagcctggaggtgtctctggccagccacagcatccagctgctggctcccagatctgtccagttgcccagagggaagaagggtgggtgggcagaaggaaggggctggagacagatcatcagccttcccacccaccccgggtggggccctccctgtctccagaaaggtggcccaggggcgccagtccagtcaccccagaaatatccaaggcactggcgggggggcaaccccttacagccagccccgcccggctatgtggctgttgtgtgcctgttggtcagacgcccggccacccggctccgagggccatcagtgggggctggcctgggccctccagctgccccgttctttagctgcagaggttcctgggccgccgccgcctcctcactggagtctgattcttctacatcactacgaatgtccttctccatctggggaacagagagagggatggagctcagagcagggaggaaggaggagcttagggctggggcccccggggaggtccagccatacctggcccttcttcatgaagctatagagcatgcgcagaatgaggcaagaccagaacacgtgcagcagctgcagcaacatcagaagcccgttgaagaagtagtagccgaagaaggggcccctgttgctgatggactcgtagtatgtggtgtagaggatcctacagccagggggagaggaggaggctggggtttgaccagccgctgtagcccccagtcctaagaatttctaactggcatggccttccctgctccataaccacctatggctccctagtgccccccaccccatgatacctaacactcttgagctgggcacgcgaggccccctctcgcttgtactaaatgagcagaacacacacacgagctccctgactggccattcatgactatgaaccccacccaagcgggtacttatgaactcagctgctttcctgggtggcactctggcagcttctctctactcctcagacccccatcacctccccttcatc

SEQ ID NO: 34664 - DNA, 1061 bp, Artificial sequence
  DNA replication origin
gggaatgggaaggcactgcccaagctctgctcttcttccaagaatcctgatgttaacgcagactccccaccccagccctgctgcccctgctcccaaaaagcaagcagcacagtagctgcacacagggctgggtgtccatgtcccaccttctatgggctgggctctcatggaggaggggctgcagcagcgaccccaggctgcccaggccaagggagacagagacccagaggcaggcggaggatgtgaagcaactttaattgccaccctcagacggggcagcaggagtgtcttaagcacagggccgttctaccccctgggagctgcctggggccagcccctcagttctggctgtggcaggttccccatcctagctccccggatctccatagggagtgtccagggaccctcaatctccagggccacttctgcaggagctcgggttcgaggttccacgtggccagaagagctcaggtctctgagggctggtgtgcccgggtacccatccgcatcactgctctcctcctgtccggctacgcccagggctgagtgacggtggtggcaagtgcttgtcctcagggcagcgaggtcttctgttctgacagcagcagggactccttcatggccaccagtaaccccagtgggcggaggcgctcctgggctcggagccaggacaaaaggaggagggtggcggtgaccaggcttgcactgagcaccgctgtggggaacagatggacagaggagtaaggagggggaaggcaagagcccccacacccaccaagctccatacacatggggatgggagttctgcagctcatccctccccacccacctcccctgaatccccggagctctaagcccccagcatgggagggtaagtccctcttaccagcagctgcaataaccccataggcagttgggcttccagactggtctccggcagaggaggatgtggcattcccgacagaggggacactctccagggtcacagggggccccatggttgtggcattcctgagagaggtgacactctccagggtcacagggggccccatggttgtggc

SEQ ID NO: 34665 - DNA, 910 bp, Artificial sequence
  DNA replication origin
ggaaaggcagggccgcagggatgggtgcgacttgggtctgtgggtcataagaagcggggtctaagatgggcttgggctgggcgcagtggctcacgcctgcaatcccagcactttgggaggctagggtgggaggatcgatcacttgatcctgggaggttgccgctgcagtgagctaggattgtgccagtgcactccagcctgggcaacagagtaagactgtctcaggaaaaaaaaagaaaaagaaaaaaaaaagaaaaatgaaagaaaggaaagaaaggaaggaaagagagagggagggagccaggtacggtggctcacacatgtaatcccagcactttgggaggccaaggcaggcggatcacttgaggtcaggcgttcgagaccagcctggccaacacagtgaaaccccatctctactaaaaatacaaaagttagctggatgtggcggcaggcccctgtaatcccagctagtcaggaggctaaggcaggagaatcacttgaccctgggaggcagaggtttcagtgagtcgagattgcgccactgcactgcagcctgggcagcaaagggagaccccgtctcaaaagaaaaaataaagaaagaaacaaacaaacaaatagaataaagtgggcttgtaggaaggtagagctagtggggtctcaggggaagagcttgcagggaggcctgtccttagaaagtggagttaacagttgcagggggcggagccttaggaagggagcatttttttgggctcagctgttcttagagggtggggcttgcaggggatggggtttcagggagtacctgggccttcttgggtgggcatttgggacctgaccaaccctgtgccccagggattgagccatgtacccagaaagggcaatgcccaccgccccctggcctcccctgccc

SEQ ID NO: 34666 - DNA, 1104 bp, Artificial sequence
  DNA replication origin
gcctaagaggtattggtggccagtggggacgggctccctctctgatacccctagaggcagctggagggttggagtggcctccctgtgcactcaggcactcccaacttgcagccctgggctcaggctcacacactttcccagctcctttgtgcattccgcacttctaggtccctggactcatcccaaagtccctgacattcacgttaaatgttcctgggtttttttttgtttgtttttttttaaggaggcagcgttcacgttaaccaagtacaaaagtttttgtttttttttttttgagtctccctctgtcgccctggctggagtgcagtgcaatgttggctcactgcaccctccgcctcccgggtttaagcaattctcatgcctcagcctcccgagtagcttgggactacaggcaccgtcaccatgcccggctaatttttgtatttttagtagagatggggtttcaccatgttggccagactggtctcgaactcctgacctcaagtgttctgtccgcctcagcctcccaaagtgctgggattacaggacaaaactctatacacagtctcttttttctcaggatgttgaggtagggattcccagcataccccgtttacaggtgaggaaactgaggccaggagagaaagtcactggtcactgtaactcctgtcaggcttacaccctatgaggcggggactgctgtgctctactgtccactttgcagagggatacacactcccgcagtccagcgaagggaggtcagaggtgtcagggctgtggaagtctgcgcctgggtggagagccacacctggaggctgccagatctcccgggggcggggaaggaagcaggcaccggtttgtccacagctcttctgggatccatagagctcagggaccctgtggcaagtaggtgcaattaggcctgaaggccgaggaggggctggcagtggggagtggggggttggaggctcatggctggtgggtaaaggtggaagaggttaaaggccttggcagagtgaagctaagccagggtggcggatttgccacctcccctggccgcacccaggaggaagccgtaaaggccactcccttcctctgtccctt

SEQ ID NO: 34667 - DNA, 1423 bp, Artificial sequence
  DNA replication origin
aattgcacctacttgccacagggtccctgagctctatggatcccagaagagctgtggacaaaccggtgcctgcttccttccccgcccccgggagatctggcagcctccaggtgtggctctccacccaggcgcagacttccacagccctgacacctctgacctcccttcgctggactgcgggagtgtgtatccctctgcaaagtggacagtagagcacagcagtccccgcctcatagggtgtaagcctgacaggagttacagtgaccagtgactttctctcctggcctcagtttcctcacctgtaaacggggtatgctgggaatccctacctcaacatcctgagaaaaaagagactgtgtatagagttttgtcctgtaatcccagcactttgggaggctgaggcggacagaacacttgaggtcaggagttcgagaccagtctggccaacatggtgaaaccccatctctactaaaaatacaaaaattagccgggcatggtgacggtgcctgtagtcccaagctactcgggaggctgaggcatgagaattgcttaaacccgggaggcggagggtgcagtgagccaacattgcactgcactccagccagggcgacagagggagactcaaaaaaaaaaaaacaaaaacttttgtacttggttaacgtgaacgctgcctccttaaaaaaaaacaaacaaaaaaaaacccaggaacatttaacgtgaatgtcagggactttgggatgagtccagggacctagaagtgcggaatgcacaaaggagctgggaaagtgtgtgagcctgagcccagggctgcaagttgggagtgcctgagtgcacagggaggccactccaaccctccagctgcctctaggggtatcagagagggagcccgtccccactggccaccaatacctcttaggccagggcgaacacgtccacgggggtatattcaacttgtgaccccagtctctgcgagagcctgcagtagcatgggggggagagacctcgcgttctctaaggatggaggacaaaggaggagagactgggagggcagggacggttgcggaacggtcacaaggcctgggcgcgagggtttggaaggcaaaggtgcgagaggcaccaggtgacccgtcctgcgtgattagcggtcggacaatctgagcctgctaagagctttcctgaccacgctggtatgaagggcggcttggaggtgacaatgggggacgacagggcacagcaggtgtggagacggtgtgcagggccggagcaaaaccgttaaaggcaggtggagacaccctcctcccctcccccagcatggggtcttcctagcaccagtgcgcgccttcccacaagcgatgaagtccaagtccacgtgctgggggagtgtcatgaactgacgtgcggtgcagccagtgactaggcgttg

SEQ ID NO: 34668 - DNA, 1075 bp, Artificial sequence
  DNA replication origin
gtgcagggccggagcaaaaccgttaaaggcaggtggagacaccctcctcccctcccccagcatggggtcttcctagcaccagtgcgcgccttcccacaagcgatgaagtccaagtccacgtgctgggggagtgtcatgaactgacgtgcggtgcagccagtgactaggcgttgtcggtgcgcggcggcggggcgaagcctcgcgaggggtgggagcccgcgctgcggggcgtcactcacctgcggcctgggcagaggtcggggtggaaagcgggctcgcggcggcctccaggcctagtccgaggccgagcagcagcagcagcgccaggcccagagcccctgttcgccacgctccaacctgcgccatccaaccgccgctcatgctgtccccacagcggcgccggccacgcgctgtccagaccgctctcttatccctgcgcacgcgcacgcgcggggttggggcggggcccaagcccctgagttctgcggcgcccgcggctacgcgtaccgtaaatgtcagaatagcagggaaaagagaattagaggcccgtccccactttccccagtgaccagatcagttgaaaggtatggagcccgcttgaagttagaaacttctggggatgggaaggaatttgttggtgttcatttgcattatttcccgttccaaatgaggactgctgcaaatgttactgcctcgtgatcttctttaatatggcagccacgcccctcaggcactccgcatttcctccctcatcccactgcttttgtggcgccgacaggtaatttattttatttacttattctggtttgttgtccgagtccccatagaatgctagctactggagggcagggatcttctgttgctcactgctttattctcaggatctgacacatagtgcttgactcatagtaggctcttagtaaacatttggtgagtaaatgaataaatgaaacgtccattctcggagtcgggttgcttgggggggaaaaaggaaaggaaatcaattaattaattaaatttaataataaaggccgggcgcggtgggtcacgtgtgtgatcccagcattttgggaag

SEQ ID NO: 34669 - DNA, 1126 bp, Artificial sequence
  DNA replication origin
acgttccctgtttgggtggcatgctgtgtgggtgtccatgccttccactaagacaccgtgtaaggcgtcaggtggtcagggaggagcacccagaaataaccagagtggggtccttgcaggctagccaaggacccacctatcttcctgctccctctcccttttctcttgcagctaccttgaccttgcttaactaaagaatcaccctggctaggcacagtggcttacgcctataattccagaacactggaggccaaggcaggaggatcacttgagctctggagttcgagaacagcctggacaacagagcgagacctcatctctactaaaaatacaaaaattagccgggtgtggtggagaacgcctgtaatccccgctacttgggagactgaggagggaggatcaattaggcccaggagttggagatcagcctgagcaacatggtgaaaccccatgcctacaaaaaaatttaaaaagaatcaccctttgttgacttcatcccctggttgtcttctgctacggcccttactagcatttgaaattatttcacgtttttacttgataatcgtctctctccactcttcactcaccacccccaccacacacacacacacacacacacacacacacacacacacacacacactcaaaactacacattcctgaaagttctgtgggagcaggcatttattcaacacttgacggtttgctgtgggtttgtcaggcaggcaggtagggtcgggtgagagaggggtatggagaagaatccacaacaggctgaaggaggatgacagaggcaaagagacaaggggtgggggcagtgaaacggagagggagcagtgggtaattgtccccgcaaggtccaaggattactggagttggggaatgggagcctgtgagccgagaagctgggaggtgagggtcgggaagtggggagctgagaagtgagattctgtaacgggcacaactattagggacatcaaggtctggggctgatgttatacctgtaaagctgatgtggggcagagtcaaggtcaaggaaggagagcagccaggaggttgcagggatcatgggggaggatgttgaaattgacaagtgggccgagcgcggtggctcacgcctgtagtc

SEQ ID NO: 34670 - DNA, 1232 bp, Artificial sequence
  DNA replication origin
ggaggcggaggttgcagtgagccgagatcgcgccactgcactcctgcctggtgacagtgtgaaactccgtctcaaaaataaaataaaataaaataaaataaaataaaataataaaattaaaataaaataaaataaactcaaggaggagtggtgccctgtgctggacagccattctctgctttcctctccagagtctttgagcctaggtcagcccctgccctctccccccacccatttcctggtgtcccacccaccctcccttggctctgacccgtatccaggagcaggcttgcgatggccaggttcccgtgggacacactgtagtgcagggccgtgttcccgttgccatccgccaggttcaccacgtgcgccagcagttcgggtcccaggcgcctcaccccttccagcatcctggccacgggctccgcctgagagcgccgctggctggacactcgaaaccactcctgggccacgaggcgcactgcgccctgcaagggacaggggccaagataacatcggcgatggtccacggcggcgccgtggtgggggagctggggaggggcgggactgggaagagacccatttggcgtttccaggcaagtaaggaaggtcactcctcgtccaggtggggagccatgcgaacccagatggagggctggggccacacccctatcggagggcaaacacgggggaagggggtcctttccttccagggaagaatttgcgggagaacatggaacggggaaaggcaatgaacgcttgcccttggggagtccgggagtggggctggggccgggcctttttggggaaaccaaggaaagatcggcgctgtcctgggaaggagatcccttcggagagcctggggtcaggcgaggtgcctggcgggaagggatggaacccggtgtgctcccctaagtgggcgtcagaggtccttggaggctcccacgccactccctggtgctgcgctcccggggcactcacgccgtcgctggctactccgcggggccggctcagctgccgctgcagcgctacgcacgcctccctcagacgcgggctcagctcgcacctgcagaggaggccaggagagactcaggatggatcggggacagcgccgaccaggaggagggcagccgcctcctctccaaacaactagcgagcgccgctcacctcccctgtgccacctgctgaggctctgcctccgcctcgggctcagggtcccggatgtccccgcc

SEQ ID NO: 34671 - DNA, 1039 bp, Artificial sequence
  DNA replication origin
gccggacggggaggctgagacgcgcccggacaagctcgcccagctgcggcggctcaccgagcgcctggccacctccgagcgcggcggccgtgccagggccagcccccgggctgacagcccagacggcctggctgcagggcgcagcgagggcgcgctccaggtcctcgacggggaggtcgggagtctcgatgggacgccccagacccgggaggtggccgccgaggccgtgcccgagacccgagaagcgggtgcccaggccgtgccggagacccgggaggccggcgtggaggctgcccccgagaccgtggaggcggacgcgtgggtgaccgaggcgctgctggggctgcctgcggccgccgagcgcgagctagagctgctgcgcgccagtctggagcaccagcgcggggtgagtgagcttctgcggggccggttgcgggagctggaggaagcccgcgaggctgcggaggaggcagcggcgggggcccgggcccagctacgcgaggccaccacccagaccccgtggagctgtgccgaaaaggccgcgcagaccgagtccccggcagaggcgccctccttgactcaggagagctcgcccggatccatggacggagacagggccgtggcgcccgcgggtgagtcccgaccccgtcgctgggccctggcttactcggcgccggactcgaactcagtgccctcatctcatccccgccaggcatcctcaaatccatcatgaagaagagagacggcacacctggtgcccaacccagctccggacccaagagcctgcagtttgttggggtcctcaacggagagtgagcgcctttcccctcctgtggcagcttctgccgggacatagactggggttggaaccccagctctgcccctctactggcagcgtggtctgggcaatcctcagtttcctcatcgttaaatgggaacggccacacccacatcgcaggactccagaacgagcccacaggggaggtttagcagacacctcccaccctgcccccaggtacgagagctcctccagcgagga

SEQ ID NO: 34672 - DNA, 1221 bp, Artificial sequence
  DNA replication origin
ccagctgcagttgggcagggccgggcgaagcaggggcaaggttaggggcggggctgctgcggccggacccgcgtgggctgcgcgggaccccgcggccggggctgggcgcgcgctcgtgtgtctgcgccagctccagccgccggctggtctcccggagcgtgtgctcgacgcgcgggttgcgcacgggcgcgcgcggcgacagcggctgcatcaggagccccgagggcgcgccctgggagagtatgcccggtgctccaccgtcgtcactggccagggactcgctggatgtccaggcgcctgggctacgtgcgcccgcgaggccgggccggggcgcgcggggacggcgcgaggtcgggggtcccggggcgcggcgggcagcggggccacgctccagctcctctatgtacttgaggaagtccaggtccaggtggaagccgtagggcgtctccaccgagtagggcgagctcgggctgcgtgcgcccccggcggcggggaccgggcacaggcgggggccgcccaggtctggaggcacgacgggggcacggggagggcgcatcagaacggggaaacccgggagatactaaacaaaccgagcgtgtcccccacccatgcccacgcttcacacctatctgtacccaagtattaactcaatcgcttgtttaatgagcacctactctgtgctaagcaagtttctaggcccgggggacacagcagtgagcaagacaaacatccctgtcctcctgtagaaagcagataagcatccttccaaacgatgcctacggcaatggtaataataacagggaataaacggaggaggcccgatttagcgtttggttgccagggaagctttcctgtgaggggactttcctgtggagtggagccctggcccggcgtgtggttcgcgcctgtagtcgcagcattttgggaggccggcacaggcggatcacctgaggtcaggagttccagaccagcctggccaacatggtgaaacccagtatctgctaaaaatacgaaaattagctgggcggtagtggcgcgcgcctgtaatcccagctactccggaagctgaggcaggagaatcacttgatcctggtaggcggagtttgaggtgagccgagatcgcaccaatgcactccagcctgggcgacagaagagaacctctcaaaaaaaaaaaaaagtagccctggccgggcgcagtggctcacgcctctatctcaacac

SEQ ID NO: 34673 - DNA, 1517 bp, Artificial sequence
  DNA replication origin
cccaccccaccgtcccactgggcggcttggagagcctcgggtgctggttggctggcgtggccgtcagttagggcgaaggccttgataatcagtccccggacttcgagggggcgggctcgggtgcgggcgcggctggggctgcggcttcaggtaaattgccagcttgcggggacacggatgggggacccctgggtgggtggattcggggacgcaccgggacccggcgctgcgctgcgtttccagccccactgagggctctgcccgctgcgacggggcgggcgtcgtgtcctctggccgggacccctcccacattggaagtcccaggtgggtagcgagcagagtggggggctctggaggcgtgggcttgcccccctctcgcccttcgggagctcactgcggggctcgttcgctccctaatgccacaaccggccctgggaccctttcccgggacggcctggggaccccagccagcccctcgcgctgggctgggtgtgggagcgtgtcacggaaatggtgttttggggagggacgcacggcccccggacccgcagacaatgggtagcggatggaaccgcccggcggcgcttcctgtaggaaactgctctgtctctgtgcggctaggacgacctgggggtggacgggtgatgatgactttaacacccaccttcctgccgccaccggtcccccacccacccacctcaagagtctgagagtcccagcagacatcaggggctgccagtactcagggcctcctggaaggcgccctctccccaggactgggatcctcactggcctgccgtggcccccaccactccggtttggtgatcacagctctgcgtcccaaaatagtccctggggcgggagagggggcgtgtggcgtcggctctgacggcctaatgagggggtctcaggcacagaatccggatctagctgtgacagtcagggcagggagcggaggagagggaaggcagctaaacgccccacttagtgaggccccagcccctgaagccgcagaggtggtgggcacctccgcccccaatcagagtctgacacaggtgtaggctgggagggacaagccccctgaggctccttggtggttcatgcctgttatcccagcactttgggaggtcaagtagggctgatctcttgaggtcaggagtttgagaccagactgaccaacatgatgaaacccgtctctactaaaaattcaaaaattagccagctgtggtggcaagtgcctgtaatcccagctactcaggatgctgaggcaggagagtcgcttgaaccctgggctcagaggttgcagtgagccgagatcctgccactgcactccagcctgggtgacagagactccgtctcaaaaataaaaataaaagaaagcattcaagtgtagtggccaaagcaaggactctggaagacctgcctgggtttaaaacctgcctctgcctgtttatgacaggacccaggcaggacactaaactgttctgtgtctcagtttctccatctgtacaataggg

SEQ ID NO: 34674 - DNA, 1520 bp, Artificial sequence
  DNA replication origin
gaaggtgggtgttaaagtcatcatcacccgtccacccccaggtcgtcctagccgcacagagacagagcagtttcctacaggaagcgccgccgggcggttccatccgctacccattgtctgcgggtccgggggccgtgcgtccctccccaaaacaccatttccgtgacacgctcccacacccagcccagcgcgaggggctggctggggtccccaggccgtcccgggaaagggtcccagggccggttgtggcattagggagcgaacgagccccgcagtgagctcccgaagggcgagaggggggcaagcccacgcctccagagccccccactctgctcgctacccacctgggacttccaatgtgggaggggtcccggccagaggacacgacgcccgccccgtcgcagcgggcagagccctcagtggggctggaaacgcagcgcagcgccgggtcccggtgcgtccccgaatccacccacccaggggtcccccatccgtgtccccgcaagctggcaatttacctgaagccgcagccccagccgcgcccgcacccgagcccgccccctcgaagtccggggactgattatcaaggccttcgccctaactgacggccacgccagccaaccagcacccgaggctctccaagccgcccagtgggacggtggggtgggacaggcaggcggggcctggaatgtaggggtggtgactgagggcgggccctggagtgacggtcgccgagcgctggctggcggcatttctgcaccagcagaggtcaagtctctgcccagcgccgggccaaggagcttggatttgatccacaggcacgagggagccatgggagaactatgagtagaagagtaacccggtgggatttctataactggcacttatttcgcagtgcctgggtgaagtatcaggtcccggatcttccccaccgcagggcctctgcacatgctgttccacctacctgaaatgctttcccttgcacctgtacacgtaggtactttttgaggctcccctactgttttttgttttgttttgtttttgttttttgagacggagtcccaggctggagtgcagtgacactcactgcaacctccgcctcctgggttcaagcaattctcctgcctcagcctcccgagtagctgggattacagacacacaccaccacgtccagctaatatttgtatttttagtagagatggggtttcaccatgttggccgggctggtctggaactcctgacctcaagtgatccgcccgcctcagcctcccaaagtgttgggattacaggcgtgagccaccgcgcccggccttccctactttctgaggttcagcttttgtgttgctgccccctaaattcctgacatagcccctccccagttagtatttttctcatcactctattgtattaacctaatagctacttttactatctggaaaaaaaaaaaaaagcagactctgttattggcaggcgcagtgactcacgcctgtaaatccagtatttagggaggcatagatggg

SEQ ID NO: 34675 - DNA, 1774 bp, Artificial sequence
  DNA replication origin
acctccctcctcggcttcctaaggggggagcccatcccttgacgcagggaagcccagggagccacagttgcgcaccccgcccccacgccccactcctgtccatacccttccaagccaggagagccactaggggcgcggagaaccagccctggggacacgtacctgcaggctgtgaaggacctcagggtccacccggctctcaggggctaacgggaggtcggtggacccctcggttccctgacaggcggacccgcacgcgctcaggcgccgctccagcgcgctcagctgactgcgggtgcgctccgcgtgttcgcgcagcccctggccgagctgcaggagtccgtgcgccaggacattcatctcgtcccaggacgcaaagcgcggcgacttggactgcacgggtccgccctgagcgctcagtagcacggcggtggcggcgcagagcatcagggctgccccggccgtcggagcaccgctcatcctcttaggtagcctgggagcggggattcggggactctcggggacgttggggttccaggtgcgaggactggagacgcggaggaccgggggtaagacccgcttggttgcagaagccgctggaaagaatcggatcacagtcgtgtgaggatccgctcagctcggcttctccccgccgcgcccgaggacggtttttataagttgggtgcggagtgggcggaggagtcttggaggcggggtgcggggagtgctgggggcagggcctgtggccgggggtggggtcctgtcctctggaggcctggtagtctgcgggctgggggatgccctggggatgccaaactgtggctctcccgcccccgctccaggctcaggcaggccttcctctacgaaccgtgggagacgtgactcttctttcccccacggtgcccgcctctagtgtgaaattgcaagccccctattccgcccccgccttacccagtggcggagagggcgcacgcttgaggtcaagacttccagaccagcccggccaacatcgtgaaacccagtctctactaaaaatacaaaaaaaaattagccgggcttggtagtgcgcgcctgtagtcccagctactcgggaggctgaggcagtagaatcgcttgaacccgggaggtggaggttgcagtgcgccgagatggcgccattgcgctccagcctgggcgacagagccagagtacgtctcaaaatgaaagaagagaaaagaaaagaaaagaaagaaaagagagagaaagaaggaaagaaggaaggaaggacggaaaaagaaaagagagagaggtagggagggagggaagaaggagagagagagagaaaagagagagagaaaggaaagagagaaagaggaaggaaggaaggagggaaagaaaggaagaaggaaagaaaggaaggaaaagaaaaagagctgagttcagcggagcccggaactcaccaaaagtccttgccttgcggaggcttcgtgtgacctccatcccaagaccaggagagacttttctgggctcgcatgttccttcccgtgaaagggttcgtcatcgcagctgtgtttatgagattctttgacttccatttctcccctgagcccgaaattatgagtgccttagcggcaggacttggatcagggcctcacccccatagcctaccctctaccgccagggtctttaatgtcctgagctttgcctataataaagcaggaacttagagaacagaaagaggagacacaaggaagggaggaaccagggcggtcgcccatgactgtggtcgcagcta

SEQ ID NO: 34676 - DNA, 2159 bp, Artificial sequence
  DNA replication origin
gaggaagaggggtcagggacctggagcattggatttgtaagatacaagagtgtttctggtctgggagctgggggttcccagccctaattcccacataccccaagacattgtggagggcccaaatctacaaacactactacctggcaccccctcctccatgacaccctcccctagaaggttctaaccttcaggatggcaccccgaaccccatttctaccttctccagcacccctgcagctcaagtccctcaagacctctttctccacctctgttccaatcagtgatcagcagggcttcagggacagcccactggcttgcagaggagaagggttgggtggcctggctgggccaggtcagggctgaggaaggaggtgctcccatcagctttgacccagagactggtgagccctcagggactccaggccaggacatcttctccttaaggtggacctgacaaggagaggaccagcaatggcaagtggcggggtaggggtggccaccggagagcatcgaggggcagacactcacggtgcaggcggctgacattgtgagccgggtcaactggctgggccatctcgggcagcctctttcttcgggcaggcttggccacctcatggtctaggtgcttgtggtccaggaggccaaactaggatgggacgggaggagggtgtcaggtcctgcctggccccacgtccccagccacacgtccagttctcaccacctccctctcaacctggggtccagctatcagagggaccttttctcccttgatcctagggttacctggctttgcagatgctgaattcgcaggtgctgcttctccaggtgccgctgctgctgggccaccttgtggaagagttgctggatcctgctgttctgagccttgagttgtgtctggggaggggtgaaaaccttggtgaggacccagcttgcctaccccaacctcttaattcatccactcatccatccttccaaatctccatccgctgaggccaggcaagggagtctttcttttttcttttttttcccaatgacggggtctcgttctctcgcccaggctggagtgcagtggtgctgtcacagctcactgcagcctccaactcctggggtcaggcgatcctcctgttttcagcctcctgtgtagctgggactacagtcatgcagctctatgcctggcttattttttattttttcagacagagtctcgctctgtcacccaggttggagtgcagtggcgcaatcttggctcactgcaacctctgcctcccagactcaagtgattcttgtgtctcagcctcccaagtagctgccaccacacctggctaatttttgtatttgtattttattttatttattattattattattttgagatggagtcgagctctgtcgcccaggctggagtgcaatggcatgatcccggctcactgcaacctccgcctcccgggttcaagaggttctcctgcctcagcctccccagtagctgggattacaggcgcccaccaccacacccagctaatttttgtatttttagtagagacggggtttcactgtgttggtcaggctggtcttgaactcctgacctcaggtgatccactggcctcgccctcccaaagtgctgggactacaagcgtgagtcaccgcacctggctttatttttattttatcgctattatttttttgaggagtctcactctgttgcccaggctggagtgcagtgctgcgatctcggctcactgcaacctctgcctcccgggttcaagagattctcctgcctcagcctcccaagtagctgggattacaggcatgcacaccatgccaggctaattttttgtatttttagtagagacgaggtttctccatgttggccaggctagtctcgacagcaggtggaggctccgtgagccactgcgcccggtcgttttttaattttatatttattttattttattttatttattttgtgtgtgtgtgtgtgtgtgtgtagaagagacgggggtctcgctattttgctttaggtggtcttgaattcctggccttgagcgaacctccctcctcggcttcctaaggggggagcccatcccttgacgcagggaagcccagggagccacagttgcgcaccccgcccccacgccccactcctgtccatacccttccaa

SEQ ID NO: 34677 - DNA, 845 bp, Artificial sequence
  DNA replication origin
cgaacccacagaacccctgcccccttccaccgcatttcccagccaggacttgtgccttcccccgtcaccctccagaagcccctcatcctgggatggtggctttgggagggtggacaggaccctgaccacgctgagatgctagcctggcggggttgggggcgggcagcacggaggtgggaaggagcgggagcttggggaggagagaaccctcaggtctacagtgctggaagcctgccactgaccctagggtgtgagagggggatccaaactttcacccagttggctgtggacagccacagatgcagggaaggatgaggaccacagagaaaccgtgtggggccgtgaacttagagaaccgcgagtctgcatcggacacacgtggacatgctgtggttcgagatgaacggagatttgggaataaagcacctacaacttgtggtggcagcaaaagcccactttctgcggtggggagggggccggcgggggcggggagggaggaggagaacaagagaggaaggaggaagaggggtcagggacctggagcattggatttgtaagatacaagagtgtttctggtctgggagctgggggttcccagccctaattcccacataccccaagacattgtggagggcccaaatctacaaacactactacctggcaccccctcctccatgacaccctcccctagaaggttctaaccttcaggatggcaccccgaaccccatttctaccttctccagcacccctgcagctcaagtccctcaagacctctttctccacctctgttccaatcagtgatcagcagggcttcagggacagcccactggcttgcagaggagaag

SEQ ID NO: 34678 - DNA, 759 bp, Artificial sequence
  DNA replication origin
gggaggaggggaggatggcgttgagcacgtctggaggctcagacgctccagactgggaggaaccgcccccagcccagccggaaaagtaggggaaaggtcgaaatgagtctgcacggtgggggtgggggcgggcccagagtgaccaggaagacgctttccggcccctcaggcatctcccctttcccctactttcctcccatccagtaaggatgggcacgcggccaaaccaccagtgtggcttccatgaatgccagctgttcgccttcccagctctgaactttctcctacttggcgggcctgagccaagagtctgggagtcccgaacccacagaacccctgcccccttccaccgcatttcccagccaggacttgtgccttcccccgtcaccctccagaagcccctcatcctgggatggtggctttgggagggtggacaggaccctgaccacgctgagatgctagcctggcggggttgggggcgggcagcacggaggtgggaaggagcgggagcttggggaggagagaaccctcaggtctacagtgctggaagcctgccactgaccctagggtgtgagagggggatccaaactttcacccagttggctgtggacagccacagatgcagggaaggatgaggaccacagagaaaccgtgtggggccgtgaacttagagaaccgcgagtctgcatcggacacacgtggacatgctgtggttcgagatgaacggagatttgggaataaagcacctacaacttgtgg

SEQ ID NO: 34679 - DNA, 1245 bp, Artificial sequence
  DNA replication origin
gcacagtggcttgcgcctgtaatcccaccagtttcggaggccgaggcgggcagatcacttgaggtcaggagtttgagaccagcctggccaaacccatctatactaaaaatacaaaaattagctgggtgcagtgggaggcgcctgtaatctcagctactcgggaggccgaggcaggagaatcgcttgaacccgggaggtggaggttgcagtaagctgagatcgcactaccgcgctccagcctgggtgacagagtgagactcttgtctcggaaaaaaaaaaaaaaaaaattaacagcagctggggttcagaaaatggacagatgtggttttcctcaaatacatgtcctagatgtagggtatccaattattacaatttttattttatttcatatttatttatttattttttagacagaatctcgctctgttgcctgggctggagtgcagtggcactgtatccggaattggggggttcttggtctcactgacttcaagaatgaagccatggacccttgcggtaagtgttccagctcttaaggtggcgcgtctggagtttgtttcttctgatgttcaggtgtgttcagcgtttcttccttctggtgggttcatggtttcactggctcaggagtgaagctgcagaccttcgcagtgagtgttacagctcataaaagcagtggggacccaaagagtgagcagtacaagatttattgcaaagagcaaaagaacaaagcttccacagtgtggaaggggacccaagtgggttgccactgctggctcgggcagcctgcttttattctcttatctggccccacccacatcctgctgattggtagagcccactggtctgttttgacagggcgctgattggtgcgtttacaattcctgagctagacacaaaggttctccacatccccaccagattaactagatacagagtgtcaacacaaaggttctccaaggccccaccacagtagctagatacagagtgtcgattggtgcattcacaaaccctgagctagacacagggtgctgattggtgtgtttacaaaccttgagctagatacagagtgccgattggtgtatttacaatccctgagctagacataaaggttctccaaggccccaccagagtagctagatacagagtgttcattggtgcattcacaaaccctgagctagacatagggtgatgattggtgtatttacaatccctgagctagacaaaggttctccacgtccccaccag

SEQ ID NO: 34680 - DNA, 1004 bp, Artificial sequence
  DNA replication origin
gctttcagcccagcccggcccgccaaatcttgggaaagctccaccccctgcggaggccccgccctaacagcctctcccaccgctccgggccccaccccctctaggctctggccccgccccggcgcgtcctaggtcccccaggtctctccgggcctccggctccgtatagccgcgcatcctagcccgaagctgatgctgcccggtcggctccggccttcccggctgcctgacccgccgggccccaagccccgggctccggcctgggcccagcggcctggagcgcggccttggcccgtctgcccgccgcctcgccgccacgacttcgcccgtctgtgccccaccggccgcacctttgaataggtagtcgtactcgtcgtcccgggtccccattgtcctggcgcttccggcgggatcggcgactccgcagccccaccacaaacacccgacgggggcggagccggcgccgcgcagagcggcggttgaatggcctatcagcggcgagtggagtagcgacgggcacccagcgaagccaatcagagatggaagtagtgctctgagggtgggcgccgcttggtaccaccctcctcgccctcggtgtcctggagaaaggcggaaggaatgcggacctttttgaagtgacggacgcgccagcctatcaggggcgagctcaagagggcggggcggaagactgcaggaatgaaatggattgacagaccaaataactaatgagaggcttgattgagaacctacccgactatcagaggacctgtccgggaagagaaatggggctacgtccaggtaatgctacgatgcttaacgtcccgatgacgtcataggtcagcgcgcgctgccctggtcgccccccaagcccataaatgaccatttccggggacctcagcgctgggtcccctttctcggttgcagtctccatctctatattgggactcactgggttatccttctgtgcctcagtttcctcctctgtaaactgaagaaacccgtct

SEQ ID NO: 34681 - DNA, 1465 bp, Artificial sequence
  DNA replication origin
gtggtaccaagcggcgcccaccctcagagcactacttccatctctgattggcttcgctgggtgcccgtcgctactccactcgccgctgataggccattcaaccgccgctctgcgcggcgccggctccgcccccgtcgggtgtttgtggtggggctgcggagtcgccgatcccgccggaagcgccaggacaatggggacccgggacgacgagtacgactacctattcaaaggtgcggccggtggggcacagacgggcgaagtcgtggcggcgaggcggcgggcagacgggccaaggccgcgctccaggccgctgggcccaggccggagcccggggcttggggcccggcgggtcaggcagccgggaaggccggagccgaccgggcagcatcagcttcgggctaggatgcgcggctatacggagccggaggcccggagagacctgggggacctaggacgcgccggggcggggccagagcctagagggggtggggcccggagcggtgggagaggctgttagggcggggcctccgcagggggtggagctttcccaagatttggcgggccgggctgggctgaaagcgtgattcgggatgggggcggggtttttaggggcggggctaaggcgtgatgggcgtgaccaataggtgggttgggcctgggcaaacggaggcggggctctcacgaggcttgtcctgattggggcagcgtgtttgggggtggggcccgggagaggcggggcaggcaatgggggctgggccgagatgagggcctgggggtgaggtgtgtggtggtgggagccttggattggggtgcaaagctgggattgagtggaaaggcacccgtgtgtgcagcaagaattccatctcttcactcagaactctcaacagtgctaagccagtacttgcacttttctgagcactttacccgaattaactaaaatcctcactgcagccctttgaggttgatactaaccagcctctctttttacacgttgggaaactgaggcccagagtgacaaagacacagtttataagtgttggaacccgattgagcccaggccacctgtaggccttaccacttaggaagcgtgtcttagggggcttgtggccagcatctgggactttgggttgttggaccaacttcttccaacacgtgcgcactgatggccggggccccagccagcctgctggagggtcttccccgcccgagggactgagggggctctaggagcatcacataaggcctaggtagatcaggcagccattgcccatttagggacagctggaggaagccggagtcccttgtttctcagctgagccttctgtgcccagctacactttggcctagtggtctgccctggttgctgggctccctggctgacaatggcagcccttgagggctaacccctggatccaaggtgccttcaccctgcggcctgctctatgagggcctgcgtcgcacatca

SEQ ID NO: 34682 - DNA, 932 bp, Artificial sequence
  DNA replication origin
gaaactgaggcccagagtgacaaagacacagtttataagtgttggaacccgattgagcccaggccacctgtaggccttaccacttaggaagcgtgtcttagggggcttgtggccagcatctgggactttgggttgttggaccaacttcttccaacacgtgcgcactgatggccggggccccagccagcctgctggagggtcttccccgcccgagggactgagggggctctaggagcatcacataaggcctaggtagatcaggcagccattgcccatttagggacagctggaggaagccggagtcccttgtttctcagctgagccttctgtgcccagctacactttggcctagtggtctgccctggttgctgggctccctggctgacaatggcagcccttgagggctaacccctggatccaaggtgccttcaccctgcggcctgctctatgagggcctgcgtcgcacatcagctgttggtatcctcacctcgctgagccgttcctccgagtgtgctctgtggcttgcaccaggcctagctgggccttgtgtctggtctcatccagcgtcttctgattgtggggaatgaggcagaggtctccccacctgggctgtccgtgtggcgaaagccttccggggggagggagaggaagtgcctctacaagggcctagagtcgtcctgtggcactgagggctctggcagctgcacacaggttgataatgtcactggtgggtgaggctctgtggtcagcaggtgcccggcccaaggtctcgcccctcgtggcaggaggaagctttggaagggttttggagactgggattctaaggggccgtctggagacagggggactaaactttgggtcctgctgatcgggtgccatctccactcagcccaccgtgaggcagctgctcccaggtcctggctgggcaccca

SEQ ID NO: 34683 - DNA, 1413 bp, Artificial sequence
  DNA replication origin
cggcatgcgtgggaggctctgccagcctttttggcattttgtttgttcacttgacagacattttcttgggtgtttattgtgtgccaagcactgtgccaggacctgattcctgcccttggggcagactggcaaaagataaatgccacctgacaggtgagagagtggcaagagtgacggaggaagaactgggtccgggagcagggtaattcggagagtagagttttagtagcatagcagggagggccttcttggccaagtggcatttaaggggccacacgaaggggatgagggagggagccaggtgtgtgcctggagaagagcgtttctggcagcaggagcaacccgtgcaaaggccctgaggcaggatcgcacctggcgtgttgggggaacagcatggaggcctgtgtggctggagcagagtgagccggggggggggcgggagggaggaggggagggccctgtgggcagcggggaggactgtggcttttcccctgcggaaggtgggggccacggagggttgtctgcagaggagggagggaggtgccctggctcggcactcacgggcgctctctggtggctgctgcaggaggacagcgttttggttggtgatgagcgtgaacacagggaccgcacagacaataccttccagggtctgagagtctggaatggaatcgcccagggagacatggtggggtgcacccctcgtcctcccttctcttggatctgtttcggatgtgctgaaggattgattctgagatgcgagagaaaggaaggagtcgagaatgactccaggtttctggcatgagtgcctggtaggaccaagccaaagttaaccaagataaggagggtaggtgagcggtgggtgagcaggcttagggagtgatcgggagcttggctctgctcttctgggtatgaggggcctggggcccctgaggagacatgaaggagacaatgggcacgccagtctgggcttctagggagagaggtaatataggagttaccagcccatggctggtatttacagccatgagcctggatggggtcacctggggactgggtgtggacagagatgcctgtcctgaggctccctgaggttcgaaggtagagtgggagactgagtgggagtgactgtgaggagaggagtcggggtgtggagcccctgcaggcagggaaggagggagagctggctgggtgcctgctgcacaggcccgggggagtgggggtagctgaggctgacactgactgtgggggcgaaagcgtgcttggtttgagttctaggactgggggacaggaggtggagtgagtgagtgtagatgataccttccagtgcccgaggcaggaagttgggtcaggagagaatgttttctagagggaaaattccaaacgtgtaggtacagccccacagtgtggcca

SEQ ID NO: 34684 - DNA, 963 bp, Artificial sequence
  DNA replication origin
attaattaaattagccaggcatggtggcacaggcctgtagccccagctactcaggaggctgaggcaggagaatcgcttgagcctgggaggtcaagggggcagtgagctgcaattgtggcactgcactccagcctgggcgacagagcaagaccctgtctgtctccaaaaaagaggaggcgacagccaggcacggtggctcacgccacctgtaatctcagcactttgggaagccgagagggtggatcacctgagggcgggagtttgagaccagcctgaccaatgtggagaaaccccatctctactaaaaatacaaaattagcctggtatggcggcatgtgcctataatcccagctacttgggaggctgaggcaggagaatcgcttgaacccaggaggcggaggttgcagtgagccgagatcgtgccatcgcactccagcctgggcgacaagagtgaaactccatctcaaaaaaaaaaaaacaagaggaggtgacagagagacagatgtacctgagggatgaaggagatgggagggagcccagaggatctcaagacggtggtgggaatggctggggggcttgggaggggtccagaaaaaggcagctgagtgggtcctgatggctgggaagcctttgcagggaatggaggccaggcccaggtgggaggacaggaggcgtgtgggaccaggtgtgggcaccagtgaggagggaagctgagggaggaggaaggctgggatgctggctgggcaggggcagcggcaaggcggagtggcctgagctaggtcctcactgcacttggtacccagagataccctggtgtggcgaaggctgggcgctggtcagcctgagggtcccacggcgcatggctaaagcgttcttccagcctcactccctggtcttgggagcacactctccccttctcctgcccaactcctacacatccttccaagcccacgcgctgcaagc

SEQ ID NO: 34685 - DNA, 955 bp, Artificial sequence
  DNA replication origin
gaaggttcagaggccgtgttccaccctgcctggctggtgccctacccacacccatctggtccccggccacctgtgaggatgttcttgaatgcttcctctacgttagtggaatccaaggctgaggtctcgatgaaggacaagttgttcttttctggaacaaagaatactgcctaggtgagtggggaggcagggtgacaggctcccacatgctctcagggaccccgcccacccacctggcccatcccaaggccactcctcagggaagggaagccagggctgtggccagggccccaacactgtgaggggcctcctgccttccagacacctctctgatgcctgcgtctccgtctgctcacctgcgaaggcgcgggcctcgtcagtgggcacagcccgcaggtggcgcaggtcactcttgttgcccaccagcatgatgacgatgttgctgtctgcgtggtcccgcagctccttcagccagcgctccacgttctcataggtcaggtgcttggcgatgtcgtacaccagcagggcgcccactgcaccacggtagtacctgcagggtcaggggcccatgagcctctctggaggacaaccatgggcagcggcagcctcacgggataacagcacacatcacgcccagggtgggtcgtccagggccgagccaaggggcagtcattgtggcctcaagggaagggtgtgtgtctggaggccccagcgctgctccctggatccagctctgaaatgtgggggtctgaggagggagtttgggagctggaaatagaagataccgtgaggtcatcaaaaaaagggaagaaggggctgggcatggtggctcatgcctgtaatcccagcactttgggaggctgaggcgggtggatcacttgaggctgggagtttcagaccagcctgggcaacatggcgataccccatctctactagaaaaacacaaaaattggcc

SEQ ID NO: 34686 - DNA, 1569 bp, Artificial sequence
  DNA replication origin
ttgcgtgcaggagaggggaggggagaggggagagggggggacgggcttctccctgcatcaatcaacaggcagaggtgggaggcctgtgcgagctgctgtgtgcggaggagcgggtgggcgctgagagcccggggggtccgcctgccccggcccccgctgcctggttcttcgggctttggcccagagcacggttctgggtggggacgacgggctggctgggccacccggtcacggagggagggaggcaatcgctccctagagtcggccaaggaaaaggggagaaggcggcgccgtccgcccgtcctcctcgcctctggccagccccgtccatcctgccgccctccccaccccgccaagacgctgtggggacccgagtttcatgggtgcagcaaaccggggcttctagcttttccccgggcaggacggggtagcactggctcctgtccttcctgggccccggcccggccgtgcagagctcactgggagggctggaacgagccggccacagagggacagcagggaggggccagaggataccgtggcgggggcgggcggaggacgtgcacgcacgctgggtggaggcgcaggggtcacaggttctggcagcactgcagcttgttgggcttctgtccgtccgtggtgggcggcacgctgatgtccaccacgttgttccccggggactcgtcgtgggcagcgcggtctgcgatctgtttctgtgacacgatgcggtagatctctgcaaagggggtacagggggacgtggggtgagccagcacgtgccctgcctgccgaggggaacccctccctgcaggactccagaggccctctccagacccccacagcgcccccatcacatcaggggtaacaaggacaggggctgcgcacccagccaggacccacatctggtcacagccagccccggcctctcgctccctaagatcagaagcgccctcctccctcagaggtaaactcccagaagccaaaaggctccaggtccctgaggctacccgcctccccgcagcgccaagagttaaggcagggcccatccccaggaactggggccagggggtctctgtgtccccagtgccagcaagggctagacctggtctgaccctgtgaagtgtccaggtggaccggcaggtttaaaaagcaaaggttaggggtggtggtggaaaaaaatcaaacaggccaggtgcagtggctcacgcctgtaatcccagcactttgggaggctgaggcaggaggatcacttgagcccaggagttcgagatcaacctggacaacattgtgaaatcctgtctctactaaaaattacaaaaattagcgggtgtggtggcaggcacctgtaatcccagctactcgggaggctgaggcaggagaattgcctgaacctggaaggcggaggttgcagtaagctgagatcgagccaccacactccagcctgggcaaagagcaaaaatccatcctgccccgacaaaaaaaagaaaaaaacaagcaaacgaacaaaacaagcgaaggttcagaggccgtgttccaccctgcctggctggtgccctacccacacccatc

SEQ ID NO: 34687 - DNA, 863 bp, Artificial sequence
  DNA replication origin
aggctggagcttttggacagctgctggcagctcacactggtcccaaggtcactgcaggggtgaggtggagggagacgctggatcctgggaagaggaactccatgccacacattttgctgtccctggcatttccccactgggccctcctccggtgtcagtttagggtggagacatctggcatcaccaacatccactgggcaagtcaccctcgtcaggaccccaggggaggggaggccctggcaggagacaaagtgatgaaccctggccactgctcttggctcccatccccatcaggggacgcccgcaggcctgaggtcctaggacccaggagtttaaagtcaaggacaagcggcagccttccatccctccctgccacaggggcagcttgaccagggcccaccccaactgcgctggctgacttccacgctgcccttggcaggtgctggggtcctctcgcttcctgtggggtgggctggggagacggggggtctggcctgcattggggaacgtgcagcgagaggggcctcagcctaggagctggcgcctggcggaaaagaaagaagacagaggcgcagcggcaggtttctgtacaggaagtcagattatacatttcagtaacgggcggggtgacggggacggggcaacagcgcaggggccacagggagaagaagagatcgagagctggggtttggcgtaaatcttacaaagtgtataaagaatctgtgtttctctacattaacaaaaaccaaaggctacaagagcggttgtatatacaaaacacggagatattgcttcacttgcaaacaggttccagaccagatggggagacgagacagaggagggggacagggagggccgagagg

SEQ ID NO: 34688 - DNA, 1142 bp, Artificial sequence
  DNA replication origin
gcagcagcaccccctcgtgcctggggcggggctggggcggggccagtgctggggcggagccggagctgggggcggagccaagacgcggcaggggcggagccagcagctgcggcacagcggggcctgtgcggcccaagtcgtccctgtggcctccggccccgcctcttagggcgggacgtgcaaggcgattggcgaatgcaggcgagaggcggtcgctattggtccgcggcgctgtcggctcggcgggcggtgcccggacgcaggtgccggccggagcggagctagtggcgccgacgggccgggccgggccgggaccggggccgaggcgaaccgaggggcctgtgcggccgcccggcccggccgcggatcaggtaggcacgggcctgcaggtagggccggaggacgccagtccgcgggccggccccgggttcgaggccggagctcggcacccgggcgggacggctgggctcgatcccttggccacagccttctcggggacgcggggacctcagttcccgtgtcaaggccggtgggaggtctccggggtccggcacacataggcgcctctccgagcctcggtttccccacctgtgaaactgggtcatcccattgccaacctgatggggcttctgggaggattcaggaggtggctggtgcagaaaacgcctgacacacagtaggcaactgctaagtggccaatgcccttccccaacctccttctcagagcggctctgcctgcaaaatagtaagttataatataatgacccagccactttgcacaaagatgctgaaacaggatgccctgtgctatgtgggtgctcaaaacggggtagtcaaatgggcatgttgagctcattcagttcttttgaaaccatactgagtaggtggaagcagtagaaatgtcccctgttatacagttgagagagtccaggctcaaagaggttaagtgtcttgcccagggccacacagcacataaggagtagagctgggattggaaccttgcttctcatgcagggaggaatgaatgcaataacaacctccacatttaccctaaaaaatattaatagagcttttattgagcacttactgtgtgtgccagggttgactgtgtgacctctcatcaacaactctgtaagctgatg

SEQ ID NO: 34689 - DNA, 1485 bp, Artificial sequence
  DNA replication origin
tggagggactgagggtggcgaggctcgaggcccggtgtaggggacgattctggaggctcccccggctccccgctcacggccctagacgccgctaccctgagcaggcggtacgggaacagccggggccgaggccgcgccggggctaggccgccaacagacctaacggagccgccgcccgcgtcggccgcggagaggaacccttacccgtggcaaaggaccgtgggatactcaccccttagggcccggagccccgttgccgctcggcacgccgggcgcgccgctctcttcctccattttgatctccgtcgccgccacctccgccgccgcttcgacccctgccgccattttctccgcgtctgggctttgtgtgagcgaacgggctgcaccgcgctgcgcctgcgcgcccacgtgacccgacgcaaccagtaacacctgcgcccgccgctcccggctgcctccttggccccactcgccccgggccacgcccccgccgcgcgcaggcgcagaccggcagctgttgatcgcttctctctcgagatacactcgcgttaggcaccgactggctgttcccggcgcgcgtcctctgagtccgatagaggaggcatctccccaccccaccccacacaaacacctagacctagtcactctcagctttctgtaaccagagctggagcagaggggaagcaatgatcctgtctagagattcctggaagttttagatgaagcttgttcaacccgcggtccggcacacgattcgtaaactttcttaaaacattgtgtctttttgtgtgatttttttctttttgtaacgcaattgcgcggttctccagcgcgaactttgtaggcaacaacggaacggcatggaataatatcagagtattatccgtaattcgcattataattgcaaacagttcgtccagaagaaacggaaaactgttaaaattcactaataatggggccaggcgcgatggctcactcctgtaatcccagcactttgggtatgggaggccgaggcggcggatcacctgaggtcaggagttcgagaccagactggccaacatggtgaaaccgcgtctctactaaaaataaaaaaattagctggacgtggtggcgggcgcctgtaatcccagctactcgggaggctgaagcaggagaatcgcttgaacccaggagccggaggttgcagtgagccgagatcacgccactgcaccgcagcctgggagatagactgagactccatctcaaaaaacaaaaagataagtattgagtactgggcttaatacctgggtgatgaaataatctgtacaacaaacctccatgacaagtgtttacctatttaacaaaccttcacatttacccccaaacctaaaagttaaaaacaaaattaaaaaaaaaattaatggctgggcgcggcagctcacgcctgtaatcctaccactttgagaggccaaggcgggtggatcacgaggtcaagagatcagacca

SEQ ID NO: 34690 - DNA, 1163 bp, Artificial sequence
  DNA replication origin
gtaccgcctgctcagggtagcggcgtctagggccgtgagcggggagccgggggagcctccagaatcgtcccctacaccgggcctcgagcctcgccaccctcagtccctccaggccggggccaaccccgtagtcgaggcctcaggcccagctgctgcgcatgggggttgatggcgcgggcccggaccggagagcctccgaggcctacccgaccgctccccgggagggtgacctcgggggccgggtttcagccccccgtcccctctcctcccggggtctgttttctgatccgtaacgtggggggaggagagagggtgcgcgcccgggaggcctcgcgcgcagtcagcccgagtcaacggtaaccgagcgagggaagcgtcaggaagggccgcgaagccgggtcggggggctcccctcctgccccgccccttagtccccgcgcgccgaccgcgctccgcgggaagtgcctccctcggaaccgcccctcgccccacgctctggccctggctcaagtccctcgccgtttcccgctcctcctccccgggtgcgccgcaggtattagtggagagatgggatctgctgcttagcgttcaccctcggaagcagacagatacgaagtcgggggaggaatcccctttttcccgtgtttcggggaagctgttctgtcaggaggcgggttcatttacttccagacttcatcagcttttcgagtcctgcttggggctctttgactccttggcttttaaaagtttctttaaaggaggaagcatcgacttgtgccccggtgaaactcattcattctgattacagacacttaagagagacagagaggttttggctccaagatcagcggccgggaaggaaggggaagcctgggtacacattgaatttcccagacatttatttcattgtggtaaaatagacataacgtagactttgccattttaaccattttttaagcgtataattcagtggcattgagtatactgactcagtgtgctgtaaccgtcactgcttcatgtccagaactttttcatcatcggaaacagaaagtgtagctattaaatactaactccctccgttttctttcctttctgtctgtgactttgccttcctcatattgtaatgtgtgaagcttagtttatggagattaaaagtgaatgcg

SEQ ID NO: 34691 - DNA, 1448 bp, Artificial sequence
  DNA replication origin
caggcccatccgctccagattgttggcgcccatgcgctccaggccggtggccatgcgatccatcacggggcccatgcgctccaggccagctcccatacctgcgggcaccatgcgctccatgctcaggcccatgcgctcgatggcagggcccatgcgctccacgccagagcccatgcgctcaatggtctggcccacacggtcgatgggagcggccatgcgctcaaggccgaagcccatgccggcacccatgcgctccacgccagagccaatgcgctccatggtctggcccatgcgctcaatgctggaggccatgtggtcgaggcccagcgggcccatgcgctcaatgccggagcccatgcgctccacggagcccatgcggtccatgaccaggcccatgcgctcgatctcggagcccacgcgatccatgccgtggcccaggcccgcgcccatgcgctccatgccggcacccccgaggcggtcaatgccaggacccatcctctcgatcccagggacgcttcctccacctccacctgaaacagggacacaaaacacaggtgggtgtcaagaacttgagtgtgcgtgtgcacaacacgccagaccacttcagctcatgggcatggatcaggggtaaaggcccaccataatttaccattaagacacccctcaaatgttgacaacagctacagctgtgtggtgggcacatgggggcctcccagcattctctctgctctatgccacagctgagatttccataacacaacttctaaagaacacccctgtatgtgtgtctgtgaggtgctagtgtctgtgacaagctttgtgaaccatggacgtcaattcctgagacatctgaggtttctccatcagcagacactgagaaatgctccagggggaggcatggacaccccccactcggggggccacccagggtaatgaacaggagttatgtggagacaagtcggagtcactcccaccttcccctcccagcctgtccctctaggatgctctgctgggggccactctggctgcatttcctcagcgctcccagggcacagagaaaggattttcggccacaccatcaagcagaggtcaaaaaaacacacaccgagagatcctctgtgtacaaatgcacacagctggccacttttggggaccctattgtcagggaaaccaaatgacttgctggctttggaaagaagatgttgatggcactgcagagtgggctctggtagcggctgggggtcagtcagcagaacgaagggacgcccccacccgtggtgcttgcaactctggaaagcagggtctggctccgtcagcaaggccacccctttccacatgccgagtttggggctcctccccgaaaccctgtcgcttgcctctgagagtggccatcagcccagagccagcctgtgaccgacccaagcagcctagtcaaagataccaattca

SEQ ID NO: 34692 - DNA, 991 bp, Artificial sequence
  DNA replication origin
attgagcgcatgggcccgctgggcctcgaccacatggcctccagcattgagcgcatgggccagaccatggagcgcattggctctggcgtggagcgcatgggtgccggcatgggcttcggccttgagcgcatggccgctcccatcgaccgtgtgggccagaccattgagcgcatgggctctggcgtggagcgcatgggccctgccatcgagcgcatgggcctgagcatggagcgcatggtgcccgcaggtatgggagctggcctggagcgcatgggccccgtgatggatcgcatggccaccggcctggagcgcatgggcgccaacaatctggagcggatgggcctggagcgcatgggcgccaacagcctcgagcgcatgggcctggagcgcatgggtgccaacagcctcgagcgcatgggccctgccatgggcccggccctgggcgctggcattgagcgcatgggcctggccatgggtggcggtggcggtgccagctttgaccgtgccatcgagatggagcgtggcaacttcggaggaagcttcgcaggttcctttggtggagctggaggccatgctcctggggtggccaggaaggcctgccagatatttgtgagaaatgtaagtggctcttggggaacttcttggtggtggtgagcatgaggggacaggggaggcaaagatcagcaggatgaagtcagaggtggcgcccttcaaaggggaccacacctccttgccactgtcccaaacgttttatgctagtgggacaagtaaggaatgtgagaactgtgggttctggaagagcctgggcttctccactgtgctagaatatggagcagacgctgagctcagagactccagtttctgattggttggcttgaagaggcactatgtgttgcacgatggtccagggaaagaagtggctgtaacggaattattttccccagctcagccacccttagccactatttagtgactgtgggctgcgcaccgc

SEQ ID NO: 34693 - DNA, 1361 bp, Artificial sequence
  DNA replication origin
ccacagatggctacgtgcccagaacagcgctcctgcccctgtgagtgccagccctgaccgtggtgggggagtgcggggtgtgtggtgcagggtggggggaatgggccacggtgccccttgctgacccaactgtgctctgccagggagacggaggtgtacgatgatgtcgacttctgcggtacgtggacactctgggagggctggagggaccctggcgattccccgggggcgctgctcactattgggcttctggggagaggggtccatggaagtcacgcttcctcggcagatcccctggaaaaccaaccactccccctgggacggtaagaccggtaggcgtggggccaggacagccagccagcccagcgcccgctcacccaggagccctggatcccggcgcgggaaagtcacagagctgcctgggcttgtacctggccacataaagccccagtttaaagcagtccctgcttcttgtcttttctttccctcctgattggcacacagtggagcaaaggcacgggaaccccctgaccaaacacaaaagggggtgtgtctggggtcaccctgccatggtctcacccctcagggataaaagccagtggggagaaaagggtggcaagaagctggtgagcaaggggggctccgggtgatcagaacagcatgtgctaccaggcaggcagccgggcaggacgcgcccctccacagccaacagaacagcagcagccaggcctccttgccaggtatgcacacctgcttggcctgagtggatcctgagagcgcttcactgggggaaggggtggggcctatacccaattctgacagagcccaggtatcaatcagatttggcctgagcctctggcaggactgaacacgcatggaaggtggcacacagtttggtctgtttcagcaggaaaaaaaaaaagccagagaacaagcctgactcaggcagggcctgtgccccagggcgttaacttcacaacagggagacaggatggctttcggggggcttttttttttttttttttgagacggagtcttgctctgttgcccaggctggagtgcagtggcgcgatctcactcactgcaacctccgcctcctgggttcgagtgattctcctgcctcagcctcctgagtagctgggactacagccatgaaccaccgcgcctggcctcagaaggctctaaacagccaaacgctccattgtaagccgggggattacagcccacaggaaggcagtttccagggaagagtctccccccatctgtgggcaggcacccacccctggggcctcagacaagcaagagaggggatgagatccctgctgcttggactggaagctcgagtgaccccagctccccac

SEQ ID NO: 34694 - DNA, 1480 bp, Artificial sequence
  DNA replication origin
acacccgcagcctgagttcttcggtgatctccctcgaaagcctccactccccagctccgcttccgagagctcactgcctgcggccgtggccggcttcagctcccggcacccgctcagccctgggtttggagcggctgggacaccccgctggaggtcaggaggcctggttcacagtggaggggccaggccaggcctcagacccagccatccaccccggcggaggcctctgccccctgccagcagcctgggacaccctccagccaagcccccgctgcccccggggcccgtggatatgcagagctttcggagaccctctgcagcatccataggtgggtgagggcgggcggcaccggcaggagcgggggctgaggtcccaggcagtgccggcttccctgccctactctctaccccacagatctacggaggacccgctcggccgctgggctccacttccaggaccgacagcctgaagacatcccgcagtgagtgtggggaggaagcggaggtgggtgcggattgtggggctcaaagaggcctcatctcggcctggagctcccagaacttcgggaggctgaagtgggcggatctcctgaagtcaggagttcgacaacagcctggccaacgtggtgaaaccccgtctactaaaaatacaaaaattagcccggtgtggtggggggcacctgtaatcccagctacttgggaggctgaggcaggagaatcgcttgaacccgggaggtggaggctgcagtgagcccgagatcatgcccctgcaccactccagcctgggcaacagagaaaaactccgtctcaaaaaaaaaaaaaaaaaaaaaaaaagaagaggcctcatctcaggtatccccgcagggtcccagatgagatctacgagctgtatgacgatgtggaacccagagatgactccagccccagccccaagggcagaggtttgttggtggcctgcccgagtccctgcaaaacattcggggcaaggccattttctgccatgctcctggtgtaagagcaagtaacattttaggacctgctggctcctgctgggtggaactacataaggggagcccagaggcgaaggaccagtgagaaggctgttgtaggcagaggtgtggcccaggttggcagcaggagatgtgggagcagtgggtgaattcagtaatcaaaagcaggcatcaggccgggtgcagtggctcatgcctgtaatcccagagctttgggagcccgaggcaggaggatcgtttgagccaatcccagggctttgtgaggccaagacaggaggatcccgtaagcccaagattccagaccagtctgggccacagagcgagacctcatctctacaaaaaaacttaaaaatcagccaggtgtgacaagcatctgtagtcccagctatttgggatgctgagacaagaggattgcttgagtccaggaggtcgagactgcagactgcagtgaggctgtgactccaccactg

SEQ ID NO: 34695 - DNA, 1171 bp, Artificial sequence
  DNA replication origin
cctccagcggggtgtcccagccgctccaaacccagggctgagcgggtgccgggagctgaagccggccacggccgcaggcagtgagctctcggaagcggagctggggagtggaggctttcgagggagatcaccgaagaactcaggctgcgggtgtctcttgaggacagcgctgggctcaggctgtgagaacttgcggggtggcccccggcgctccggctgcagcagcttcctggggagtgagttgaactcgggctctgaggaggtcctggggaggccgcccagctcgggctgcgggggcttcttggagagcgctttgaattcggccggccgcggcctcttgggaagcacgctgacttcgggctctgaggaggtcctggtgaggtccccaagctcaggctgcggaggcttcttgggaaagtcactcagcggaggctgggaggcctttttgggaaaggcgctggagtcgcgcttcggctcgctggactgaggcttccagaggggagtctgagcggcctcgctgaactcaggctgcggcacggacttcttagggaggccaccgacctgaggctgcggaggctttttggggtacacgttgaactcaggctgcgcaggcttcttgggaaaggtactcaactcaggctgcggggacctcggggtagcctcaccggcctcgggttgccagagcttcctggggaatgcgccggatttgggttcggaggggggtctggcggggtgactgagttcgtcgggctgcaggggtttccgggccggcgcaccaggctccggcagcgaggccttcaaaggggcctcaccgacctcaggctgcaggggcttccttggaaacggagtggcccccagctgtgggaacttcttggagaggtcactcaactccagtttggacggcttcttggggaggtcagtgacctcaggcggcgggggcttcttggggaggtcagtgacctcaggcggcgggggcttcttggggaggtcagtgacctcaggcggcgggggcttcttggggaggtcagtgacctcaggcggcgggggcttcaaggacactgcaccaaactcaggcagcggggccttcttggggtgctcgcttagctcaggctgggagaacttcttcagtttaccaaactcaggcttcggaggttttttgggcaggtcgctg

SEQ ID NO: 34696 - DNA, 704 bp, Artificial sequence
  DNA replication origin
tcagggtgcagggaggagaaggtggctgggtagggaggctggttcgcccaggcttttatgaggcatttagcttgaactgtggggacatgaggaagcattgccgagttttgagcagagggacacaaacagactcagggttcaacaggcttctccctccagctgccatggggggaactgaccagggaagggggtaggcagaggcccagggaagggcttgttagagtaatccaggcaattggttgggggagggcagacactgcctcccactacctcctggggtgacagtggtgaaggcagtgagaagtggttggattccggatgtgttttgaaattagcacagaagggactgggggcctgggcgcggcggctcaagcctgtaatcccagctactggggaggccgaggtcgggggaatcattggagcccaggagttgcaagctgcagtgagctatgattgcaccactgctctccagcctgggcaatggaacgagactggagacatgcagtgggaggggtgaaagaatgagggggtcaaggatgctgggggggtggggtaccacccatggggggagggcagtgggactggaggctgcaggagggatgtcgggatctccagtgctgctagaggaggttgggtgtggaatcagcactaaatggagaagtagggaggggtgtcggtcccaggatcctaggatccatgggggc

SEQ ID NO: 34697 - DNA, 1201 bp, Artificial sequence
  DNA replication origin
atacgtaggggtgggtacgatggagaaaatcatgcatgctgaatgcagggcagtagtgggatggggtgatccatttaaaatagggtggtctaggccaggcgtgatggctcatgcactttgggaggccgaggtgggtggatcacttgaggtcaggagttcgagaccagcctggccaacatggtaaaaccctgtttccattaaaaatacaaaaaaaattagccaggcgtcgtggcagacacctgtgatcccagctactcaggaggctgagaatcgcttgaacccaggaggcggaggttgcagtatggcgagattccaccactgcattccaacctgggtgacagagtgagactccgtctcaaaaaaaaaaaaaaaaaagaaagaaagaaaaatagggtggtctaggttgggcacggtggctcacacctgtaatcccagcactttgggaggctgaggcgggtggagggtggatcacctgaggtcgtgagtttgagaccagcctggccaacgtggtgaaaccctgtctctagttaaaatacaaaaattagccaggtgtggtggcgagtgcctgtaatcccagctacttgggcggctgaggcacgagaatcatttgaacctgggaagtggagattgcagtgagccgagatcgcgccattgcactccagtctgggtgacagagcaagactccatctcaaaaaataaaaataaacaaatagggtggccttggatggcctctctaataagaaaatatgagaacagaggctgggaggaggaaaaggagagacccaggtggtgcagagacatgtcctgggtcagggacagggcagaggccccgaggtcggagggaagtgttcagggtgcagggaggagaaggtggctgggtagggaggctggttcgcccaggcttttatgaggcatttagcttgaactgtggggacatgaggaagcattgccgagttttgagcagagggacacaaacagactcagggttcaacaggcttctccctccagctgccatggggggaactgaccagggaagggggtaggcagaggcccagggaagggcttgttagagtaatccaggcaattggttgggggagggcagacactgcctcccactacctcctggggtgacagtggtgaaggcagtgagaagtggttggattccggatgtgttttgaaattagcacagaagggactgggg

SEQ ID NO: 34698 - DNA, 1448 bp, Artificial sequence
  DNA replication origin
tccgtaggggctcccggcagggttccgcgcggcgcggctgcagacagggacagatagggttaccggaatcccggagaagggagcccggaccaggggagtgagagttcgttagggcgcgccttggggaatctgcggggtcggaaacgcgaacaacggtgtgcagggggaggagcccggggagcacgtgggcggcggatcccagggccgcagggcgccctccacctccccgctcctggcccgcaatgagggtaaccggaccggcacctgcaagtgacagctggggctggacaaatgccgggcacgggcctctggccggcctcagagctgttcagcgcgagcccgcggcttccagccaacctgcccgctatccccactgctctcccggctttcattcccccgagtctgagattcctgggcgccccctgctgggcggagccggggcccaagagggctgggctcctgtgcatgggggttgggggccggcttgagggtaggaggtcgtttctgcagtggacagggtgaacggtggaggacaggtggtgagccagctccccaggcctcgcggcagtcagttcactccagagggtagtgtggtggccgtgggcccgctgtacacacaggaagggctgtcccatctccgtgggtgatggggtaggggagaggtccctggacggacgtgttggctctaggtttctctggaaagatactgacagactgggaagaggcgtggcctagatctgggggtggccgaataaagaaactgatggggacaaagactcctgggggcccccgggaccctggagaggggttaggggcctgggggacagagaacacagcgctgtccctggagatgggggagaggcttggactacagccagatctagggacctgcagaatgcgggaacaggggcgtgtcctctggacctgctggcagggttttctcttctcgtggtaaccgtgcgcagctcccaagatggtgcagaatcagtgccgctgactgggaactggggctggctagaggcctcctagcctcaccttctctatatatctgtaaaatgggccccttcaccctgtcccaccctcctccccaggtcgagagagtcccaggcagccatgggctcgggacgtgaagttctcagcagacatttcccaagcccctcctctccctgcagcctctcttttcatcctcgcgtccaccccaaaggactcaccagtcatcatgacacccttttaaggacgagggaattgggaggcagggaagtcgactcttttccagggtcccacagtggtggtttcaaggcttctggctgagaagggggagcttagggggcctcctgatggcctgtcctaccccatcctgacaaccacctcagctggggcctacaggttctgggagagtggacacccagcccaagccacgtcagctgaggctgctgccccgtcacatc

SEQ ID NO: 34699 - DNA, 878 bp, Artificial sequence
  DNA replication origin
gtccatctttgaggtgacatggcactgagcaggtgtggggcaggtggcccttggcttgtctacctggatggctttgactcagagcctgaggtggacacgttggtggatgaaaagtccaaggaagataggtgcggtggatcacgcctgtaatcccagcactttgggaggccgaggcgggcggatcatgaggtcaagagttcgagaccagcctcgccaacatgctgaaaccccatctctactaaaaatacaaaaaattagccaggcatggtggagggcacctgtaatcccagctacttgggaggctcaggcaggagaatggtgtgaacctgggaggcggaggctgcagtgagctgagatggtgccactgcactccagcctgggtgacagtgcgagactccatcttccaaaaaaaaaaaaaaaaaaaaaatctgaggaagacaacaaggagggtggcggggggcaaggagaaggtgggagggcagtgacggaggagtggggtctgggggccccgcccaggggttactggtgtctcggctgcagataccaggatgaggaggtgagggggaaccccgaagtggattcagagaatggagaaaggaggaggaggtaaggattgagacaaggtggactgcgtgaaggaggtccctgggttcttgctcacaggatgtctgtatatccaggaggatgagggagacagtgagtgttgttctgggaggggaccgagaggttcaaggtagggccttgtgggctactgggagaacaggatcttcatccagagggccatgggaagccactgaagggtgccgggcaggagaggggaacaatcagaagagaccctggcagggcgtggtggctcacacttgtaatcccagtacttt

SEQ ID NO: 34700 - DNA, 1568 bp, Artificial sequence
  DNA replication origin
ctactgggagaacaggatcttcatccagagggccatgggaagccactgaagggtgccgggcaggagaggggaacaatcagaagagaccctggcagggcgtggtggctcacacttgtaatcccagtactttgggaggccaaggtgggtcgatcacctgaggtcaggagttcgagaccagcctgaccaacatgttgaaacctcatcgctactaaaaatacaaaaagttagccggggtggtggcaggcgcctgtaatcccagctacttggaggctgaggcaggagaatcatgtgaacccagaaggcggaggttgcagtgagagctgagagtgtaccattgcactccagcctggcactgccattgcactccggcgagactctgtctccaaaaaaaaaaaaataaataaaataaaaagaggaagaagagactgttttctgttttcagtcttggggtaagggcaggttggggagagtagggggtgggctaggggaccctggggctggcgagatgaggatagaagggagagggatcatggaggtaaaaccagcttccaagggatggctgtggatatcacctgggacttccatacctgggaggctggcttcaggggtgaggagaaagaccaggccatggagggctggccttgacccaccccactcctcagagctgggacatggtggaaattggtctggcagacagcaaggaggatgaagacctgagtccccagcctgcctccccaatcccaaaggattcttccccttaagtcagtatggggttcagggtctgggggtcttcaggccatcctggccagtccctgcactttctcaggaccagccttccagcctgtccccgaagctcctgggattttttctttttttgtctcccaggctggggttgcaatggtgtgatgatggctcactgcagccttgaactgctgtgctcgtgatcctcctgcctcagcctcccaggtagccaccacggctatttttttttttttttttttttaagacagagtttcactctatcacccaggctggagtgcagggtcttgatctcggctcactgcaacctccatcccaccgggttcaagcgattctcctgcctcaggctcccgagtagctgggattataggtgcccaccaccatgcccgactaattttcatatttttagtagagatggggtttcaccatgttggccaggctagtctccaactcctgacctcaagtgatccacccacttcggcctcccaaagtgctaggattacaagcatgagccaccatgcccagccatgcctgattattttttgtattttttttggtgggcggggaggtagagatgcgatcttgctaggttgcccaagctggtctcgaactcctggcctgaggcgcccctcctgcctcagcttcctaaagcactgagactgcagacattagtcacctctcctggttacgggattgctttttaattttctttatttttgagatggagttccactcgtattgcccagactggagtgcaatagcacaatctcagctcactgcaacttccacctcccaggttcaagtgattc

SEQ ID NO: 34701 - DNA, 1322 bp, Artificial sequence
  DNA replication origin
gttcccgtataaaccttgcgcccctttcaccgttcacctcggagcgggcttctccccaacagtgaatctggggatgatagtaggggacgcggagaagccaagttgggtgcccccaactctaggggcagacagacccgggagaaactgaactaggcgcccggaagctgatggggggcgggaaaaagtcccacccaccctcgccggcgtcctccatccttggcgcacgggtcttctgggctgggggagcccgggactgacggggtcccgcctgcccgcagggcacgcggccccgagccgcatcgtgtgggagcacacacgcggccgctactcgtgcatgcagtgcgccttctccacggcctcgcggcccgccatgaccctgcacctggaggaccaccgccccggcgcccccgcggcccccgcggccgggccgccgcgccccgacgcccccgcgggtaaggccgaggaatgcgcgggtggagaggggggcgggggcccaaggcgctgaggctcaggcgcccccctcctctgccccacccagatccggccccgcttgcacccaaggtgtcgccgctgctgtcagagggggagcttccagtgttctcgcagctctgaatcccgccgctttgggggtgggccatgggatgtgggtagttttgtcatttggagggggctgcagggaaggggggctggggtggacaataaagaaggcgccatgagccagcctatgctgtgttcccatcccttgtccatccaaagcatagtgggctcgagcccagcagtcatggattgatcacatcttgggaggaccacctgggtccacaggtgcaggcctcacagcccacctgtgtcctgtcttcccatcaccccaatcctgggacccaggtccccacctccagctgtggttgaggtccccagtacccactgtggcagcgttctcccttgtccagaaaccaaatgggatggggactctccagttttctttttttttttttttctttttttttttttcttttttgagacagtcttgctctgtctcccaggccggagtgcagtggcacaatctcctctcactgcaagctccacctcctgggttcacgccattctcctgcttcagcctcccaagtagctgggattacaggtgcccaccactatgcccggctaattttttgtatttttaatagagatggagtttcaccgcgttagccaggatggtctcgatctcctgacctcatgatccgcccgccttagactcccaaagtgctggaattacaggcgtgagccaccacgcccggtctccagttttcttttaagaagtcccggcc

SEQ ID NO: 34702 - DNA, 1214 bp, Artificial sequence
  DNA replication origin
taggctggctcatggcgccttctttattgtccaccccagccccccttccctgcagccccctccaaatgacaaaactacccacatcccatggcccacccccaaagcggcgggattcagagctgcgagaacactggaagctccccctctgacagcagcggcgacaccttgggtgcaagcggggccggatctgggtggggcagaggaggggggcgcctgagcctcagcgccttgggcccccgcccccctctccacccgcgcattcctcggccttacccgcgggggcgtcggggcgcggcggcccggccgcgggggccgcgggggcgccggggcggtggtcctccaggtgcagggtcatggcgggccgcgaggccgtggagaaggcgcactgcatgcacgagtagcggccgcgtgtgtgctcccacacgatgcggctcggggccgcgtgccctgcgggcaggcgggaccccgtcagtcccgggctcccccagcccagaagacccgtgcgccaaggatggaggacgccggcgagggtgggtgggactttttcccgccccccatcagcttccgggcgcctagttcagtttctcccgggtctgtctgcccctagagttgggggcacccaacttggcttctccgcgtcccctactatcatccccagattcactgttggggagaagcccgctccgaggtgaacggtgaaaggggcgcaaggtttatacgggaacgccggcgcagatgaaggcgcaggtgccagtcatttttaaggcaaaaatcctgtatttcgggacggtggcatttgtgccccctgggaaggggatgagcactgctgcctcctggtatccaccagaccccgcagggcgcaggaaagaaagcccctccacccctccctggtggtcacctgcacgcacctgagggcgcgtcggagccgccctggggtcttcgggggctgctgccagcacctgcggtaaaggggcgggtcaagttcagagtcagggcgagcccagccagccctcctggaggcccccgaccccacactcaccttggctctttttccagacggcggcgctggaagccggcggcccgggtgcagcggccaggaaggggcgcaggcgcggggggcttaggccaaagggcgcagggttcaagtagggcaggaacggtccggtgggggcaggggcgggggtcgtgaagggttccagcagcgggaacggcag

SEQ ID NO: 34703 - DNA, 1718 bp, Artificial sequence
  DNA replication origin
tttcgggacggtggcatttgtgccccctgggaaggggatgagcactgctgcctcctggtatccaccagaccccgcagggcgcaggaaagaaagcccctccacccctccctggtggtcacctgcacgcacctgagggcgcgtcggagccgccctggggtcttcgggggctgctgccagcacctgcggtaaaggggcgggtcaagttcagagtcagggcgagcccagccagccctcctggaggcccccgaccccacactcaccttggctctttttccagacggcggcgctggaagccggcggcccgggtgcagcggccaggaaggggcgcaggcgcggggggcttaggccaaagggcgcagggttcaagtagggcaggaacggtccggtgggggcaggggcgggggtcgtgaagggttccagcagcgggaacggcaggcccggcgctgatgcggggtcaacctccggggggcgctccggcgcgggcggctctcggtccagggccgggggtggcggcggggctgggctctgcgcatgctccgcgcaaacatgcaggtgcttgaagagcgagcggtgcgtgcggaagcgcaggaggcagttctcacacctggaggtgggcagagggctgggctgggctgggcctccaggggcaccagggagagtgtcctgtgcaatgccacccgcccttcgagcgtgggaacggagcctgggcactaatcacctccccgctcctgtacaactgtggcagcgacccttcctgaccacttcgggtgggaacctggggaaacccggaaagaagtctcaattttaagttaggcggccggttttccacttgggaggtaaagcctggctgggtggggccacgcccacgtatgccccgccccatccagggagttgagggcggggcttccccaaaggcccacccacatcaagtcccgccctccaacaccctgaccaggaagggaggaaggcctggagcccacacatagggtgaggctagggcagggcggagctcaagaggtcagggtctcacttgaagtagcgattgggtttgtagtgcagtttgctgtgagccaccagctcctgcatgctggggaaggtctcggtgcagctcagggctgagcagcggaagagcttgcctggtagggatgaaggacagagaagtggagacaggtggccaaggctggctccgaggggctccgcctgtttcccaccctaacctgcctccccattaccagtcctggccctaccttccagggactgtgtgggcgggcagtgggttcgcagatgctgtgccaggtcacggacgctgggaaaactgaggcagcagccagggctggagcaagggatttgcttccctgcaggacgcacagaacagtggtcactggtcccttcctcactagtgctgtccctgaccccagggttctgccccagagaagcaaatatgatgtgctggggcctttactctctgcctaccacaacagactggtctgccacagtgcaggggctggactggccaggctcaccattggagccacagcctggcatccaccggctgctccgtaaaatgatgagtggcatccctctagaaaggccctgaggttagagattctctacgtctcgcttctattgtttcagggactgtgattccccagaagaccccatcacagatcacctggaggtgggcgtcgtctgggaggccgcaggtcctcgctggtccc

SEQ ID NO: 34704 - DNA, 1234 bp, Artificial sequence
  DNA replication origin
gcaagggatttgcttccctgcaggacgcacagaacagtggtcactggtcccttcctcactagtgctgtccctgaccccagggttctgccccagagaagcaaatatgatgtgctggggcctttactctctgcctaccacaacagactggtctgccacagtgcaggggctggactggccaggctcaccattggagccacagcctggcatccaccggctgctccgtaaaatgatgagtggcatccctctagaaaggccctgaggttagagattctctacgtctcgcttctattgtttcagggactgtgattccccagaagaccccatcacagatcacctggaggtgggcgtcgtctgggaggccgcaggtcctcgctggtcccggagactatgctggtcaggccagggctgggtccggggccaggctggcagctgtctggggctggggaggagccctgctgcatccctccagcccctccacgttcccacactggcggtgtggctgcctgctcagggcctggctcctccgacatggaggaggaaggggctgcagctggcacagccggggacaacacctccttgtcggtctcactggagctgggctctgcagtggccagcatgtctgggatgggccctgagggtttctcctcctggtggaaggaagaggcggagagaacccttctgggctctgggtcaacccagtcggcccccatcctaaggaatcaccagcaggagaggataggggaatacgtaagggtggactaagctctttttttctttttataaagatggggtctcgccatgttgccctcactggtcttgaacccctggtctcaagtgatcctcctgcctcagcctcccaaagtgctgggattagagtcgtcagccactgcactggcccggattgagctccttatgcatacgggagaaacatctgctctcctcaactaggataggtgggagccccagtatgcacacaagcgtggcctagagggagtgggcggggccaaggctacggaggcggggctatgggcaggcatggactgggaagatgctagaggagctagacatggattgtctgaggaccgagaccggccggcctcgagcagtgtggacaatcttggaggtgctgggggcccggatgtaagaagtttaggggcggagtcctagcctgacgggcgtggtccattccgggccgggcccggaagtagggcgctctccgagtgacagccagcgg

SEQ ID NO: 34705 - DNA, 1674 bp, Artificial sequence
  DNA replication origin
gggcagctccaggaggtgggcagggggtaggggagtgtctggggctgtgactcaaaccccctgtgcccacagcatgcagaggaagcgcagcgtggggcaacggccagtgcctggtgtgggccgacccaagccccagcctcggacacatggtcccaggtgccgggccctataccagtacgtgggccaagatgtggacgagctgagcttcaacgtgaacgaggtcattgagatcctcatggaaggtgtgtgtaccagggcagaagctggggtgaggggagtggtaagaaccctgacatcggccgggcgcggtggctcacgcctgtaatcccagcattttgggaggccaaggcgggcagatcacgaggtcaggagatcgagaccatcctggctaacacagtgaaaccccgtctctactaaaaatacaaaaaattagccgggcgtggtggcgggcgcctgtagtcccagctactcgggaggctgaggcaggagaatggcatgaacccgggaggcggagcttgcagtgagccgagattgcgccaacacactccagcctgggcgatagagcgagactccgtctcaaaaaaaaaaaaaaaaagaaccctgactgacattgccaggcagaccccaccactgcacaccctccccacgggagaacagagataacagatgggcgaggtggctcatacctgtaatcccagcactttcagtggctgaggcaggaggatcacttgaggtcaggagtttgagacaagcctgggcaacctagcaagaccccatctctacaaaagatttacaaaaaaaaaacttttaaagagtagaaatggccggatgcagtggctcacacctgtaattccagcactttgggaggctgaggcaggaggatggcttaagcctaggagtttaagaccagcctggacaacatagggagtccccatgaacaagatggacagaccaggcatgagagctttctccagggccagctaggggcacctcaagctttcctctctcccacagatccctcgggctggtggaagggccggcttcacggccaggagggccttttcccaggaaactacgtggagaagatctgagctgggccctgggatactgccttctctttcgcccgcctatctgcctgccggcctggtggggagccaggccctgccaatgagagcctcgtttacctgggctgcaatagcctaaaagtccagtcctttggcctccagtcctgcccaggccctgggtcaccaggtcactgctgcagcccccgcccctgggccctggtcttcctccaacatcacacctgctgcccattctccatttctgtgtgtgtcaaaggggactaacagcagaatctacctcccaactgccatgtgattaagaaatgggtcttgagtcctgtgctgttggcaaagtgccaggcacagttggggaggggggggtccttaacaagcgtgactttgctcattctgtcatcactaaggcaataaacctttgccaggtgaaagcacgagttaacttactaagtgcccaacaaggacgatgttttcacagccctgtgaggtaggagctgtgaaggaccccatcttacaggtggaacaatggaggttcagagaggttcactgacccaagactgcacagagccatgccttgcattcatatgtgaccataaag

SEQ ID NO: 34706 - DNA, 1285 bp, Artificial sequence
  DNA replication origin
taaaaaaaccacaaaactcaaaagtctctctctctctctctgtagacactccccttcctggccttcgtccactcttaaccagcctcgctggccccgccccctctgccctagttccgcgcagactcactggagctcttgggcagcccatcgcccacgctgaccgtgagggtccgaccgccaaccttgagcactgccaagtcgccgaagccgcgggagaaggtgacgctgcgggtgccgccaccgccccagccctccttcttcacccgaaactgtagtctatggggagagaagaaagcttgggggcgctggctgaggtcccccgccccacccaactctcgctggttggggcaggggcggggccgcggccggggccgaagcgcagttcggccgggtcggtggggcgggagagggtgcgccgcgccgagaccaccccgagatggtgctggggttggcggggccgtacgtgtcgctgaaggtgaggggcaggggcctccgcgtcgcctcctcgaagcgcttgcacagaaggctgacaaactcggtcttgaagacgctctccaggaagctgtcggcggcatcctcttggaggatgaagaagtcgtcctgtcgcgtgctggggaggggcgggtgagagcgtcaggtgggacacaggtgagggcgacaggtgagagagacagatgaaggtggctgaaggtggatttagggaagggtcagctaagggccaagtcagcggtgaccaggtaggagaaaaagggggatgtggcaaggagtggaagaggtggttacagaagagggccaggtgaggtctagtaagagggtaaggtgcaggacggaaggatttggcatctaaggatcatgagcatagggggcaggtgaacatgacaggtggggccaacagagggctacaggcatggcaccaggtaagattgtcagggtaacagacggggtcactagaatgagggcagccaggggacaggtgagagtgactgtgcggcaggtaaggacctggcttcacctgagggagactccccgcagagcctggatgtccactttcttcttcaagacttcacacacctggcccttctcaggtcccttcttcactttctctcgcccaatcacatacacacacttgggcgtcaggatcaagtcccgcttgatgggctgtggggatgcaggattagaggctgatgcctgtagcctggccagcctggccacagaggatccaccccaggcagaggggtggtgctggcaggtcaggtgaggaaggtgggagccctccaggtgaagg

SEQ ID NO: 34707 - DNA, 1421 bp, Artificial sequence
  DNA replication origin
gtgtatctgaactctatgagtttgtacaggaaggcaggtgagggtgtacctggtagaagggtgaatgtgcaagccggttgagctggcctgcggtcagagttctctgggtctagtggggatacctgtctcagtgaaaacatttaaggtgatggtatacaggtcacctgagagggcatacctgccacacagacctgtccaaagcaggtgggtggatcaggtgaaggtacccaataatgtgtgtctggtatgtgaagttgtacagatcatgtgaggaggcacctgccacataaacttgtccaaggtaggtgagggtgtccaggccatatgagactatccatccaggtaaagatggtatataggtgatctcagtgtgtacctgccacacataggcctctctaaggtgagggtagggtgagttactgggctaggtgactctctgggacatgagatatgggtcaagtgagtgtgtacctggcccgcccaggtacaggtgacggtaaacaggccaagtctgggtgtacctgtggacaggagagtccaggctaggtgattagagtacacgtaggttcagggctgtctggggcagaagaggatgtgtctgttggtggaggtgcccagctgtctatgccaagcatgaatgcacgggtcaggtgatgtatccctgtagagagcatgtacctatggactaggctgcctgggccaggtgagagtgtacctgtggacaggtgtgtctgggccaggtgaaggtatatctaatttccaggttgaaggtagagtgtacctaatggatgggtgtgtctaggataggcaagggtggcctcgtggttggggcttctagacaaggtgaatgaatgtgtgattgttgagagatgcatctggccaggtgagggtgtatctgacaggtgtgtctgggctacaagtgcatgtttgatggacagctgtgtctgctatacttgagtgtatacctgtgggcaggtgtgtctgtgccgggtaatgatgtacctgtgatggaacagattgatctaggctgggggatagatacctgtgggcaggtgtgcctgggctaggtgaggatatacctgtgatggaacagatggatctaggctgggggatagatacctatggacaggtgtgtctgtgccaggtgagggtatacctgtgatggaacagatggatctaggctgggggatctatgcctgtgggcaggtgcatatgggccaggtgagggtgtacctgtgatggaacagatggatctaggctgggggatatctggctgtgggcaggtgcatctgggccaggtgagggtgccaggctgtagtcagggtcttgctgtgcccacccactagtgcctcaccttgaagcggcggtcgtacttggtgaccgaatcggcgaagtccacccgctccctcttgcccaggaac

SEQ ID NO: 34708 - DNA, 1316 bp, Artificial sequence
  DNA replication origin
tctctctcagtccctctctatacctttctctctcttcccctctccttctctgcctgtccctcaaacacactcaccgactctgggttcttgacaaagaccttggtgctccccatctggtactggtcgggctccatgttgaccgcccgaagcaggtgctggacgccctggcgttcgtccccacgccaccgcggccacgtctcgggggtcagaatggcatacctgagggcggagggctggggtgtgggagtgctcatagcagacaggcctggctgggcgttctgatgaaggggatggcgagggcgggggtggagggctcctcacctctgcaggaatttggcgaactggcggcggtaggcgaagccggctctgcgcaccctgatgttctccttcaggcccaggtattccacctggtgcttgactctggtggggagggtaggctgagtcccctcggggtggggagtcaccagtcctgggggtgggtgggaggtgctggaggtgggggacctggggggatctggattcatgctgagggaagtttggggggtgagttctgtggtctgggggggcttcgggggtcagcctggggactggggggagggatcttgtcctgatggtcccttctggggtcagttctgcaggtgggggattgtgggaggggctgtgctagtccctgggtcatcctacaggaggtcagggaggtgtctcggtcagttctaggggtaactgcagggcctggggggaatgaatcttggattggttgggggggatcacctgttctcctcccagtctcggggcctcttggtctcgttgggtttgatgcagcggatgtagtggggtgtgcacctcatcagtgtggccaccaggtcgttggcttgtttctgaggcagaagtgaagacgggtgggtggggggcacagagatgggaccctctggcccctcttttttccaccctggatacagtcccaatagacagagactgggggtgggtgagggctggtaacagataagccacaggggccagatgtccctggtctgtgtgcacctccactagtgcacaccacactagtgggactgatgtggggtgtctgcctgaccctggaacccaagacaaggagctctcacgtctaccgcactcaccacttaccttggcacatagtaagtgctcagtaaatgtttgttgactgagtaacagagcccttatgagagcatttctttttgtcctttggggagataggtaccttgggtgtttgttttttttgttttgttctgttttattttgttttgagatggaattttgctctgtcacccaggctggag

SEQ ID NO: 34709 - DNA, 3964 bp, Artificial sequence
  DNA replication origin
ttgcccaggctggtcttaaacttgggacctccagtgatccttctggctagggagattctgcactggaaacaaggcccaaggatgctcaggttgctggtctaagaaccacatgtcaaacactttaaggatccccgtcttattactttacatctaatgctatgttctttgtgtgtgtgtgtgtgtgtgtgtttttttttttttttttttttgagacagaatctccctctgtcgcccaggctggagtgcagtggcacaatcttggctcattgcaacctctgcctcctgggttcaagagattcttatgcttccacctcctgagtagctggaattacaggtgcgcgccaccacgcctaggtaatttttataattttagtagagacaaggttttgccatgttgcccaggctggtctcaaactcttggcctcaagagatttgtccacttcggcctcccaaagtgctgggattacaggcgtgagccactgcgcccggcctctggagttactttttacatcagaactagtccatagaaacaccatcctggccgcacagccactcccctcgagtttgtggcgagatggcagttctgggtaagatggagtggggcccggtcctccctccatccccttggggggttgtagccggaggtccccatgcctgggaccactcactgctcactggtctgcatcagctctatgaggtcggagaagagaacgtctcggttcctctcgcagaagccgctgacgtcgtaggagacctggaggggacagtgctgaggacagtgagggactgagaaacctggctgggagggtgggcgtggggtgcttacagcccaggtggtcaaggctttcctggggcctgctgtggggtgagaggatcaggcagtgtctacagcgctggctggggggtatctacagttcagaataggggatggggggcgggcttcctggagagctgatgttcaagttgaggttagaggatcgtggctgtatcccaggtcagaggtaaggggaggtgggggttacaacctagatgagccaggagagagctgcagcttgcatcagaggccggggggcggtgaaagttatagctcagattggtgggtggggggctgcagcctggcgggggggtccctgggagtcagaggtcagattggatatctgtgacctggtcaatcaggggccagtgcagggggcctgtgtcaggagggtaacagccctgtctcagggatctctgggggcatttcagccagggttgggggctggagctgctaccaaaggttagggccctctgtagttctgagcagggcttttgcaaccctggctgagggaacatgggagctccagccgtttttgtttttgtttgtttgcttttttttttttttgagaaagagtcttgctctatcacccaggctggagtgcaatgacacgatctcagctcactgcaacctccgccttccgggatcaagtgattctcctgtctcagcctcccgatgagctgggattacaggcgtgtgccaccacacctggctgatttttttttttatttttaatagagacggggtttcaatatgttagccaggatggtctcgatctcctgaccttgtgatccgcccgcctcagcctcccaaagtgctgggattataggcgtgagccactgcacccggccctgtttgcttttgttttgtgagatggagtcttgctctgttgctcaggctggagtgctgtggcacaatcttggcttactgcaacctccacctcttggattcaagtgattctcctgcctcagcctcctgagtagctgggattacaggtgcccacgaccacgcccggctgatttttgtatttttagtagagactgggtttcaccatgttggccaggctggtcttgaactcctgacctcaggtgatccacccgcctcagcctcccaaagtgctgggattacaggcgtgagccaccactcccagcctctccagcccattttaggggcactcctaggaacttctgctctcatgttgtgagatccttggatcactgcctgagagtgtagtcctgtcttttggggagtggggctgcgggcatggttagagtccagtggatttctgtagccttcggtaggggtctgtaggaggcttcagcacattttgaaggctggtggctcacaggaggggcctgggggctttggggatttcctctccaaattgggatcagaaggtggggggctgtgtcctagtcagggggttatgactcacattggggcttatctgaacataggcagtctggtacccaagctggtgttaatcggggggaattctgttccctctgttaggggagttgatgtgtaagggaagctgtggcctggatcagaggtcagggtttctgcagccctggcccagggaacacggtggtggtggtggtgctggtggtggtggtggtggtgctggtggtggtggtggtggtggtggtggtggtgctggtggtggtggtggtgctggtggtgctggtggtgctggtggtggtggtggtggtggtgctggtggtgctggtggtgctggtggtggtggtgctggtggtgctggtggtggtggtggtggtggtggtggtggtggtggtggtggtggtgctggtggtgctggtggtgctggtggtggtggtggtggtgctggtggtggtggtggtggtggtggtggtggtggtggtggtgctggtggtgctggtggtggtggtggtggtggtgctggtgctggtgctggtggtggtgctggtggtggcggtggcggtggcggtggcggtggcggtggcggtgctggtggtggtggtggtggtggtggtggtgtccagacaagtttggggcttagagagttcctggggggtcagccggaagggtctgtagttctggttagtagggggtggattgaggcgggggacagtggaattctacagccctggataagggtcctagcaggctctttccagcctgggtgctggagggtgggggctacagcctggagccctgggggtctgcgaggaggcacagggtagggtaggggcagggggcgcaccttgccagcgtagtggtggatgacgaagccggcgctccagctgttgaaatgctcgtgggtccccacagccgcctgcagcttctgcagcagtgtctggtctgctcccccgcccgtggcgtgcatggtggcgcacacgtcgtccaagacgctcatgatgcctggggggctctgcggggcgagcgggagccagcagcggctcagtttggtctgccttgcctccccacagctcgtcagtgcagagattaggggagggagggggtggaggagtggagggagctagagctttgggggtggggagggcaccaggggcttcaaatacaagcacaaaaggcgttgcaggggtcagggatggaagggataggggggcaagggtgtgtggggctactgtggaagctcgctgaggtgcagaagtgggtggggacccctcaagagattcaggccccagactagaatcccttggtagggggacctgccttatgtatttatttatttatttagagacggagtcttgctctcttgcccaggctggagagcagtggcgtgatctcagctcactgcagcctccatctcccaggttcgagtgattctcctgcttcagcctcctgagtagctgggattacaggcatgccgccaccatgcccggctaatttttgtattttttagtagagatggggtttcaccatgttggccaggctggtttcgaactcttggcctcaggtgatccacctgccttggcctcccaaagtgctgggattacaggcatgagccaccatgtcccgcctaaatacgtcttaaatttaattttttttgagacagggtcttgttctgttcctcaggctggagtgtggtggtgcaatcatagctcactgcacccttgacttcctgggctcaagtgatcctcccac

SEQ ID NO: 34710 - DNA, 1091 bp, Artificial sequence
  DNA replication origin
gggatttaaaggaggcctaattaggtgtttttataagaagtgggtgctggccgggcatggcggctcatgcctataatcccagcactttgggaggccaaggtggatggatcacttgaggtcaggagttcgagaccagcctggccaacatggtgaaaccccgtctctactaaaaatacaaaaattagccaggcgtggtgtcaggcgcctgtaatcccagctacttgggaggctgaggcaggagaatcgcttgaacccaggaggcagaggttgcagtgagccaagatcatgccattgcacttcagcctgggcgacaggagtgaaaccctgtcttgaaaacaacaaaaaaagaaggaggtgctgactgggatgcactgagagtccctggggtgcgtcaggagatgacagaatcctggggagcagtggcatggaggggttgaagttgacacccaccacagactggctgagtaggaactgccagggaagtcagaggcaaaacccggaccaggcaggggaggcccagatgggacgagggtgggttaggagccatcgactcaaccctgaagagcgtctgagctcactggagactaagaggggccccagggtcagaagcaggattgggaggctaggaggtatagacaggaatgaggatctggctgagaaggggaagagggagagaggctgtgggggagaagtggggtcaggggagcccgtgtttcctgttttttttttgttgttgttttgagacagagtctcgctctgtcacccaggctggagtgcagtggtatgatttcggctcactgcaacctccgcctcccgggttcaagtgattctcctgcctcagcctcccaagtaactggaattacaggcgcctgccaccaagccaggctgatttttgtgtttttagtagagacaggatttcaccacgttggacacgctcatctcgaactcccaacctcaggtgatccgcccacctcagcctcccactgtgctgggattacaggcatgagccactgtgtccggccagagacagggatttcaccatgttggccaggctggtctgtaactcctgacctcaagttcaagtgatccac

SEQ ID NO: 34711 - DNA, 1436 bp, Artificial sequence
  DNA replication origin
gagggtgtcagggaggtggtgctacccccccccctcccatagcagacacagattcccccccagctcggagtggaggggtagggcagtgctggggggcagggcaccggcagaccacctccccacccctactcttcacagtacatattccgatcaaaggagggggggagtgttggggactccctaagggtgggttcaaagggtgctggggtgaacagctgtcccctccccagacccaccctggagggggggtctcactatgtgaactggaaggggcggatgctgaagaggggctctggggggatagccagcccctctccatccccccagccagggccctgcaggggttcccaataaataacttccggctccgtctcacccttccctcccagttcccgcccccccggggccccctctggccggcccgctgcagggctggcggcggagaccccgccagctgtggctccgggtgccgcgcgccccctagtggccatggcaggttttgcagcacatctggcggaagtaggctcggctgcagaactgaaatttgagcaccagggggcagtaggcgaccttgttcacatccttgcactctgcggggacgggagaaggaaggaaaaatcaggtctcagctgccctccccgcagggctgcacacacgacctgcagtgcttcctggccagtgactttctgtgccttggtttctttctttttaaatttactttttttttttttttttttttttttttttacagatgttatcttgctatgttgaccaggctggtctccacctcttgagctcaagtgatcctctcacctcagcctcctaagtagttgggactacaggtgtgagcaaaccacgcctgacttctgtgccttagtttcctcaactatcaaagggggcttataatagcaccgatgtcactaggctgttttgaggatttaagagagagagtgtagggttgggggccaacacagacacattagtaatgagaaaagggccgggtacagtgtatcatgcctgtaatcccagcactttgggagaccaaggcaggaggactgcttgagcccaggagtttgagaccagcctgggcaacatagtgagagcactgcatctacaaaaactaattaaaagaaaaaaataggctgggcatggtggctcatgcctgtaatctcagcactttgggaggccgaggcaggtggatcacttcaggtcgggagtttgaaaccagcctggccaacgtgatcaaaccccatctctactaaaaatataaaaattagctgggcgtggtggcgggtgcctgtaatcccagctactcgacagcctgaggcaggagaattgcctgaacccgggaggcagaggtttcagtgagccgcgattgcaccactgtactccagcctgggagacagagcgagactctgtcacaaaacaaaacaaaa

SEQ ID NO: 34712 - DNA, 1183 bp, Artificial sequence
  DNA replication origin
actgggatgcccaggtggggtgtccacggagacgcctctgcgcggtctccaggttagctgtcccctcctcacttcgcactggggcagcaccctgagcacgaaacgccccttccaactgcagtgcacccccagctgcgggccgggcctccgccaccgcgtggtcctttgcaagagcgcagaccaccgcgccacgctgcccccggcgcactgctcacccgccgccaagccaccggccaccatgcgctgcaacttgcgccgctgccccccggcccgctgggtggctggcgagtggggtgaggtaggagggcgcgccccagaggggtgggggccagggcaggggctgcggggcagcaactgagtggtgccccctcgcagtgctctgcacagtgcggcgtcgggcagcggcagcgctcggtgcgctgcaccagccacacgggccaggcgtcgcacgagtgcacggaggccctgcggccgcccaccacgcagcagtgtgaggccaagtgcgacagcccaacccccggggacggccctgaaggtatgtgggtgaccagccagggtgcgccaggagggtcctggccagaggcagccacagagggcattgggggtcctgacttcatcctagaacttctggaacctcggaaatgcattgctgtgtctctgccaggccatccttcaccatcccctccctgcaagcatttattaagtgccactgtatgctgagtgtttcaggcacctgacccttctgtgcacccaaacttgtgacatttccccagtcactttcataacctgtacctattcatctccacctgtagcacaatttcctgaatatttttcctttaaatcggtttttcaacctcaggcactagtgacattttgagctagatgattgccgtggggagctgtccagcacattgtagggttttttgtttgtttgtttttcttttttggagagatggggtcttgctgtgttactcaggctggtctccaactcctgggctcaagcgatcctcccacctcagcctcccaaagtgctgggatttgtgccagcctgtaagatgttcagcagcatccccggcttctacccactgggtgccagtagcagccttctcccaagttatgacaactaaaaacgtctccagacattgcccaatgtcccctgggggtcaaaatcgatcacttccct

SEQ ID NO: 34713 - DNA, 2120 bp, Artificial sequence
  DNA replication origin
tcatgatctgcccgcctcagcctcccaatgtgctgggattataggcgtgaccactgtgcccggctacaaaattcttttaattaggcgggtgtggtggtgtacacctgtagttccagctgctcgagaggctgagaggcaggaggatcccttgagcccaggaggtcaaggctgcagtaacctatgatcgcaccactgcactccaacctgggtgacagagtgagatcctgtctgaaaaaaaaaaaaagctggccaggctcataccggtgctcccagcactttgggaggctgaggcaagaggatcacttgagcccaggagtttgagaccagcctgagcaacttaaggagacccccaactctacaaaaaaaaaaaaaaaaaaaaaaaggttttttagttagccaggtgtggtggctcacgcctgtagtcccagctactccagaggctgaggtgggaggatcacctaagcctaggagtctgaggctgtagcaagccaagatcacttcactgcactccagcctgggcaacagagacatcctgtctccaaaaaaaaaaaagaaagaaagaaagaaagaaaaatcctaacccagtcatttcctagctgtaaaacctggtcaagttccttagcttctctgagcctcagttttgtcagccctaaaatggggataatgaaacacctggttcacaagggtggggcaggggtgcagttagatgtgtgtttagcgcagtaatagttagctgttatcctcatgggccggggacaggggaggcaggcaggtgttggggacatgccaagtgggtgacatctgagctctgctgttcagggtacgaggatgtcgtctggattcccaaaggctccgtccacatcttcatccaggatctgaacctctctctcagtcacttgggtgagcagatggtggggaggggatgaggattaggggtcagtggggagggcggtttcagcatgactagaattctgaaccctgcatcgtcccccagccctgaagggagaccaggagtccctgctgctggaggggctgcctgggaccccccagccccaccgtctgcctctagctgggaccacctttcaactgcgacaggggccagaccaggtccagagcctcgaagccctgggaccgattaatgcatctctcatcgtcatggtaacagggagactgggggcaaggtgcagcctttggaattagagactccatgcgatccttccactggctgccgccccctttctccaggtgctggcccggaccgagctgcctgccctccgctaccgcttcaatgcccccatcgcccgtgactcgctgcccccctactcctggcactatgcgccctggaccaagtgctcggcccagtgtgcaggcggtgaggccgggggtgggggaaggcacaagatacctgggctgaggttctctgggccgggaggggctgagcaggcctctcaccctcccctccaggtagccaggtgcaggcggtggagtgccgcaaccagctggacagctccgcggtcgccccccactactgcagtgcccacagcaagctgcccaaaaggcagcgcgcctgcaacacggagccttgccctccagagtgagtgccgccagggggcagtgttgctcagggtgagaggagagtactccctggagtcaagagcgagtgctccaggggggtggggagcagattagtgcagagtcggagtgacagtgggccgagtgctgcagtgatggttctataggagttatgggggagtccaaggtaatagtgcccccaaggtggcggtcaaagctgcatggccctggagtcagaatgatggcgctgcctggtcactcgcattgtccaaagatttatttctccttagggtaatgcacctctctgcccccagtctgggtgcaggctaacgatgccccaagtgtggaatgtggaggtgcctggtgccagtttccatatgaggctgggtgattggaagggtgggggtaggctatagtgccccctgctgttgtgttgggaccccctgccctgcttacttgctcagaccccttcatctcttacagctgggttgtagggaactggtcgctctgcagccgcagctgcgatgcaggcgtgcgcagccgctcgg

SEQ ID NO: 34714 - DNA, 1014 bp, Artificial sequence
  DNA replication origin
gcatgccactatgcctggctaatttttgcattatttatttatttatttatttatttttagacagagtttcgctctcgttgccctagttggagtgcagtgacacaatctcggctcactgcaacctccgcttcctggattcaagtgattctcctgcctcagcctcccaagtagctgggactacaggcgcgtgccaccacgcctggctaattttttgtatttttagtagagacggggtttcaccatgttagccaggctggtctcgaactcctgacctcaggtgattgacccgcctcggcctcccaaagtgctgggattgcaggcatgagccacctcatccggcctaatttttgtatttttagtagagatggggttttgccatgttggccaggatggtctcgaactcctgacctcaggtgatctgcctgcctcagcctcccaaagtgctgggattataggtgtgagccactgcacctggccacatggagtctttcttgagagagaaggtctggaagggatcagggtttatagaaagtgctagcatgtggattctctgaagacctggttccccccagctgggaggctgaaaagtccaaagctctcactgccctctaaaacaccccctccccagtaaacttctcactgctcactgatggttgcaggtcagctgagggcacaagcagaggacagacacctgtcactgggtttggtgagaggaagcttcagctacaactttgggggatgacagaaggcaggggtaggactcttcaggggaagttgggctgtaaagggaggggagagactggatggtagggggttgtgagggccaagcagtgatttcaaggtgggggcttgtagtctaaatgtaggaggaaaagagagctggaaggagccaggtctttaaggaggaggggttggggacgagaaggtggtgggggtcagggagaggagggaagagaggggtggcggctgcaggttccccaggaggcagcaggtgcctggatgaagcactctgat

SEQ ID NO: 34715 - DNA, 848 bp, Artificial sequence
  DNA replication origin
acagtgcagatccctcactgacatcctgttggccaccaccgtctctgtccctgagcctctctcaagcttcatctttggccccagacccactgccttgttcatgtccccccaccacctggtgccctgggctgtgtcacacctcgacaccaccctgtgggctggacccccagctcagacgcctgtgagccttctgcagacccccctcctccccctaccccatacactgtgcacaggtgagtccccttcccctgtcctcaccccctgtgctgggtccttccacaatgtcccaaaccttgtccctcacaccccacctgagcccaaagcacagaagggggtgtgagggttttgggaggagcgcctcacttcagaggacagtgatgaggactgagggtcttagggggaccaggacagacccaaagacactctagacaagaccagagagagcccctgaaggaggaggatggggcaccaggcctggcaatgcaagaacaggagaggagggagggagccagtgggagaaaggggtgaggtccctgcttcacttgcaatgagaatgttcctacctttcaggggtggctcagggcaggagcgggggtcagaggtgcccaaccaggaagggccttgatctgggagttggctgacacttccaaagaaggaatagggaagaagaagcaagaagagagggagagggagaggaggtgggtttttgttggagggggttcattaggaacagaagaaagaagaagtctaagaggaagttctccaggggcagagagagggtcagaatttcctcagtgatccctcaactacagacccagctcagtgctgaagaccagcccggctcctcc

SEQ ID NO: 34716 - DNA, 728 bp, Artificial sequence
  DNA replication origin
acccctgaaaggtaggaacattctcattgcaagtgaagcagggacctcacccctttctcccactggctccctccctcctctcctgttcttgcattgccaggcctggtgccccatcctcctccttcaggggctctctctggtcttgtctagagtgtctttgggtctgtcctggtccccctaagaccctcagtcctcatcactgtcctctgaagtgaggcgctcctcccaaaaccctcacacccccttctgtgctttgggctcaggtggggtgtgagggacaaggtttgggacattgtggaaggacccagcacagggggtgaggacaggggaaggggactcacctgtgcacagtgtatggggtagggggaggaggggggtctgcagaaggctcacaggcgtctgagctgggggtccagcccacagggtggtgtcgaggtgtgacacagcccagggcaccaggtggtggggggacatgaacaaggcagtgggtctggggccaaagatgaagcttgagagaggctcagggacagagacggtggtggccaacaggatgtcagtgagggatctgcactgtggcgtgtgtgtgtgactgcatgtacattacagcatgtatgtgagtgtgtgtgaccctgtgtgtgattgtgagcgtgtgactgcatgtgcattatggcttgtgagtgtgtgtgaccctgtgtgtgtgtgtgtgtgtgtgtgtacccaggcctggc

SEQ ID NO: 34717 - DNA, 1330 bp, Artificial sequence
  DNA replication origin
caattctgcctccatccccatcccccacctgattctttctcccctcccccacccattctccccgccgccactcgatttctcccgcttcgtcccctccccgccccccgcggttccccagccccctcccacgcggcgggggcgctggtcccgggcggggcggcccgagttcccgggtccctggctggggtccagcccgcggcccaggccgggcggcggcaggcgggcggggtttctggccgcgcgcagtttgggggtttttttataaccctggcaggcggctcaggaagtgccttccccgcgccccctcccctggccacgccgccgcgctcgctcgctccctcccttcctgcgcgcgcggggcggcgagacagcggcggcgacggcgcggaggccccgggcgcggcgcaggtagcggcgcgggcggggggcccgggggtgcgtgattcagtgggactttgtgtgtccgcatcgggctgtgagggcgtggggctgtggtgccctggatgggggagggcatcccgctgtgcgactccggtcggtgcctgaggtccgcaagtgcgcgcgccactgatcacgcccggggttgccgtgggtttgtttgcgctgtgtgtgtgtgtgtgtgtgtgtgtccgtccacgtaggggcagagtggttgtgcattacatgtgtgtgtcagtgcctggggatgagtctcttgtgtgtctgtgtgtttggacagtgtgtgcgcataggggtttgctatgtgcgcgcagatctggaggcgagtgtgtgtgtgtctgggtttgtgtgtgtgtccccaagcatgtgtgcgtttgtctctgaccgtgatgagtgtgtaaatacctgtgtgtgtgtgtctggtgtgggggggtgtctaggtctgtgggacttgtgagtttgtctctggtttggtgtgagcatgcaaatgagtgtgtatgtgtcagcgtgtaggcctgtgtgtctgtctccttgggttgtctgtgtatgtatgtgtgtgtttctgtttgtgtaggccccgggtgcgtgtatttgtgtgtccgcgtgtttctctgtcttgtcccgtgtgtgcgcgtgtaaatgagtgtgtgtttacacatgtctgggagtgtgtggttgtgtgtctccatgtgtttgtctccgggtgtgtgagtgtgcactgagcctgtcggcgtgtgtgtctgcggtggaggcgtcctgcgtcttttgtgggtctacagtgcccgagcgccggtctctggttgcgcggggtgtgtgtcgctgccagtgtgtgtttgtgtgtctgggtgtgggagtggcgccgcccacttcccctgagttggtcagtgaggcc

SEQ ID NO: 34718 - DNA, 1544 bp, Artificial sequence
  DNA replication origin
gaacctaggagtgccagaacctaggagcgcctggctcaaagcaaccctgaaattcccagtgcggtctggaaaccacccatccttaagaggagggacaggtgggctgggtgcagtggctcacgcctgtaatccaagcactttgggaggtcaaggtggtcggatcacttgaggtcaggagttcaagactggcctggccaacatggtaaaaccccatctctactaaaaatacaattagccgagcatggtggcaggtgcctgtaaacccagctactcgggaggctggggctggagaattgcttgaacccgggaggcggaggttgcagtgagccaggatcacaccaccacactccagcctgggcaacacagcaagactccatctcaaaaaaaaaaaaaaaaaaaaagtagggacaggtggctggaccagtcactaggctaacagtgggagcctttagtatctacagcaaagaaaggaagccaccacctctttgatggagaaagagggccccataggtagtagaagaacagctaacagaggccagaaatggctgacttagactcgttcctcaaatgggggcccgagaggccctggtgggaaggagggagtgtggggagcaaacaggagggtgggggctgcacctctggtctagcctggagtcccaggaggttggggtaaggtagtgtggtgggaactccaggagtctggtatttatgcagcacctgctgtatgcgtgagtaatgacaggtcattccaagttcaaaaggaaaaattccgagttgggaagctgccctcctggtctcagctgtgtccctggaacccagcacataacaacaaatctttgctgcagaatgaaacccctcctccaccccctactccagccctgggaaggctgttattacccccactgtgtggatgagtaaacccagactcagacaaagccaaggccaaggctctggccagctccctgggggggggcgttcctgggaaatgcctgcaattgtgaggcctgggggtcaccgcccttccctggaaccaggcactgtaccaggcgcctgggattcaaatcccagccctgccccaaccatccaggtcctcctcattcacgcattcgttcattttatggagcgagacccagagtgaccaagaccaagagggctccggttccaacagaattttcactctccccatctctgtggcctcagtttcctcatctgtgaaatgggaccagctgagcctacgtcaccgcaaaggagttaaggcacagagaccaaggccaggcccaggaccgatcaaacccccctgagagctcggagagggcggggccgagctgggacttatttcccgccccgggcaccgtgcctggcacacgggaggcgcccaataaatgcttgtttgagccaggcccagccctcaataaataacagctgttgttgatgccgcagaggctggcgaggaagtgggctctcccctccccaaccccagcatctcatgctcccatcccccctccagccccattccttacccccctccattccttcccgtggcc

SEQ ID NO: 34719 - DNA, 1484 bp, Artificial sequence
  DNA replication origin
cggagcgaaaaccgcccccctccacaaaaccaccccagacaggcacaggaacaagactcctttcaacagcagagcccccagaatactgcaccccaaatccttacaacaactggatcccctcaatagtcaaacgccaaccacagacaacccccaggacaaagaccttcagcacggtgactggacccacctaaccaccagatttacagagccaagctggactcccccacctcccctggagcaggtcccaagaataaggacccctacagccacacaacagccagaccctccctggtgcatgaggcatcatctttggagacctccagaccccccttcagttccctgctacacacacacaggtgttgccacccataggggcccaggattagctgctttgcagaagtgcaaggaggccatgctcttccattcacctagcacaggcctgggcgcagcagggaaacattgggcggcggcagctgtgctgtgtggggagcagggccaggtacgggggctgcacccgtagaagtaaaaaggcaggacaggaggttggagccaggtgggaaaacaagcggggagaaggggagcttcagagagaaggtgggctgcaggagaaggtgggctgcgggagaaggtgggctgcgggagaaggtgggcttcagagagaaggtgggcttcgaggagaaggtgggctgcggaaagaggtgggtttcagagagaaggtgggctgcgggagaaggtgggcttcagggagaaggtgggcttcagggaagaggtgggcttcaggaagaagggggcttcagggaggaggtgcgctgcgggaggaggtgggctgtggggagaaggtgggcttcagagagaagatgggctgcgtggagaaggcaggagggtttctgggagaaggtgggctgcagggagaacactggctttgtgcacaaggtgggctgtagggagaacgtggctatggagggccttctcagatggaggcagcatggggttctgcagcctggtgctccctcctccttcctgggcagtgcctggtggtcccccttagggaccgggtcagagtaagccaatgaggaagagaacctcggagagggtagaacctgttctccccaccctgagagcagggcttggatggggcagcagagacagggacaggcagagacacagagagagacagagactcaaacggagacagagaccccccctgaaccagagacccagggagagagagggccagagacagcgagagagacatggggagacacagagagagaaagagacacagcatggagagctccaagacagtgaacaagacccagagagagacagcgccagagagaaaggacagagttgagagggtggaggggacagagatggggagacagagtcagagagagggcctgagacaggcagggggcagcagctgggtgtggggtccctgaatgtcctccagccccctgaacgggccagcccagcatgccgtc

SEQ ID NO: 34720 - DNA, 1235 bp, Artificial sequence
  DNA replication origin
ttatctagaatctaacaagatccctgatgtaataataataataataataataataataataataatgggagaggggctgagtgagaaactgaggaggagggagccttgataagtccttgggctccaggcccctggaagaccttccctgcagaatggacccttccacctgggtgggtgtatacctggttctcaggggcagggggcagccagggagagagaggacactgatgccctcacacagctgctcctgttccagcagctcaaggcctgatccaagacacagaagaagccaatatgtctgcccctcaaactgggtggtaagcaagccccccaggggacaccaagaagggggattcagacaccctagacgttacctcctccttcagtctggtcttcagtatgtttcttcccaaacacccattcctaccccaggacaggaaacccaagaccagaaaagtgtcttctcacttgtcactaactgggcacaaaaggaaggtctaaagatcgtgagtgggtgggtgaggggacaagtgaattataagtaaattaatgagtaagagaatgaatgaataaacaagttagcacataaatgagtggctaaatgaataaatgaatgaaaggatggatgggtggatgagtagatgaatgggtggatgaaaggaaggatgtgtagatggatgggtgaggatggatggatggatgggtaaatggatgaggatgagtggatgcaaggaaggaagacaggatggatggatgaatgggaatggatgaggatggatggatggatggagaataaattgatgtatgaatggatgaatggataggtgtgtggatgggaaaatggatagaagcaagaaagaatgggtggatggatggataggtgaggatgggtggatgagtggatgaggatggatggatgcatgcatagataggtggatgggtggatgaatgaatggatggatggatagatagaaggaaaaacaaatgcatggatgaatgagaatggatggctagatagaaagaaggaagaacaaatgcatggatgaatgagaatagatgcatggataaatggaggatggataaatggacagatggatggctgaatggatggacggatggatgaatggatggatggatagatggacggatggatggatggatggatggatggatggatggatggacggacaagtggatgaatggatggagggatggatggatggatggatggatgg

SEQ ID NO: 34721 - DNA, 3265 bp, Artificial sequence
  DNA replication origin
gatctcacactaacccagggtgagcctggagccacagcctactctccaggacacagtgggacagggtgggtggggagtttctcacggctgacttggagggtaggggaggtcgcctcactgctccacagataaatgcatttccactctggaaaattccatccataagcatggttcttgcaggtgagtcagacggagaggaagagagagagagagagagagagagagagagagagagagagaggcaggtagagacagagacacacacgctggtttagggagaaagaaacacatcaagtgaggccaggtgtggtggctcacgcctggaatcccagcactttgggaggcaggggtggatggatcgcttgagcccaggaattggagaccagcctgagcaacatggtgaaaccccatctctactaaaaatacaaaaaattagccagatgtggtggcatgcacctgcagtcccagctattcgggaggctgaggtgggaggatcacctgagctgggggaggctgaggctgcagcgagtcatgatcatgcggctgcactccagatggggtgacagagcgagaccctgtctcaaaaacaaacaaacaaacaaacaaacaaacaaacaaacaaacacagcaactgagcacaaaactcctgaaaagttagcaatgcacagaaagacacagcaggagcctacagatcctgtgagtgatgctccttaaatagtgactggctgaaagaatgaatgaatgagtgaatgaatgatttcttgggctgagcaaaaagaggacttgacacagacatggataacctccagcagctcctgtctactgtgttgataaactgggggttgtgtccagactgctggctggaggtccggatgtccttcaggctgggctagggggcatgaagacagagggtcctacctccagaggggacccaggacgctcgccatcctgagaggctggattccccctcccgaccctggcagggacagggtggggtgggagaggcctcctcgagcatcctcagtgcacaacccagagaaagctcatgggactgagaggaacaggctgagagatggacttttaatggaatggagggagatggggatgcatagcctgggacacatgggccctgggtgcctgtgctggggcgagtgagagagccagtgtccaggtgaagctccttgcctggggcatctgccccatgactgcagtggactgggaagcccttaagagtatcactacccactgatgtccaagtcttgcttgatagtatggtgtccagggaatggtcttggggagtgggttccggagagcctgtgagagttccagggcggggtgcacatcatggggtgcctgggagggtatctttgggagagtctgtggaggagggagttgggaggtgttggaacacagaggagggcctagggtctagtggggtcgttataggatgctcatggggacctgagcatgacatttgggaggctggctctttcctgggaggagctgggggctgaggaagagggtcaggaagtgtcctgtgagagagaacatttgggagtatttcgggcggagacacagtgcaagaaagtggtcttagagcaacaggggtccaccctggggtttcgggggtggatctcagaatgatgtgttttgggaagatggatgggggatgggtgatgggaccacctggtcagtggaggtggggccaggggaggtctgggggaaaaatcctgaggggaggggagagttctgcagggatgatggatgccaggggcatcccatggtgggaccattgtaggagaaacccttgaaagtcagaattcaggtctctgtgatggatctggggggtcagcacttgtggggggcatcctaggggaaaccaatgaagaggtggatttggggtgctgagaaccaggggtatcttgacaagtggaatcttgacaagtggaatttaagagtgtgtttggggggattagaaataaggggaagattatgggggtgcacccaggggttggagcactcacgggaagattctgggaggaggttggagcattccggggtagagactgggttggggggtccctgaggagcatactaaggggggtggcagtttggagggtttggagcccaggggtattttgggatgctatatcaaaagcaatagataatggggtgagattagggagtcagtatttgaggatgtcttgggcacatagtgggtaattaatgaatgtatgtgggatcaatgcatgaatcacttaaactagaaatggaaggaattgggtatgtggcttgggtatgtggcagaccctaggggtgtgtgtgggcatggggtgggtggtcagaggctttcatgttcttcatgtttggggttgggggcaggtgccaggtggaggcttatctatgactcataggaggaggtgatatttctaacaatagccttgaggtagtgaactccccatctctgggagtgtgtaaatgggaagggcacttgtcagaggtggtctggggagggggtgtcccaacccaagggtgcctggggaggggcacagatcacaggaggatgggttgacaggattagaacttagtggtctgttgggagttattcatggggaaggtgggtttagggggtcaggattggggtgtctcagggcatgcatcacaggaggtgagttaggtcagcctgtggggcgaggtgcccaggagtggatggggcaggccctggaggaaggacaggacagagccggctgtagcagaggctttactgcccccacgccctccccagctctgccctggtcagtagcatttgcggtacacgatatagggaccctgttcctcgtactgctcccgcaggacccagcaggactggaaggcgcgcagggaggccaggatggagcccccgatccatacggagaaattcctggtgggctgggcagccaccaccacgtgggtctcggctggcagagcgcgcagcagctctgcccggaagcgaccctcgaagccggtgaagagcgaggacccaccgcagagaagcacgttttgggccaagtccgcgcgcatctccagtgacaacttgcggagactctgcttggccatggtggagaggccgacgggtgacagccccgggacctctggggggttgaacagcagctccggacactggaacagctccttgcccagggtgaccgtgcgcccatcgggcagcttcagagtccgcttgtactcctgctccggccgggcctgctccttctggaagtcggaggcc

SEQ ID NO: 34722 - DNA, 1117 bp, Artificial sequence
  DNA replication origin
tctccgccaggaaggcggtcaggttgttgcccgccaggtccagacgctccgtggcgtggagcaggttgtagccctggaagacgggcactgtgtaggtgaccccgtgtcccgtgtccaccaccagcccgctgacacgaccgtgggcgtagacagacagcaccgactgcgatgccacgtacatggctggggagcgcagcgactcgaaggccacctccactagcttctcgcggttggtggccgggctgaagggtgggtcggagaacagcagcgggtggtcgtgggtggccactcggaggtcgtgctccagcaggtggcgccagatgagctcggcggcatcccagtccacgacgatgccgctgcgcaggggttgcaccagcgtcagctctgggagcacgcgggctgcctcgccgatgaacgtctgcagcccggactgccccgaggtggcgggtttcttgggctggcagcccaggatggtggccacggtgtaggtggggctggcctgcccagcaaaacctaccttacaggtgcctgtgcccatgtcaataaccaccgcgccggtctttggtggcagcctgtcggccaccatgccgggggagtcccgctgcaggggcttgttcaccacgttgggactggggtttgggccgggcctgggggcctccagggaggactgggattccgaggacttggggcgacttgcatccatggttgcgggacgccaggtgagggggcttttcctctggggttggggttgcggggagaagaggttgaggcccggccagtggggagggcaggcagacagggggaggggtgggcccgcaatctatgacgtcacggtgccccttcagtcttcttaagacatcacaatgcagccaagaggatgggtccctgcccagccctgcctgcccaaaggctgtcatctcttctctgaagagccaaatttggaggaggagatgagcatctcagagcagggccctcttaacacatttctgtcggatgcgctagaagctaatacgatggcacctggtttttgagaaaagacaagctttttgttgcatgtcaacccactgggagctaggaatccagcacaagtctgtttctcagctggctttaaggcagt

SEQ ID NO: 34723 - DNA, 1024 bp, Artificial sequence
  DNA replication origin
cgcccctcacctcccggatggggtggctggccgggcgggggctgacccccccacctccctcccggacgggacggctggccgggcggtgggctgaccccccacctccctccctgacggggcggctggccgggcgtggggctgacccccccacctccctcctggacggggcggctggccgggcagaggggctcctcacttcccagtaggggcggccgggcagaggcgcccctcacctcccggacggggcggctggccgggcggggggctgacccccccacctccctcccggatggggcggctggccgggcggggggctgacgcccccacctccctcccggacggggcggctgccaggcggagatgctcctcacttcccagacggggtggctgccgggtggaggggctcctcccttctcagacggggcggctgccaggcagaggggctcctcacttctcagacagggcagccgggcagaggcgctcctcacatcccagacggggcggcggggcagaggcgctccccacatctcagacgatgggcggcctggcagagacgctcctcacttcctagatgggatggcggccgggcagagacgctcctcactttccagactggacggccgggcagaggggctcctcacatcccagacgatgggcggccaggcagagacgctcctcactttccagacggggtggcggccaggcagaggctgcaatctcggcactttgggaggccaaggctggcagctgggaggtggaggttgtagcaagctgagatcacaccactgcactccagcctgggcgccattgagcactgagtgaacaagactccgtctgcaatccgggcacctcgggaggcgaggctggcggatcactcgcggttaggagctggagaccagcccggccaacacagcaaaaccccatttccaccaaaaaaatacgaaaaccagtcaggcgtggcagcgcgctcctgcagtcccaggcactccgcaggctgaggcaggagaatcaggcagggaggttg

SEQ ID NO: 34724 - DNA, 1140 bp, Artificial sequence
  DNA replication origin
tgcctggcagccgccccgtctgagaagggaggagcccctccacccggcagccaccccgtctgggaagtgaggagcatctccgcctggcagccgccccgtccgggagggaggtgggggcgtcagccccccgcccggccagccgccccatccgggagggaggtgggggggtcagccccccgcccggccagccgccccgtccgggaggtgaggggcgcctctgcccggccgcccctactgggaagtgaggagcccctctgcccggccagccgccccgtccaggagggaggtgggggggtcagccccacgcccggccagccgccccgtcagggagggaggtggggggtcagcccaccgcccggccagccgtcccgtccgggagggaggtgggggggtcagcccccgcccggccagccaccccatccgggaggtgaggggcgcctctacccggccagccgccccgtctgggaggtgtacccaacagctcattgagaacgggccatgatgacaatggcggttttgtggaatagaaaagggggaaaggtggggaaaagattgagaaaccggatggttgctgtgtctgtgtagaaagaagtagacttgggagacttttcattttgttctgtactaagaaaaattattctgccttgggatcctgttgatctatgaccttacccccaaccctgtgctctctgaaacatgtgctgtgtccactcagggttaaatggattaagggcggtgcaagatgtgctttgttaaacagatgcttgaaggcaacatgctccttaagagtcatcaccactccctaatctcaagtacccagggaaacaaacactgcggaaggctgcagggtcctctgcctaggaaaactagagacctttgttcacttgtgtatctgctgaccttacctccactattgtcctatgaccctgccaaatccccctctgcgagaaacacccaagaatgatcaataaaaataaaaataaaaaaataaaaaaaagaagggcagactcatgcatttaagaatcactcagggaaatctgaagatgacctgtggtgggggtataaatggattcttaaatgtgtcttgtgattatgtgagagtgtgactgtgtgactgtgtgtgtgtgtgtgtgtgctgtc

SEQ ID NO: 34725 - DNA, 2291 bp, Artificial sequence
  DNA replication origin
gctggaaacttgcagaaggctgtcagctgggtctgcatcatctgaaggctcaacgggtaccgggggccactccatggcctgcgagtcagagctggccgtcggtgggaggcctcagttcctctccacataggcctctccacagggccacttgagcgtcttcccaccatggcaactggtgtcctctagagcaacatccaggagaccaaggcggaagcagctgtagtgccttccaagacctggtcctgaaagtcacccctgcacccacccccgctgtctcctcagccatattctgctggtcacacaggtcagctctaattccgtgtgtgcgtcgggcctacacagggtgtgagcaccgggaggctgggatcgtcaagggctcgttaggaagcagttaccacagaggggacaggggaggaggtgtgaagtttaaagagaggagaggaggtttgacgagtgggaagccatgctgacctgtgggatcgccctgcaggctgagggttctctacacgttggtgaccgtgttattccagagtggcaacgtcacagcctttgcacagggtggtctgcccgaatgtcccctggagcaggtggatgattgaagtcacgcctggctggagttctgctgggctggcatgacagtggggggtagggaggaggaaatcagctgaaatgagggacagtgacatccaagctgggtgaggatgaaatcaagagagggggtggctgaggcaggagagggggtgaccaaggcagagcataggtaggagaggggctgactgaggcaggaggggggtgactgaggccgagcacaggcaggagcagggtgaccaagggcaggagttggggtaacaggcagaacatgggcaggagagggggtaactgaggcagagcacaggcaggaggggggtgaccaaggcaggaggggggtgaccgaggcaggaggggggtgaccgaggcaggaggggggctgactgaggcaggatgggggtgaccgaggcaggagaggggttgactgaggcaggaggggggtgaccgaggcaggaggaggtgactgaggcctgcgtgtggtcggaggacatgcggtgagagaaaaaaggagtgaacgccgtggaagttgaggagggaggttgggttcagagagaggggagtttctgaacgttgttctgggtggtgggacagtgcccggtgatgaccaaggctgaggggacctgtggaaacatgtggctgatgagagaaggaacaaagggccctggagctgaggaactcctgagactctgggggtctctgacatcctccaggagctgggactggaggtgggaggagttatggaggcgccggagtccccggggaaggagggagtagccgggaatgcgtttgtggtgcgcttggatgggaagaacatgccgtgagactgcgtgaagccgaggttctcaaagcgggtgggtcagggaggtactggtcgttgtgttggggacagaggaaggcaagttttccatcaggtggccctgaattcattgcctgctcagcaaaataaaggcccagtgtggaagccggaacttgcatttgaagaaggatgggaaggatgggttgaggagggcccatccccagcagcccgagagggaggaggccacggagacttggagcattcccgtttcttccagagcgctgcgggataaaggaggagcgtcctgcttcccggctgccctgttgctgtcggagtcacaggatggcggctgtcatcctgccctcgactgctggtgagtcgtggggtcctgacatttctcagagtccagccttgaaaggttctgacccacagcatgggacacgagcggggttgggcagagcaggtgaggcaggagtggagccccaggggcccagaggtcctccgtgtctgatcgggcagctctcgggatttgggacttaggcatttgggtgtctgtggatgtcacctgtgtggtgaatgtgctggagcttttgaattctccctttagttctttctgtgaatctgataaaaacacagtgacgcccttggaacttgtttcctcatctgtgaagtgggaataatcccttccccaagtgcagtcagaccttgagccctattgtctttggttggtgagacagggctgtgtttgggtatcttaggagagctgtgggtaggtgtttgcatggagcgtaggtgggcactgtgtggtgcctcatccgtgtgggtgtgggaggtgggtgtggtcaatcaggggcagatctgtgggtgtcagacaagcctgaatccatgggactcatttctcctcctc

SEQ ID NO: 34726 - DNA, 1674 bp, Artificial sequence
  DNA replication origin
aaccgaaacacggctccctggagggacgcagggcccgtggctggcggtgtccgcggcccacgtcgccccctggactcggacccgagcccccgccagtcgctcaccgagcccggcccctcccgcggggccaaaagcgccgactcgcggggacggagggactcgctccccgctgccccacgcgcggcccctcccacggtaccgccccgcgcttccgcttccggtctggggagaggtgcgctgcacgtccccttccggctcgcgcgggcagcctcgcagagtcgagcgtgttgggggttcggcgcttaggcgacaggcgcggcgggcgggagcggcggccgcgaaccccagccttgggcagaggtgttctagtttgcttagtgggcacaaagttgggccctggcctggggcagtagcgggggtaaggttggccctgggggcggggccaggctgtgagccgcacgaggcctgggggcggggctggttgtgggcggagatcagttccggggcggggctgaaggcggggaaccggctgaggccgtaccaggcctggagggcgaggctgattgggcagagaccagttccagggtcggggctgtgggtggggcccagttctcggggcggatggtataaggcttctagagcggggatgactgagcagagaccagttacaggggtggagacctccatttccggggcggggctgagcgggaaccaggctgtggttgtgacagccctggaggttggggctggctgtgggcggagataagctccgggccgggcggagggcggggactaggctgtgggtgtaccggtcttggagggcagtggtgattggcagagagcagttctaggggcggagctatggggtggcagcaagcctgggggcggggctgactgtgggcggagaccagttctgggggcgggactgtgggctgcaccaggcctggggagggggcagtgggtggagaccagttccaggggcagggatctgggtatgaataaaagggtgtatgatgtgggtgggttgggataggcccaggagccaggattgtgggagatcagattcaggggtagggccttccttggatccctagattgttgatacagttactgccccatgttcatacaacccaataggatcagattatgtatgcacatttgtctataacttgctttcccaaggcagaacatagtgatttaacactaagagtttaggggagcaggagaggactgggtcatagatacacatataggaaaacttaagaatggtacaaagtcagtcaaatattctcccaccacggtctttcagttcttttgctcagaggcaaaaataattttctcctctatctttccagatatagtgtggacatgtatgtgtgtgtatgtgtgtatgccgtagtcatattcatggaataaatgctattacctcccccccaacaagtctctgttttatacaccatggatatagactgaacaaaataggtaaacgtccttgccctcagagaacgtgcattttagttgtgagttgggcaggagaaatggacagtgaatgtgataaatagaatacatggtgggttggtgcgttagataccactaagtgctggttggacctggtggcttacgcttgtaatcccaacactttgggaggccgaggcaggcagatcacctgaggtc

SEQ ID NO: 34727 - DNA, 1834 bp, Artificial sequence
  DNA replication origin
ctctttactgaatattcatcacatatatcctctctctcctcccctatcccagttcaggtcttattttctctcaccctgattagcacctggcagactcactggatgccctgtctaaaggacattctctatactgaacacaagaagaatctttctgaaatgacaatctcactatggctgcccctgctctagtaccatccacagctccctatggccttcagtgttaagttcaaatttcttgacttggcattcaaggcccttcccaatctggctcctgctgacctttcagtctcacttatccatccactctgggttaagctttatgtttcatgcaaaccaaatttctctcacttctccctatactctatgctgtttctggccactgaggctttgctcacagattcccctctttcagttatactattcatgccctatttgcctgaatcactcttagtcatccttaaagactcagttcaggtgaaactttctccagaaagccctcctccttcccaactatgccaggtatctcaccccaaaacatctgacattatgatggtctatttatttcataaaatctgggactccacgagggcaggtgtctgattgaaatgctattctaatcttcgaggaggaaaaatggccccaaatacctgttgtggcttctgacagaggaggcaggaatgtggtggctggcttgggagctgtggaaggaacagtccatcagagaggacaaaagcccaccacctagtgggagaagctcccctgggcttcatcagtggtccaagccaggacaaccattcacaggtgggccataaatgagactgagggaaggagtgattgtgtgagtggaggagtgagcaagatggatggatggatggatggataaaaggacaggtggaaggaaggacaagcaggtgaatgggcaagaggatgagtgggtggatgggcagatggatgaatggatggaaggacagaaggaaggaaagacaagcagatgaataggcaggaggatggatggagagatggagggatggttggaaggacagaaggaaggacaaacaggtgaatggggaaaaggatagatggatggatgatggatggatggatggttggaaggacagaaagaaggacaaacaggtgaatggggagaaggatagatggatggatggatgggtggatggatggataaaaggacagatggaaggaaggacaattgagtgaatggggaggagaatggggggagagatggctggctggatagatggatggatggaaagacagaaataaggaaacaggtgaatgaagaggagaatgaatggagagatgggtggatggttggaaggacagaaggaaagacaaaccagtgaatagggagaaggatggatggatggatggtggatggatggagagatggataaaagacagatagaaggaaggacaagcaggtgaatgggcaggaagatgggtggatggatggatggaaggacagaaggaaggaggggctagcgagtgagtgggcagaaggatgggtgggtggtggatgagtggatgggtggatggatggatggatggatggatggatgtatagaaggacagaagaaaggagggacaagcaggtgaatgggcaggaggatgggtgatggatgaatagatggataaaaggacagatggaaggaaggacgaggaggtaaatggtcaggaaaatggggtggatggatggatgggtaaatggatggacggatggatggatggaaggacaggtggtgtctgagagatgactggaaggatagaaaaatggatggctggaaagatagacgagtggatcactggatgaggc

SEQ ID NO: 34728 - DNA, 1089 bp, Artificial sequence
  DNA replication origin
ggctgaacgccttcctttcctcccctcttagattctctgggcaagttcccttagagggaagtcagattggggttttccacatgctgcaagttcataatgggggcagaggaggaagtgccacctaagggataggagtttggatatagaacctgaagtgctgcagttgctttgtgtgtcctggcacaagccacttaatctgggcctcagtttccccttctgctcctgcttcatgaggctgttgcaagcactgatgaggcattaaatataaagtacataatgcagtgccttgggtcttaggaatagttatctgctgctgctggtggtgatgcttagtatccatgggcaatagttgttccaagtatgaacagagtcagggagcccagagactagggtcatattcacctgttgggctgtgtttttcttaaggagcgtctcacctgagtgaggctagtctgcagcctgaatagaggtattccagactgctattcctgaacaagggtttgagctgcaaggaaggagaggggaggtgagaaacaacagctgcgggaagccaggaagagtggggcattggaggggtggaccagggtgaggtgggcgtggctgaaatcagtgggcggggcagggaaaggtgggcgtggctggcatcagtaggctgggtggggtgaggtgggcttggctaaaatcagtgggtggggcagggaaaggtgtctggggttggatgaggtgggcgtggctggcatcagtgggcgaggcagtgtgaggtgggctggtttgtctaagtgggcgagggaggagtacggtgggcggggctctcaccagaccctgcagttctctctctgtggcgttgaacttcctggaaccagggtgccgcatgtcctcctcgtactgcaggttggtgatggtgaagttgagggtgaatggcaccatgaatgggactgtggctgctgcaaggaaggagaaaagaaggccacgcctgagtcagatctgaactgactgtaagtcaatttctgaggacccagacggagtgcttgaagcaagagtctgaagcagacaggtgggtgctttagtttggacggataatggaaagcc

SEQ ID NO: 34729 - DNA, 809 bp, Artificial sequence
  DNA replication origin
aggtgggcttggctaaaatcagtgggtggggcagggaaaggtgtctggggttggatgaggtgggcgtggctggcatcagtgggcgaggcagtgtgaggtgggctggtttgtctaagtgggcgagggaggagtacggtgggcggggctctcaccagaccctgcagttctctctctgtggcgttgaacttcctggaaccagggtgccgcatgtcctcctcgtactgcaggttggtgatggtgaagttgagggtgaatggcaccatgaatgggactgtggctgctgcaaggaaggagaaaagaaggccacgcctgagtcagatctgaactgactgtaagtcaatttctgaggacccagacggagtgcttgaagcaagagtctgaagcagacaggtgggtgctttagtttggacggataatggaaagccaggtaaggagaaaagtgggatgttcctaaaatgcattacctgggcccagaagcaggttaggggaccagaagcaggttaggggaccagggtaggtgtattgggtcagaacgtgtgcctactggaagctgaggtctcagactctgccaggtgcccatacccgccctaacaaactctagctgagaagttaaaagggaaaaggaccggaacagtctcatgctttggggaacaagaagggaaaaaagagtcaactcaatcccattgaacactgaacaacaacaataaaaatcaaacagcagtccttaaagcagaccttctctcacctgctttacttggctacccttccccactcaagcccaaaactcccaaaactcccagaacttgccc

SEQ ID NO: 34730 - DNA, 908 bp, Artificial sequence
  DNA replication origin
ggctggtatgacaggtgatttgtgcttcctaagccccagcagggacagccaggaggtcttttgcttttgcttttgcttttctgtaaatgcctcctccagcccgacccaatgaatctgcatttaccagactgacgtgggcgagttcacaaaaccgctgtattgtgaattgagtatctgccgagatgagtgtggaaacacccaaggattccttccatcaccgactcactcacacactcactccctgagggggttttagcggcacctccagtcccagtatctgtgcccagctctcagggacagaaatgagcaagtcgccgccgcagggttccaggagctccgatctggtgggcgagagagactggggcgtccagtcagtcggggtacagggctgagcaggaactttgctaagaggcattgatggggtaagggtggtggcggtgggggcaggggtcttaaactgcagggtggcatctgaattgcacagggttggaattttacaggcacacttaggagcaaaagagaagggcgttcccggcagcggggacggagtaggcatggactaggaggcagggagccatcaggcgtatctgggtcctttcctgtgagctgcatgtatctgggctgcgtgatggggagataccgagggaaggactggaagcagaaacgcagcgtgggagggctgtgggaggcatgttcctgggtccaaaggggtctttcaagaactgttggtcattttaggagattagcctggacattactgcccagagaaaagaccctgggctcagggaagggctggcatccagcttggtgtttctgtgtgttgttgcgggcttaagggagccagcctctcttccctacagggaagtttcaagattgttcatacctgaacccaggactgcccaaaccca

SEQ ID NO: 34731 - DNA, 1206 bp, Artificial sequence
  DNA replication origin
tcccggtgccgtgcgcccgcactcctcagcccttgggtggtcgatgggactgggagccgcggagcagagggtggcgctcgtcggggaggcgcgggccgcacaggagcccatggagggggtgggaggctcaggcatggcgggctgcaggtcccaagccctgccccgtgggaaggcagctaaggcccggtgagaaatcgagcgcagcgccggcgggctggcactgctgggggacccagtacaccctccacagccgctggcccggttgctaagcccctcattgcccgggccgggcagggcaggccggctgctcggagtgcggggcccgccaaggccacgcccacccggaactccagccgggcccgcaagcgccgcgcgcagccccggttgccgctcgcgcctttccctccacacctccctgcaagctgagggagccggctccggccttggcctgcccagaaaggggctcccacagtgcagcggtgggctgaagggctcctcaagtgccgccaaagtgggagcccaggcagaggagtcgcggagagtgagcgagggctgtgaggactgccagcacgctgtcacctctcaacctcccctgaatcttgttgtctcgtggaagtaggcgatgaagacagaagctctgccccccaaaagagcagggagacagagcccggcaggtggtacgcggcctggatgatttctcctggagaacgcatgagtgtcttggaccttgcgcctgggggcctgggtgactgtaagtagatgaattgcatgttgggccctggggtggtctatcccctctgaagcttgttagacaaattggtcaatggcgtattcattccctgatcagtttggttcctcatgggcagggactacacaggaagaggtctctgaacggccaattccttattcttgggagactatcaatggggccagctgtgactcccgtctcctgtacctctcctttgggaagaatcactctagtctactttgaatcacctttggtgacaactgtcagcaatttttttttttttgagacagaatctcgctctgtcacccagcctgaagtacagtggcgaaatcttggctcattgcaatgtctacctcccaggttaagcgattcccctgcctcagcctcccaagtggctaggattacaggcgcgtgccaccatgcccggctaacttttgtatttttagtagagatggggt

SEQ ID NO: 34732 - DNA, 1094 bp, Artificial sequence
  DNA replication origin
cataaagaggggacaggaggggaccgagccgaggcaaatgtcaccccgtgctcacccgacacgccgcgatccacagatcagctcacagagaacgaggctgaagcgcttgtccttgagacacgaatggcagagatgctcttcctttctggaaagagagcaaaggatgctttcggaggctgatgaactacgacattggttctccaactctcgcctgcatcagaatcaccccgatttctgtacccagaccagagttcccgattcagtgagtttgggaccagccgcggccacaggggcagctgacccgggctctctgaggaggcgccgcggcggcgggaggccccgggcgcggggtccggacaaggagtggcggggaggcagcccttagaccgccgattcccaaacccagccctcggtctcccgcggacccgacccggggcaggcagggcggggcggggcagggcaggacaggaagcgggcggaggcaaaaatgttcctcagacgcgggcggaggcgtagggtgacaaggctgtcgactcgcgcatgcgcagaagcacacttctgattcctctttcggcgctgcaaatggcgtatggggcggggcctgggaagcgggacttgaggtgaagggggtggagcaggtaggagcgggatgcaaaggagcgccaaggctggttccagccgcaagtggatgagaaatcctagtttcttcatgatttggagtaaacagagaagaaacagaaccctgaactggacttgcatgactcggcctgaggggcggaactggggctagacctaggggcgtggccttttaaatactccaaggggcggggctaaaggtggaaccagattgggagcggggcttggtagaaattcctagggggcggagacgagggctgggcggggcttaagtgacaaggcctagggatggggctaaggctagggcttcccatccaggttctcagctaccacggatacaggatgctcatcgatcgggtttctacctatcctccacgttgctacagtcctgtacacaggacacatatatttgcagctctaataggaaacagactctccttgacactcactcagtcctt

SEQ ID NO: 34733 - DNA, 931 bp, Artificial sequence
  DNA replication origin
gggggaggaggggaggaggagtgggggaggagggtggcaggggggaggagggcgggggggagaggagggcgggggggaggagggcgtggtggcggggaaggctcaggcatggcaggctgcgggtcccgagccctgccccacgggaaggcagctaaggcctcgcaagaaatcgagctcagcgccagtgggctggccctgctggggcacccagcacaccctccgcagccattggcccgggtgctaagaccctcattgcccggggcagggacggctggctgctccgagtgcaggcctgccaagcccacgcccacccggaactccagctggcccgcaagcaccgtgcgcagcctggttcccgctagtgcctctccctccacacctccgtgaagctgggggagccggatccagccttggccagcccagaaaggggctcccacagtgcagcggtgggctaaagggctccttaagtgccgccaaagtgggagcccaggcagaggaggcgccgagagcgagcgagggctgtgaggactgccagcacactgtcacctctcactaacattcttaaatatctgctagctgtaataaagaaatcagtgtactttatgttcttagctcccacaatttagcctaaatatttgccctggcatgcttatactggtccaagcaagcattaggtcatagtctgttcctcttccttatctgaaggtgtttttacctttctcagcatcccacaagttacttcctccatcctttgttctcctctgcctttgcctcttttaaaaagtcctaagttgctagccaatcaggacaaatacagaatggaaggtcctgttctagccaatggaaactgataagcctcctctaatctcccccacccagaaagaaacaagcaaagaaatctccaaggtaccacagcccccacccccccccc

SEQ ID NO: 34734 - DNA, 1089 bp, Artificial sequence
  DNA replication origin
actcttcatttaagaatatacagatgttctccttttccagcagtaagtcaaggcctcggcggttttggaggacaactgcagctagagtcaacttgggcctggaggactgatgaagtttgtgatatgactgtgatgctagcagagaattcattagagagactatggaaggtcctgacagaggttgaaatgcctgctattccagtaccgagagcaatagtggaggcagaaagtcttaaactgacaagggaattagtggaataactctttttgtcgtgtcggtgtcatgaggggaacagggagctcttcagtcctatttgcaaattgcattttgagagtaaggaaaactagtgtgcatgtgcctgtccaattagcaggtagacacatgtaggtagaggatccacagaggaaaaagagaccttgtgcgaggcaaaactggagatgcaaagtaaaaagatgaggagtgctgaaaggggtgtcttgtacttagaatcctagggatccagctagggcggcagtcgtcagaggttgtaatggggactgatgaggtaattgcgtcgagggggaggttcgattttcatggtgtatgagaaaacgtcgagtatctacaagcaacctttcactgttattttcagggctgggtataagtaagcaagaagagggcctgggagaagagtctgacgagcaaggggaaggtagccaaggatggagtgaaatacagggtaagtgtcttcctaagcaataattactgctaatgtttttaagtttgccactactgatagagggcttgtctgtaatatggagctggaaggctccaattgtttcagtgatgtgtgtagttgggctttggagatgaagagtaaaggaacatcgagaaggtgaaagtttacctaggggaattccagtgggtctttgctgagagatacataaaggagctgccacaggaatagtagtttgtgttgtgagaggtctaaatatggggggagtagagttgatataaggaggaaggttttaggtctttaagaacacaggctaagggagaagggggaatggagggcagaagcttgcccatagtgaaggaggcaagcccag

SEQ ID NO: 34735 - DNA, 1467 bp, Artificial sequence
  DNA replication origin
ttctttctacacagacacagcaacaatctgatttctctatctttcccccacatttcccccttttctattcgacaaaaccgccatcgtcatcatggcccgttctcaatgagctgttgggtacacctcccagatggggtggcggccgggcagaggggctcctcacttcccagaaggggcagccgggcagaggcgccccccacctcccagacggggcggcggccgggcggaggcgccccccacctccctccctgacggggcggctggccggcggggggctggcccccacctccctcccagacggggcggctggccgggcgggggctgaccccccacccccctcccggacggggcggctggccgggcgggggctgaccccccacccccctcccggacggggcggctggccgggcgggggctgaccccccacctcctggacagggcagctgccaggcggagacgctcctcacttcccagatggggtggctgccaggcggaggggctcctcacttctcagacggggcggctgctgggcggaggggctcctcacttctcagacggggcggctgggcagagatgctcctcacctcccagatggggtcgcggccgggcagaggcgctcctcacatcccagacggggcggcggggcagaggtgctccccacatctcagatggtgggcagccgggcagagacgctcctctcttcctagacgggatggcggccgggaagaggcactcctcacttcccagactgggcagccaggcagaggggctcctcacatcccagacgatgggtggccaggcagagacgctcctcacttcccagacggggtggcggccgggcagaggctgcaatctcggcactttgggaggccaaggcaggcggctgggaggtggaggttgtagcgagccaagatcacgccactgcactccagcctgagcaacattgagcactgagtgaacgagactccatctgcaatcccggcacctcgggaggccgaggctggcaggtcactcctggttaggagctggagaccagcccggccaacacagcaaaaccccgtctccaccaaaaaaatacgaaaaccagtcaggcatggtggcgcacgcctgcaattgcaggcactcggcaggctgaggcaggagaatcaggcagggaggttgcagtgagcagagatggtggcagtacagtccagcttcggctcggcatcagagggagaccgtggaaagagagggagagggagaccgtggggagagggagggggagggggagggggaggtcttttctttttgagaaagggtcttgctcttgcctgtgctggagtgcagtgctgcagtcatggctcaatgcagccttgacttcctggtctcaagtgatcctcctgagtagctaggactacaggtttgtgctaccatgcctggcttccttcctttcttccttccttccttccttccttccttctccccctt

SEQ ID NO: 34736 - DNA, 806 bp, Artificial sequence
  DNA replication origin
gaagtgaggagcgtctccgcctggcagctgccctgtccaggaggtggggggtcagcccccgcccggccagccgccccgtccgggaggggggtggggggtcagcccccgcccggccagccgccccgtccgggaggggggtggggggtcagcccccgcccggccagccgccccgtctgggagggaggtgggggccagccccccgccggccagccgccccgtcagggagggaggtggggggcgcctccgcccggccgccgccccgtctgggaggtggggggcgcctctgcccggctgccccttctgggaagtgaggagcccctctgcccggccgccaccccatctgggaggtgtacccaacagctcattgagaacgggccatgatgacgatggcggttttgtcgaatagaaaagggggaaatgtgggggaaagatagagaaatcagattgttgctgtgtctgtgtagaaagaagtagacataggagactccattttgttctgtagtaagaaaaattcttctgccttgggttgctgttgatctgtgaccttacccccaacccggtgctctctgaaacatgtgctgtgtccactcagggttaaatggattaagggtggtgcaagatgtgctttgttaaacagatgcttgaaggcagcatgctcgttaagagtcatcaccactccctaatctcaagtacccagagacacaaacactgtggaaggccccagggtcctctgcctaggaaaaccagagacctttgttcacttgcttatctgctgaccttccctccactattgtcctatgatcctg

SEQ ID NO: 34737 - DNA, 1268 bp, Artificial sequence
  DNA replication origin
aggcagaagaatttttcttagtacagaacaaaatgaaaagtctcacatgtctacttctttctacacaggcacggcaaccatccgatttctcaatcttttccccacctttcccccctttctattccacaaaaccgccattgtcatcatggcccgttctcaatgagctgttgggtacacctcccagacggggtggtggccgggcagaggggctcctcacttcccagaaggggcggccgggcagaggctcccctcacctcccggatggggcggctggccgggtggggggctgacccccccacctccctcccggacggggcggctggccgggcggggggcgctgacacccccacctccctcccggacggggtggctgccgggtggagatgctcctcacttcccagacggggtggctgccgggcggagggtttcctcacttctcagacggggcggctgccgggcggaggggctcctcacttctcagacggggcggttgccaggcagagggtctcctcacttctcagatggggcggccgggcagaaacgctcctcacctcccagacggggtcgcggctgggcagaggcgctcctcacattccagatggggcggcggggcagaggcgctccccacatctcagacgatgggcggccgggcagagatgctcctcacttcctagatgggatggcggccaggaagaggcgctcctcacttcctagatgggatggcggccgggcagagatgctcctcactttccagactgggcagccaggcagaggggctcctcacatcccagatgatgggcggccaggcaaagacgctcctcacttcccagacggggtggcggccgggcagaggctgcactctcggcactttgggaggccaaggcaggctgctgggaggtggaggttgtagcgagctgagatcacgccactgcactccagcctgggcaccattgagcactgagtgaacgaggctccgtctgcaatcccggcacctcgggaggccgaggctggcggatcactcacggttaggagctggagaccagcctggccaacacagcgaaaccccgtctccaccaaaaaaatatgaaaaccagtcaggcgtggcggcgcgcgcctgcaatcacaggcactcggcaggctgaggcaggagaatcaggcagggaggttgcagtgagccgagatagcagcagtacagtccagcttcggctcggcatcagagggagaccatggaaagagcgggagagggagaccgtggggagagggagagg

SEQ ID NO: 34738 - DNA, 967 bp, Artificial sequence
  DNA replication origin
ggccgccatcccatctaggaagtgaggagcatctctgcccggccgcccatcgtctgagatgtggggagcgcctctgccccgccgccccatctggaatgtgaggagcgcctctgcccagccgcgaccccgtctgggaggtgaggagcgtttctgcccggccgccccatctgagaagtgaggagaccctctgcctggcaaccgccccgtctgagaagtgaggagcccctccgcccggcagccgccccgtctgagaagtgaggaaaccctccgcccggcagccaccccgtctgggaagtgaggagcatctccacccggcagccaccccgtccgggagggaggtgggggtgtcagcgccccccgcccggccagccgccccgtccgggagggaggtgggggggtcagccccccacccggccagccgccccatccgggaggtgaggggagcctctgcccggccgccccttctgggaagtgaggagcccctctgcccggccaccaccccgtctgggaggtgtacccaacagctcattgagaacgggccatgatgacaatggcggttttgtggaatagaaaggggggaaaggtggggaaaagattgagaaatcggatggttgccgtgcctgtgtagaaagaagtagacatgtgagacttttcattttgttctgtactaagaaaaattcttctgccttgggatcctgttgatctgtgaccttacccccaaccctgtgctctctgaaacatgtgctatgtccactcagggttaaatggattaagggcggtgcaagatatgctttgttaaacagatgcttgaaggcagcatgctcgttaagagtcatcaccactccctaatctcaagtacccagggacacaaacactgcggaaggccgcagggtcctctgcctaggaaaaccagagacctttgttcacttgtttatctgctgaccttccctctactattgtcctatga

SEQ ID NO: 34739 - DNA, 1657 bp, Artificial sequence
  DNA replication origin
gatgtatcagttatctactgctgtataacaaaccacctggaaacagcgcatactcgtacatggcggcataagcgcagaggaaagcgagcagaggcatttcgaggtccagcccaaccgactccctccatcatggtccagccccccatacgtcctcccgccgggttccgcccccacggtccccagtgaagccggagggcggggtccaatcgcgtttggctgcgcggaaactaagacttctccccagagttgcggaggacgcggccgccgcccctcccaactcctcaggcctccgaggccgggtccagagccctcagttccttctgaaaccctggagcggaatcagaagtgcgcgtggccacagcggcgcctcctgccctttagccgccgctggcccaacggtttccccagcagtagcctctgcgaccaggtgcggcttcaggtgcggcttagccacccggagggaggcagacgggggcggggtctcggtgagggagagatgggagcggggactgggtgaagggcgagatgggggtggggtctcggtgagggtgagacgggggcggagcctcggtgagggggagatgggggcaaggtcttggtgagggagagatgggggcggggactcggtgagagggagatgggggcggggtctgggtgagggagagacgggggcggagtctcggtgagggggagatggggcggggtctcggtgagggagagatggggcggggtctgggtgagggagagacgcgggcggcgactcggcgagggagagatgggggcggggactcggtcttggttgagacaggggcggggactccgtgagcgagagacgggggcggggagtcggtgaagggagagatgggggtggggtctccgtgaaagagagtagtggtgaggggacagactgggaggctgacgcaggcggatcacgagggcaatcgattaagaccatactggccaacatggtgaaaccccatctctactaaaaatacaaaaattagctgggcatgctggcaggcgcctgtagtcccagctactggggaggctgaggcaggagaatcgcttgaacctgggaggcggaagttgcagtgagccgagatcgggccactccagcctggtgatagagcgagactccgtctcaaaaaaaaaaaaaaaaaaaaatctcggtgaagggggagacagggtggggtctcagtagtgagagaacagatggggccggggtattgtgaggctgcatcaatgatgcatatttcccagtctcactgacttcttatggttaggtcagtatatgtgcgggggaaaagaaagagagatcagactgttacttgtggggaaaagagagatcagactgttactgtgtctatgtagaaaaaggaagacacaagaaactccattttgatctgtacttagaaaaattcttctgctttgagatgctgttaatctgtaaccttagccccaaccctgtgcttgcaaaaacatgtgctgtgttgactcaaggtttaatggatttagggctgtgcaggatgtgctttgttaaaaatgtgtttgcaggcagtatgcttggtaaaaggcatcgccatgctccattctcggttacccagggacacagtgcactgtggaaggccgcaggcacctctgcccaagaaagcccggg

SEQ ID NO: 34740 - DNA, 2179 bp, Artificial sequence
  DNA replication origin
cacgagcctgtagttccagctactgttgaatttgagggaagatcgcttgagcccagggattggaggtttccgtgagccgtgatcgagccactgcactccagcctgtgcgacagaggaagaccctgacctataaaaacgcaaacaaagtagtgaagagagatgtatcagttatctactgccgtataacaaaccaccaggaaacagcgcatcctcgtacaagccgcatgaatgcagaggaaagcgagcagaggcatttcgaggtcccgcccaacagactccctccatcgtggtcccgcccccaccccaagccgccgccgggttctgcccccacggtgcccagtgaagccggagggacggggtccaaccgttgtcggctgcgcggaaactgggacttctccccagggtcgtggaggacgcggccgccgaccctcccaccgcctcacgcctcggagaccgggtccagagccctcagccgcttccgagccccgagaggggaatcagaagtgcgcgtgatcagagcggcacccccttcccaggaaccgcagctgaaccaacggtttcccctgcaccagcctttgcgaccaggtggggcttcaggtgcggcttcgccacgtggaggcaggaagacccgggcagggactcggtgagggggagacgggggtggggtcttggtgaccgagagacgggggcggagacttggtgaggggagacggaggcggggactcggtgagaggattgacgggggcggggactcggtgagggagagacaggggcgggaatcggtgaggggagacggaggcggggaatcggtgaggggagagacgggggcggggactcggtgacggggagacgggggcgggaatcggtgaggggacgacgggggcggggactcggtgagggaagagaagagggcgggactcggtgagggggagacgggggcggggacttggtgagcggacgacgggggcggggactcggtgaggggagagaagagggactaggtgagggggagacagggactcgatgacagacagggcagggtctcggtgaggggaaccgggggccggggacttcgtaagggagagacaggggtggggattaggtgatggggagactgggacgagaactcggtgagggagagacggggggcggggactcggtgaggggctgtcagaggcgggacctcagtgaggggagagaagagggcgggatctcagtgaagggagagaagagggcggggactcgatgagggggagacggggccggggactcgatgacgggaagggtaggggactcgatgaaggagagacggtggcggggactcgatgagggagaggcgggggcggggtctcggtgaggggagagacagggatgggaactcggtgagggggaggcgggggcggggactcggtgagggagaggcgggggtggagacttgatgaaggatagacggggcgggtactcgatgagggggagtcgggggcggggtctccgtgaggggagagacgagggcggggtctcagtaagggagaggcagggatggggactcagtgagggggaggcgggggcggggactcggtgagggcgaggcggggcggagactcgatgacggaggacgggggcggagactcgatgagggcgagacgggggcggggtctcagtgggggagagacagggatggggactcggtgagggcgaggcgggggcggggacttggtgagggcgagatgggggagcggtctcggtgacggggagacggggtaaggtctctgtgagcgtagatggggctggtgtctcagtgaaggcgcaatgggggcggggattcagtgaaggcggagaccgaggtggagtctccctgagtgtggagatgaaggtagagactccgtgtaggataggaggaccgggactcagtgatgcgggagtctgtgggcggaggattacccaggtgcccaggcaagagactgaaggcacaaactgtttcagtataataaagaaaacagttagaataagaatagttataaattagatatagagatgatcatggacattatcaatcattagtatgaacattattaatcattagcttttaatattactctttgttgtattactaacataaccaaggaataacgggcgggtgtaggatcaggtgctgaagggacattgtgagaagtgacca

SEQ ID NO: 34741 - DNA, 1447 bp, Artificial sequence
  DNA replication origin
accgagtccggcagttcgaccaaagtcgccatgatcccgccgacacgcacttccgcttccggttaaagagacccgaggggtcctgggggcgccgaggcggctgacagggcggcggccgcgaccttcccgtagccggtcgagaaatttgaccttcctctcgctgggaagtgattcggtcccagggccggaccagccgcggatggggaccagaaaccagcctggaaagcgtggctgaggcagtgagaggcttgcgggaggtggctgaggcgtgatttggccgcgactgggaactaagaccaagtccagaaggcggggctggagtgaggcgaagctcggaggcggggctagagacgaggaccaagtccggaaggcgtggccggggtggggtgaggatcggaggcggggctagagaccaggaccaagtccggaaggcgtggctggggtggggcgaggatcggaggcggggctagagacggggaccaagtccggaaggcgtggctggggaggggcgagacccggggacggggctagaggcgaggcccaagcccggaaggcgtcgctggagttgggcgaggctcaggggcggagccagagaacggaaccaagtccagaaggcggggctggggcgcggctagggggcggggctagagacgaggaccaagtccagaaggcgtggctggggtggggcgaggatcaagcccggaaggcgcggctggagcggggcgaggcctaggtggggctgcagacgagaaccacgccttggaggcgtggctagggcgggtagaggctcggacaaccgctggaaggcggggctggggcggggcgagaccttgggggcggggttgacgacgaggacctagccgagaggtcgtggtctggacggaaaccaggctgcagcaggaccaggcgccaagggcgtggctggggagcgatggagacgctcggaaggtggggagcgggggacggagacagggagaagactacgccatgaaggcgtggttgaggcggggcgaggcctgtgggtctggccccgagcgaatggcttggtagagagtcagagaactctatttttttacttaatgatgcttcttgatgtctatgcacaaggataaatttgtattactggaatatcgtggccaaaggacctgttgaatttttcactttcattgatactacagatattttctgaattggcaagtccaccaagaaactataaaaatgtgtgtgtgcaatggctgcacacagcagcttccttggtagtgtacgcagcctgttggttgtatgggttgctctaagggaccttggagacaggcctttccgatggatgttcatgtttctaaccttgcactaccacaatgtaggctccaaacaggcatgtgaggtgcctttggaaagccccagggcactgtggccagggttgacattggccaagttatcatgtccatcc

SEQ ID NO: 34742 - DNA, 1599 bp, Artificial sequence
  DNA replication origin
acagggcgggccggggccgttaccccggggacgacgcggaagagccaggaccccatgggagggaggcagcgctgccgccgcgcccaaggggcgagctcgagccctgcttacgcgggcccgcgcagtcccgccccagccccgacccccgcggcacctgagctgcggctcatgcgcttctcccagccgggcggcagcttctcctcgtccgccatcttccctcctgccgcagcgcctgctccgcctcagctgcgccgcctgtcgcccgcgcccgcccgccgccgctgcctattggctagacgcgctctgcaacggggcctggcggcgacgcccattgggctccctaacggtccggattggctttctggccttctattgggtagaagaaaggctgggcggaccctcccacgttatccctgcgccccgcccccggccagcctcagcctggccccgcccactcgctctcctcggctcctgagtggtccgaagcgacgcgggcccgcccttctcaacgccctttagcgagcgccaaaaaactcccgaccccttcttggcgcgcgtcgccgcagagcccacccaggcgggatagagcttatggattggctaatgccgcagcaactcccgcctgcctgagctgttcccggaggtccgcaagcccccagccctcccatgcggaagagtctggctggtgcagaggtaacggcggtccaggaggtacttgggcggggcggtgctgcctctgctgttgccatagcaatgcagttgccttggagatgagcacctaagtacccgatgcttaaatttggctcctccatcctccctcttcccacctgtttcccacagatgtccaaagctaacccagcctcttttattttttgcagggctcaacttttccctaggctctggacccaaaggccttccacgtcctttggaacctgcttacttcctttattccctcgcagtctggctccttcctccatcctgggtgaccagtgggtgccgacattgacattcatataagaacacggaggaggtgcaggtgggaggagatgggctcagttttagccaacttaaaatagagtctgcagagcccgtgggacacaggggaggtatttggggacccagagttggggaactgtgggtagatatgggagttgaagacactgacagcaaagggtgcaactacagttcacctagcatagaaccctatgtgaccgttaaaaagaatgaggctcagtgaagtgaactcatagggaaacctgcccacaacaaattagacgcaggatgcagtagaaggctaagagaagtctggagccagacttgggtttaaagcctgggactgacacttgctatgcgaccttgaactgattacttaacgttactctgtacttcggtttcccaatctgcaaagcggggataagcaattacatccttctgtttgatgtgaacattaaataaattaatccacataaagcactcaagccaggctcggtggctcacacctgtaatcccagcactttggaaggccgaggtgggtggataacctgaagtcaggagttcgagaccagcctggccaacatggtgaaaccctgtctttactaa

SEQ ID NO: 34743 - DNA, 1674 bp, Artificial sequence
  DNA replication origin
gagtgggcggggccaggctgaggctggccgggggcggggcgcagggataacgtgggagggtccgcccagcctttcttctacccaatagaaggccagaaagccaatccggaccgttagggagcccaatgggcgtcgccgccaggccccgttgcagagcgcgtctagccaataggcagcggcggcgggcgggcgcgggcgacaggcggcgcagctgaggcggagcaggcgctgcggcaggagggaagatggcggacgaggagaagctgccgcccggctgggagaagcgcatgagccgcagctcaggtgccgcgggggtcggggctggggcgggactgcgcgggcccgcgtaagcagggctcgagctcgccccttgggcgcggcggcagcgctgcctccctcccatggggtcctggctcttccgcgtcgtccccggggtaacggccccggcccgccctgttgtggggactgcgagcctcaggagccgccgggaagcctgaggaagctgaggcagggggctgggcgggtgagggtccggggagtccggggcgatggccctggccctgccggcccggctgatacctctcggcctaatgcacctgacaccccgggggacgtctctgcaccttgctgggcccgggggcacccctgggagggagacaccccagtaccctgcaaagggcgtagggtgttgcccggcctcgggtccacaacctacccctgctaacacccctactgtgtacacctaatgctgagtctgcgacatcgcccgtgacattctgccagacgatggcccctgtgcttaggcccgatttaagggttagccacaatgataatattgccagtaacagggcatgtttttctctgtgtcaagcgctttaagttctctctgaattgccgcaactctgggagccaggtagttattacttccaccttaccagcaaggaaactgaggtcagaaaactgaaggaactcgtccaagatcattcatttcaggggccgggggttggattaggacctaggcagtttgcctacaaatccccctccccgtgtcactgcaaactcctgaggagcaggcccagcatctgtgggcaggtcccgagtcactctgctgcctctagagcccatagcaatcgcatttgcaataataattctccttggttgagtgccaggttctggtgaactgtttggatacatggactctcctcattaaccccatgaggtttgatctccttattctctattccccatttttcagatgagaaaactgaggtgcagggagattagagcccattgccaaggttttagagtgagtcagtagctcagctgcatttgcacctggaacccgcgctctcgcccaccctgctctagccctggcctgtggctgggacctccagcataaaccggatgctctgcccagctctgggcccatttctgctgtttctgctcagttcaaccctgatggcttcctttatgggtgacactccatgtcacccaggcgaactgtcagcctttggagtggcacccagtagggtctttacttccagtttcttgttcacagtcttcactccttcatacccctcactccctgggtaacatcgggccaccagtaatgctggttcctagctctgcaacaccatgcacggtgtagtagctaagagcagagctttcgggtgt

SEQ ID NO: 34744 - DNA, 781 bp, Artificial sequence
  DNA replication origin
cacacgctcagagctccttttgagtttgtggcttttgttacaaacaaggatgggcaggcagactaacatttcccaggccaggatcaatctgtgtgcgtcttcggctatccactgctaactcactgacttcccctctcatcatggacgtgggcacagcgaagccaactcctgtcctggggcagtaataccgtttaccccaaggtgacctgctccagctctgcccagcggccacagaagccaggggcacgtagagactgaccccctggggcgggtctggcctgggaggtgcctgtaagtggcactagggaagactacactgtcaccatcctaaaggcctgggatttatgccctggttctagacaggagggggtgagggggtgggtgggaggtgagggaatgcgcagctgcttaataatgaatcaccggccccgaagtgggctctggaggcatgtttacctaacagcgacattctcatttgggttttggccactgcacagacagacaagggaagggggtacctggaggggcaggtggtcacactcagaaccggaggactctcagaaccggaggactcccaaaatgcacaggacagagagacgaccagtcacatggccccacacattcttgggcaaacgcagacacacatacacacgggtgggggcagcggctcccacacagaacgatgcacagccttccctgggccctgctgctgatggtcaggacacaaagcccattcttcaccctggagtggaactcagcaaaccctctgggccccagccac

SEQ ID NO: 34745 - DNA, 1155 bp, Artificial sequence
  DNA replication origin
ggtgacagagcaagactgtctcaaaaaaaaaaaaaagaaaaaaaaaattccagacctcttagtaatgcatcaacagtgattgcagagtggcaatccagtgacgggagaatactcatttgaggccagttttcattgctgtgctagaattctcggttgttttgatcaaactgcttttaaacgaattgctttcgatcaaaacaactttggattgggtctcctcacccatctccccaaagggctggccctggggaaccccttccccccagttcgcttaagcttgagtcatggaataaggggatcctcactggagatgggtctccaggcttggacttcggggccacctccacctctgtcgccattggacacacacagtcaccgaagcgtcaaatgtcaaaggtcctgtttattccggcaaaccggaaagaaaaagtgtaaataaaaaaagaaacagatccatgcactcaactcctgggggtgggggtgggggtgggagtgagggatgaggaatgggtgggaagcaaggagggaggggtggaaggacagagagagagagacagagagaggcagagacggaaagaactggagaaccagagccataaaaagaaaaagacatccataaaaaggcagaaagaaagaagtggtgtattaaaagcagagatcaataaaggagaagaggggaaattgaaaaaatagacagaaatacataggcagagaacaaaagcccagcaaaaaggcggggagaaagggcgtgacagagacagagagatcacccttgagggacacaggcagaatgaaaagggcccccagcccccagaggccccccaggcagcagcccgagccacagcattggctcaggggtccccagaggtgctgatgacgtgaaacagggtgacattgtagagcacctggtggccgttgttccaggtatagagggcgcgctcccgggggttgtaatccagcatcgagatgtgggaatactggttgtggaagggcacgtccgtgtactcgtaactggacgtgttggtaaaataggcgaagtagaccttggccccagccaggtgggagttggtcacgtagagcacaccgcagatcatgaaggcctcgccagcgctgcgcttggggtagccggtgtcccaggaccgcatgacctcgagg

SEQ ID NO: 34746 - DNA, 1002 bp, Artificial sequence
  DNA replication origin
agatcacccttgagggacacaggcagaatgaaaagggcccccagcccccagaggccccccaggcagcagcccgagccacagcattggctcaggggtccccagaggtgctgatgacgtgaaacagggtgacattgtagagcacctggtggccgttgttccaggtatagagggcgcgctcccgggggttgtaatccagcatcgagatgtgggaatactggttgtggaagggcacgtccgtgtactcgtaactggacgtgttggtaaaataggcgaagtagaccttggccccagccaggtgggagttggtcacgtagagcacaccgcagatcatgaaggcctcgccagcgctgcgcttggggtagccggtgtcccaggaccgcatgacctcgagggtgtgcgggtccagccggctgaccacgatgttgcccgcgttctggttggtggtgtacacagcccagagcccgctctcgtccaccatgaagtccatgtcggagaagccgccccaggagtaggggaaggtgttgttgtaaccggcgcccgggaggctcctctgcaccagcacagagcgcgagcggaagtggtatttgaccaccacgttgctctggtacttgttatagaacagggagccgttgtacaccacgtggcccgtgcccgcccacggctggggcagcaggtgctggataaagttctggcctttgatgaagtctcccagggtacggaactccaggacccggcggcctttgtaatagccatccatgtaccagacctatggtagcagccgctggtcactggggggaaccaccaccaacgacccaagggtcccagcaccagctacagccattagagttcaacagtcactaagtggtcattagtcatgggaactctgttgaccattcattaccaattatggccctagtgtgaccatgatcatctcctggtgacagcattaaccatgggcagtgaattcaagtgacgtcttatcactcaatggctgtccagtga

SEQ ID NO: 34747 - DNA, 602 bp, Artificial sequence
  DNA replication origin
ctacatagtcacagctgggaaggaaatgaccaggcaagaggagagtgagtgagcggctaccggacagggtggtcagggaaggatgctttgagtgggggacgctggagctgaaccctgaaggatgagaaggagccagccatgggaacttgggggaacagcactccaggtagagagaccagcaagtgcaaagaccctgcagaaggaaggagcttagagtctgtgagaacaaagagagaggaagtgggttgggcggggggggtgggcaggaccagccagcacaggatctgtggaggaggaaggtgatctaatctctgttttgaaagttccttctgtctgctgtgtagagaattgactacaggggatgaaggtggaactgggagactagggaggaggtgagaggtggtggtaggtggaccagatgggagccagtgggtagtagggagggagcgatggatggatggattgggcacgcaattgggaggctgctggtaagctcaggggaggagaaggtggcctcgtcggtgtggtgtttgtacagcctctgttcctgccagctcttgtctgtggcatctctgggttgggatttggggaaggaggtctgg

SEQ ID NO: 34748 - DNA, 1157 bp, Artificial sequence
  DNA replication origin
cgcagctcgcgctcgtgccccctcccccacgcccccccggggcgcctgggtgtcgagggaccgagcgccccgcggcgggccagagaagggacgcgcggcgggcggccgcggggcatgaggcggaggcgcgatgtcggtgccgctgctcaagatcggggccgtgctgagcaccatggccatggtcaccaactggatgtcgcagacgctgccctcgctcgtggggctcaacggcaccgtgtcccgtgcgggcgcctctgagaaaatcgtgagtggccgccgcgcggggggcgctcccggggggcgtggtacccgcgccacagccgctgccgccgccgcagcccccggggcccccacctgtccccctctacccctgtgcttcccacgaccctgcccggcacgcctgggtaggggacgccctctcggggttccagggtcggacgtggaggcagaaggagccccgggacccctagccacctccgcgccatttaggatggttcttgctgttattattgattattatgattattagtgagcaatgtctgagcgcgaatagcgtaccaggctcgctccggccccagggcggaggcgacaagggctgcagaattgagctgagtccgggctgagtggggtgcagcgggaggagggtgagactcgggggtttagaaggaccctgtctctgaaagaggggaggatcgaggggtttccgagtgtctccaccttcaaggtctctgcctggttgcgtctcggcgtctctgagtagttctgtctgagtctctattcatttcccctgctttgcgtctctgggtctctttctattaatatttctatctttccttgtctctgtctctgtggcgctgagaatttgtatctctttttttctctctttttctctcccctgcaccccttccgccattcttgcctcgccatgtgctgaatatttatccccataactcaccctccctgggaggtagacggggcgcagactggggccggagctgacactgcctccagaagctccaggatggcgccttcccatcccatccccctttgaggctttatcctccagcttccccactacagagcttccctggatcagggaagaaggagagaactcagtggggttctccccgtggtgtcctgaggagagaggggagggg

SEQ ID NO: 34749 - DNA, 901 bp, Artificial sequence
  DNA replication origin
acagtgcctgggacatagtagatgctcagtaaattacctgattctcaggatgaccaagccctttacacgtgttaggtctccaccacccactttgcagatggggaaactgaggcagagaggaacagtcatccctacaggtcacacttgcatcttggtgttgtccagctcagaaaaaaagacggttcgagacccctagcccccctccccgctcatgcttggcgctcctccccagccagagccctcagccccaggccgccgcctggaaaggcctgagtcatcgccgcctccagacggcggcggccgcgggctgagggcgacggcggcggcggagcgaggtgatgcggggacgccaggagggggcgtgagtgcaggcaaaacagaggaaattaaaactagcccggcgctcctctccgcggcccagcggctgccgccgccggctgatgcgtgggcggacgggtgggcggcgagggcactgcgcttcccgctcccccgagggagcgggccgggagcggggtccccggggccgcgaggaaggtccgaagcgtgagtgccccgcccccacccaaagttaaagttgcaagtagacacctgcccgggactcgcctcctaaaagccgcgtgccaggtctccgtggtccctgggtaggaaactgcccttggtagtcgtgggaactcctcccgtggccgaagtgaccccaggaccgcacctgcacccaaacaatttcgtctgctggccctggatcacgccaccctgggggcacgaaatgaccgaaggatccttagagtggtctcagtgcccgggaaggaagccccttcccccagctaaaggagacccttggtgacccgattcatgggagcgcacgagcgtgtcgcccccccacgccccccaatgcccgctgtcc

SEQ ID NO: 34750 - DNA, 1248 bp, Artificial sequence
  DNA replication origin
tcctcaggtcccctcgccggcgctggctcccccacttccccgcccccacccccccacccgaccctgctcgagctgctcccgaagaggagctgggggcggggcggggggcggagcccgcaacaaagactcggagcgagcgagggggcgggggtggggcggaatcccggccgccggcgaggcgggggaggcggcggcgcagggtcgccccggccgggcgggcggggtcgcgcctggtggcggtccccgcgccgaggcgccgctagggcgggcgggggtcgggacgccgggctaggggcgcgtcatgtggccgctcacggtcccgccgccgctgctgctgctgctgtgctcaggcctggccggacaggtaggggcccggcgggcaggtgcgggcgcgggtggctccgggagaggaggggggcgcggagggttcccggagaaacggggttgggaggctccacaagcccccccagctgcagggcggcgaggggcgggggtcgcagcgggggaggggccgggacgtgcactctctggcttgggagaggacgaggggggcttcaaatccagcctcaagctgggctggtttggggggtggcgtctttggggttctcaacccctccatggccccgagcccccaccccgccatctcgctggagctgaatggggttgggagggaaacttcagggggcattggaggggggcggttgcttacccttgacttcctcttcggggccgagatgcccagtttctgaagccctccactcctcgcctgcagcccccagtgtggggcaggggacgggactcacgtgagagtgactgacggggacgcgtgtgaaatgctgtgggggtgcagggtaaacgtgtgtgtctttgtgtcgtggttgggtgtgaccggggggagtttgtgtgtgtggcggttggggggcttgtccaactagtgcccgagttggggtgtgatcagtacgtgagacagagtctgtgtgtgaccgtgtcctcattactggctccagatgactgggtgttgtacaatacgtgtgtggccaggtgtgtggccgtgtgagagccttggagtgagcgtgtgctattctgtacctttgggtaaatcactctaaaagggtgtgtgtgtgtgcaagcgctgtgtgtgcaaacgtgtccatccatgcacgtgtgtgtgtgtatcttggtgccttgctcacaaccgcacacgccattcatacccttacagaagcgggtctccctccccatggcacc

SEQ ID NO: 34751 - DNA, 1295 bp, Artificial sequence
  DNA replication origin
ggggggcttgtggagcctcccaaccccgtttctccgggaaccctccgcgcccccctcctctcccggagccacccgcgcccgcacctgcccgccgggcccctacctgtccggccaggcctgagcacagcagcagcagcagcggcggcgggaccgtgagcggccacatgacgcgcccctagcccggcgtcccgacccccgcccgccctagcggcgcctcggcgcggggaccgccaccaggcgcgaccccgcccgcccggccggggcgaccctgcgccgccgcctcccccgcctcgccggcggccgggattccgccccacccccgccccctcgctcgctccgagtctttgttgcgggctccgccccccgccccgcccccagctcctcttcgggagcagctcgagcagggtcgggtgggggggtgggggcggggaagtgggggagccagcgccggcgaggggacctgaggacaggacttggcagcgccccccaacccccaggccattccgggagcgggtcgcggaggtgggggaggggtgcccgtcacgtgtttgtaaatttcaccctccgggggcatttcccacgttgcaggtgggacggggacgaatggttgggggagaggaataggaggaaggcctggtagcagagaggggaaatgatgaacgccccctccctaaaaactcaagagtcaacagggaaactgaggcagaatctgaaattggaagttggaggaggggtcaatgccaggacaagaggggtgaggcatagatggagacggggaataagaggaaaaaattgaggttggggggacaggagaccgagaatcaggcaagaggccaatggaaatggccacgtgggtgggcttggcctcaaaaaggggcgtctcgttttcactctccccgggcgccccatttccccaccagtcctcccgctggaagcctccccgcctccgccacacctggaagagtttctcttcgctccctgtttcaatagcccaagatgaaagaccacatcccccgagagaatcaaaatattaacaccgcctccacgcgaagccatttgcatatgaagggcgtccttgtctagcctcactttcgggaggctttccagcctttctctgcctctcactcctccaaaagtctccctaggccgggcgcggtggctcacgcctgtaattccagcaatttgggaggctgaggagggtggatcatctgaggtcaggagttcaagaccagcctggccaacatggcaaaaccccacctctactaaaacatacaaaaattagccgggcgtggtgg

SEQ ID NO: 34752 - DNA, 1457 bp, Artificial sequence
  DNA replication origin
tgtctgcttatctctcctttctctatctctgccccttgtttatctctctccctcctctttctcatttgtgtctgtctgcctcttcatctctgcctgtctctctttctccctctctctccctcccccatctcccctctcttctccgtccccatcccctacgcccagggtgcccctgccgagctgcatgggctgcgcaggcgccggcgcttcgtcccagtcccgcttccagtcgtggagggcggcctggaggaggtgctggcctcgctcacatcgctgagcttggagctggagcagctgcggcgtcctcccggcactgcggagcgcccgggcctcgtgtgccacgagctgcaccgcaaccacccgcacctgcctgatggtgaggtccggtccccccgccacttggatgggcggagtgggggtgtggggggggttggggtccgtcgggtcccatccggactcacccaccctgcctggctctgcggcaggggaatactggattgaccccaaccagggctgcgcgcgggactcgttcagggttttttgcaacttcacggcgggaggagagacctgcctctatcccgacaagaagtttgagatcgtgagtaacccaaacctctcatcgcctcccccaggaagtgctgtcccctgctccccacacccacaaccaccttgtctgggacgttatccttccttcaaccggcatttattgagcacttactgtatgccaagtcctgcctcaagagctgggactacagcagaggatcaaaaagaaaaaaaatcaggccagcctggtggcacatgcctataatctcagcattttgggaggctgaggcgggaggatcgcttgaggtcaggagttcgagaccagcctgagcaacatagcaaaaccccatttctacaagaattaaaaaactggcgggcatggtggtgcgagcctgtagtcccagctactctggagactgaggcgggaggatcctttgagccctagaggcagaggttagtgtgagccgagattgtgccactgcactccagcctgggagacagagcaagtctccttctcagaaaaaagaaaggaaagaaaacaaactatctctgcttttatggaactcataccttccatgggaagacagacaaggaaaactccaaaagaaatcaataggctggatgtggtagctcacgcctgtaatcccagcactttgggaggccaagcgggggcagatcacctgaggtcaggagttcgagacaaggctgaccaacatggtgaaaccccgtctctactaaaaataaaaaaatcagctgagcgtgatggcgggcgcctgtaatcccagctactcgggggctgaagcagcagaatcacttgaacttgggagacggaggttgcaatgagccaagattgcaccatggcactccagcctgggtgacagagtgagactccgcctagaaaaaaaaaaaagaag

SEQ ID NO: 34753 - DNA, 939 bp, Artificial sequence
  DNA replication origin
ttgtgggtgtggggagcaggggacagcacttcctgggggaggcgatgagaggtttgggttactcacgatctcaaacttcttgtcgggatagaggcaggtctctcctcccgccgtgaagttgcaaaaaaccctgaacgagtcccgcgcgcagccctggttggggtcaatccagtattcccctgccgcagagccaggcagggtgggtgagtccggatgggacccgacggaccccaaccccccccacacccccactccgcccatccaagtggcggggggaccggacctcaccatcaggcaggtgcgggtggttgcggtgcagctcgtggcacacgaggcccgggcgctccgcagtgccgggaggacgccgcagctgctccagctccaagctcagcgatgtgagcgaggccagcacctcctccaggccgccctccacgactggaagcgggactgggacgaagcgccggcgcctgcgcagcccatgcagctcggcaggggcaccctgggcgtaggggatggggacggagaagagaggggagatgggggagggagagagagggagaaagagagacaggcagagatgaagaggcagacagacacaaatgagaaagaggagggagagagataaacaaggggcagagatagagaaaggagagataagcagacagggagagacacacaggaaagagagagacagattcagagatggggagaagccaagttgtaagaggacaaaagagaaagcgcaagaatagcagagacagggagagagagcagggagagagacagaagatgaaatagtggcgccagtatagacagagacagataagggagatggacagagacagggagggagagatggggtccaagagacaagacccaggtcagagcccccatgggtgtccccccaagtcccccctcccaggccagaccttccttggg

SEQ ID NO: 34754 - DNA, 1732 bp, Artificial sequence
  DNA replication origin
ctccaaacggtgatgggatcacaagctgggagcagacagagaggagctggatccaccctgtcccacccctgccccgctccactcaccacagggccagggatccctcgaagaccctcaggccccacacgtccagggggccctctagcccccattggacccgtcctccctgggggcccatcaggacctggctccccctgaaatggacacaggcaagggaggggccagagtcagagggttcctgcctcctgacccctgccaagaagcatctgggatcgggagggagtaggtgcacagagtggtcataggtccaccctctcctgatggccccactgttggcctagagtagtgcagggacccttccccttgccagggggactcaccttggcacctttctccccttctctgccttctcgacccatgtggcctgaaggacccttggaagggaaagacagtgaggggggtctaggggctgactgagggtcagaggggtgagtggggtctgggtgactggggggttatggatgagtggggtctgtaaggtgagtggggtctgtggggtgaatgaggtctgggtgagtgggggctgtgggtgagtgggggctgtggctgagtggaggctgtgggtgagtggaggctgtgggtgagtggaggctgtgggtgagtggggtctgtggggtgagtggggtctgtgggtgagtggggtctgtgggtgagtgggggctgtgggtgagtgggggctgtggggtgagtggggtctttggggtgaggtggggtgtgtggatgagtggggtctgtggttgactgaggtctgtggggtgagtggaatctgtgggtgagtggggtctgtgggtgagtgtgttctgtggctgagtggggtctgtggggtaagcgggggctgtggggtgagtggggtctgtggggtgagtgggggctgtaaggtgagtggggtctgtgggtgagtggggtctgtgggtgtgtggggtctgtggggtgagtgggggctgtggagtgagtggggtctgtgggtgtgtggggtctgtggggtgagttgagggctgtgggatgagtgaggtctgtaaggtgagtgggggctgtagataagctgaggacccaggaggtggcttatcacttaccctcttgccggggggcccgggggcgccgggctccccagaagctccaggcggaccctggaggagacaaggacaccagctgtggtctcagctaacattgtttgagcctgactgttttaggacgccttggaccagaggacacccttccccaagcctcaccccagcaccgggtactcccacctcccacctactccctcaagctgctcacattcctgggggtccccagagaggtgaagcgggagcatctgcaggggccttgggtaccccactagcccactcccctgcccccccaattcactcactcattagctccccaacccccgcctcagcaccacaccctctgttttcccactcaccggtcccccaacatcaccagggtctcccttctcccctggggaaccatctatgccctgcatggggggaagacagagttgggaggggtgatgagggtacgtgagaatttgggatggggctgggaggcaaaagaacgtttttggttccactgtcagtgcccaggtctgtgggggtagggagatggggacagaattaggaaatatgccaggattggggagggggtcacactcactgaaactccagggtct

SEQ ID NO: 34755 - DNA, 1288 bp, Artificial sequence
  DNA replication origin
caacctctgcctccctggttcaagcaattctcctgcttcagtctcctgaatagctgggattacaagtgtgtgccactgtgcctggctttttttttttttttttcttttccctcttttgagacggagtctccctctatcgcacaggctggagtgcagtggtgctatcttggctcactgcaacctctgcctcctgggttcaagcaattctcctggcacagcctcccaagtagctgggattacaggggcccgccaccatgcccagcaaattttttttttgtatttttagtagagatggggtttcaccattttggccaggctgatattgaactcctgacctcaggtgatccacccgccttggcctcccaaagtactaggattacaggcatgagccaccgcacctggctggagataaggtttgagtagaactgaggttaaggtcatgagtagagttgagactggggctgaagtgggggttcagagctgggtttaggttggaatttagtctgattttaaggttgagtgtatattggacatcgatatagaggggcagatcaaagttgagcatgaggttgagattgaaccagattctggggttgagtccatattggatgttggcattgaggggaagacatggttggagttgagattgagccaaattctgggggtgagttcatattggattttggtattgagggaaagacatggttgggttgggactgggcaggattctggagttgagttcacattgggtgctggtattgagggggaacacatggttgggttgggattgaatcagattctggggttgagttcacattgggtgtcagcattgaggggaagacatggttggattgggattgagacaaattctagggttgagttcatattgggtgtcggtattgagggaaatacatggttgggttgggattgggccagattctggggttgagttcccattgggtgttggcattgaggggaagacacggttgggtcgggattgaatcagattctgggggtgagttcatattgggtgtcggtattgaggggaagacatggttgggttgggattgaatcagattctggggttgagttcacattgggtgtcagcattgaggggaagacatggttcgactgggattgagccaaattctggggttgagttcacattgggtgttggcattgaggggaagacatagttgggttgagattgggccaaattctggggttgagttcacattggatgttggtattgagaagaagacatgattgggttggggttgactccgaa

SEQ ID NO: 34756 - DNA, 757 bp, Artificial sequence
  DNA replication origin
tggggttcctcccactatgtccacacctcccactcacctgagtctgctgcagaactgcctgagcctgggcctgctggaatgagactggggggcctttaaaggagccgcctgcaaactggaactgggaggaatttagtggtgagggaagcccccaggagaggccccctcctggatcaggactccactccccaaggctgggccactccatctccttcttaccggcatcatgatcacagtgcccggtgggcctcggatcccatcaatgccggggattcctgggaggccagcagggccctgagagagggatgggggaagagaggtggagacagggagagagggagagagagagcgaggacaggggaggcacagaaggatgagtcagaaagagagagagagggagagatggagagagacacagaatcaaagagggatcatggcaaggaaagagagagaagtagagagaagtggaaaggaaaagacagagatggaacagagacaaagagaaggggagagagggatggagaaggatgggggcagatggagagacatacagagacagaaacagagagacagagagagatagacagagacagaaaagccagtgaaagacagacagagatggagaaatagagagagaggcgaacatagagagatggacggagggagagggacagagaccaacagagagagacagaagagagacagagacagagtcacaacaggagaaagacagagataaaagacactcagaaacaga

SEQ ID NO: 34757 - DNA, 869 bp, Artificial sequence
  DNA replication origin
aaactgaggcagagggtgggatgttttgtctacagcctgaatctggagaggatattaaagaaggaagatgtcaagcttcaatctatccccaggaagctaagggaagcgagttcatgctttcgtgcaccgttgcagcctgtgattgtgagattgcagagccacaagacaataatttttttttttttttgagatggagccttgctctgtcacccaggctggagtgcagtggcttgatctcagctcactgcaacctccacctcatgggttcaagcgattctcagcctcccaagtagctgagattacaggtgtgtgccaccacgcccagctaatttttgaatttttagtagagacaaggttttgacacgttggccaagctggtcctgaactcctggcctcaagtgatccacccgccttggcctcccaaagtgctgggattacaggtatgagccaccgcgcctggccaagaccataaattgtgacgatgcctacttggcttgttgtgggaagatccagttgtgccagtgcatgcttgtgtgtgccgttgcagtgcatgactgtgagattgcagagccacaagaccataaattgtgacagcgcctacttggcttgttgtggaaagatctggtggtgtcgtgtgtctgagactgtgacctgagatggtgctggttgctgtgatagtgtgtgattgtgtgggggcggttatgactttgggagccagcaggcagctgtgttgtgtggttgtgtgatatgtgttctgggtgtggagacctttgttagctgtgtgtgaccgtgatgtgtgtcacctctgggaggccagggacctgatctatctcatgttcctccttatccccagtaccagctcttcccac

SEQ ID NO: 34758 - DNA, 1263 bp, Artificial sequence
  DNA replication origin
agaaagagacttggacacagatggaggcctggaaagacccggcacagaaagtgggacagagagagggcgggcagggatggggagagaaggagattggaggcaagaggaaacagaggctgaaacaggcctccgaggagtctggaaaatgagggttctgacctaggaagagtgggaatgggggtccttcatccaagcccgtgcctccccaacgtcttagcccccccgccccagctccccgtggtgagatcagcagagccgcccccaggggtgaggtcatggcagattctggagaatccagctcccgccaagaggctggggcagggggtcagtgggacagtttgctgagggttgggggatgggggaatcagacaggggctcggggcccaggggaagcccccacccgcccctgcccaagccatgtggttccacttagcactggctgggctgcctgctggggtggggctggtagcatggcctagattaggaactgttgggccagacaagtcctttccttagctgggatgaaagagggagagggtcagacaggggaggtctggaggttatcggagacagctggtcagaaggaggaagtcagagagatgaaatgaggaggtcatgggtcagatggaggagatcaggataggcagtgggagaaggtcagggggtagtcagagggaggaggtcagagggagttgatcagaagggaatgtcagagggaggaggtcagaggggaatgtcagagggaggaggtcagaggggaaagtcagaggagagatcagaggggaggctcagagggaggaggtcataggggagagtcagagggaggaggttagaggggaaagtcagaaggaagaggtcaaaggggaaagtcagagggaggaggtcagaggggaaagtcaggagaggagatcagaggagacattcagagggaggaggtcagagggcaaagtctgagagaggaagttcatagaggagggtcagagggaagaggttagaggtgaaagtcagagggaagaggtcaaaggggaaattcagaaggaggagtttgggatcagacagaaaaaggagatcagagggaataggctggggtcaggcagaagaagatcagaaggtcagagggggtaaccagaaaaagaagttagtgggcatggtcagaggcagatggtcagagggaggagatccaaaatggctgtagtcaaaaggaagaggttgtgggtgatggtggtcaaaggaggaggttagagagagggaggaggtggggga

SEQ ID NO: 34759 - DNA, 1030 bp, Artificial sequence
  DNA replication origin
gcaggattgagaccgacgacctcacccagcctggaggctctcccctgacccgcaccctaacctctctgcagaggaaagagggtcttccctcaactaccactcatttacattaagaaagtccttcccggcatccaactcaaagctctcctgcttgaaacttgtgtcccctctggaatgacctttcagaaactgactgccctttcttttcacagctggcattatgacaaaaaggcacacaagctgcattgagtcctgcctacaggggacaaggggtgggggggtctgtcaggggcccagcctgccccctgccactctcccctgtgctggtcagggcccccacggggatgttgggtggggtctgggatgtggagggacagaggcggggactgagtcagggcatggctgggaaccccccaggtgtgcgatgtgtgtgcaaatacgtgtatgtgcatgagattgtacaagcgtgggtgagtctgagtgagacaggcagagaatagctgggcatatgtcgtttctccaggtgtcaatgtgtgcaaatatttggcttctaatggagggattagatacacttgcttgacgtgtggccatgcaacgcttgccgtgagcttgcaggtgtgtctgtgactttaacacctcggacttctgatgggggagtgccgttctgtgtgagagtgtgacccagtgggtgagtgggtgatgggttgtgaatgttgacagtgtttgttcggatgtcaggggcagcatgtgtgagaatttgagcacgtgggagggtcataaaagctgggaccatttggcgggtggctgaagggggttgcctggacacggtgtttcacattcctggagtcccaggggacttatattcagagtggatgcctaagattccatgaccatgtggatgtgtgagcgtgggaatgcggcatagtccaatcagggattaaccatatggacaggcaccttcctggactccaaagtaagaagtgtgctgtggtgtgtgtgtgtgtgtgtgtgtgtgtgtgtgtgtgtgtgt

SEQ ID NO: 34760 - DNA, 904 bp, Artificial sequence
  DNA replication origin
gtcagcgctccccctccaaaaagccccgcctggccaggcgctggagcgcagggcgaggccagggcggggtctcgggcagtttcccgcggaccctgagaggagcggccgccgcgagtgactgcaccgagcccgagaagtcgccgcgccccgcagccgccccgactggttccccgccttgcccgtgggccccgccgggatggggaaccgccgggacctgggccagccgcgggccggtctctgcctgctcctggccgcgctgcagcttctgccggggacgcaggccggtgagccgggagggaagagatgggacccagggtccacgactcagagaggctctaaaagagcgaggggtggaggggggtggaggggcgtggaggggaagggcgtgggcgccgcgtgcggccccggtgtgatgtgggcgcatgagtatctgactctgggtgatttgtgggtgtgacagctcggggtgggggtggggatgtgtgagtgcgttttctggcgagcgcgtgggaatgcatgcaatgtgcaggtgtgtgcatgtgtgtatgtgtgtgtagcatgtgtgtgcatttggagtgaagttgcgtatgtgcttgcgtgtggaggttgatggtgatagtgtgactgtgagtgacagggcagtgctgggacggtgtgtattgcgacaggtgagtatgcacttgtgctcttgtctatgtgctgattttcgagggtaaccgtgtgagtggttatgcgtgtgattgtgtgtctctgagtgccgctatgaggggtgtagttatgatttttgggtgcaaataattgcccatgaggatgaaggtgggtggggacaagtattggggggtgctcttcgggaacccacagtttcctttgcgtctctttaaatggcttcacctcattctccctt

SEQ ID NO: 34761 - DNA, 981 bp, Artificial sequence
  DNA replication origin
tgctggaggtgggggtcccagcacggtgaggggggcctctgcctcatcccaagaatggcaagaatccaccccttcctccccagtggctgtgcgttgctttgcgacagggacagattcccaccacctcccaccaacgcgccggcctttttttttgagacagacagagtcttgctctgttgtccaggctggatcgcagtggcacaacctcagctcactgcaacctccacctcccgtgttcaagtgatcctcccacctcagcctcccaagtagctgggactacaggcgccagtcacaatgcctggctaatttttgtatttttagtagagatggggtttcgccatgttggccagctgatctctaactcctggactcaagcgatctgcccgccccagcctctcaaaatgctgggattacaggcatgagccaccgcacccagctcagactccctcatttggtggggatttgggattgaggccggggcatccactggagacctgagttggggcggggggagatgagggttagggatggagatgagaccctttatttgaggaatcaagaatttggggaaagtgaaaactgtgttttgggatctgtggtgagaatttgggaccaggacacgtgacttagggatttgagtggacagatgaaggtttggagtaaggctggggaccccattttgggatctggggtgagatttgaggtgggatgaggacccgttagggacttgaaggaaaggctttggggctgaggctggtacctcctattgtgcagctgagggactgaggataaagcaggtaggtgagtgagagttcggggtgaggttgggaccccagttgggggcctgagtgaggcagaaaggacttggtgccaggggcggtggctcatgcctgtaactccagcgctttgggagggcaaggccggaggatcgcttgagaccagaagttcaagaccggcctgggcagcatagcaagatcccgg

SEQ ID NO: 34762 - DNA, 1328 bp, Artificial sequence
  DNA replication origin
aatggaatgacttttttttgtcgtgctgaggttaagagaggaacgggcagctattcgctaccatttgcaaacttgattttggaagtaaggaaaactagagtacgggttcctgtctgattggcagggaggcacatgtaggtggaaaagccacagagaaaaaagagtccttgaggcatgcaaaactggaagtgcagagtaaaatggtgagagtgtgttttggaagtggggtcctgcacccagacccctagggatccagcaagggcagcagctgttaaaggttgtagtggggtttgatagggtagttgtgtagagggagaggttctgttttcatggaagggtaaaggaacataaggaagatgggaggctccctaagggaattccagtaggtaattgctgggagacgtataagggggcagcaatggggatagtttctgtgtagtgaggggtccaagaacagggggtgtggcattgatataggcagacagctttttttaggtaggtacagaggagagtggcagcttgttgttaaaacatgtcaggggaatttttactgaatttgtctagaaagtaaagaagttgttcgggagggcaaaggtggggggtcactgaaagaggttcggaggtgtagggagatgggggaggttgcccagtcagctggtagggcagggacagctgtgtagtaggaggaagagagggaaatgcatagccaacaatttttggccaaggaaggaacaggatggaggggaggacaatctgattaataaggcgaaggtcttggactagtctgtaggatttatctggcttttgaacaggtagggtgggagagttgtaagcggagttggtaggaactaagaggccatgctgtagtagacaggtaataacaggctttaggccccttaatgcctgttgtgggatggggtattggcattgagcaggataagggtggttaggttttaatgggatgataaggggtgaatggacagttgcaagggaaggagcggaagtatcctacactttaaggttgaggtggggagatgaaaggggaggttgccagggagggttggaattggataaaagggtagctatgagatgtggctgtagtccaggaatagtcagggaggcagataatttagttaaaataccttggcctgataaggggactgggcaggtggggataaccaggaaggaatgcctgaaagagtgttgcccgatttgacaccagagttggggacttttaaggggtttagaaacttggccgtcaatacccacaacagttatgggggcaagagaagcaggctcttgagaagaaggtaatgtggagtgggtag

SEQ ID NO: 34763 - DNA, 694 bp, Artificial sequence
  DNA replication origin
cctggctatgccttggacccctgcgtggtaggtccactgggggtcttcacggggtacttccctggcacctttttggaggccaggctcaaggcaccagtggtcatcagcataagactgagctagggtccaaactcgctctcgctcctcaggagtgaacgtagaggtgaggatgacgtttaagtcattccagttaagattatagcactgggttaagtatcggaattcttgtatatagttcgtggggtcagacgggaaagagcttaggcgttgactattttgggagagttctgacagggagaaagggacatgaacctggactattccttcggctcctgccacctctcgaaggggaaattgctgggcaggggcagggggaccggccacggggccaaattgtaagccagataaggtgtgaggaggggtggtgatgggaggggcataagggggtgggctgtgggtagaagagggatcaggttctgagggggaattagaacgagttcgggtgggtgagggggagaaatatcagagggattaacagacacagaggaatcggcattgccaatggaaaaaggaggggtagacggaagggagataaggaaaacttgggacaggtcacattgggagcagacggtagggagagatcatagtgtaaaaaaatgcctggacatagggtacctcagaccattagaccatt

SEQ ID NO: 34764 - DNA, 1292 bp, Artificial sequence
  DNA replication origin
gggagaaagggacatgaacctggactattccttcggctcctgccacctctcgaaggggaaattgctgggcaggggcagggggaccggccacggggccaaattgtaagccagataaggtgtgaggaggggtggtgatgggaggggcataagggggtgggctgtgggtagaagagggatcaggttctgagggggaattagaacgagttcgggtgggtgagggggagaaatatcagagggattaacagacacagaggaatcggcattgccaatggaaaaaggaggggtagacggaagggagataaggaaaacttgggacaggtcacattgggagcagacggtagggagagatcatagtgtaaaaaaatgcctggacatagggtacctcagaccattagaccattttgtgacagaagttgtctaagtcccgcaaaatagagaaattgaaagtgccgttttctggccactgagggctgttgtctaatttacactggggccaggcatgttacagaaaaaaataaataaacgtttaggctttagattgggtgaaagctgaagaggtttgagatttttgaggacaaaagtcagaggggaagaaggagggatggagggcgggaggttgcccatgatagaagagggaagattggatgggaaagaaagagacaaagaatagagcaaccacagggatcttcggtgggcatcccgaatggaagtcctgggttgtacggctgtgaccaacgctggatttcagaaacacagataaaaggaggttccttgtctgaaagaaaaagagagagagagacgaagagagactgaggcagcttaatcgatctgtaggcaggagtggggtcattttgcaggggtgggtctgaagtcccaaggtggaagggagtctcttcaaggaagagtgcaggggaatgggggtaggtgtcccggaggagatcctctatcccgggctttcagcaccaaatgttctgcgcgcgtctaattgaagaggcaccctgaacaggctaagtgtgagcaacaagactgtttattcactcggatgcaagcgggctgagtccgaaaaaagagtcagtgaagggtgattggagtggaactggttttataggtttggggtagggtagtggaaagttacagttaggggcagttttttcgggcaggggaagaatgtcacaaggtttatagccacaaggtggggggaggtcacaacgtcaattgattagttagggtagggcaggaacatatcacagtggtggaatgttccaaggtcggttaataagttaaggcaggaa

SEQ ID NO: 34765 - DNA, 1325 bp, Artificial sequence
  DNA replication origin
ggtccccaggaactgcgaagccccctccgcgcctcccggccgctcctcggggtctgtcgcggctgaccccggcccagccgtagccatcgcttacctccacaccttcctgagacatggtggcggcggcgcagttccccgcgagggtccgcactgcgcggctcagccgcccccctacctgggtgcgcccgtcggtccagcagccgcgcagggcagggggcggtgcctcggggccggctccgcccttcctccccggcccctgtttcgctttcgattcaggggggacccggcgcgctggctccgccctggctccgcctctgctcttgcgccccaaacccaggcgggcgccccgggtctgcaccctgcggcggagcgcgcagacctcggacgggggaggcggcgcggcctctgcagtcggtcacatgtccccacgctgcgcggggtccgcgtcttcacgtccctcgtgggggcggggccgcatcagaaggccgcggcgaggccccgcgcccccccacccagcgcgcgctcccccagttcatcaccctcctctctgttctccctccttccccgggaatctggcgctcatgaggacctgggcccttttcctgccctgagtctctgtcctagctacggtcacctctctcaacctcagtttacccctctgtgaaatggggagaatcctggtgtctacaccatggagtggagtatgtgccaagattcccgagtggatcgcgtaatagcgcctggcttgcagtaggcgttcaactagtcactgggccacctgctgtgtgcccttgataggggcaggcagtgtgtgtgtggttggggggagcggtgcttgagaaaaatacagattcttggtctctagtagcccggtagaatccggctgtctcagggatccagggaatctgcaatggttaagaaccccgtgggacggacaattctaacccagtacagggcacatcagggagcccttaggtggtggggctctggcccagcctggggacacagagatggcaacttcattggaggaggggatgctttgtagagtcactgaaattggaggtcttagctaggggaggaatagagtggggagatgaggcagccgtgcagagcccccaaagcaagactaagtctggggtttttgggcaatggcttctcaagcccagcactcttgacactttgggcggcctagttctttgtgtgggggactgtcctgtgtattgggggacatttaacaccatccctggcctccacccactagatgccagtggttccctactctccctgttgtgactaccaaaaacgtctccagagactgccggata

SEQ ID NO: 34766 - DNA, 2095 bp, Artificial sequence
  DNA replication origin
aaagggcccaggtcctcatgagcgccagattcccggggaaggagggagaacagagaggagggtgatgaactgggggagcgcgcgctgggtgggggggcgcggggcctcgccgcggccttctgatgcggccccgcccccacgagggacgtgaagacgcggaccccgcgcagcgtggggacatgtgaccgactgcagaggccgcgccgcctcccccgtccgaggtctgcgcgctccgccgcagggtgcagacccggggcgcccgcctgggtttggggcgcaagagcagaggcggagccagggcggagccagcgcgccgggtcccccctgaatcgaaagcgaaacaggggccggggaggaagggcggagccggccccgaggcaccgccccctgccctgcgcggctgctggaccgacgggcgcacccaggtaggggggcggctgagccgcgcagtgcggaccctcgcggggaactgcgccgccgccaccatgtctcaggaaggtgtggaggtaagcgatggctacggctgggccggggtcagccgcgacagaccccgaggagcggccgggaggcgcggagggggcttcgcagttcctggggacccccatcctagaaccccagatccttacccctgcctggcgctcgccccccttgaaaaggaaagtgactcccacgtttccccagagcgaaatgaggcctccccgaggaaaagcgggggctgcagggtcaaaggtcagaggccagagataacctggccgcccccccacaccttaggctgggacgctcgccccagtccgcgccttcccccaacgccctgtggggactttggctttttccaggaaatgccgtaaagggatgaaaggcggggggggggcggcggaggccaaaaccaagggtcaagttcgggccgggagaacggtgcctagagatgggggagggatgatcccgtttccccttcccccaccggaacccccctgtctccatcccagctggagaagagcgtccggcgcctccgggagaagtttcatgggaaggtatcctccaagaaggcgggggctctgatgaggaaattcggcagcgaccacacgggagtggggcgctccatcgtgtacggtgaggctgcaggggtcccgggcctggtgcggggaccgcgcgtgggagcgccgagggggcgtggtctagggagaggcgttgagatcacctcccccggaggtcccagccttggggaggctctgcgtcgcggctctgggtggcctggaactcccacagacccttcaagggcccttcccttatatgcactctcccccgcaggggtaaagcaaaaagatggccaagaactaagtaacgatctggatgcccaggtaacctatcccctcccctcgcaaaggaccgggtcacgggagggagagcaagaggggggacccgacccgttcatggtgactgacccccctctgaaacaggagggaccaggcattgtcggtccataactcatcacccaatctcactttttcacctctccatcatttgtccggccagggagcctgcaaacagtaggcgctcattatgtgctgattgtattcaatgggggagagagccatgaaactaagcaatgaaaggagccaggattattgccatcatagcgggggcgcagaggtcagagaaggcttactggaggaggaggtaccaagtcttaaaggatggggaggagtgagccctgggaggggaaagggaaagaaaggcaggggtcttggggtgggggagggaatggcataagcaaaggctgggaggtggggaagggttgttagtggcagtctctagaaaggctaggatgagcagaggattggggaggagagagaggcaggggaatggaacccttgtgttgaatgaatgaatgaatgaatgaatgaatgaatgaatgaatggctttgaagcacaggtgcatcatggctactttgcttctttgacagctttggtgatgggaacgctgtggatttagcctgcctgaaaggcttagtgtagggctgttaaagagtataataggccaggcgcggtggctcacgcctgcaatcccaacattttgggaggccgaggcgggcgg

SEQ ID NO: 34767 - DNA, 1287 bp, Artificial sequence
  DNA replication origin
ctcgcggaacttgacgtccagctggtggaaccgggcggctgcgcgctgagcctcggcggacgcgttgagcacgcgctccccgagcagcgccagcgccgcggcaggctccgcccccagatccgcccccgggcccgccccgggccccgcctcgtgctgcagctgcgcgcgcaactggcccaggcgcgcgctcaggccgcggctctccttgcgcagcgcgcgcacctcgccggccacggcgccgtcggccgccgccagcctctgcagctcgcgtaacagctcctcgtggcggccgacgcgcatgcgcagcgccgccagctcgctggcgttggcggcctcgggcgtcgcccgcgtggatgcggggccgctccagcacacagcgcccgtgaacttctgcgggggcagcacgaaggtgtaggtgcagcgcggggcgcccgcccgcgcccacgacgcgcccagcaggagcagcagctgtagcgcacgcagccagggcttccccatcgcggcggacctgcaggcagaggaggaacggaaggaagacggggtgctggggcccagcgagacccctccgcttccacgcggggatgcgcgcgtctacacccgcgatgtcccgggcccataatttcagtccccatctcattccccccacggctggagggccccagggtgatcccactctggcttcaacaccgagctcttggcgccaggccggataacgcatctcaagcattcattcattcgacaagcgaggccgggcgccgtagctcacgcctgcaagctcagcactttgggaggccgaggcgagaggatcgcttgagaccaggagttcgagaccagcctgggcaacatggggagacccctgtctctacaaaaaaaaaaaaaaaaaattagacagacgtggtggtgcacacctctggtcccagctattcgggaggctgaggcaggaggatcacttgagcccaggagttcaaggcttcagtgagccatgatcgctcccctgcactccagcccgggcaacaaagtgatagcccatctcaaaaataaataaataaataaaaacaaggcttatggggccgttcaggccggtaattccagcactttgggaggccgaggtgggctgatcacttgagcctaggagttggagaccagcctagacaacacagagagaccctgtctatacaaaaaatacaaaaattagctgggcatggtggcaagggcttgtcatcccaagatcgcctgagcccagcagttccaggctgcagtgagctgcgatcacgccactgcactcaa

SEQ ID NO: 34768 - DNA, 890 bp, Artificial sequence
  DNA replication origin
gttaagttgtgaacaatgttccaggctgcaaaaacagcaggtacaaaggacctgaggctggaacttgcttcgtgtgaggaagggcctgggaggagggcagaaggggatatggcagatagcacaagtttttttttttttttttttttttttgagatggagtcttgctctgttgcccaggctagagtgcagtggcacagtctcggctcactgcaagctctgcctcccgggttcaagccattctcctgcctcagcctcccgagtagctgggactacaggcagccgccaccacgcctggctactttttttgtattttcagtagagacggggtttcactgtgttagccaggatggtctcgatctcctgacctcgtgatccgcccgcctccgcctcccaaagtgctgggattacaggcgtgagtcaccaagatagcgcaactttttatggatcatgggtggatttgggcttttcctctaaaggaggtgggagccaagaaggattcagggcagaggagggagggagggacgtgaactgactcagatgttcacaggcgccctctggctgctgtcagagagactagacctggggttgaggatggaaatccagagagcagggaggcagctgctgtcatccagatggtgtcttgagctgggaattcagggagggtctgggggcagtggggagtagcggagacgtggaggaattcaggatctaagcagaagagcagacgggtctggctgatggattagatctgctgagatgggttggatctgctggggttttggtctgaggacgtggaagatggggtttccaatatccgacggatgggaaggcagttagtgagacgtttccctcaccccacctcacctccttgcaccctgctccctttgcta

SEQ ID NO: 34769 - DNA, 1495 bp, Artificial sequence
  DNA replication origin
tgggctgagtgggtctttatctgtgtgtcaggcttgtccacatcctggttcttgtgatcacacagtagtgcacagatacaaaacaggtacacacagttgacacccggaaacctatccaccgcaccacagaggtcaccgtctgtctcccacacactcggtcacattttcacacaagtcaaatcacacgaggacggaactgggggaagtaaccatgcagtcatttcccaggggtacaaagaaactcacatagagccccacagagcccaggcccagggtctgagacctgtccaaaggccccaccgacgaccagccacacgccgggagagtcacctccttcccctggtctgcaccatcctgagctcccgagtaactcgagtggactccagggttgaaaaaggaaatggtcgtcccagatctgagagaggctgccaggctgggctctgggcctgggttggggcccccacactgggcccctcggccccccaccctcagccccctctggcttccccattggcagtagagagggagggaacttcataagtcacagagaggggctgaagaatacagagagtcagacagatggagatgggagaggcatagggagatgggagagacatagggagatggcagagaaagggagagacggggagatggggagagacagagagagatgggaagatggggagagaccacagggaggcagatgagaagaaagaaacagggatggggccagacacagagaaaggaaacttctttagtttccatcttcagttataaatgatgaaagagacaactgatgacagagacaaagttacaagagggagaaagagacagggggaagacgagggggaggggagacacatctgggggagaggaggaagaattggggtgccagagagagcaaggagggagaggaggccgatgggggaggagagagtaatgttcagcccagtgagggggtgtccctttcccccactgcaaggttttggggaagaagccagaggcctgaggccaagactgaggctttgagcggaaagaaggagggggcgagttattcacgaaacgcccgccttgccctgagtttccagaaggtgatgtggagtttccatccctcagcctgtctgcagacaggggtacccggggaggacagctggcccagaggagttgcgagactaaagtgaatgattgccacagtcattccctccggtggcttctccccaagtacttggcgccagagcgcccaacattgtgcatacatggtcgctcctaattcgtgggcccgggggacattatcagccttactttgggatattttaggagcctcggaatgcagaaagtggttttagcccagctggaggaaatgggccgaagcgggattcgaaccggcggattcgtttctctgcagcccggagccgcgtagccccgccccggtctccctagaaacaggcacccgtgtctccatagcaaccgctccatctgattgcccctccccgct

SEQ ID NO: 34770 - DNA, 3301 bp, Artificial sequence
  DNA replication origin
gatgaagaggcctctgggatcccttcaaggacggcgagcctggagttgggtgaggacgatgatgaacaggaagatgatgacatcgagtatttctgccaggcggtgggcgaggcgcccagtgagggtatggagtggggtctgcagcagggcacccagagcctgtccttgtctctgggggccctgacactgtctctccccacagacctgttccccgaggccaagcagaaacggcttgccaagtctccagggcggaagcggaagcggtgggaaatggatcgaggcaggggtcgcctttgtgaccagaagtttcccaagaccaaggacaagtcccagggagcccaggccaggcgggggcccagaggggcttcccgggatggtgggcgaggccggggccggggccgcccagggaagagagtggcctgagcccaagccgcaccggagcagcggctggattgaacgccccagattggggcccgagatgtggccctcggtttcctttcataaaggagttgtgtccccagcccttccactccagtaaagaactgaattggccaggggtccacgtcagcgtttgggatgggggattctggagccatacaaagcaacccagagagtcctgggccggccacacccgagagtccctcccacctggtttcttcctggaagctgggtctctcccctaccctgcacggggttggtttcattggtggcagcagcagccatgagtggcccctccccccagtcccaccaaagagccgtgcaagcagacaggtcacactttcagcagatgagcttgaacctcaggagggttgtggcacaatgaggaaggaaacgtgggtggaaaggcacgctggcctgctctgctggctgggccagtaactggggatggggctggggcagggcccactaagccactggtgactgggggaggggctggggaactgggtagcagacacaggctgaggatcggcacgggagcatggcagccaacgtctcgggtaaggagaaggcatgttggctgtctctgggggtctgcagattgtcaggaggtgggggtagtgggtattggtaaaacacctaggtctggggctgggcacggtggctcacgcctgtaatcccagcactttgggaggtcgaggggggtggaacacgaggtcaggggttcgagaccaccctgaccaacaaggagaaaccccgtctctactaaaaataaaaaaattagctgggcctggtggcacatgcctgtaatcccagctactcgggaggctgagacaagagaatcacttaaacccgggaggcggaggttgccatgagccgagattgcaccattgcactccagcttgggcaatgagcgaaactccatctcaaaaaaaaaaagcctaggtcaaggctgggtgtggtgatgcgagcctgtgattccagctactcgggaggctgaggcagggggatcacttgaccccaggaggtcgagactgcactgagctgtgattgcaccactgcacctcagcctcggtgacagtgaaatcctgtctccaaaaaaaagccacgtctagacgacacttcctccttaagcaggctggcgttgggagcagggaggcgcctccggagaagcctgtccccagcctgcagaggcaggggtggggtgcacaaggagtgagtgcccctgtgctgctgtgccctgggcactgtggtgagcactggcaccagtaatgggtaagcaggcccccccatcctcccgaaggagggagatttttctcaccgtcatcaggtggcgcagggtatgggggaaaataacgcagggaagggagagtggaggcacgagggctgctgtcaacagtggttagggtggccttggggcctctcgcaggcaggaccacggacgtgggaagaggagcctcaagaatgtctgggtgtggctgggcacggtggctcacacttgtaatctcagcactttgggaggctgaggcgggcagatctgaggtcaggaattcgagacctcttggccaacatggggaaaccccatctctactaaaaatgcaaaatttaaaattaaaccaggcgtggtggtgggtgcctgtagtcccaaatactcaggaagctgaggcaggagaatcacttgaacccgggaggcagaggttgcagtgagctgaagtcacatcattgcactccagcctgggtgatgagagtgagactctgtctcaaaaaaaaaagtctgggtgcgaaggtaccaaggcacaagtctgcaagagcagccaggaagcctgggtgggctggtgcgagggagtgagtcgcggagcacagagggtggcactggggggtatggcgggcgggagcgctcttgggggaccttgtggggtgagtctggctttttggcggcaactccctggccaagtgtgagcacctggaagcaaaaggatggggcaggactccagcgctcgcgggtgctctctggtggccacggggagaagaggctttgggcggcggcgggtgccaaggtcagggcagagtgggggctggacccccacggggctttggacggcacagatctgaagtggagccggcaggccttgctggggctggactttggggaggaggcctctagtggggccaggtgtggtgggggagtagggtggccgctgtctgtgttaccagtggaccttgagctccaagactgcctggcccgcctaagctggtccattggggcccaatgcataaccctggctctgagcctcaatcctgtccacataaaggagtggagcccggtccccctccagggaggggaaagaactcgtgtccagggatccacgccatggcagacgtgggctcttggggtagcaggagccgccttatgggggaatagggctcagctggtgacaccttctgcccacaggtgccaagtcctgccctgccaacttcttggcagctgccgacgacaaactcagtgggttccagggggacttcctgtggcccatactggtggttgagttcctggtggccgtggccagcaatggcctggccctgtaccgcttcagcatccggaagcagcgcccatggcaccccgccgtggtcttctctgtccagctggcagtcagcgacctgctctgcgccctgacgctgcccccgctggccgcctacctctatccccccaagcactggcgctatggggaggccgcgtgccgcctggagcgcttcctcttcacctgcaacctgctgggcagcgtcatcttcatcacctgcatcagcctcaaccgctacctgggcatcgtgcaccccttcttcgcccgaagccacctgcgaccca

SEQ ID NO: 34771 - DNA, 1402 bp, Artificial sequence
  DNA replication origin
gcaacctgctgggcagcgtcatcttcatcacctgcatcagcctcaaccgctacctgggcatcgtgcaccccttcttcgcccgaagccacctgcgacccaagcacgcctgggccgtgagcgctgccggctgggtcctggccgccctgctggccatgcccacactcagcttctcccacctgaagaggccgcagcagggggcgggcaactgcagcgtggccaggcccgaggcctgcatcaagtgtctggggacagcagaccacgggctggcggcctacagagcgtatagcctggtgctggcggggttgggctgcggcctgccgctgctgctcacgctggcagcctacggcgccctcgggcgggccgtgctacgcagcccaggcatgactgtggccgagaagctgcgtgtggcagcgttggtggccagtggtgtggccctctacgccagctcctatgtgccctaccacatcatgcgggtgctcaacgtggatgctcggcggcgctggagcacccgctgcccgagctttgcagacatagcccaggccacagcagccctggagctggggccctacgtgggctaccaggtgatgcggggcctcatgcccctggccttctgtgtccaccctctactctacatggccgcagtgcccagcctgggctgctgctgccgacactgccccggctacagggacagctggaacccagaggacgccaagagcactggccaagccctgcccctcaatgccacagccgcccctaaaccgtcagagccccagtcccgtgagctgagccaatgatgtggcctagcggaagctgcctcctcaccctaggtgttgctggagaaccctgagggcagggcccgagccccgacacatcccttcccccaaaaagcaacacctgtgcttgcagccaggtcaggcccagctgcagcccaggcaggagcagtcgcctttcccacccacagcgctggccacagggctccctgcagggtcagggaccagaccacgcccagaggaggggaggcactggcccccgccacaggactggagacgcaagaacaaaaagaaccaagtagagagagtggagctgctttattgcccttggagcccgcgctctcggaggctgtcttctgtcgccaagggtcccggaccgagtacacagtggcagctggcttagttggtggacggcctggggtaggggagggtggcaggtataagacttctgggggcaccccaagaccccagacacccaagtggcatcttgggggtgggtgggcagaggacggggtaatgtgaggacgaagcgggcacggagccagatggccagtctccaggcctggtccacggactggcagggaccccaggcacaagagctgccacccctctgcccggttttggaaaaaaac

SEQ ID NO: 34772 - DNA, 1069 bp, Artificial sequence
  DNA replication origin
cagggtcagggaccagaccacgcccagaggaggggaggcactggcccccgccacaggactggagacgcaagaacaaaaagaaccaagtagagagagtggagctgctttattgcccttggagcccgcgctctcggaggctgtcttctgtcgccaagggtcccggaccgagtacacagtggcagctggcttagttggtggacggcctggggtaggggagggtggcaggtataagacttctgggggcaccccaagaccccagacacccaagtggcatcttgggggtgggtgggcagaggacggggtaatgtgaggacgaagcgggcacggagccagatggccagtctccaggcctggtccacggactggcagggaccccaggcacaagagctgccacccctctgcccggttttggaaaaaaacaataaaggactgtcccctcaaaaccagccgggggactgttaaattggctcagggctattggttggcccaacactccgtgaaggtgctgggacaaggcagggagcaggggctggggcagggatggagtcttacttggcccactcgacgttgaggatgaggtggtcgtagccaaagccggacaccccggcaatggcacgcgcagcatcctcgcggcggtggaagctgatgaaggcaaagccctgtggaggggcgggatggggtcgggcacgagctaggacaggcgaccctaggacaagtgaccctcacacagccccaccgtgcctgcctgcctgcccaccttggattggccagtggtcttgtccttagccaggtagatgcgggagatggagccgaaaggccggaagagctcctgcaggtcggtctcacgcgtgtcctctgacaagttggtgacacggatggtggcgttgtcgtcggctgtgtgggagaggggaggtggctgtgagggggaggacactgcccagccctcgtgtgctgcccagccctcgtgtgcacgcttcggggataattacgaggtgccgggaggtgcccacccaccagcctggcgtcggggtgcccctcacctctgcggttgggctgcatggactccccg

SEQ ID NO: 34773 - DNA, 1786 bp, Artificial sequence
  DNA replication origin
ctggtctccagctcctgggcttgagagatctcccaccttcgcctctcaaagtgctgggattacaggagggagccactgcgcccagccacggttagattcttattcctcttggcctgtcaacctgcaggaacggaagcaggaggtggtcgcagcagtttttggaagaagcgttagcaataagtatacttagaacagcttgctgtgcacttaattgtaacataccccatgccaagcaccttgcacgaagtgtttctcattcagtctccttaggagcccagggaggcaggaagcttttgtggttcccgttttataagggaggaagctgaggctcaggttgtctagctcaagggcccggaggtctaggtggacccctgcacatccctgagtattgcgccctggtgggagctggtccgccagactgcgcaggccccacgctgtgtagctgtcacctggacccggaggctgacagctgccctgcctcctggagctcaggcctggcgtgtactcaggaaacaactgtcgccaggactgttcagggagtgcttgaggaggatgaagatggggtttgaggcccagacactctgggggtggctgttgtaggtctagggcaccccactgtggaacccagcctgcccctgccctcaactgtcccccatccctccctgagcccagaactggaagaagttcgggaactcagagtttgacccccccggacccaatgtggccaccaccactgtcagtgacgatgtctctatgacgttcatcaccagcaaagaggtaagcggggcaatcaggtggggctggcatcctggggtggggcaaagggggtgccttagccgcctctgagctccccccaacccgcccctgccaggacctgaactgccaggaggaggaggaccctatgaacaaactcaagggccagaagatcgtgtcctgccgcatctgcaagggcgaccactggaccacccgctgcccctacaaggatacgctggggcccatgcagaaggagctggccgagcagctgggcctgtctactggcgagaaggagaagctgccgggaggtgtgggggtgggagggtcctgctgtcagtgcacgggttctgtccccactgctgccttcgtgctgtcatctcccgcacgacagtgcagcgggtttgatggtgccagactctcctcggggcgtctgtgccttcctaattggctgtacctcctatggttgggagacgggcgtctcccatatatgtgcgacttggcagctgtgactttgctggtggccctgtgactgtcctgatgagctgctgtctgtcggccccagggtgctgaccaccccacatcgtgtgtgcgcactgtgtgtatagtgtctccgttgcatgcctgtggctgtaccgtccgaattctttggtgggatttgctggtggcgagtgtgagagtgcagacgtgcacttgtcgcctgccacgcgagggggacctgggcgctgttcctgttgtgtgtcccatgtctgccgttgctgtgcatgtgaggctgctgcccctgttgtcctcccgccctctctggggtggggtcggggctcctcctcctcctcctccaccagtgtcgctggctgggagctcaaatggtgtcagcttctcaggtgtcaccttggtgtcctcgtggccaactggctgcctgtggtttggcacacagtgcctgcgctggctcaacactgaagcccgagcttcctggggcggctctgtccccacgcctgcgccacagtgaggttgaacttgactgtcttttggtccccag

SEQ ID NO: 34774 - DNA, 1047 bp, Artificial sequence
  DNA replication origin
gggtccccactccctgcaccccccaccctcaccttgaacttcttgccatcctcatctatcttgtactctgtcactgtctttatgtttccgttgatgacctccttgggaggcggcagtggagctggcagaaggggaaaaacagagaaagactgagccctgggtcatggggatcaggagcggcagggctggagggagaggcagcccggacaccgagtggcagtcctcactcacctcccggcagtcctcactcacctcccggcagtagctctggctctgggctggtgtcacctgtggccagagggatccccttgaggagctcgctggtgacacatttgtctgcaaaaggcagcgtaggaaggaggagtcagctccaggggcaggagctccccagctgcgatggaagggcttttgggatgacgcctacagcaaaagcggagaaaggcaggccaagggcagagggctggccaggcaacgcactgggatggccctgtggggactcggagtggcaaggatgggagatccctcgtaggaaggtgggtgccaggccatgaagccaaccaggcgccagtagagaaacaggagacgggagattacaacttcctccctggaggggaacagctgggaggcagtggcatgggaggaagagggacccgccggggaacacctggagttggcaacaggcgggtcccaaggaggatggcgcggggcaggggcagaccgtgacggggtacacggtgccagactgggagatggaagcaggcggcagtcacacggcttgggcctggccgcgaataccccgggcgaccgtgtacacttaccgtcctccccctcctcctccacctggtcggcccaactgggcttcgaactgcggaaacaaatgtgtggggaacgaagattaagtcagccaggcccggctcccgcagcctcggcgtacccaggccccataatacttcccagagcaccccaaccgcttcccgtgcccctttccgcgatcgccgactcactcaaagtctccagtaggcatcgcaaaaagtattctccacgcag

SEQ ID NO: 34775 - DNA, 1718 bp, Artificial sequence
  DNA replication origin
gctgcccacttcctgtgcgaccaagctggagtcaagagcccggcccaccgctgcttgaagaaggggaccccggaaacgaacccaaagcttgctgtatttggggatcaaaagagaacccccaccccgcctagtttctagccaccagggagctacgggggaatccacggtccattttggcgccaaacagcccgggcacgcgcgaccggaagtgccaccctgcccgcgccaactgccgctgcgcgccgcaccaccccacgcatgcgcgcccgtctgtcagcagcggccaccggccaccccgaggggaagcgaccccccacccagcgccctgcctgtccccctgagtccgtgttcccccccatggtacctaccgcctgcggacatcgtcgggcagcgagatggccgggacggccagtgtgggcacccgggctggggcggtacgcgccggcatctcggaggcttcagcagacgcggcggcggcagcgcaggcgccccggcttttcgcgcggaaaccgatggggaggggcgatgagcggaggcggcgtctaccaccccagtccgggcgtgggggaggaggggatgtaccaaacggagagaggcgataccctgtgcagaaggatggaacggagccggccatgcccagggaacacgcatgcgcaaggcgggcacacaccccccccacgcggagcagtgggctcgtccaagctccacggtttgctgggaggtgggcacggtgcccgaggcattcattcattcattctttcaggtgtgatggggataaagcagcgagaagcccccaagggtttgtgagagcccttgagtaaagtcctcagttccaatccaacctccatctatttgctggctatacgaccttaggtgggtcactacggctcagcctctgtgtcctcatctgtaaaacggggtaattgcacctactctagaaaatcttgagtatacacagaatttgtagctagtaccaagaatctcacagtgtatagaggcccatgccacttctatacccagtgtgtggggggttttttgttgccttttttaagcaccacgtggctcacgcctgtcatcccagcactttgggaggccagggtgggaggatcgcttgagcccaggagttttagaccagcctaggtaacatagagaaactgcatctcaaaaaaaaaaaaaaagaaagaaagaaagaaagaaaaaaagaaaaacaaaaattagctagtcgttgtggcatgtgcccatagtccaaactactccagaggttgaggcaggaagatcacttgaaccggagaggcagaggttgcagtgagccatgattgtaccactacattccagcctgggagacagagcaagaccttgtctcaaaaaaataaaaataaaaagtaagaataaattaagaagcaccatgtcaggcgcagtggctcacgcctgtaatcccagtgctttgagaggcccaggtgggaggatcgcttgaggttaggagttcaagaccagcctgagcaacatagggataccccatctctacaaaaaatacaaagatttgctgggcatggtgacacacacctgtaatcctagctacttgggaggctgaggtgggaggatggcttgaaccctggcagtgtaggctgcaatgagccatgattgggccactggactcctgcctgggcgacagggtaagaccctgcctcactctgtcaccccggctggcgtgcagtggt

SEQ ID NO: 34776 - DNA, 1133 bp, Artificial sequence
  DNA replication origin
gctggtcctcggtggcctgcccatccttggctggaactgcctgggccacctcgaggcctgctccactgtcctgcctctctacgccaagcattatgtgctgtgcgtggtgaccatcttctccatcatcctgttggccatcgtggccctgtacgtgcgcatctactgcgtggtccgctcaagccacgctgacatggccgccccgcagacgctagccctgctcaagacggtcaccatcgtgctaggcgtctttatcgtctgctggctgcccgccttcagcatcctccttctggactatgcctgtcccgtccactcctgcccgatcctctacaaagcccactactttttcgccgtctccaccctgaattccctgctcaaccccgtcatctacacgtggcgcagccgggacctgcggcgggaggtgcttcggccgctgcagtgctggaggccgggggtgggggtgcaaggacggaggcggggcgggaccccgggccaccacctcctgccactccgcagctccagctccctggagaggggcatgcacatgcccacgtcacccacgtttctggagggcaacacggtggtctgagggtgggggtggaccaacaaccaggccagggcagaggggttcatggagaggccactgggtgaccccagatagagacttggggctactgagccagatgcccccgccccacagacctgggtgatgttgcaaatatttcacacctggaaaggccagataaggcactgactagtcacatagcagtgttgcagtgcggtcctgagggccagtccagtggctagtgtgacccctttagaactggatcctggggaggccagggcaggggacctgtgaagagccagggtgagggcaggcagcatttaaggggagctcagggcaggagcactttaccacctggtacaaaggatttttttttttttttgagacggaatcttgcactgctgcccaggctggagtgcagtggcgtgatctcggctcaccgcaagctccgcctcctgggttcatgtcgttctcctgcctcagcctcccaagtagctgggactataggcgcctgccaccacacctggctaattttttgtacctttagtagagatggggtttcaccgtgtta

SEQ ID NO: 34777 - DNA, 3129 bp, Artificial sequence
  DNA replication origin
taaatgctgcctgccctcaccctggctcttcacaggtcccctgccctggcctccccaggatccagttctaaaggggtcacactagccactggactggccctcaggaccgcactgcaacactgctatgtgactagtcagtgccttatctggcctttccaggtgtgaaatatttgcaacatcacccaggtctgtggggcgggggcatctggctcagtagccccaagtctctatctggggtcacccagtggcctctccatgaacccctctgccctggcctggttgttggtccacccccaccctcagaccaccgtgttgccctccagaaacgtgggtgacgtgggcatgtgcatgcccctctccagggagctggagctgcggagtggcaggaggtggtggcccggggtcccgccccgcctccgtccttgcacccccacccccggcctccagcactgcagcggccgaagcacctcccgccgcaggtcccggctgcgccacgtgtagatgacggggttgagcagggaattcagggtggagacggcgaaaaagtagtgggctttgtagaggatcgggcaggagtggacgggacaggcatagtccagaaggaggatgctgaaggcgggcagccagcagacgataaagacgcctagcacgatggtgaccgtcttgagcagggctagcgtctgcggggcggccatgtcagcgtggcttgagcggaccacgcagtagatgcgcacgtacagggccacgatggccaacaggatgatggagaagatggtcaccacgcacagcacataatgcttggcgtagagaggcaggacagtggagcaggcctcgaggtggcccaggcagttccagccaaggatgggcaggccaccgaggaccagcgagatgagccacgaggccccgatgagcagaagcatgcggcagctcttgtcgctgccatacagcttgaccttggcaatggccacgtggcgctcaatggcgatggccaggaggctgaagacagaggccgagagcgtgatgaaggcagagccctcccgggcaaaccactgcacaggcgtcagcctcagcgtgacagagccagagagcaaggtattggctacgaaggccacgcctgccagtagatcggaggcggccaggttgcccagaaacaggtacattgccgagtggaacttgctgtttcgggccaccgcaatgagcaccagaaggttttccaccacaatggcgcaacagaggatgacgatgaaggccgaggccacctggcgggaggtcgtctcctgcgtttccagcgtctccttggtataattatagtgttcctggaccttgttggggttcaggtactccgagtacaagctgcccatggtggggctcagaggcctgctggggccatggggctttcagaactgcagagaagacagacagacagacagacaataggtcagagctgtggctgctacctgggctctggcctcggatgggctgagattcaatttcctgctctgttactcttcgaggaagggccacatgaattcagaatcatcatcatccccacttacagacgggaaacccagagagattaattcactttcctaaagtctcaaatttaaccagcggcagggccagagagactggctctgcggcctctataagccctaggctacgctctttcttatttattttatttatctatattttaaagacaaggtcttgctctgtcattcaggctggagtgcagtggcgcaatcatagctccctgcagccttgaactcctgggctcaagtgatcctcccacctcagcctcccacctcagcttcagctacaagcacatgccaccacgcctggctaattttttttttttttttttttttttgagatggagtctccctctgttgccaaggctggagtgctgcggcacggtcttggctcactgcaacctcctcctcctgggttcaagtgattctcctgcctcagcttcctgagtagctgggattacgggcacctgccaccaggcccagctaattttttttttatttttagtagagacagggtttcaccatgttggccagcatggtctcgaacttctgacctcatgatccgcctgcctcggcctctcaaagcgctgggattaccagtgtgagccaccgggcccagccgcctggctagtttttttgttttttagagattgggtctcactgtgttgtccaggctggtcctgaactcctggcttcaagcaattctcctcggcctctcaaagcaatgagattacaggtatgaaccatgacatcttgcctcttttaattttcattattattttctagagatagggtcttgctctgtcacccaggctggagtgcagtggcatgatcatagctcacagttgtctctactcctgggctcaagtgatcctcctgcctcagtctcctgagtagctacacgctttcaaagggaaagaagctcccccaaatggcatgaaaaatataatgtggacttccagaaaccttgcccacctacccagagagcaagccctaggcaggtcctggagggtttgtctcttttctggaacacacaggcgcctgcgccctcatgctgacctgggtcagggagagtctcaccactgatagctccgtgccctgctcattcattaccacccactaacgctggatttcaggctgggtctaagccttgaggccacgggtgctcccaagataaggtcttggggagacaccagggcggccctgagattcaaacatcccagaggtcacaccatcttcaaggacacagaccttgaaggcaatccagaatttgctcccattccacctctgaaacactgggcaagtccctagacgctgtctcagcctgaacctccttatctgtgcaatagagagaagaaagcccacttcatgggggtgatgggaaaatccttttaaatgacgcatgaggcacgtttagctcatagtaagcactcaacaaatactgccaaatgttattagctcccctctttcctccagtcctttgggaagggaagggatgtaagccaaccagacgagatctccaacagcctgttctcatcagcaccatctagctctgccctgggacagaaggtcctgccgggatgggcagggcgctggc

SEQ ID NO: 34778 - DNA, 1170 bp, Artificial sequence
  DNA replication origin
gcgtggctttgttttgtaaggaaagagaaagtgactgcgtggctcagacgcctcctctttcaactccggctcagggatgggtcgtgggtgaaggcgcgcgtggcgcggacctcgcgtggccccgagccgggcggagcgtcggaactcgcccccttctcaggcacgggttgactcacccggggatttccaccccctcctctgtctctgtccttgtcagatgctccgggccccacgcgctgagcccacagtccccctcgtggggcgacacggccaggcgcggaactcgcggtgcagctgctgctgcgatctggtcccccacccccagtcttcccagaatctcgaggcgggacccctggcgggacggagaggaatccttccagtgccgcttggagacgtgggggccccgcgcgtgtggcggtctcgggggcgggggggagaggaggcgtggctcccgcgcgagcgagcgtggataccgcgcattcctaaaccagataaggaggccgagagtgcgggccagcacggggtcgggtcctgctgccatctccatggagacacgctgggctttgcctggttgatggtgggcgatgggggcgctgcccgcggaccagaggtgtctccaggctcctttgttgctgtttgggtctgggctgagcttaggagtttccacccttgggaacccactagggtctcctttgttcattggttcattcattcattcattcatttgcccattccacacgttttctgagtgttttatttgtgccaggcatccctgtaggggctgataactgacttgctccctggccttaggcattgactgtctaggtggaagccagacagaaaaggaaagatatcatgatagtttcccatagtggcaagcgctgtgcagataataaaacgagattctgtgattagaaaaggcttggagatggctgctattgtagactgggggtcaggggagtcccctctgaggaagtgacctttaaatagaaaggtcactttctataaggtagggtggctaccacgggctccatgggtgaccagggggaactgtaaccacagggcctgcctttctgaaagatggggagacagtcattcaaagatttgaggaaaggccaggcgtggtggctcacgcctgtaatcccagcactttcctaggcttaggcaggt

SEQ ID NO: 34779 - DNA, 1358 bp, Artificial sequence
  DNA replication origin
gggaggcagaggttgcagtgagccgagatagtgccactacattccagcctggcgacagagctagactctgtctcaaaaaaaaaaaaaaatccatctggtcaaggagtttttcctttttgttgctgttgttgttgttcactgctgtgcccagtaggtgcataaaaaatatttgttgccaggtgctgtggtttacatttgtaatcccagcacttggggaggccgaggcaggcggatcacttgaggtcacgagttcgagaccagcctggccaacatggtgaaaccctgtctttactaaaaatacaaaaaaatcagccaggcgtggtggcacgcgcctgtatttccagctacttgtgaagctgaggcacaggaatagcttgaacctgggaggcagaggttgcagtgagctgagatggcaccactgcaccccagcctgggagataaaggaagactctgtctcaaacaaaaaaattttgttgctggaatgaggggctttcctatcctgttgtcgaactgctggttacacacacacacacacacacacacacacacacacacacacacatcattcgatgaaggtgtagtgtccatcatttccgcaggcaggcacacagaaatgcccaggaattagtgaaaattggaaatctggatagaagactgggcccgacgctggaaggcaggcacaaactgggccccgccagaggggacagtgatctacagaggcaggaaagagtgtggagtgtccccagtcccccaagggaaacagggcagcacctgaattctggaggtcctatcaagggagagactggtcaggcacagtggctcacgcctgtcattccagcactttgggaggctgaggcagtaggattgcttgaatgcagcagttcaagaccagcctgggcaacacagcgagaccccatctctacaaaaaactgcaaaaaattagccaggcatgatggcgcacctgtagtcccagctactctggaggctgaggcaggaggctgaggctcccgtgagctatgattgagccaccacactctggcctggatgacagagcaagaccatgtctcaaaaaaagaaaaaaaaaaagagatcaattttgtctttgggacaggacatcgcacttagtaggaatttatttgttgggtggacacacagtaggcacttaatgcctatttgctgcgttgacacctagtaggtacttccaaggctctttgttgagtcaataaatgtgacctcgtgttttcttccaagtccagggtcccaggggtaagcccagaggtaacctggggttgaagacagttgtttcaggttgaggccacctggccaggagtactgtgacgtcaccaggctgcgtgacg

SEQ ID NO: 34780 - DNA, 973 bp, Artificial sequence
  DNA replication origin
cgtcatccagcggcgcctcgcgaggctccagtggccttgacctcccgcggcgtgggaggctgcgcggcgatgctgcagttcgtccgggccggggcgcgggcctggcttcggcctaccggcagccaggtgaggccaggggctggaggcgtggtcgaaggatgaaatttgggggtgtccaggggtcgtctctcactttcgcccaacccttgcagggcctgagttccctggcggaagaggcagcgcgtgcgaccgagaacccggagcaggtggcgagcgagggtaaggcaaccggggtggctccaggaggggcggcgacagagaggtctgacccttgaccctaacctctgacccccgcaatcgctccaggtctcccggagcccgtgctgcgcaaagtcgagctcccggtacccactcatcgacgcccagtgcaggcctgggtcgagtccttgcggggcttcgagcaggagcgcgtgggcctggccgacctgcaccccgatgttttcgccaccgcgcccaggtgagcgagggctgtaatggtgaactgagtggcagagggatgaagagcgggatttcaggagtcacgatgactttgggcttgtacccttgggaaagtgctgtatttctacagcctccgtttctccacctgtcaaaggggaatgatgacagtttcccctgctgtagcgctgtgtgagattgaagcctgagaggtgacatcatctaagggttagggagacagaattctggagcccgactgattaggttcaaatcctgccttcccctcttgtccctcagtgtccctattttgtcagcggtcgggaggttgctgtgatgaataaatgacttaattctggcacataataagttctatagaaatgttgataatctttgttaactggtttttgcaaataagagcactaaaaagactaaaccattcctcggtgcctggaagaggctgtttgcattttagttaccc

SEQ ID NO: 34781 - DNA, 1005 bp, Artificial sequence
  DNA replication origin
cgccccggaacggcctgagcaaagtcacagggtgggacgggggacgcccctggtcctcagaaggcctgggaaaatcctgcgccacgggttcttcctcgggcgggttccactgagctcttgccccggcccgaggtgcgcgagctcccccgcgcggcccaagtcccacttgcagccacaatggtgccgttcttttctcaacatgtggctcaatgttttttaagcgcctactgtgtgcttggcgtccttccaggtactggggacacaggaatgaacagagtcagacaaaaatccacctgggcgcggctcccacctgtaatcccagcattttgggaggccgagatgggaggatcacttgagcccaggagttcaagaccagcctgggcaacatagggagacccccatctctatgcaaaatacaaaaattagccgggtgtggtggtgcacacctgtaattccacctacttgggaggctgatgcaggagaatctcttgaacccggcaggcggaggttgcagtgagccaagatagaggcactgcactccagcctgggtgagagtgagactcaaaaaaaaaaaaaaaaaaaaaaaaaaaggaacagccaggagaacagtgtggctggagcaggcttagcaaaggagagattcgaggagaggagcgggcagggagatgacagggcagataggtgcaagttcctgtcacctgaggaggactttgttgttttgtttgtttgtttctgaaccccagtctcgttctgtcacccaggctggagcacagtggtgtgatctcggctcactgcaaactctgcctcccaggttcaagcgattctcccacctcagcctaccgagtagctggtactacaggggtgcgtcaccacgcctagctaatttttgtatttttagtagagatggggtttcaccatgttggtctctaactcctgacctctagtgatccgccccccttggcctcccaaagtgctgggataacagatgtgagccaccgtgcctgg

SEQ ID NO: 34782 - DNA, 1349 bp, Artificial sequence
  DNA replication origin
tccactctccggggaagttggcagtatttaaaagtacttaataaaccgcttagcgcggtgtagaccgtgattcaagcttagcctggccgggaaacgggaggcgtggaggccgggagcagcccccggggtcatcgccctgccaccgccgcccgattgctttagcttggaaattccggagctgaagcggccagcgagggaggatgaccctctcggcccgggcaccctgtcagtccggaaataactgcagcatttgttccggaggggaaggcgcgaggtttccgggaaagcagcaccgccccttggcccccaggtggctagcgctataaaggatcacgcgccccagtcgacgctgagctcctctgctactcagagttgcaacctcagcctcgctatggctcccagcagcccccggcccgcgctgcccgcactcctggtcctgctcggggctctgttcccaggtgagtcggggtggggattgccgtcgggccagttctccgaagccccgggaggaccggctcccgggtcaggtcatgcatgcttaggtagctgtttatgggaaggaggggctagagacagcgattgaaaggcaacagccagtaggttcgaatccagaccctgcatacctccacgtgtggccttgggctatagattgcagctttaaaaaagggtagggggttggagatggaggggaggggcgggcctcgttttgttgcccaggccggtcttgaactccgggggtctagccttacctcctgcctcagcctcccgagtagctgggatgagaggtgtgaaccaccgccttgcttggctagattgcgtctcttacagtttctcagctgtaaaacgggaaacgttatagcggccacctggcagggtatcttggcccagcgcagcacctggccccaggactcgatcatgatggtttgggaacttggctctgtgccaacccaacaaggcttaagggacccccacccccctcaagatgtatattctgttcctcatcctctctgcccctggggaagtccagggctgcttctacttgggggaattccagagctgacttatccgtggcccaaagctgagaagtgggacgccccagcacaccctcccccagctccagcccagctagggaagagggaaggggtcagagggtctttcatggtggtgtaagtttggggaaccaggagggtgggagattgacagcttggttaacagctcaacaaagcctgagatccaggccagcacggtagttcatgccagtaatcccaacactttaggagccccaggcgggcgaatcacttaaggtcaggagtttgagaccagcctggccaacatggcaacatcccgtc

SEQ ID NO: 34783 - DNA, 1069 bp, Artificial sequence
  DNA replication origin
ggcgggaggcgagcgtgcgctaagctcctggccttggtgaaggcgagctggcaggagtgagcgacccctggggtctacgtggaggccggcatgatggcccagggccttctgggggcgaccacgctctctcgcgtcatccccggccgcgactctgggatcgggggatgctgggttgcccttcccaaacccctaccccagccctggctgagatgccatgataataagctggactccgagccccgcccccacatttagctcctcccaccagcgccccttagggcggggatacatttggggactaagagagatttgggaggcactggatggggaaaggacagttctaggggagggtgtggggatgcctctctcactgatccttctccttttgaccccgcggagccatacctctaagcacccctccgggtcagctcccgcacgcgacggagggggcgggacgaaagtgccagcgagccgaggacacgtgtgcgtgcgcgcagcgttcgcgggcgtctaaattagaatccgctcggctccgggtctgtatttacccagggtgcagcgggcacgtgtctactcagcgtgtgtgagctcgagccaccctggagcgcccctgagtccgccttctgctcggtgggtgggggccctgacatccacgcgagaacaagggaccgagggtgatgcttttgactccgcttccgggccccaagctttgacaccccccacccccaactccatgcgctcatctggctgggtgactaccagaacatcgtcagaattcgagtttgtgatattccctgtggaccatctgatcaccccttcccggctgccaccacatggatacctcttctgcgtatccacgtccctcaatatgtccgtgggaccctcccctccccaccattcgtggtctcactccagcgtggtaagttattttggagatgagttctcgctccacagttgtttggcctccaggaaagcacagggtctgaaggtggggctgggataggaaacttaacatccaatcagagctgccgcgtggtggcggcggcgccaatcaggaaagccataccat

SEQ ID NO: 34784 - DNA, 886 bp, Artificial sequence
  DNA replication origin
ggagtcaggaagctggggctcgggtgtgtgttggggaggagggggaaggggagaagactcaggctcgaggtgggggcagaggcgtgggagcgaggcgagggcagagctgggagggacaggaggccgtttctcaggtccagggactccgcccccgccctgtccaccccgaaccagagcggggctcttacctgagaggccgaagagccccaggcccagagcagcccagaggccgagtagcgcccggcgcagccctggcgaaggccctggcatcgccgcggcggggaaagcacaggaggcgaggagagcgcgagccgaggagctgggctagaggacggctccgcgcggcgcggcgggtggggtgtgggggaggcagagttgcgcttggggattggtttaacgttggtaacttggtttccaaggagggggcggcggcagaggcggcgggggggcgggaggcgagcgtgcgctaagctcctggccttggtgaaggcgagctggcaggagtgagcgacccctggggtctacgtggaggccggcatgatggcccagggccttctgggggcgaccacgctctctcgcgtcatccccggccgcgactctgggatcgggggatgctgggttgcccttcccaaacccctaccccagccctggctgagatgccatgataataagctggactccgagccccgcccccacatttagctcctcccaccagcgccccttagggcggggatacatttggggactaagagagatttgggaggcactggatggggaaaggacagttctaggggagggtgtggggatgcctctctcactgatccttctccttttgaccccgcggagccatacctctaagcacccctccgggtcagctcccgcacgc

SEQ ID NO: 34785 - DNA, 1385 bp, Artificial sequence
  DNA replication origin
gcagcggcatcagctctacgcgatctggtcgctctgcaagggggaagagtccgcagctctttgaacaccgggacttggaacagaaggtggggcctgaaggggaggaccctgggacccagggggcggggcctgggagggagggagagtagtggagtacgcgcgtggccacccagaactcacggaaagtgcgaatgagcccacgcgcctgtagtgtgcgccgcgcgcagcggaagaagcagacgggctgagtctccggctcgcgaatgtccaccagctgccgcgccaaccaacgcaaacccctctgggtcccgtttcggcgcagcgaggtctccaggccaccgcgctccggccgagggcagttggtgctgcaattcagccacagcgagcccccgcgctccacgaacgccacgcgaggctgcaggtccgcccagaagggctcctgcgagaccgctgcccagggaaacgcgggctgagcctggggagccaactccctgacatcttagcgcccctatgtcgagtcaagggttctcagagggcggggaggaggaggagaggctgcagccagggaaagaacccaggcgtcccgcgtcctgcccaggcctccggtttaaaggcgcactcccagagtctaaacctcgagggtgtctctgggacgtggtagcagagagccatggtctccaaagcgccgatggagcggcgggaaagcatggggggagggcgtagaggagaggaaaggtgggttcttggatgaacacagcaaggctgagagaaggggacccgggatgggggatgggggatgaaccagttctcagggtcctggcagaatgccgggatacgaggagagtgcgtttgcggcaagggcaaaggagagacgaggctgggtcaaggatcaggaaggaccctacacccggtgaagaacacggagccgggacgcaaggctgggctcatggaaggaaccgcgggaacagctgagggacccggttgccagggctctgggtggagcgggaacagcgcctctgagtcagggtagttggagagatggagtcttcgcggaccgcgagtggggaagatgccagtccgtggaccatggtgcacagcacagcgtaaggaggtacccggggagcggacaggagagacactgggtctccagggcgaagggttgggtgcggaagaacacctaggatctcgaagcgggtaggggctatcgaggagtcaggaagctggggctcgggtgtgtgttggggaggagggggaaggggagaagactcaggctcgaggtgggggcagaggcgtgggagcgaggcgagggcagagctgggagggacaggaggccgtttctcaggtccagggactccgcccccgccctgtccaccccgaaccagagc

SEQ ID NO: 34786 - DNA, 1097 bp, Artificial sequence
  DNA replication origin
gacttcaaccctcgccggctgagctgtttccccctccgtgccttgaggatgataatacgataagatagtgcatgtcaagtgcttaggacatattgagcgctcggagttagttcaaacttggttcttcgacccctagccctgtctccggatgccccgcgcctcgctgctccccggctcttggaagttggctcggaaaggcccgtgagctgcactctggacggactgtttccagcctcagaggccagggtctacctcgcactgggggaccagaatctgagtcctgatgtcaccctcgaaggggacgcattcgtggccactgccacagccacagctagcgcagagcaggagggtgccaggcagctggtctgcaacgtcaccctggggggcgaaaaccgggagacccgggagaacgtgaccatctacagtaaggaaggaggcggggtctccgcggctccgaggtgggaccagaggaatgcgaaggcggggcgaagagtgggcgggacctcagtaccggaacaggcgtggcccgaggggcggggcaggtgggggcggagacgtaatcgctggggaggaggagcctgtacagcctgagaggcggggcgccgtaccctagttcgttctcagcaccccgaggattcgggcagataaggggcgggccttgaccggagggaggggtatggtcagtatactacgaccaaatgctccgcccccaggcttcccggcaccactcctgaccctgagcgaacccagcgtctccgaggggcagatggtgacagtaacctgcgcagctggggcccaagctctggtcacactggagggagttccagccgcggtcccggggcagcccgcccagcttcagctaaatgccaccgagaacgacgacagacgcagcttcttctgcgacgccaccctcgatgtggacggggagaccctgatcaagaacaggagcgcagagcttcgtgtcctatgtgagttggtgataacccctcgccccccaccttctggtgacttccaaggacccgcctgctccctcaccgtgtcgtggaggcggagccatttcttacgtctaagcctctgtaaccccacgccctgcccgc

SEQ ID NO: 34787 - DNA, 1734 bp, Artificial sequence
  DNA replication origin
tggtcacactggagggagttccagccgcggtcccggggcagcccgcccagcttcagctaaatgccaccgagaacgacgacagacgcagcttcttctgcgacgccaccctcgatgtggacggggagaccctgatcaagaacaggagcgcagagcttcgtgtcctatgtgagttggtgataacccctcgccccccaccttctggtgacttccaaggacccgcctgctccctcaccgtgtcgtggaggcggagccatttcttacgtctaagcctctgtaaccccacgccctgcccgcagacgctccccggctagacgattcggactgccccaggagttggacgtggcccgagggcccagagcagacgctgcgctgcgaggcccgcgggaacccagaaccctcagtgcactgtgcgcgctccgacggcggggccgtgctggctctgggcctgctgggtccagtcactcgggcgctctcaggcacttaccgctgcaaggcggccaatgatcaaggcgaggcggtcaaggacgtaacgctaacggtggagtgtgagtgggggtgcgcagggtgcatttctatctggttcaaggtctggagggtggccagcctccagggaagagtaggagtagggtatgaggtgtccctttgggtgaggttttgggaaagggaagaggctggttagtggggttggagaaagatcttggaggatggaagggaccgggtgggcgtgcccctagcctagggcgtggtatttgggcggagtcgtggaaaggcgggcagtccagagtgtttaagtttttagacgaaaaaggcgccactggtggctcaggaagctcccagacagagtgcatgcctcgactagcgtgacacctccttggatcggcgtccaagggttatgcagggacaacacttcgtggaagccttgccgcgccaaggagggtctagggacgtcagatttgcccccaaaccccaaagccaacaatacactccctcctccagacgcaccagcgctggacagcgtgggctgcccagaacgcattacttggctggagggaacagaagcctcgctgagctgtgtggcgcacggggtaccgccgcctgatgtgatctgcgtgcgctctggagaactcggggccgtcatcgaggggctgttgcgtgtggcccgggagcatgcgggcacttaccgctgcgaagccaccaaccctcggggctctgcggccaaaaatgtggccgtcacggtggaatgtgagtaggggcaccgcggagttaggcaggatctgtgggacaaccccggctggacttcctggcccccgtgtgagcccctgcaatcctgtttcccagatggccccaggtttgaggagccgagctgccccagcaattggacatgggtggaaggatctgggcgcctgttttcctgtgaggtcgatgggaagccacagccaagcgtgaagtgcgtgggctccgggggcgccactgagggggtgctgctgccgctggcacccccagaccctagtcccagagctcccagaatccctagagtcctggcacccggtatctacgtctgcaacgccaccaaccgccacggctccgtggccaaaacagtcgtcgtgagcgcggagtgtgagcgaggcccaggcgggtagggagcaggggtgccccacggtccaggcactccctgacatcccccatggctgctttgcagcgccaccggagatggatgaatctacctgcccaagt

SEQ ID NO: 34788 - DNA, 1315 bp, Artificial sequence
  DNA replication origin
cagatggccccaggtttgaggagccgagctgccccagcaattggacatgggtggaaggatctgggcgcctgttttcctgtgaggtcgatgggaagccacagccaagcgtgaagtgcgtgggctccgggggcgccactgagggggtgctgctgccgctggcacccccagaccctagtcccagagctcccagaatccctagagtcctggcacccggtatctacgtctgcaacgccaccaaccgccacggctccgtggccaaaacagtcgtcgtgagcgcggagtgtgagcgaggcccaggcgggtagggagcaggggtgccccacggtccaggcactccctgacatcccccatggctgctttgcagcgccaccggagatggatgaatctacctgcccaagtcaccagacgtggctggaaggggctgaggcttccgcgctggcctgcgccgcccggggtcgcccttccccaggagtgcgctgctctcgggaaggcatcccatggcctgagcagcagcgcgtgtcccgagaggacgcgggcacttaccactgtgtggccaccaatgcgcatggcacggactcccggaccgtcactgtgggcgtggaatgtgagtgggggcagcaccggatggaggggacacggtcctcggaagaatgactcgcagcggtgggagcattcaagggcacctctcccaatcccattctcggggacagggaattccagcctaaaccagggggtaatgaaaattctagccaggcgcagtggctcaggtctgtaatcccaacactttggaaggttgaggcggatgaatcacttgaggccaggagttcgagaccagcccggccaacatggcgaaaacccgtctctacaaaaattagccggtcgtggtggtgggcgcctgtggtcccagctacttgggaggctgaggcaggagaatcgcttgagcctgggaggcagaggttgcagggagccgagatcccgccactgcactccagcctgggcaacagagtgagactctttcttagaaaaacagaaaaagaaaattatagggaataggagcacggccctcctcaaatcctggattagaacactgacctgggcttcacctccttccattcggtgaagaagggcgaggaattttagccgcaacagcagcctgattgtcggggaaggaggctctgataggaggcaggatcctcttctgcccatcagaggcgcggtggtctcccatcgatcgttgtgggccggagcagggcatttgatcagtggctgggccggcgctaagccccacttcaccttctgtgcccttcagaccggc

SEQ ID NO: 34789 - DNA, 1131 bp, Artificial sequence
  DNA replication origin
cctccttccattcggtgaagaagggcgaggaattttagccgcaacagcagcctgattgtcggggaaggaggctctgataggaggcaggatcctcttctgcccatcagaggcgcggtggtctcccatcgatcgttgtgggccggagcagggcatttgatcagtggctgggccggcgctaagccccacttcaccttctgtgcccttcagaccggccagtggtggccgaacttgctgcctcgccccctggaggcgtgcgcccaggaggaaacttcacgttgacctgccgcgcggaggcctggcctccagcccagatcagctggcgcgcgcccccgggggccctcaacatcggcctgtcgagcaacaacagcacactgagcgtggcaggcgccatgggaagccacggcggcgagtacgagtgcgcagccaccaacgcgcacgggcgccacgcgcggcgcatcacggtgcgcgtggccggtaagtggcagctggggagaggcggggcgaggtatctgagagggggcgtgacctgggtcttggggcggccggccccgcctgcctccctctcggtcccggtagactagacggaagtgggacagagtagaagtcaaaggtgccttagcgggtggggctgttgatcgcactttgaggggtgggagatggaggtggcagggggactgaattcaaggggagggaccctccggggctgtcactgctgcaggaaaggactttaaaacttgggctggattctgcgtggtggaaacttgacccaattcacaatccactgtggggaagattggggagggaccaaagtcattggatgttggagggagagaggggtcaagatcgccttctctcacttcctgaagctcctggggctgggttctctctggggtcgggggaacctgacctggtcctgccggtcctcattttttgggggatggggagagttgacttgtcgccagggggctaagtgtggtcacgggtttatatccccatgggctgaagtgcgatataaatcgggactcgggtcgccctggcactgggagtggccttattgcatgggttgtctcccttctcccaaggccagacagtgagctccccggggcatgaggactgacttcgtgcctgtgg

SEQ ID NO: 34790 - DNA, 1873 bp, Artificial sequence
  DNA replication origin
agtaggaattgaggcttgacgcacaggtactgaatagggcaaagcagaagggggacctcgagatgaagctacagggcaagatggggaccagaggaattccgtgggatgaggaatgggggacttggccccctgcactcacacgtccccgggccgctccgggccgcccgcgtcctcctctccagccgggcgcgagcctggaaaacacggttcggtgagcggctgcgccgagccccgccccgccggcatctgacggattaacgctgcccgccccgggcgccccaggtacctgtcgcttgaaactttctggttgtccccagcgccaccccctcccccgacccggaagtgcccccaggtctgttccaccaggtgcccctggcagcctgcagtagaaccctggcactcacgcctccccgggccatggaggcggccatgacatgcatcacgtgactcaccgactgagcatgcgccgcgccagggaggcgagggaaagcccataatcaatggaacataagcgcagatgtttgcttagggcctgcggtgaccaggtgggaagagcagggcggaatccatctcaggtaaacccgcggggccatcccagacctcccactcaagcccactgtttgtcccaagaaccagccaactctgatttctttaaaaccatttacttacaaactttaattcagcaaaggtccgtgtggggagactggggtggggtcgggggaatagtccccttggagtggatgtggacccccagagtcaagggagggaagctggtggcccagttggctgggggcaaggcccagggtcacctcaggtcgacaggtcctgctggtgggcgggcccagagtttatcttcatggagtgctggtttctggcactgggctggaaggaggccagctccagggatctggccgggggtgggcaggcagaattcaagaattcatcttcaacaagcgagtgacagcagaggctccgggagatgggcacaatgtccgactcccacagacagacagcaggggactggcagagaaagcccatctctgcacggaggcccgggtaggagggggtggtggggccggttcgccaagatgaaggctttccccttctactgtccccagggtggagatcctgggtagggtggcccaatccctaggccagagctgtttggtccatagtcaagctcccagagcttggcatctgtggctctggccagcagggcctggggcccagcttttaaggcatcagaaggggagggggctgcggcagggaccccgggccccacggctggggtataggccagatgggcaggcaggggcaggagacagccatgcctgcagcaaatgtgggaaaaacagctgtttcaaaccgcaaggtgtggaatggtggcccggacaggccgggccttgaaggaatcagagctgggggctgtccggggtggtttgaaaaataaaacttagaaaaggaaacagaagtcagttgtcaaagttaaaaaaaaaggagacagtctctgtatcttcacgggaggtcagggaaacctccaaggcactcgaaaggccaaaattacaggagcaatgaggcaggagggctccggagagacgggcacagcggaggaggagatggggggagggagggagagcaggccggggcccctctctcttaaggctgcagggtttcagcgtggggagcaagccagagacataatgaggcctccagactcccccacaccccttgggctcctggggctccggctgattggtcagtaaagtctttcagagatttttctattaccgaaagagagaaaatggtttaaaaaaaacacaaaacaaaacatcagaaaacccaaaagcgatttggtgcaggcccttgagttatc

SEQ ID NO: 34791 - DNA, 1180 bp, Artificial sequence
  DNA replication origin
ccccacaggggcggggggaggagtgagctgggccgctgggggacccaagcccagggcctcccggtcacccccagcagggccaagcacggatggcagcaggggtggtggcttccctcgccggggcggcagctccgggggcaggccccctcctagggagggaaggaggatttcaggggcccaggctcacaggacccctctccccagggccctccagctcccacctggaccagggcccaggggtcaagagacaaatccatgctggccactgagcagagctcatccctgggccctgagtggagggcacccaactgatggacaagggcgctgggacccagaggttgggtcactcacccgaggccacgtagcagggaaggaaggggaagtggctgggggacaccgtgtgggcagggtctgcgttacctgcaggcagctccccgaggagggggttggctggctgggccccaggctggagggcgcccaggggtgagtctcccaggatgccgggcttctagggacagagcacagacagttgcagatgggggcagggtggcccagggaagcagacaggtgtggcccagagtcttggcagacacaccccaactccagggcacggccgatcctgggcagacaggcacagggttccccagtgcccgccacactccaactctatcactgtcccatcagccatggtgaccgagggtctcctgagctccaggccccagttccctggccaatgattgcagcacagtatcaactgcagccacatggaatgggacagccacacagtgtttcagccacttttagtcacagaaggccagacccacaggctcacatattctgtcagttaccaccagacagacacacctgacttagaatccagggaaccacaccagacaggacggagcatgggtgtatgtctatgtgtgtgtgtgtctgtgtgtgtgtgtgcgtgtatatctgtgtctttgtttctgtgtgcatgagtctgtcttgtgtctatatgtgtgtctgtgtctatgtgtgtgtctttgtcttatgtctttgtgtgtctatgtctctgtgtgtatatttgcatctttgtatgtgtgagtctatatgtatacctgtgtttctaggtgtgcgtgtgtgtgtgtgcacacactgaggggatagacctggagttttttcccaggcatgtcta

SEQ ID NO: 34792 - DNA, 1307 bp, Artificial sequence
  DNA replication origin
cgtgtatatctgtgtctttgtttctgtgtgcatgagtctgtcttgtgtctatatgtgtgtctgtgtctatgtgtgtgtctttgtcttatgtctttgtgtgtctatgtctctgtgtgtatatttgcatctttgtatgtgtgagtctatatgtatacctgtgtttctaggtgtgcgtgtgtgtgtgtgcacacactgaggggatagacctggagttttttcccaggcatgtctatagagcttccgagcagagtctattcacaaactggtgcccagcagcggcgctcccagcccacacccagtttcaggctgtaaatgggcgtgtccaggtcccctgaccccaccccaggcaccaagtccaggggcgctctcagaatggagggaaagatggcgaaccatcatgagcaattgccagagggggatggggatgtgggtgggaaaggcaggggtttgggggagtcgccctcaccctggttctgcgcccccagggcacagccagaggtccccccaccccaccgatcgcaccagctgtgttgaaaagagcctgtaggggctgtagagcagtgggtgagggggatgcgtgtgttaccttctggccctgggtctgcagggcgagctgcaacagcgccgtggacagggctggcccattgagcagcggcatggctgggggggcacccaggaggcctggagggagacataggaggatgtgtgggggtccctgtgtcctccctgccccacctcacgaaacacagccctgaacccattgatggggcaggaaactgacactctggggccggggggtgggcagtggacttgcccaaaggaagggcctagaaggggcagaggctactccagtgaaggtcagccccctcttgtcagcaccccacctcactgcaggctgctgtgtggccctggtcccggcccccagttgtggacagcagcagcccccgctatgactccatactccccctcggccctactcctggggctcctgtcactgcagccaagatgagcagtttcgggaagtgccgggggcagcgctgcagcccctgttctgcacagtggggcccctgtccagccccaccttaccctgcttcccccccgcactgccatggagcagggggttgagcagcagctggagggacgcggatgggcccaggttgttgagcagctgcaggatgttgggctcggggaggagtcccttcccccgattgagggcctgcaggaaggaacagaagcagctcagagtgccgctggggccctgacatccccatggggctcccatccccaccccgccacctctgcccgca

SEQ ID NO: 34793 - DNA, 1921 bp, Artificial sequence
  DNA replication origin
ctcactgcaggctgctgtgtggccctggtcccggcccccagttgtggacagcagcagcccccgctatgactccatactccccctcggccctactcctggggctcctgtcactgcagccaagatgagcagtttcgggaagtgccgggggcagcgctgcagcccctgttctgcacagtggggcccctgtccagccccaccttaccctgcttcccccccgcactgccatggagcagggggttgagcagcagctggagggacgcggatgggcccaggttgttgagcagctgcaggatgttgggctcggggaggagtcccttcccccgattgagggcctgcaggaaggaacagaagcagctcagagtgccgctggggccctgacatccccatggggctcccatccccaccccgccacctctgcccgcacaggctcaccgtggcctgggcagcgatgagagcggccagcatactgcggccggggggcccaggggcgcagaaggagactcgcaggtggctgccccccagggacaggccgtccgcctgctgctgtgcctcctccgccatctcagccgtctcatactccagcaccgcgaagcccttcagctgcccatcctggccgcacgccagctgccggaggaaggcaggcagtcatgagcatctgggcagcagtgactgcaccaccccgggaagtgacaaccgtaaccagactcagctgccccataagggtgaactccacgccaggcctccactgccctgtgcctcattcctgcatcagctcatctgattttcccaatgaccctgggaggctgcatcatacccatttctcagagaaggcaactgaggcacggagaggtcagcgcacccaaggccacacagctggagggagggcggagctgggagccacctcaccaacaaagccaaggccacgggcggatgcggtggctcacacctgtaatcccagcactttgggaggccgaggcgggcagataacctgaggtcgggagttcgagaccagcctgaccaacatggagaaaccccgtctctactaaaaatacaaaattagccaggcgtggtggcacatgcctgtattcccagctacttgggaggctgaggcagaggcaagagagtcacttgaacctgtgaggcagaggttgcggtgggccgagatcgcgccactgcactccagcctgggcaacaagagcaaaactccatctcaaaaaaaaaaaaaaaaaagagataatcagcaacgggtggggaaggaagggctctcgttccagacagtggccaagccaggtagcagtgctaagggaagtggttgggctgggcaccggcacttgctgaatgcccgggcagcaaaggtgcaggtagcagcccttcacctctgcccacgccctgtgccaaggtctgggcacagatctcccataaccaaacctgtcggcttttgttttgttttgttttttttgagacagagtcttgctctgtcaccccggagtgcagtgatgtgaacttagcttaccgtaacctccacctcctgggttcaagtgattctcctgcctcagcctcctggtagctgggattacaggtgtgcaccaccacgcccagctaatttttgtatttttagtagaaatgaggtttcaccatgtcggcaaggctggtcttgaactcctgacctcaagcgatccgcctgccttggcctcccaaagtgctggattacaggcgtgagccactgtgcccggccataaacacacccatcttagggatgaacagagagagactcagaggggtcacagagtgatcaaggccacacaattcctaagtcgagggactgatgtgtgaacctcaagctgcttcactgtcaagcccaccctccattcagctgggtcacctaacattaaaggtgggctcctcggaggacatcacttca

SEQ ID NO: 34794 - DNA, 810 bp, Artificial sequence
  DNA replication origin
gaggtggggtttctcccagccaatcgacgggcgcgccctcgttgccgctctatgccgctccgccccggctcgctggtcccagaaggcgccgggtttcccaagatggcggcggacgtgtccgttactcaccggcccccgctgagccctaagtctggggccgaagtcgaagccggcgatgccgcggagcgccgggcgccggaagaagagctgccgcctctagatccagaagagatccggaaacgcctggaacacaccgagcgccagttccgtaaccgccgcaagatactgatccggggcctcccgggggacgtgaccaaccaggtattggggggggcggtgtaggagcgtggcgggaaataccacggtgcgcgtgcgcggggggaaccgggcgacaccaacgctgaggtgcgcgggggtcgttggcgggggcgcccaagcaccggatccacgcgggatcgggagagaccaagagcgggacgtgggggggcgatgatgaaaggggaaaccgactgcgaagtgagggagggcgttgctaggggcgaccacaggcttgggcgacaccaagtgatggaagcgggcggggaatggaagggggcggacagctttggtcctgttggggaattgtgaatgggctggtacattggaccaccagttgccccctgcttggatgatgcttttctccacccactctaccacagggtggcgggacctcacatccagaagtttcaggactgcggagagtacgcccctccatatcacgcgtttattcactgctctcagagataaatccggaagttaacagcagcccct

SEQ ID NO: 34795 - DNA, 1194 bp, Artificial sequence
  DNA replication origin
ctgccaccacgcccggctaatttttgtatttttagtagagacggggtttcaccatgttggccaggctggtctcgatctcctgacctcgtgatctgcccgcctcggcctcccaaagtgctgcgattacaggtgtcagccaccgcgcccggcctatgcctttctttcctttcttttctttctctctctctccgtcctgtcctgtcttagacggagtctcgctctgtcacccagctggagtgcagtcgggagatctcggctcactgcaagctccgcctcccgggttcatgccattctcctgcctcagtctcctgagtagctgggactacaggcgcccgccaccacgcctggctaattttttttgtatttttagtagagacgggtttcaccgtgttagccaggttggtctcgatctcctgacctcgtgatccgcccgcctcggcctcccaaagtgctgggattacaggcttgagccaccgcgcctggcccagcctatgcctttctaattgctctagcaaactcccggtggggctgcgggcctggctctcaccgtgggggggctctggctggagtcacagtgcgtcagcagctcatacagggtcaccccgaaggaccagacatctgacgcatagtagaacttatactccttcaggcactctggggcatacctagggggaggggggcactcaggccacggggggctgcactgagggcttggggatcagaccaggctgaagccctcacctgagactgaaggaccctctgggctcagttgggacccacccttaagagcgcagcctgagcggggtgatatgctcattggctaggccgctcattggctaggccgggttaaccccgcccaccaggccaagccgcactctatacaccgccccttgcctccataggccccacccccgcaccgctaggccccgccgcgcttcactgggatcatgccctatcatgatacccagcatccgtctactccaccctgcctgttccaagtgaccccagcaccccctcagactgcaccccgcctggtcaccagaacacggggctgtccccatcctcgcgcacgcggtagtactcgtggccttcgggcacggccttggctaggccaaagtccccgatcttgaccagcctgtcgttgtccagcagcacgttgcgcgcggctaggtctcggtggatgtagtgctgcgc

SEQ ID NO: 34796 - DNA, 1464 bp, Artificial sequence
  DNA replication origin
gatcctcctgcctcggcctcccaaagtgctgggattacaggtgtgagccaccacgcctggccagtttttctcttttctctatgaaatatctgtgccctctacccaatctcggaacttccagatgtcaggtttttctgttttttctttttctttctttctttcttttttttttttttaaagacagtgtctctctgtggcccagactcactgcagcctcaaaactcctgggctcaaacgatcctcctacctcagcctcctgagtagctgggaccacaggcatgcaccaccacacctggctaatttttttttttaacttttttgtagagagggggtttcaccatgttgtccaggctggtcttgaactcccgggctcaagtgatcttcccgcctcggcctcccaaacaggtgtcagttttgatgcagccaactctgcatcattttgtacaataagtggactctttcagctgttgcaggaaaaagttttcttacctctagaatcggatcctggggtagctgtggctggctttgtgactcccaagtgtgggcctgctggggaaaggatcggggtcaggcctttacccaccgcaactcttccagatcttgctgacgtcttgactgtgaacccggactcaccggcgtcggaccctacggttttccacaagcgctatttgaaaaagatccgagatctgggcgaggtgagggacgggcctgagctgctaaaaggcccgcctggtcgggaaggagtttgggggttgaggataaattcctacctaaggtgattctcaggagatgtgggtgggaccctctgctttgagggaggcctaggtgccaaggagtcttaatagagcggagtaggcggggcctggggtattccgaaaggatctgcctggaggagtggcccgggaaatcgggggttggggagtggtgcagggattggggaggtggagctgaccctcgtgcgctcccgaccagggtcacttcggcaaggtcagcttgtactgctacgatccgaccaacgacggcactggcgagatggtggcggtgaaagccctcaaggcagactgcggcccccagcaccgctcgggctggaagcaggagattgacattctgcgcacgctctaccacgagcacatcatcaagtacaagggctgctgcgaggaccaaggtgggcgggacccggcgagtcctagagacttgagggggcgtggttagagcgtgggtgtggccttgtgggcggggccagtctggcctagccaattagagactctcaaccccaggctgcagtacgcggttcttggcatctgggtgagcgtggctgggctgcctccttcccatctggggggtgctacctgctggggccaggatggacgggagccaccagcagctccctcaagtgagaatggggttctggatgggtccatcccacctgagaactgggtctagtgtgcgcgggtcttggccttc

SEQ ID NO: 34797 - DNA, 951 bp, Artificial sequence
  DNA replication origin
cgccttggcctcccaaactgctgggattacaggtatgagccaccacacctggctatttgtttatttttaaaagatggggccagctgggcgtggtggctcacgcctggaatcccagcactttgggaggctgaggcggatggatcacgaggtcagaagttcgagaccagcctgaccaacatggtgaaaccccatctctactaaaaatacaaaaattagctgggcgtgatggcaggagcctataatcccagctacttgggaggctgaggcgggagaatcatttgaacccgggaggcgaaggttgcagtgagccgagatcatgccattgcactccagcctgggtgacagggcgaaactccacctaaaacaaaacaaacaaaaaagatggggtctcgccctgttgcccaggctggtctcgaactcctgggctcctggccctccctgaccgacccaggccccacacacaggccacacaccaggtagctgagggcgctggccagctgctgggccaccaccatcttccaagccatgggcacatggccccgctccctccgcagccacacatccaggggtccgtgctccacgtactctgtcaccatgatatctgtaaagacacagctgctctggggcaacctgcctgcttctgccctctggatggcggggaattgggggagacgccagggagggacttggcatgtggctggggaggtgtcagggcagaggtgtgggtggagtttggtctgggttgaaagtgagtttggggagagaagaaatgcggaatgcagcagaggcagcggtggatgagggcattggggtccaagtgggatggggcacggaagaagttgaagttcaagagagaaaggtgggctgggcgtagtggctcacgcctgtaatcccagcactttgggaggctgaggcaggtggatcacctgaggtcaggagttcaagggcagc

SEQ ID NO: 34798 - DNA, 1306 bp, Artificial sequence
  DNA replication origin
gctaggggcttgaggttggggtgtaggagatgtttgggtaccagagtagtcagagggatgtgggtcagggtgtcggccagggtccaggggaaagtgggggagatgcacacacacacacacacaggggggttgagggatgggtgggtctagggttgttctgtacaagggctttattttttatttatttattatattttttgagacagagtctcgccctgtcgcccaggctggagtgcagtggtacaatcatggctcactgcagccttgaactcctgggctcaagtgatccttccattccagcctcacaagtagctaggactacaggcataggtcaccatgcctggccctgatttttaaattttttgtaaagatagggtctggacatgttacccaggctggtcttgaactcctgggtttaagcgatcctcccacctctgcctcccaaagtgctgggataggtgtgagccaccacacctagcctatacaaggagttttgagctacctgcagaggaaaggaagaggtggggttaggcagggttggatgtgcaggggctgaggcctaggagaatcagcacacatcagcactggagtctgcctgaggccatagtgctgatggggccaggagcagatgggggctggactgtagaggttgtttgggaggttgatggaagtggggatgtagttgggaatcagggtgggggttgagactgagggcaggtgagggtcgacgtgttgggatgtaagttatgggctggaatatcgttaggggttggggtctaggttgaaggtcaaggtgtagcccgggatcagagtacaggtgagagttgagaaataggcataggttggggtgtaggtcgagggttggggtacagatcagggagtgggtataagtcaggggtggcctgccaaagggggatgggtatggcgggacccactcactttcagggccgcgcacacagacgccatgcacgaaggccaggtgcgtgtgggagacctggctcatgaggctggctgtctcgtagaaggcctgtggggaccgggcaggtcaggtggctgcaaagccgacccctcccatcccacctcctccacggacacacccctcccatcccacctcctccacagacacacccctcccatcccacctcctccggccacctcctccacagacacacccccaggcctggccctgcccactcaccagggcgatgtcatggtgactagggtccagcactttgagcaccactcgtagctcctgcccacggtccctgccaggcacgagggggtcctcgtcatccatcttgccctc

SEQ ID NO: 34799 - DNA, 993 bp, Artificial sequence
  DNA replication origin
ttctggtcaacccggtggaagctgagctggctgaggttgagtgtcctggggctggcccgagccccccgcatgatgatgagattggaggtttctgggggcaggcatcaagtcatggagggcgggcctgggggagagatgccacatcccacccagaggtccccctatcatcgtacctcctggttggggcaggcaacagcgacgcagagagaagcagtcatccccggccctcagcaagcagccctgcaaggcagccccaagttcccgaacgctggggaaggaccggccccagccctccagcacgaaggccccgtcctgctgctcaatggggaactttcggagccgcaagctctgcatgccgtctggtgcctggcaggaggtggcagaggtgggagcagtaagcaggggaccaggcagggaacgtgtccagccccagccccagcccccagccctgggctcacctggctacgctgggccactgtgaggatcaggcggtaggggtggctggtgctccagtgaatgaggtacaggccgtcctcgggccgcagcttggcctgcacaaatggctccctggaaggtggtccagggggactatcaggccacctggggccactctggacccatacccgggaacaatgacactcattacctacttagagggcacacacacagctaggacaagtgtcagacacagccactcttgtggggacactaactctggacacacagccacttacatggagacacaatgcagcagcaggcacacacctgcttttttgtttatttgtttgtattttttagacggattttccctcgtcacccaggctggaatgcaatggcgtgatctcagcttattgcaacctctgcccacctgggttcaagcaattctcttgcctcaacacctcaacctcccgagtagctgggattacaggtccctgccaccatgcccagctaatttttatatttttagtacagagggggtttcaccatgttagc

SEQ ID NO: 34800 - DNA, 1453 bp, Artificial sequence
  DNA replication origin
ttccgcctgacggccgactccagccactacctgtgccacgaggtggctcccccacggctggtgatgagcatccgggatgggatccacggacccctgctgtgagtgctgggtggggggcgctgggggccaccgccaagggtgccaactagactgtgagccctaggggctgtgcagggtgtgtgtgtaggtgcacgtcttattttttttttattttttgtcgcccaaactggagtgcagtggcatgatctcagctcactgcagcctccgcctcccgggttcaagcgattctcctgcctcagcctcccaactgactacctgggactacaggcactcgccaccatgccaggctaatttttgtatttttgtagagatggggtttcatcagattggccaacctagtcttgaactcctgacctcaggtgatccacccgcctcggcctcccaaagtgctggtattacaggcatgagccaccacgcccggccatgactgtcattgtgtgttgaggttgtcattgcacagaactggtgattttcatgggactgtgtgttaccctgacgctggtgaccattcaggcgtatgttggatgcttccacctctgcaggcggctgcctgtgctggtaacttgtgagtcaccatctcagcggggtcctgtgtgtgacttgtgggcctgagggcgtgaagttgtcggtacttatgtcatcatcaggtgcaggggagtgtgtggctgtcctgtgtgctgccaagtcgtgatttgtgactgtctctttgtctggtcactggccctgtgactctctgtcccttgtcctacctgtgatgccaggggagggggaagtggccatttcaccttgtgaggcctgtggccgtgcctgctgtcaaggctatatgtgtgctgcccccgtacagacaggtgtttggggaccacgtgtgtcagccactgcacatgtaggtgtctggacctatgtgaccatgacactttatagtgcatgtttgtgtcacctctgtgtctgggatgccctggcccctatgttgccctgtcatattgggtgattagttgtgtctgggatcgttgtcctttgcttgtgtgattggccatccaccgtgtgtcacccttgtgagtggcgatggtcatggctgggtgtgtgcccatccggctcctgatggctgtttccaatcttggagtgtgtgtcaccttgtcagggcccgtctggcgtcaagtacaagagtaggagtaggctgggtgtggtggctcacacctgtaatcccagcgctttaggaggccgaggtgggagaatcacttgagcccaggagttcaagagcagcctgggcaatgtagcaaggtcttttaactacagaaaacacaaaaattagctgggcacacctgtaatcctggctcctcaggaggctgaggtgggagaatctcttgagcctgggaggtccaggctgaagtgagcc

SEQ ID NO: 34801 - DNA, 874 bp, Artificial sequence
  DNA replication origin
gtgccagccgctcgagtgtggctaggtatttgaccatgaccatctgctgggagagtcggcccggctggaagtcccgcaggaacctgcggaagacgttccgaaggcgcagccgggtcagggcgctgtgctgccggatatgccggcggaaggagcgcgggatgcagtccttgaagctggggggaaacacagtgaggggctggtcagggacctgggttgcaggcccagctgggtgacacagggcaagtggcttaacctctttgagcctcagctgcctcatctggaaaacaggcacactagccaggtgtggtgacttgagcctgtagtctcagctacttgggaagccaaggcggaaggatcgcttgaggtcaggagttcgagaccagcctggccaacatgatgaaactcagtctgtctctactaaaaatacaaaaattagctgggcttgatggtgggcacctgtaatcccagctactcaggaggctgaggaaggagaatctcttgaacctgggacgcagaggttgcagtgagccaagattgcgccactgtactccagcctaggtgacagagagagactccggctcagaaaaaaaaaaaagtagaggcacggcaatatgcaaagtctaccctggctcccagatgctcaggacatttccccctgcctacacagcgtccccaccccattcccagacacctggtcttcttggccacctcctccagggggatgccatggcggagagcgaggtgacagaggtgcagaaaggccatgcccaggctctcattcttaaagtggtggatctcctcctcggtcgacagctcccacagtgatgccacgtcattcacaaactcatgcttgccctgggaacaggaaattgag

SEQ ID NO: 34802 - DNA, 1150 bp, Artificial sequence
  DNA replication origin
catggagctgggtgtcttagctcacatctgtaatcccagcactttggaaagccaaggcaggatgattgcttgaggccagaagttcaagaccagcctgggcaacatagccagaccccatctctacaaaaatttaaaaattagccacaaaatttaaaaattaacaacaaaagggccgggtgcggtggctcacgcctgtaatcccagcgctttgggagggtggatcacgaggtcaggagttcgagaccagcctggccaagatggtgaaatcccatctctactaaaaatacaaaaattagccgggcgtggtggcgggcgcctgttgtcccagctacccaggaggctgaggcaggagaatcgcttgaatccgggagtctgaggttgcagtgagccgagatcgcagcattgcactccagcctgggcgacaagagcgaaactccatcttaaaaaaaaaaaaaaaaaaaagtggaagatgaggaagttgatcagacatcaaggatgagcggatgacttaataggcttctttgctaagacttggctgggcaggtgaaagacaaagtcgaggagtggttatggtgtggcacagaagaagggtcagaggacggtctttgttacctcttcatgcctgagtttcttcctctgtgaaatggggataataagagccgccatacagggaattgctgctaggatcaaatgagataatgtatgtgaaacgctctggctgtaggcttctcagcaaatgggcacgacttgcggagtggggatttgaattcacgtctggcgggatgtccaagctgctaccctgaccgctagggagcttcagaggacagggctgcaggtgatcaggaagaggactggggcaggtgggcgaggaatgcctcccaggagtgaaggagggggaattctagtcagcaggatggagtcggccaggtagaaacgagggaaaggagacaggaccggatggaacggggaagccaaagggcagggcgtcggagggttgaatggtggccggtgcagctttgaacaccgaggtgaggacatgcagctgtgtcctagggtcaggaccgtacacgcctgacccaattccacagcacggaggggaactccaggatccggccgcgttgcccacacacttcgctctccctcccgcctc

SEQ ID NO: 34803 - DNA, 2525 bp, Artificial sequence
  DNA replication origin
gaggaggcagggaattccagacaggggcagcgggaagttgccatcatcaggaaggtggttggggaaggggtcctcgctaaggcaacatggagcccagatggcacgggtgccatggagtcagctgtggggggctctgaaggaaaagcattccaagtagttggaacagccagtgcgaaggccttgaggttcaagaaaaaagtgggctccgcagagtgcagtagctcccgcctgtagtcccagcactttgggaggccgagagggaaggatcgcttgaacccaggacttcaagaccagcctgggcaacatggcaaaccccatctttactgaaaatacaaaaattagctgggcgtgctggtgcacacctgtagtcccagctacttgggagactgaggtgggaggatcgcctgagcccagggaggtcgaggctgcagtatgtcatcattgggccactgcactctgacctggacgacagagtgagaccctgttttttgttttgttttgttttgttttcttaaacaaaaaaaatggcctcaagaaaaggtgagaaaagtgaggggctggtgtagctggaaggaagagttaccaggggaggtgccgaggcagattgtgtagggcccatgtaggctgtggtgacaacttgggttctgctgtgagatgggagccgccagggttctgagcagaggacggagggacctgaccccacttgggtgtgcgctggcacctgtgggcgcaggggcggaagctgggagaccagggcacgggaggtggacgcgtactttttcctggggccatctccggtgcagggattgggtatggggcgggggtaagggacagacgactccccagagttgataggccgtccctgcccgcaggcccgggtggaacgcatggagcagttccagaaggagaaggaggaactggacaggggctgccgcgagtgcaagcgcaaggtggccgagtgccagaggaaactgaaggagctggaggtggccgagggcggcaaggcagagctggagcgcctgcaggccgaggcacagcagctgcgcaaggaggagcggagctgggagcagaagctggaggagatgcgcaagaaggagaagagcatgccctggaacgtggacacgctcagcaaagacggcttcagcaaggtgtgcggggcgggcggggcgggcagtgcgcatgcgcagccagagagcctgcaaccaggacgcatgcgcacccaatgcctggtcaggggaggaccccggtggtgtagttgaagagtgtggtggggggcggggagctgagggatggacgggggccacgtgggaggggggacaggcttggggggccgggcggatgaaacaccccaccggtcccctcctctgatctgccccaaggcccatgcccacgctcccgccaccttgatgctcatggcttcgtcaccacctccgccgtggatgggatgggcgctgcgaccacggcccgcccggccgcgctcgaggcgctccgcagccttgccccagcccactccccctctcaccctaccacagagcatggtaaataccaagcccgagaagacggaggaggactcagaggaggtgagggagcagaaacacaagaccttcgtggaaaaatacgagaaacagatcaagcactttggtgagtggggcttgtgggttatggggggcaaggtcgaggcaggccctttgcctccagggccctccagcaccttgccagcatcttcccacaggcatgcttcgccgctgggatgacagccaaaagtacctgtcagacaacgtccacctggtgtgcgaggagacagccaattacctggtcatttggtgcattgacctagaggtggaggaggtgagtggagctttccccgggactgtgaaaaggcgctgccatgaggccgccacttggtgacgctgtgcctgttcttcctggcagaaatgtgcactcatggagcaggtggcccaccagacaatcgtcatgcaatttatcctggagctggccaagagcctaaaggtggacccccgggcctgcttccggcagttcttcactaagattaaggtagggtccctgagctgccaggtggctggaggccccctccccagggaaccagcccacaatgctctaggtaaggccgactcctctccactgggactcaagcccctccagtcaccgcatcctagatcaggagagggtggggccagggaggaggagagaagtgggcagattctgccagactttaaaagtggaggccgggcgcagtggctcacgcctgtaatcccagcactttgggaggctgaggtgggcagatcacctgaggttggaagtttgagaccagcctaacatggagaaacctcatctctactgaaaatacaaaattagccgggcatggtggtgtgtgcctgtaatcccagctactcggggggctgaggcaggagaatcgcttgaacctgggaggcagaggttgctgtgagccgagatcgtgccattgcacttcagcctaggcaacaagagcgaaattccatctcaaa

SEQ ID NO: 34804 - DNA, 1214 bp, Artificial sequence
  DNA replication origin
aaagaggagtgcctggggagtgacatctggggctggggtgagcgggaagcaggtagacaccaagctggggctcaggagggcatgctgggctggagacagagctaagagggccttggcagtgatcctggggcaaggttatgggtggaacaaagaaacatctagaaggggccctggtgcagtggctcatgcctgtaatcccagcactttgggaggccaaggtgggtggatcacttgaggtcaggagttcaagaccagccaacatggagaaaccccgtctctattaaaaatacaaaattacccaggcgtggtggcgcgtgcctgtaatcccagctactaaggaggctgaggcaggaaaattgcttgaacacgggaggcagaggttgcagtgagccaagatcacgccactgcactccagcctgggcgactccgtctcaaaaaaaaaaaaaaaaaaaaaaagccaggcttggtggtttgtgtgcacctgtagtcccagctacttggggttgaggcaggttgagcctgggagatcaaggctgcagtgagccattatcacaccactgcactctagtctgcatgacaacaagaccttgttcaaacaaaactgaacaaaataaaaacaaaaaaaaaaacaagcatttgctgagcccgtgctttgcaccaggccacgttcctggttctgggaacaaaatggcgaacacgttcccatatttagagagcagggcttcattcattggaggggggcagtacccaaaacgtgataaataattgtcatatgatgttagtggttgctgatgttgaggaggcagggaattccagacaggggcagcgggaagttgccatcatcaggaaggtggttggggaaggggtcctcgctaaggcaacatggagcccagatggcacgggtgccatggagtcagctgtggggggctctgaaggaaaagcattccaagtagttggaacagccagtgcgaaggccttgaggttcaagaaaaaagtgggctccgcagagtgcagtagctcccgcctgtagtcccagcactttgggaggccgagagggaaggatcgcttgaacccaggacttcaagaccagcctgggcaacatggcaaaccccatctttactgaaaatacaaaaattagctgggcgtgctggtgcacacctgtagtcccagctacttgggagactgaggtgggaggatcgcctgagcccagggag

SEQ ID NO: 34805 - DNA, 1098 bp, Artificial sequence
  DNA replication origin
agcttgtgcagtcagcattgttgactgtttgacagatgaggaaactgaggttacaggaggttaggggatggcccgggatacccagccggtacatggtggctgtgggctaggacccaggggccgttgccccaaggctgtcctccagcaccctcaccacatcgtcagatggtcacaggaggtcctttagggatcagtggtgcctcaggcagggagcatttggggaaggctctgttgaagctgagttttgggtgcaaaagcaggtaagggaaccgcacatgcagaggccaagaggcaagacagagcccgtactttcggggaacgatgagggccagtatctgcctgggacccaggaccaggatgccaggatcagaagtcccatctgaattcagaccccccaagatgtagtggggaggactctggtcacgtggtcaaatgcatgggcttcacaggcctccctggtggcagctgtgcctggattggagagggtcagcaattgaaggtggtggcacgtttcagggtttcagggtttgattagtggctctggatagagcagcctccactgaggttcaggagaggtgatggtggagccacgcaggggtctcaggagaggcctgtacaatccgatggggcccagatggaggtctgagggagacagggagtgaggcggggaccaggagcctgaggagatgaggcactgttataaggagaaagaggagtgcctggggagtgacatctggggctggggtgagcgggaagcaggtagacaccaagctggggctcaggagggcatgctgggctggagacagagctaagagggccttggcagtgatcctggggcaaggttatgggtggaacaaagaaacatctagaaggggccctggtgcagtggctcatgcctgtaatcccagcactttgggaggccaaggtgggtggatcacttgaggtcaggagttcaagaccagccaacatggagaaaccccgtctctattaaaaatacaaaattacccaggcgtggtggcgcgtgcctgtaatcccagctactaaggaggctgaggcaggaaaattgcttgaacacgggaggcagaggttgcagtgagc

SEQ ID NO: 34806 - DNA, 1715 bp, Artificial sequence
  DNA replication origin
ctagttgtttctggataaatgatggggaattgccctatgggagggtggggtaagagatcctcactagaaggttctgagaggtatatgcccttcgtttaagagcacaacatggctgggtgcggtggctcacgcctgtaatcccagcactttgggaggccgaggtgggtggatcaactgaggtcggaagttcaagaccagcctgaccaacatggagaaaccctgtctctaccaaaaatacaaaattagccaggcatggtggtgcatcatgcctgtaatcccagctactcaggaggctgaggcaggagaatcacttgaacccgggaggcagaggttgcagtgagccaagattgtgccactgcactccagcctgggcgacaagaaggaaacttcgtctcaaaaaaaaaaaaaaaaaaaaaaaaaggaatacaacagacactggtatgtaatgcaggcacactcatttggggtagcaggaggttaaacctttaagtcttagtcatcccattggctcgtgagcactgagagggtggtgggacatggatcacccaggcttgggattctggggtctggattcgggacctctgttgtggtcagatagaagaaggggtggtgaatttagaatcagaccaggagagtccctggataagagcagggacaatttgggtcacagagtagctaacaggctggggacaaaaggtggggtgggtttggggttctgggcttgagttaggggagagtttccaatgctggctgaggctcatacaggaagccagtctgggaagtgggtggtgacagggtctgcaataccaagtaggagcaggggctctggctaggccggaagccacgtgggcaggatttcctggtataatgggaaatgggtctaccggaggccaaaggagaggctggaatgtgaggctctatcgggttggagctggtagttagatccagaggggaaccagattccaaaacccaagtactcggtgagactaaggatcctgaagggggacggttctacactctaggaagggggtcctgggtgtgggcagggacaggaatatcagagtagcacagagttccttgttccgtttagaaaaggagtggcgactccggatctgaatgggaaccccggatcaagatcccggaaagtagatcccgggacagaccaaagtattgggggtccagactacggaggtgggggggcgatgggagatcccagataggaagtgaatacccgaataggatgagggatcatctagaagaatttggggtccaaactttgaggcagagttctgggtataaatgttaactgccgaacagaattagggagaacccccaagactcgtctaggggactccagactatgaagaagttctagggggtgaatagggaatcccacgcaaaaatcggagcagggagtgggggagcggagatccagggcagggactcagggtcccaatggtactggggtcccggagttgaatcgaagctcctgaaaatccagactgggggggtgagaatcctaggtgtgaacagcggggtccctgggcagtatcggggatcacaactccgaagcggggtccgggagtggggaaagggatgggcgcgcgcgccttacctgatgccgccagcggaagagactggccgtgtcgatgttggggtgcgtctcgtcttcatcatcagacacctcaatgtggtcccacacgctgtagtccacc

SEQ ID NO: 34807 - DNA, 1169 bp, Artificial sequence
  DNA replication origin
gggcactgcgactcctcttcatctcgccaacctagcgcgccgttgggactgcggtggccatgtcggcagggccagggcctcctacaagaccaagccaaacgcatctgccatcagtgccccagggctccccctgccggtcgggcctagaacccgcccccgccacttgcctattgcctctcctggggcgtgacgtcagcggactgacgcaccaccaatgtggtgacgtcgcccccgttgccagggcgacagctgacgcacggctgggctcctgacggcgtcaatgccggggttggccactggggggccgagagcctccgggcccgggtcgccccagcccccacccttcctcccgcgggggcttccccggctcggggatcccgcagaaaaaactgggagctcccagagctggccgcgtgcggcgcgtggtccgagccgggggccggaggaagcgtctcctccgagctgttgggcttttaagccttaaacccgaaatagctccgatgtgcgggggccgggcgcagagagacggcggcttgggcacagatgggggacgcacaggcagaggcgcgtggagacagacagggacgtgtggaaatagaaacagacagacagggacacagacgccgttcccgaagacgggtgcgctctgcagccaccgatccttgtctgaaatgcttgggggagggagaggctggcttactttaccttggcacccaggcgctgaagattattgctgtgcggccatgggtcagtgtcttaaactctgtgagcctcagtttcttttctgtgaaatggaatgatattccctacagggtccatgtgagaatgaaatgagatcaaaccatattgaacagaatagtgtctggcactcagtaaatatttaataaatggtaacatctgaccctgtgggagcctgttagaactcgattcagatcatgatcttcctctactcagagccctaatagctcttacctcactcagaggaaacgtcaaagtcctcgcgtggcccacacagtcctgctagataacgcccagtcaccttcctgccctcagctccagccacactggtctagctgtttctggacacagcaagcatgctggtgcctcaggccctttgcactttcagttctgtccacctggaactcttcccccaaatatccgcaggttgg

SEQ ID NO: 34808 - DNA, 1304 bp, Artificial sequence
  DNA replication origin
gtctgtctgtttctatttccacacgtccctgtctgtctccacgcgcctctgcctgtgcgtcccccatctgtgcccaagccgccgtctctctgcgcccggcccccgcacatcggagctatttcgggtttaaggcttaaaagcccaacagctcggaggagacgcttcctccggcccccggctcggaccacgcgccgcacgcggccagctctgggagctcccagttttttctgcgggatccccgagccggggaagcccccgcgggaggaagggtgggggctggggcgacccgggcccggaggctctcggccccccagtggccaaccccggcattgacgccgtcaggagcccagccgtgcgtcagctgtcgccctggcaacgggggcgacgtcaccacattggtggtgcgtcagtccgctgacgtcacgccccaggagaggcaataggcaagtggcgggggcgggttctaggcccgaccggcagggggagccctggggcactgatggcagatgcgtttggcttggtcttgtaggaggccctggccctgccgacatggccaccgcagtcccaacggcgcgctaggttggcgagatgaagaggagtcgcagtgccctgtccgtggcagggaccggggacgaggtgcgagaggaggggcttgggctaggggcggggcttcgccccttgggggagactagcgccctctagtgaccacggctatttcctgaacgtggcttcactacctccaagctgtgaggagtttggtcccctcgtgcctcagtttacccccttgattccattttttctcctgctgccctaagaggctctcagccggcccagggacagcaggcaaaggcttctcaaatgaggagaggattttggcgaggaggtgggagggggcgctaggggtggtgaggtcttgagagtctcagatgtgagggatgggaggggggcattgacattaagaccaagaggggccctcttagacgtggaggttgggaagagaccctaaaaaggtgatgtgttagagaggtctcacacttgagacagaatgtctagatgtgacagaccccaaggctggggcatcgagaggggaccccacaaaaattatggctgagaaggggcactctcagacctaagggatggcagggcaccctctgtgtgaggggtcagcgagtggctcacacgtgaaggggagcctataccgccattaactactcccttagacagctaggtaggggtgttcttggggagaggggctcagagcttcccagccaggccacgcccctattccactttgtccctcccca

SEQ ID NO: 34809 - DNA, 1540 bp, Artificial sequence
  DNA replication origin
gcctcccccagcgccgcgccgagcgagcaagcagagagcgagcgggatccgagtgcgcccccatccccctcaacccccccaaggatggctgctgggcggggggagtgcacgcgcccgcgtgtcccaccgccccccccccccacgccgataagagctcgaacgcgaaactgctctgctgcgggacccggggaccagacccctgcccccgtgcgccccctgtcacgggctccccagggcacgcgatgccgtttgccaccgccctccccccgcgcccttctccttatttgaaaaaaaaaaaaaaaaaaaaaaaagactgccggtcttcaacccccacagccacttttctccccgccagagggggctcccggcgtgggcgaacgccgagcaaaaaccggcccccccatcagcagccgccgggtattccaagggccaaaactgtgttccccacttctctcaggaacaccccccccattacacactcaaaacggcttctagggaatttgcaggggctgtgagttctccccagatcatatttgagagtcctgggctgggccaaattcttggcggggtatgctgtaacgttggttagagatctggaagcgggtgggagtgcgtaatgtgaggtgggtgggggtgtcaggacacagctggggttgcagaagaaggaggaaacgaggagcggtggcctgagctgggggataaactgatctggacctgaggctagtgggatgggcgtggagaggtataattaagcagctccaggggcgagagacagtcacttgctctccctatctggaaatgaaccattggaccatgacggaaacagagaccctggaaccctccaattgagtagatgggggtgggggtggattggaactgccgaaagcggtgaccagaggagggcatgggggcaggggccggccagaagccaggaccagctcagctgtctgactttccagctcattcttgagccaagaggggggttgagtactctgggaaactggttgggtacctggaaggtccccagatgagaatcagcaggaggtgctgtgtgaacccagagctcgcagatatttctcacatctccccaggagaaagaaaaatactagtccagaccccttccaagactccaccatccccttcaaggcggagaagaaacctgatcctcccaggcggggacatgaaagccggtgcacagccgcctgatcaacctgccccagctctgtgaatatgggagcatcttgggggctggagacatgacacccctttcctcagtcctgccccttgctgactcaggcagctggaaaatgaaataaggggttcctagagcctgcgaagggtgccttggggtaggggtgtcacagcccgccacaggacaagttgcagctagttttgcaaacggcagggagcatggagatcgggaagggctggtggctggacctagcccagttggcactgtgcctccccaacccacctcccactctgctccctctcctacctacctgtcgttctcggccctggtgatggaaatccgcggtgg

SEQ ID NO: 34810 - DNA, 1235 bp, Artificial sequence
  DNA replication origin
cgaggggacggtcgggggttccatggcgccggcccccacttgcgccccagggggccctggcccttccaacctacaccccgctcagctgcgcgcaagccagcgagcccagggccccgcgggtgcgcccggccgcggtagggccatggcgccccggggacagacccgggggcgctgcgggccaatcgcccccgggccgggctctgcagcttcctttcggcgcctggagctctgctcagtgcccggcggcgctctccgcgctccgcgctccgcgttccgcggcccgctcggcgccagccccggctcctccgccccgtcccgcccctccccgccccccgcccgccgcggctgtcagcgccgcccccctcctcctccgtccgggccagcggggggcagctacctaaggaggggggcccttcccgcccacgcagatccccgctccgggctgggagggggcgctggaactcgtctgtcttcaaagcaccctgcttggccgcggcgcgcacaggcacgaaggagttaaacggttaatccgatctggaagcagacaccggactggttgccagagtgtcagtcagtcggtccatcatggcgagggcggagtccggtgttggcgtgtcctcgccgctacccctggcggggggcagtttttgaggagtggtcctagtgccaccggcgcggtacctgcagcgggcggcggcagagtgtgtgggatctcctgtctgtgcgtcggaggatagtgatggtgcgggcccggggcgggatgtgcgcgcacgtggcctcttccgagggttgtctgtgttttcagtgtcggctggaagtgtgtgtgcgcacgtggttggctgctgttgtctgcccgtttctctggatttggctgtgtgtataactgtgtgtgtctgtgggtgaaggatgtgtgcgcacatgtgctacctatttggaggatgtgcatccctacgtggtcttttttcaggtggcctggggactgtgaatgtgttctcaagcgcttggatgcgtttgtggtcggtgtgtgcttgcggagttgtgcacgcgattcggcctctgtcgtctgactgtagtgtcggaggacgtctatgtatgttagtgtgtgcgtgtgcgtgagtgtatgtgtgtggtcggcctggggcctctggggtgtttctggggtgtgtcccattggttcccttgtggctccaggaagacaccctgtggcggataccgcagctgccggcccaccgctc

SEQ ID NO: 34811 - DNA, 1999 bp, Artificial sequence
  DNA replication origin
tctgtccccggggcgccatggccctaccgcggccgggcgcacccgcggggccctgggctcgctggcttgcgcgcagctgagcggggtgtaggttggaagggccagggccccctggggcgcaagtgggggccggcgccatggaacccccgaccgtcccctcggaaaggagcctgtctctgtcactgcccgggccccgggagggccaggccaccctgaagcctcccccgcagcacctgtggcggcagcctcggacccccatccgtatccagcagcgcggctactccgacagcgcggagcgcgccgagcgggagcggcagccgcaccggcccatagagcgcgccgatgccatggacaccagcgaccggcccggcctgcgcacgacccgcatgtcctggccctcgtccttccatggcactggcaccggcagcggcggcgcgggcggaggcagcagcaggcggtaagactccccgcggcggatgcgcgcggaacggatgggcgcgcagggaggaggcaactcgagctgccggccgcagggggcgctaggatgcgggtggggtcggtttggctggcgggggcggagggaattcggctgcgggggcgtctgggacctggcccctggttgtgcgctctacgggaggcttcctgctgaagcccatcctggggtccatttagggggcgccacgctgcgcgtggtgttaacgaggtctgggttggggaagggggctgcacacttaggggtctgtattcttggtgacagtgcagaacagctgctaagctgggaaccacttggagggaccttcctgggggcactatactgagggctagattcgcagtgtttggggtactcttggagcactccataagggggtgcctgctaggaccaggatctttacttcagggtggggtgctctcagggtccttctaggggatggaggactctattgcggggatgttagtggactcctcctgcagcagctggggtcagaaatccagagggtgcctcttgggggagcactgttttgggagccttgcgttagattggagttcccctctcagggcaagagtgttagcgttaagtagctgttcagaggcaggaaacagtggagggggggcgcagtcccagcacagagggaaggagtccctgactgcagaggtgacagcatagtgagggtgcatgtgtgttgagcttggtctcctctgagggtattctccgattgacctccgtttgctccagctgtccgggtatgaccagctgtggctacctcagttgtgtgctctgtgtgagcttctggggtcttgtgatggtgacacgatgactctgtgtcctccagggacagtgtaattgtgacagtgtgactgtgtatttccagggtagtgtgactgtgtgtttctgggacagggtttgcgacagtgactgtgtgtgctccaagaatgctgtgactgtcacagggtgactgtggcctcatgggatgcagtgattgggatagagtgactgtttctgctcctaggacagtgattgtgcaatggtgttggtggtctagggacaatgtgattgtgacagtgtcatttctggcatgcagtgattgtggcactggggtgtttacacttggggaacaatgtgattgagttcgtggaacagtctgtgctccttggacactgtgattgaaacacagtggctgtgtgttagtcttcaccaggtgctcacgtctgagcgtcggtgctctgacatgtggtctgtgttccctctgcctggtgtatcctaagaactggtgtcctctaaccacctggtgttcttagttattgttcctcctctgatggtgctccagggtctgattgcttgtgctccagcgatgtgtgcaactgacagctttgcccgtgtgctctacctggatgccccactgctggggatatcaccaagacggtcagatttgggctccttatccctggagctcctgagtgaggcctctctaagatgtagccctactcttcctaagtctct

SEQ ID NO: 34812 - DNA, 1195 bp, Artificial sequence
  DNA replication origin
cgggcaggaagcgcagagccaaggatgctggggttcaccggcctgccgggcaagcgcgcagaggcgggacgggaactccacggctgcaacttttcggccaggttcctccctgtcctccagacgacagtccccgcagcgtgtggcaggggctggcgcatggggaaagcggcctggtcccaagcccgggagggcgaggaccccacacgcagcctgcggtcagccggcctggcgcccgctctccaggacgctcaataagcataaaataataataccgggcgccgcgacggtggcggcgactttgctttgctccgggactggcggcgtccctggagcaggtccgcgctcggagcgcacacccaggctgtgccttcctcgtcgtccagcagagggcgcgcggggagacccgctcccaacccacatccagggacttgggagcgccagggacaagggggaggcgaggacccaagtggagacagagaccagcgaccagacggataccccagctcggctgcctccacctgctcctggggccacactgtgcccccacctcgatggggaagttttagggcccagggaggggggacgcagggtccgtatgttggccccgtccccagttcagacagctccccacccccaccaccaaagtcctcctcttcctccctctccatctgcctcttgacagatcgtggctgtgccgtgactcagccgtctcatacatcttcaggtctggaggggaggtttggatgacatctccggttgggggtgggcagtgccctctctctggggattcctttgacccaaatcgggggagctcgctggactccttttgcggtagctggatgaactccagtgtggggagcactgaatcctgtatgtgccctggtaaaaaccccctttttgaagaaatgcctgttctaagcattgaggttgccatcagacaccttcctccttttccctgggaatgggggaggaccctggcactgatgccagctacagcccacccatcagtcccagctttggacctcagcacagacactgaagggtgcacaggcccacagtgaaacagaaacccgagtctacgtggggatgtggttaaggttcctgtttttttctactcaccctggagaaatgggatccacccaggtcccccctccttagtccaggtccctgaatggagatctactgattatgttaa

SEQ ID NO: 34813 - DNA, 1499 bp, Artificial sequence
  DNA replication origin
aggagaaaggaaaggaaaggaaaggaaggaagaaatgaaggaaggaaggaaggaaaataaggaaaggaaggagaaaaggaaaagaaagaaagagagggacggaggggaaaggaaaggaaaggaaagaaggaaggaaggaagaaagaaagaaagaaagaaagagaggaaggaaagaaagaaaagaaaatagagattcaccctcttttctcttttttttcgtgagacagggtctcactgtctcaagatggtttagtggcaccttcataactcactgcaacctcaacctcttggctcaggtgatcttcccacctcagcctccaaagtagctgggaccacaggctcatcccactatgccctgctaatttttgtcatcttttgtagagatgggatctcgccatgtcacctgggctggtctcgaactcctgggctcaagtgatccgcccaccttcacctcccaaagtgctgggattacaggcatgagccaccacacctgccttctaggggtgtcttaagagttgtaagacacatctcagaagctgtgggtggcattctaggttgtccccaaggactgtggggtgcatcttgggattctgttctagggtgtgagactgtcttaggagctggagaggaatctagttgtgtccctggggtctattggggcaccccagattttgctggcatctccatggttactagggcatcccctgagtctgaaggcattcccgaggttgtcttggggtctcagcacttgtgggggcatctcagagatgctgtagaaccattcagggattaagggacatctgagggactgtggaggtgttcctggggtctgtggagaactctaggatttggtgggaacctatattcggtctatgaaaatggctctgtgggtgtgggggattctgggggtactgagggagggtctatgcatgatgggatgatgagagttggggatgatggggagctctggaggaattttgggacatctgaggaactgtggtgggggttctgggatctgaagggttttccctgggctctcagagcaccactggcagggagtttgtgggagtgcccccagagatttgggggcatccctggcatttgtggatgcaccctgggattctcagggcactcctggggcttgtggcatgtcccagaaacagtgagaatactgctaggattatgggggcatctggagagctatgagagtgccctagggtttatgagggtgtctcagaacacctctaagttgtgctgagaagccccgggatttgggggggtacccctggacttcttgtgtggggttgtctcagggacaatgagggtgctccttgggattctgagagactgtggggtggctcctggggcttgtggggcctgtcaacaccacggggagtttgcaggagtgtccccacagatttgggggtgtccctggtgtttgtggggacgcgtccggcgattgtgaggacattagagccaacgcgggcggctttggggtc

SEQ ID NO: 34814 - DNA, 1530 bp, Artificial sequence
  DNA replication origin
cttgtggggcctgtcaacaccacggggagtttgcaggagtgtccccacagatttgggggtgtccctggtgtttgtggggacgcgtccggcgattgtgaggacattagagccaacgcgggcggctttggggtctgcgggagagtccccaccagagccgtgcgggcgccccagacccgccccgccctgggggcggctccagcgcgaagccggaagggccgaggcgacagggcggggtggggcccgcgggcccggggctgggcaggcggcctgcgtgggcctggcggggtgggcggcgcagctccccagcgcccgccgaggcggggccgccccgcggccatggcgcggccgcgcggcctaggccgcatcccggagctgcaactggtggccttcccggtggcggtggcggctgaggacgaggcgttcctgcccgagcccctggccccgcgcgcgccccgccgcccgcgttcgccgccctcctcgcccgtcttcttcgccagcccgtccccaactttccgcagacgccttcggcttctccgcagctgccaggatttgggccgccaggcttgggctggggctgggtaagtgcagcgctggtggccgtgggttcaagtcgcccctggccacctggcgcactccagggtctagggttcgtggctcactctctccagcctcactttcctcttctgtcacatagcagcgatcaaaatcatccctgaccgccagggttgccctggagacctctgatagggcatgcagtagacgtttaataaatgttgcatccttcccacttcctgtgcaaacctgaagctgcggtcacgctttggaggagtgagggcgacctgccatccaggtcatgtgttcatcctggggtatgtgttcagttctgtcagcctcagtctactggcctgtgaaatggggccagtcatgccttctgtgggtggccttgcggtgaggcttggtgtcactcctagtaccgggccacagagggcaaatggaagttccctttctggccagacggggtgggctgcgggggcttgaagtctgggagtgacaggccccgaggccacatccagtctggctttctaatgtccttatatcctggaggcagaagttggcagcccggagttgggcactggctggccctgggggcttctccgggtcctcagcctccccctcttccacctactttccacgtgcaattgaggcacagactgaaggagggcacggcggggcaggaccgggcccagcgactggccccaggaacgaaatggggcggggacagaagaggaagaggggccagggcctttgggagccccgcgtggggtccgcagggtgtgtgtagggaaatcgttgcttctctccgggtctctctctctgcgtcctgcgtctctgtctccacttctgtctcttctgtctctgttttgtttctccttcccaccgctgagctgcaccttcccctcccctgggtttatgtcacccggccccacactcgagtcccgtttccccgggggcgcacggcgatcagcgatc

SEQ ID NO: 34815 - DNA, 1633 bp, Artificial sequence
  DNA replication origin
aagaaggaaagaaggaaaggaagaaagaaaggaaggaaggaaggaagaaagaaagaaactgaggcacataaaggataaatactatggttattagtagcagagcatggatttcttttaaaatttatttattttgtagagatgaggttttactatgttgcccaggctggtctcaaactcctgggctcaagccatcctcccacctcagcctcccaaagtgctgggattacaggcatgagccaccacgcccggcctagaatgtggatttgaacccaggcagctgagctacaaagctgcgacgagtgtcttcccccggggcgcacagggcaggcaggcctggtgtctcccccggctccccgtgcttttccacctgactcacttgtaggtggtgccaggcagcctttatggaaaggcctggcatttgctttgtgaaggtcacatggaggttgaaggcgggtgctggtgtgtgtctcccaggcaggcgcgtagtgccaggtgacacagctctttggggggctgagtatgtaagagactgggggagagggaggtctgtgtgcccccgggcatcacacatagacatctctgtggcatcgcacatctgcctgtgtgagcaggggctgggtgctcatgggtgcctgtgtgcatctctgtgtctttatctgtgtatttctgagtctgggtgactttatgagaccgtgtcgcactgatactgtgacagtccctgacccctgtgtgggcacggggtgcgttcctgtgtgtatctggtgcaggtgggagtacagcatacaggaacatgtgtgggccctgggtgtgtatttttgtgagaatgtgtctcaccaaaatacagtgtcccccactgtggaggaacgcagtgtagacgaggatgtgcgagggctgggccagggttgctgtggtctgtgtgtcacctgtgtgtggccatgagtcaactgcagggtcctcttggtgcagccaggagacccatacctagtacggtaaacaccaggtgacccggattgccctgtgtgcggccctgtgtgtgtgtctgtgttagagaccatggagcaggaaagcaagaacaaggctagaaacccctgagaattctgagaacttaaaggccactcacagccccagctcagtccagcctattctaaacaccctccatgagacccagaatctcccctccccacccccaacccagcttggttttcagcctggcagctccagcatgagagggggtggggaaggtaaggctggagacactgagccaggcagggacttagggatctggttctaggccagtggcctgggagtggagcccaggtgacgctggacacccatatttgcagccaaagtgaatgccagaagctcaggtttaaggacacaaagagggtgacgggtcctaccttggataggcaggaatggacccagcacccactttgagggctgccaccttcaagaagccctcagcagcaccccaggcctttagagccaggaaagggggtggggccccagccagatcctggaagccacttaggggactcacccaggtagactcagcacccccacccccccagcacagccagtgcccttcagtattaaaagagaggactgactggccacgggccacccacctgac

SEQ ID NO: 34816 - DNA, 1005 bp, Artificial sequence
  DNA replication origin
tgtctcagcctcccaagaagctgggattacaggcatgtgcctctcgccccactaatttttgtatttttagtagagactgggtttcatcatgttggccaggatggtctcaaactcctggcctggaacaatctacccactttggcctctcaaagtgctgggattataggcgtgagccaccgtgcctgacctttttatttatttattttttcttttaaagagatgacatcttatcctggccagcatggtgaaaccttgtctctactaaaaatacaaaaattagctgggtgtggtgacgcacgcctgtagtctcagctacttgggaggctgaggcaggagaatcccttgaacccgggaggcagaggttgcagtgagccaagatcgcgccactgcactccagcctggtgacagagcaagattccatctcaaaaaaaaaaaaaagagagagataaaaaagagatgaagtcttgctatgttggccaggctggtctcagaatcctgagctcaagcaatccttctgcctcagcctccaaatgtgctaggattatgagtgtgagcttccaagcctgacccgaggtgaatatgttgcaagggcggggcttgatgaggggagcagtgaacaggaaggggaccaagtgggttgaggtgtgtacagcaatggctggtggaaaggcctggaggaacccagtgagagaggaagaggctgagcaggttcagggggaactcacacctcaacaagtgtcacgataagggaggttagcttaggaaaacctggaggaagggcagagggtgggtcaggtgagatgtacacactgtgggaggatacagtgggtgggcactcacacctttctggctggacatgctataaagtaactgagggcgggcagggtggctcatgcctgcaatcccagcactttgggaggctgaggtgggaggatcgcttgagcccaggagtttgagaccagtctaggcaacatagtgagacccgatcactattatattttttaa

SEQ ID NO: 34817 - DNA, 2373 bp, Artificial sequence
  DNA replication origin
agccccatttttttttttctgcaggcggtccccgctgggcggccccacccctgtctgcaaggccacgctgtcaggtagctaagcccagaggggtgggaaggggccccccttgctgccccagtgggggtccctcagccccttccccacccagcagtccactcacctggcgaaccccgtcacggcggtctggagcctctgggcttctgcctacagaccttctcagtcactaccctggctgccccttccttagaagaaacgtgtcagcagttggcccgggagactctggaggagctggactggtgtctggagcagctggagaccatgcagacctatcgctctgtcagcgagatggcctcgcacaaggtgtgcaggtggtgggcagaacccctgggcggggcaggcgggggcggggccagtgggtagagccaaccgctggatgggaccagtgggcgcggcctgcggatggagccagccattaggttgttcctgtgggcggagatagctactgggtgtggctgattagggcagggccaatccctgggcgggggctggtggagctgggccctatggatggagccaaccactaggttaggcctgtagccgaggccaactattgggcgtggctcatgagggtggggccaatctctgggtagggtctatggtatggggtcagtccctgggtggggccaacccctgggcggcagcttcaaggcttgaagctcctgtagattatgactttccccagggctggaggagcctggtgtgtgttgtggggtggggtgtgtctgtctggttgtacatgtgtcaataggtgaccgtttccgttggggggttttatgcttttatggtctgcgggggtgtatctgcggctataggtctgcgtagccgctggtttattggctacgcatttgcagcgctggggtgttgggaatagattctgaagagtggcacgccagtgtgtacttgtgtaggtgtataggtttgcacgggtaattatgcagggttataggtgtgtggggctgtgccagaggggtgcgcatgtctgcaggggagagttggaccagatgggaaactgaatgtgtagctctatgtgtttgtgaatgtgtgtgtttgcagggccgtaggggtgactgcaatgctcccatgtacagttgtgcagacggtgcactgcacaactccaggggacaccattcaggaagcaggcagtatgtgtgaatgatgcttcctggagttggagagagtggtaacagcccttgtgggcgggtgcctatcaagaaatgatctgtaggtgggagtgtctttgttggggggtgcttacagcagtgggtggaggcttgtataggaacatagcagtctgagggcgattgtgtccctgagggtggatcaagcatctgaaatgtagctgtgtctttggatatgggtctgaggatgtttctgcaatggtgtgtgtgtgtgtgtgtgtgtgtgtgtgtgtgtgtgtgtgtatttttgcatctgtgagtatatttccttatggatttgtcgggatatgtttgtgtccaagggcagtggatatttgcaatggttggaaagtgtgtctgtgggtgtgtttagtgtgtgtctgtaagtgtggctggctggggaggccaaggcgggcggatcacctgaggtcgggagttcgagcagcctgaccagcatggagaaaccccgtctctactaaacatacaaaattagtcgggtgtgctggagggtgcctgtaatcccaactactctggaggctgaggcgggagaattgcttgaacctggaaggcggaggttgtggtgagccgagatcgtgccattgcactccagcctgggcgacaagagtgaaaactccgtctcaaaaaaaaaaaaagaaatgtggctggtatctcggtgtctgtctataggtgtgggtctggatgtgggtctggatgtgggtctgtgcccttggatggggcgtgtctgaaggcatttgctatatgctcagctgtggacctataagtgtgttggacatcagagttgtgactgtctccgggtgtgtgtgtgtgtgtgtgtgctgtaagtgtacaacagaaagcatttgagtatctgtgtatattcaagtgtcaagtgcctggatgtgtgtgggtgtccctggaaggtgtgtctcagggtgtttgtacatctgtgagtgtaaagtggatgtgtgtttctgtctctgggtgtgtccatggaggggatgggtcctgatggggacagcccacctaggttctggctgaggcccatgggctctgatgcccctttaatacccccccacccccagcaccacctgacatcccatgcagcctgccagtgctgcagtgagcacacacgcacacacacgggtgcacacac

SEQ ID NO: 34818 - DNA, 990 bp, Artificial sequence
  DNA replication origin
cagcctgccagtgctgcagtgagcacacacgcacacacacgggtgcacacacagagctccgcagcctcctcctgggacccttgccctgcccccctcccatgggcacggaccccccaccgcctccacccactgccgcgggggggcccgttggggcccagggctggcgggccatgtaaccagggctgctgctgggagcgcggaggggaagggagcccccagccctgctgggccggcccaggcccctccgcggctcccccttccactacccacctgcccggcaccccctccccagtggttgttaaccccgggactccccaagcccagcctctgtgtgcagcagccccaggcgggctaagtctccaagatgcccttggtggatttcttctgcgagacctgctctaagccttggctggtgggctggtgggaccaggtaggagagtgcagggtagggggtgggcgggcatcctggtgagctgggcccccggtgtgggcttgtgtgtgcagctgtgcacgtgtgtggcctggagatgaagccttgtgactgtctctgtgtgtggcccagggctgggcgtggatggcgggcagctgggggtgtgtgactctccctgggggtggactgcgggtccctcactgggtgtgactgtgtcagtgcctggatgtgtgtgtgtgtgtctgcgatggtgtgtgtctgcctgagtataggcttgtttgcctgggtcactgtgtggccctgtctgagatcatctggctctgaccatggtgttgtgtgttgggttgtgtgtctgagcccagagctgcctgatattttggggacatgtgaccccaaatgtcagtgaccgccttattttgcatgccctttgatctgtgtgtctgggctgtgtgacgctgtgtaggactgagagcctgtgattgtgtgtgtggttgtgtgagattttgtgggtccatcttgtgtggatgtgtgtgtctctgtacccagggtctctgggtggc

SEQ ID NO: 34819 - DNA, 1326 bp, Artificial sequence
  DNA replication origin
ccttgaagtcctaggctcaagtgatcctcccatctcagcctcctaagtaggtgagacaaacaggtgctcaccaccatgcatggcttcaactctgttattctaacatccgtgtctctgctcccaggcagtgttcacggacctggagattctcgccgccctcttcgcggctgccatccacgatgtggatcaccctggggtctccaaccagttcctcatcaacaccagtgagtggccctcgccaggggcggggtttgctgagttggaggcggtgttggccaggctgggggcggaactaactaggctggaggaggggctggctggcctgggggcggggctggctggcctggaaaggggatggccgggcaggaggcggggctgggggcggggctggctgggctggaaaggggatggccgggcaggaggcggggctggctgggctggaaaggggatgaacgggcaggaggcggggctgggggcggggctggctgggctggaaaggggatggccgggctggggtagagctgactgggctggaggcgaggctggccgggctggggaggggttagctagttgggggcggagctggccctcctgcggttggagctgcacacgtgggccctcccctgacctccgggctgggctgcagattcggagctggcgctcatgtacaacgatgagtcggtgctcgagaatcaccacctggccgtgggcttcaagctgctgcaggaggacaactgcgacatcttccagaacctcagcaagcgccagcggcagagcctacgcaagatggtcatcgacatggtgggcggggctggggcgggacggagcgggaaaggaagcctaggagtcgagggctttggggaggagtgggtctgagtcccagaggaaccctcaacctggacagagcgggcggcttctacctggtgaaaacttcagaggcccgggtcagtctggggggcgggtgtcagcggccccagtgacgcccccttgcccgcaggtgctggccacggacatgtccaagcacatgaccctcctggctgacctgaagaccatggtggagaccaagaaagtgaccagctcaggggtcctcctgctagataactactccgaccgcatccaggtgcccccacgccccatcatctaaggagggaggacactcccccagccacacctttaggtctgggtagctaactgccccttcctcagcctctttctcccaagtggcccatcttcctgtgtccttctttctttttttttgtttgtttgtttttgagacggagtcttgctcttgttgcccaggctggaatgcaatggcgccatcttggc

SEQ ID NO: 34820 - DNA, 1083 bp, Artificial sequence
  DNA replication origin
tgaaaccctgtctctactaaaaatacaaaaaaattagccaggcacggtggcacatgcctgtaatcccagctatagtggggctgaggcaggagaattgcttgaacccaggaggcggaggttgccgtgagccgagatcaagccactgccctccagcctgggcgacagagtgagactccatctcagaaaaaaaaaaaaaaaaaaaaaagaatggggctgggcgcggtggctcacatctgtaatcacagcactttgggaggccaaggtgggcagatcacttgaggtcatgaatttgagatcggcctggccaagatggcgaaaccccatctctactaaaaatacaaaaattagccaggtctggtggtaggcacctgtaatcccagctacgctagaggctgaggcaggagaattgctgcagcccaggaggcggagtttgcagggaaccaagatccgtgccctctagcctgggtgacagagagacccgatctcaaaaaaaaaaaaccaaaaacagaaaagaagaaagagaaagaagaaggaaaggaaaggacaggacaggacaggacaggaaaggaaaggaaaagaggatcttgcaatgttgctctggctggtctcaaactcctggcctcaaacagtcctcctgcctcagcctctggagtagttgagattataggcgtgagccaccacacccagctttcaggctttcttatctcccacctggggagggagggagtagggagagaaggtggggagaacagagaacagaggaggtaacggggagaggtgtgtgggagatggagaaaatatgggaggagtcggaaggggggtgagggaagagaagatggttagggagagggacaggggacctggaaggagttgatgagaagaaaggaggaattgggggaaatgggaggaaatggtgggagagatgggaaggagagatgggattggaaagtgaagatggagaaggggacagacagaaagaggtcaggtgtggtggctcacgccagctatcccagcactttggcaggccaagacaggaggataacttcagctcaggagtttgagaccagactgggtgacatagtg

SEQ ID NO: 34821 - DNA, 1389 bp, Artificial sequence
  DNA replication origin
agttgctgtgtttctttcttttttttttctttttttgttctttttctaaaaatgttacaattaaaattcaaaaaaataaaatcccttccgggacctcagcccctcattccccagcccccacctccaaaaaaaggccccgtgggtgggggcagggggaaaggggaaaaaaagaaaacagaaaaaaaccccacttttcgttttcttttttctcaggagggacaagaggacaagagtctttgaggcagaggaggaggtggtcgggggagcaggggagtgaggggaggagtggaggggaacagggacagaggtctggggatcaggtagggtctccacctgaccccccgccaccaggagctgggagtgcggatgtgtcctccccaaatgtccctgcgcaggcactgcaagccctcttggcagcctggtgctctcgttgggcctccacctcggccgccgtggaggggaggcccgggaggcccggggcatgctctgaaacagacagggtcctccaagcagggagaagggggctttgaagagccagggcagaggggctgctgtggcttacagcaaccacgaattcctcccgggacgagaactcatccggagccacaggtgcactgcctgtggactgtgcctgctgtgtcaaatacactgcctccagctcggcctccagggatgcttcctgtgccataacttccaacgactcctgggccggggatgcctcccaggctatggttgcatccagagcttcctcgactcctgacaatccctgcgcagtcaatgcctcttgggctgtgcacggtatctgggccattgatatttcttcctcctcttcctcctccagcgtcagctcaaactggaacttgtcaggcaggggtgggtggcctggcccccttgactcctcctcgggtggcggagatgggctctgccggatggcgctgtagtaccagtcccggttgtcctccaaagtgtccaagatctcctgggcatctgggtggacaaggtccgcccaggtctcccacaatgggtgcacaatgtagtcaataaaacccacctggtggaggggaagaaagtataaatgggcggcctatggggtggatgataccaccacattatgggagctaatgaaatgaaaaacatgcttatgggccgggcatggtggctcatgtctataatcccagcactttgggaggctgaggcagtcggatcatttgaggtcaggagttcgagaccagcctggccagcatggtgaaaccgcatctctaccaaaaatacaaaaattagctggttgtggtggtgcatgcctgtagttcagctacttgggaggctgagacagaatcgcttgaacctgggaggcggagattgcaatgagctgcgatcgcaccactgcac

SEQ ID NO: 34822 - DNA, 957 bp, Artificial sequence
  DNA replication origin
tgaatgaggtcggtccagctgcagaaccaggccgagggcgaggggaggagggagagagggggctttccttccaaacagtcccccatggcttggagaaaaatggtcttgcatctgtctgccgtattgctcagggactagctgggggagagggagaggctaggcaaggtacggatggaggagaaattattttggtgccagggtggaaggaagggctgcccaggaatgagaatgagggtatacaccattattgcttcctcctagggcaaaaggtaggggggctgtgatcagagtgtggaaggtggggtccggaggaccctggaaaggggggtgcggccaggatgggggttctgggcgcctggccctgcctcatccaaggtgcaggcggccactgcaacccccttgcctgtggccgtgggaattattaaggcagaaacaagaggagaagcagctagaagtggggcggggggcgggggggtgagtggatcagagccactgccccaaaaaacggagaaaattcaaagtgaacccaaagtggaagggaaaggggatggagagtggaggaggtctagggccctcctcaaatcccaggcccgaggctggcggtgtgaacgctcccttccataccacccccgtatcctaaagtgaacagctcccccagctccctgactttctagtcagtatcgccaggagtatcgccgggattgtgcaaaatcaagcggaagacttttttagaggggagaggaggcagcaaaccagaggggggctggagctgggacctcccacagtgactgccccccaccctggccccagccccgcctagaatggctattcctgaccacgttctagaaatcctctaaattcagaagaaaagcccagaaggaggccccacacctgcttgggcccaggtagagactccccaggcggctggaagactgagcctggaacttggggggcagt

SEQ ID NO: 34823 - DNA, 929 bp, Artificial sequence
  DNA replication origin
tgactgatcgtcaaagtggacaatacacaagcagcttacagaggtcctgtgctcaccctggggagaggagccctgcttgggggtgggtctgtctctccagtcaccccctggctcctggagaaggggggaggggacaggctctgcccagccccaacccctaggatgacacgacttcccataaaacaacagcggtgagtccacccttttcccaggactatggtacagtttgtataatacagcaggaacagagactctcccaacgggagacctccttccctaccttcccgactgggtcagccagggaagggcaagtttttattttccctttttgcctccgtagaataatttacaaaccaaccttacagtatgtacaaaaaagaaagaaagaaaagaaaaaaaggtaaagaatgaacaaaaagaaagaaaaggcccactccgatcgccggctgggacaaaaacgactttcgctacaaaatatgaaccctgtacagacagcatcaagggagtgtgagtgcggggttacctccccctggggtggacagagggatggaaggctagggaggaactgggggctacagtaccgtgtgctcagaattgggtagggggcaggcgatgaatgaggtcggtccagctgcagaaccaggccgagggcgaggggaggagggagagagggggctttccttccaaacagtcccccatggcttggagaaaaatggtcttgcatctgtctgccgtattgctcagggactagctgggggagagggagaggctaggcaaggtacggatggaggagaaattattttggtgccagggtggaaggaagggctgcccaggaatgagaatgagggtatacaccattattgcttcctcctagggcaaaaggtaggggggctgtgatcagagtgtggaaggtggggtccggaggaccc

SEQ ID NO: 34824 - DNA, 1654 bp, Artificial sequence
  DNA replication origin
gaggtcttccacgcctgcatcaactgggtcaagtacgactgcgaacagcgacggttctacgtccaggcgctgctgcgggccgtgcgctgccactcgttgacgccgaacttcctgcagatgcagctgcagaagtgcgagatcctgcagtccgactcccgctgcaaggactacctggtcaagatcttcgaggagctcaccctgcacaagcccacgcaggtgatgccctgccgggcgcccaaggtgggccgcctgatctacaccgcgggcggctacttccgacagtcgctcagctacctggaggcttacaaccccagtgacggcacctggctccggttggcggacctgcaggtgccgcggagcggcctggccggctgcgtggtgggcgggctgttgtacgccgtgggcggcaggaacaactcgcccgacggcaacaccgactccagcgccctggactgttacaaccccatgaccaatcagtggtcgccctgcgcccccatgagcgtgccccgtaaccgcatcggggtgggggtcatcgatggccacatctatgccgtcggcggctcccacggctgcatccaccacaacagtgtggagaggtgagtggcagggcctgggggtgggctcggagggtcctgctcctggcaagtcccaagacactgagatccgggtattcttcctgaggctgtttcctcttcctgtcttcagggagtggaggcctcaggatgaagctaagctccttggagagttctagtcagtgacctttgattctgtgcctggggctgggaaatgcttaggggactgtcacaaacccatatggttcctttgtgcggagttggaaaatgttccatcagtttgaaattgttgggctaggcactgtggcccatacctataatcagggactttgggaggctgaggtgggaggattgcttgagtccaggagactagcctgggcaatagagtaagaccctgtctctcttgctctgttgcccaggctggagtgcatcttgggtcactgcaacctcgcctcccaggttcaagtgattctcctgcctcagaccctggggtagctgggactacaagtacccaccaccacgcctggttaatttttgtattttttgtagagatggggtttcaccatgttggccaggctggtcttgaactcctgtcctcaagggattctcccacctcaacctcccaaagtgctgcgattacaggtgtgagccactgtgccggacctaaaggactctttgagcatcaaagagtgatgctgaatgtgtgatttctcctttctgagatgttatcttgttatctgtgaagtgggggatctggctgagccactaggggtttatcagatgtgtttttgaacttgagcaattgatggctaggaggctcagttttgtcatttggaaaatggagttgctgatacctcaatccttggagaacaactgcaagcactagagttcgagtggaggtgggcacggtggtgtgcacctgtagtcccagctactcaggaggctgagccaggagggttccttgagcccaagagttgatagctgcaggctgggtgtggtggctcatgcctataatcccagccctttggaaagctgaggcaggcagatcacttgaggtcaggtgtttgagaccagcctggcca

SEQ ID NO: 34825 - DNA, 1694 bp, Artificial sequence
  DNA replication origin
ccactccctgaagacaggaagaggaaacagcctcaggaagaatacccggatctcagtgtcttgggacttgccaggagcaggaccctccgagcccacccccaggccctgccactcacctctccacactgttgtggtggatgcagccgtgggagccgccgacggcatagatgtggccatcgatgacccccaccccgatgcggttacggggcacgctcatgggggcgcagggcgaccactgattggtcatggggttgtaacagtccagggcgctggagtcggtgttgccgtcgggcgagttgttcctgccgcccacggcgtacaacagcccgcccaccacgcagccggccaggccgctccgcggcacctgcaggtccgccaaccggagccaggtgccgtcactggggttgtaagcctccaggtagctgagcgactgtcggaagtagccgcccgcggtgtagatcaggcggcccaccttgggcgcccggcagggcatcacctgcgtgggcttgtgcagggtgagctcctcgaagatcttgaccaggtagtccttgcagcgggagtcggactgcaggatctcgcacttctgcagctgcatctgcaggaagttcggcgtcaacgagtggcagcgcacggcccgcagcagcgcctggacgtagaaccgtcgctgttcgcagtcgtacttgacccagttgatgcaggcgtggaagacctcggactcgcagcgcacgttcaggtcgtcccggctgatgagggtcaccagttggcagtgggacaggttgaagaactcctcttgcttggccacctgcagagggcgacagtgggacgggctgactctccagtcacccccacacctcaccaagcaggaccgggacaagtaacttatcactgccgctgacagtctcagcttccttatctgctaaatggggattcaaataataggaaccgcgtacattgtgatgactaaatgagttaatcctgccgggcgcggtggctcacgcctgtaatgccagcactttgggaggccgaggctggcggatcacgaggtcaggagttgagagacaagcctggccaatatggtgaaaccccatctctactaaaaatacaaaaattacccgggtgtggtggcacacgcctctagtcccagctactcgggaggctgaagcagaagaatcgcttgaacccgggaggcgggaggcggaggttgcagtgagccgatattgcgccactgcactccagcctgggcgacagagcaagactctgtctcaaagaaaaaaaaaaaagagttaatactatgtgccaagtatgtcatcaggactcaggaaaatgggcaaagactcagtagatcgtgtaccctggggtatcatttggctttggtttttgagacagagtctcactctgtcacccaggctggagtgcagtggcatgatctaggctcactgcaacctctgcctcccaggttcaagcaattctcctgcctcagcctctcaagtagctgacattacaggcacctaccaccatgccccgttaatttttattttattttattttattttgatatggattcttactctgttgcccaagctggagtgcagtggtgtgatcttgcttcactgcaacctccgccacccaggttcaagtgattctcctgcctcagcctcccaagtagctaggattacaggagtgtgcctccagag

SEQ ID NO: 34826 - DNA, 1554 bp, Artificial sequence
  DNA replication origin
cccacccctggtgcgggccggggcgcgcaggcctggaactcggggttcagactccccgcgactcggaccacgcggctaagcgcgctcagggtcgcgtgcccccgccccgccgccatgctgggcgccgtggtggccgcgcagctgggcgacagcaggcgtgggcgggggtggggagcggcccctcagcggtccctaccgcctgaggccagggcccggggacttttattgtgacacggcgggcgcccggctctgcttagtcatggtgacctgcgcgcgctccgcgcctcccccacgcgcagcgatggaggcgccggggctcgggcggtggaggcggagccggagcgcggccatggcggggtgagtgaggcgggatgtgcccgggctgcgggcatcgcgggccgcgagcgcccctgcggccgtgcccggagaccaggaaaacgggcgccacggcccagggcgcctccgagttccccgccaggactcggagggccaggagggcgcgacctgggtggatatttttgttggacggcgcaactcttggggtggcccgggagcggcggaaaccgagcgagagaaccaggaggcgctgcgcagaaggaggcccgggggctccgaggcgttgaggggctcgatctgcgttctggggttggcagccgagaggccgcggtggggtcacttcctcgcctcactgggcctggtggaggctcaggaggggcatgcgcagtcgcccacttgccgctttgtagggtgggggaagtgcccggtgcccaaggggcattgttgaccgattggccaaagaccaagaggcaaacccagggccttggcaccagagtgggggccgagtggcacccagggagggtggaggaggccgctctggcaggcacggtggcagggcagttagccaaccacccgtttattgacccctgcgcagtgccaggccccaggcgagaggcacaggagagggttggcccgacgccgacctacataggtctccctgccatttgaggcgctggggccggggacgagagacagtcgatcaacagacaagcaaaggaggtcatttcagttcctgacaagcgcagtgatgacaataaaacagggaagaggagactttgagttgagtcccagaaagaggggagtgagaacttgcagatccacttgtggggagccacttggagatcccccactccttttgaaacgtaactcacgtctgggcacagcagcctatgcctgtaatcccagcattttgggaggtcgaggagggggatcacttgaggccaggaggttgagaccaccctggccaacatggtgaaatcccatctctactaaaaatacaaaaaattagcccatcgtggtggctggtgcctgtaatcccagctactcaggaggccgaagtatgagaatatcttttttttgttttatttgagatggagtcttgttctgtcacccaggctggaatgcagtggtgcgatctcggctcactgcaagctctgcttcctgggttcacgcctttctcccgcctcagcctcccatgtagctgggactacaggcgcc

SEQ ID NO: 34827 - DNA, 1359 bp, Artificial sequence
  DNA replication origin
tgctgtcgcccagctgcgcggccaccacggcgcccagcatggcggcggggcgggggcacgcgaccctgagcgcgcttagccgcgtggtccgagtcgcggggagtctgaaccccgagttccaggcctgcgcgccccggcccgcaccaggggtggggtggacacccctccccgtcgctgctgcccaagcgctcacctcagcccccaggtcgcctccgtagggggtccctcggggtggggatggccggggcgcgcaggggctccgggcacagtgatgccacccgcgcactgcgcttccgggaagccgggggaccgcgacccagtccaggagattcctgccttaccttggctgtaggggacccgcgggcgcctccgccgtcggggggcctcggctccagggctgcgtggcctgcggggtcttggttgtcggttggggagcggcctcgggacgcccgaaaaggaggcggggagagggcggaaagggcgcggcgggaaaggagcggcgattctcccgcccttcccgcaggtgcccggcgcccgtcggcgaggagtggggcatcgggcgggggcgcacagccaggccccccttctcactgtcccttccatctcccgatttcgttgctggatgtctcctcgcggggctgcgcgccaccatctgctattctccttttaacaacgcacagcgccggcctcgtggtccggcggccgcaggatctagggaaaattatctacctcgctaggttttcttttcttttcttttctttctttctttctttttttttttcctttagagacaaggtctcgctctgatctgcacgcccaggctggagtgcagtggcgcaatcgcggctcactgcagccttgagctcctggcctcaagcgatcctcccacctcagcctcctgagtagctgggaccacagacaggcgccaccacacccggctaatttttagtttttgtttgtttgtttgtttttctgtagagatggggtctcgcaatgttgcccaggctggtcttgaacacctgggtttaagagatcctgactccattggcctcccaaagttctgggattataggtgtgaggcgctgtgcccaggcctcaggttttccttgtcttttttttttttttttttttttaattgagacagagtctctcactgtcacctgggctggagtgcagtagctcgatcttggctcactgcaacctccgcctcccgggttcaaaaaattctgcctcagcctcccgagtagctgggattacaggcgcccgccatcatacccagctaattttttgtatttttagtacagatggggtttcaccatgttggccaggatggtctcaaacccctgacctcatgatccg

SEQ ID NO: 34828 - DNA, 1202 bp, Artificial sequence
  DNA replication origin
tggcatgttggggccccctcttcctgctgctgttgctcgacgtggcgtgcccggcgcgcacctgtcctgtactcctgcaggccgatcccttcctgggactggccatggccaactcacttctgaaccccatcatctacacgctcaccaaccgcgacctgcgccacgcgctcctgcgcctggtctgctgcggacgccactcctgcggcagagacccgagtggctcccagcagtcggcgagcgcggctgaggcttccgggggcctgcgccgctgcctgcccccgggccttgatgggagcttcagcggctcggagcgctcatcgccccagcgcgacgggctggacaccagcggctccacaggcagccccggtgcacccacagccgcccggactctggtatcagaaccggctgcagactgacaccctcggcccacgactgtcttcccaagttttacagacttgttctttttacataaaggaatttgtaggaaatgcagccaaaggtgcagtcggaaaagatgcaggggaaatgtatttatgcagcgacaccccacaatgtgaacaaacagacaaaaaatctgtgccctcgtggaattgacgttctgcttgggaacacagaaaagaactcggtgatgaaataatggagatgattccagtgacaaacgacagagatggtgatggtggtcagggaagacctctctgcagaggtagtgacttgtgatgtgagctgagacctctgtcctgggaagaccaaaagaaaagcatttcaggatgagggaatggcatgcgcaaaggccctgaggctgaaatgtgcccatgtgttctaagaaatgcagcgatgctggtgtgcctggagcagggacggagggggagaatgggaggagacaaggagctgaaggagtagttcccgaaggaccttgtgggtgatatagaggacttcgcttttgctctgagtgaggtgggagccatagaagcttctaagcagaagagggacttgccctaattcaggtgatcacaggtgtcttgtggcctccatgggaggttgaaaaccagagaaggtgaaggggggctgcactgagccacaggaacaatgatggagattccagctaagcccagaccccgtggattctagatagattttagaggcagcagacagaattactgaggaattgagtgtaagagtggaataaagttatcaaggacaat

SEQ ID NO: 34829 - DNA, 752 bp, Artificial sequence
  DNA replication origin
gtacaggacaggtgcgcgccgggcacgccacgtcgagcaacagcagcaggaagagggggccccaacatgccacaaaggccaggagcaccacgctgagcgtgcgcagcaaggccagcgagcgcggcttgcgacgcgcccgggtcgaggtggtccccgcagtcccgggccgtgccggcaggcgccgcgcgttggcgcgtacctggcagtagatgcgcgcgtagagtgcacagatagcggccaggatgcccacgaaggcgagcacgcagaagagcacgtaggccttggcgtagagcggcaagacagtggagcaagcgtccaggcgacccaggcaattccagcccagcgctggcaggagcccgaggagcagcgacacgccccaggccgcggctgccatcgccagcgtgcgcccccgactggagacgggcgcgggccccctgcgcgccatggtgaggctgcgctccagcgcgatggccaggaggctcagcacggacgcagtgagtgccacgaagacgcctccctcccgtgcgaaccagagcgcgggggacagtttcagcgtgagcggccccgacagtaggatgttggcggcgtaggcggcgcctgccagcagatccgacaacgtgaggctgcccaggagcaggaacatgggagcgtggaagcgcgggtggcgtccgagcaccaacaacacggctagattctctagcacgatgaaggcgcacaccgccaggcacaccacggcgtcggcgcgcaggccg

SEQ ID NO: 34830 - DNA, 1037 bp, Artificial sequence
  DNA replication origin
ggagcccgaggagcagcgacacgccccaggccgcggctgccatcgccagcgtgcgcccccgactggagacgggcgcgggccccctgcgcgccatggtgaggctgcgctccagcgcgatggccaggaggctcagcacggacgcagtgagtgccacgaagacgcctccctcccgtgcgaaccagagcgcgggggacagtttcagcgtgagcggccccgacagtaggatgttggcggcgtaggcggcgcctgccagcagatccgacaacgtgaggctgcccaggagcaggaacatgggagcgtggaagcgcgggtggcgtccgagcaccaacaacacggctagattctctagcacgatgaaggcgcacaccgccaggcacaccacggcgtcggcgcgcaggccggcacccggctggtagcgcgcaccgcggagcttgccggtgtagttgtaatgcaggacgatgacctcgctcaccggcgccggccgcagcagccccgactccatgggccgcgcgccccaaggctgttggagaggcaagatacggtgtcaggccgcggtccccgtaagcacgctcgcagcagccggctaagtcgtgggaaaggggccctacccactgaccatcaccccctatacatggtgtccaagggggagttcaggatggagggatagagtccgtggagacagacatacacacaaataatatcacgagggaacaaggtgacatagtcccaaaaaaagggacattaataacacatgaatggctgggcgcggtggttcacacatggctgggcgcggtggctcaggcctgtaatccccgcctgtaatccccccaggctcaggcctgaggcagtggctcaggcctgggaggccaaggggggcagatcacgaggtcaggagatcgagaccatcctggctaacacggtgaacccctccgtctctgctaaaaacacaaaaaattagccaggcatggtggcacgtgcctgtagtcccagctactccagaggctgaggcagaagaatcatttgaacccaggaggcgg

SEQ ID NO: 34831 - DNA, 1127 bp, Artificial sequence
  DNA replication origin
atacgaagcatttcttttgagcttcagttttctcatctgtaaattaggactaaaggaagtggggattaataaggtcacagaggcaggtgaggagtgttattacagtttaatgacatgtgtgcccctctgtaagagtctgtttgcctcttgtggattctctctcctgtcctcaggctctgccttagtaaaatgagtgaataggatcaacttttttttttttttttttttttgagacggagtttctctcttgtcacccaggctggagagcaggggtgcgatcatggctcactgcagcctcggcctcccaggctcaagtgatcctcccgcctcagtctcttgagtagctgggactataggggcataacaccacacctggctaatttttaaatttttttgtagagatgaagtcttagtatgttgcccaagctggtgtcgaactcctgggctcaagtgatactcccacctcggcctcccaaagtgctgggattacaggcgaaagccactgtgcctggccaaggagcaactttctcatggggttttgggtggatgagggggttttggcaggaaaaagctttgtatgcagtgagacaagagtgtggagtgtggtgcactgggccccaggctagtgtgagtggaggttgtgaaattgtggcctgtgccactgggtgggagaccctgtattcgtgtgactgaattttggtcgctgtgtttttctgcctgcgtcactctgttcctgtatgatgtattttttagtttccctgatagtgtgtgactgtgtgttttgcccttgtagtgtgtcgctgtatttgtgtgtctctttctgtgtgtgttgcgtttgtgtgcgttctgtgtgtttactgttacgtctctggaactccctgcttgtgtgtttgtgtgtgtgtgtttgagacaaagtcttgctctgttgtcctggctggagtacagtggcacaatcaatgctcactgactgcagccttgaccccgcgggctcaagtgatcctctcacctcagctgggactccactgagtagcttggactataggcatacaccaacacgtcccggctaatttttgtagaaacggggttctcctatgttgtccaggctaatctcgaactcctgggcctca

SEQ ID NO: 34832 - DNA, 1144 bp, Artificial sequence
  DNA replication origin
aggtgggtgggcaatgggagggcgcagtgcccggacacccaggacagaggagacccctccgctggggagaagaggctcaggctgcgaccgccctgctgcagaaccctccctttcccgcctctccgagtcctcccaccgcgatggagcgtccctgggaggacagcccaggcccggagggggcagctgagggctcgcctgtgccagtcgccgccggggcgcgctccggtgccgcggcgagtggcacaggctggcagccatgggctgagtgcccgggacccaaggggagggggcaactgctggcgaccgccggccctttgcgtcgctggcccgccccctcgcctgccagctccagccccgcccccggagcggcgtccgctcactcggttcaaggcagcgcgactgcgggtggcgcacgaccagggcgcagagtgagtggactgcactggacctttgggggcgctgggctgggcctgacccggagggggtcgccctggcggccactttcccggtctaaaaaggcgcaccactccttgcagggagttctccgaacttttcctggaggcctctggggagggggaagctgggggctccccagctgggtgcaggacctgggatacggggtgaaggtggctggaatcccctggccaccccctcctggccgggccactgcaagtttccatacttcagtcctgctgccgggcaagctgggcggatggggttggcctccccctcagagcatgtgtaaccctgtctccctgtatttgggctccccacctccagcatgggtgagccagcgacttcctgtctatgtttgcctgccttgattctctgtgtgtgactgaagctctctgggatgtccgcatccctgccttgtgcaaaagagatccattcccctccccaggccttggctttctcatctggacttgcatggggactatttgtgcatggatgtttgtgtgggagcatggaaacctttgcgcctgcttcgatacgaagcatttcttttgagcttcagttttctcatctgtaaattaggactaaaggaagtggggattaataaggtcacagaggcaggtgaggagtgttattacagtttaatgacatgtgtgcccctctgtaagagtctgtttgcctcttgtggatt

SEQ ID NO: 34833 - DNA, 1855 bp, Artificial sequence
  DNA replication origin
tgtgtggaactcggaggagcccgggaggcagaagcagagtggagcagagagaggcacagaagtaacagaaagagacaaatcaggacggcatatggccttgtccttgcggggtcctcactgaggacttgatcacttactctgagaaacacagggagccacgggagggtttggagcagaaaagaaatgtgatctgagttttaagaactgtggccaggagtgtggagtggcagctagggatgggactcccaacatctgtcgagatcctggagcctgagtccccagggtcccaattcgtgggaaagaagttcagggaggcagctggagaggcaggttgctgagcccgggacccgcagccggaagagccccattttcgagagaagtgagattggcgcctgggaggtgtgaagcagccacctccccaccctggggcgcggcttcccctttacagaaggaggtcatttattgagcacctactgggtgccagccacagccatgctgggagatcttcaggggtcatcccagtgggcaccattggagttggcttggtccacaggactggggaacctggcactgaagggttaacaccgtcccaccctgcgggtcccattggctgtgtctttgagcagagcaggcaggaaaggttctgcccaccgagggaacagcgggggcaggagggctgggatccccaaggggctacatgggggcctgacccggcctgagtgccccctgagtttcctcccacgagggtatcccggatccacacttattctcagcctctggctcatctctcctggggcgccctcaccccacccgcggccagcagggcctgaagcatcaggggcaaagggcacggtcctggagaaggtcgcagcagcgggacccagcctcccttcctgaatctgagggtggaagagctgggaccgtctggaagttcctgggaagtcggggtgggggcgtttcggggccagcgggactggtcgttggaggagcagtggcctgggagaggcgtgggagagcatcacagacagcaacaaagagacacgcagaggcaaagagacacgcagagacaaagagacacgcaggcgagagactctgagatcctcctgagagagatacagaggaagtgagggagacactcattcattatctgggcatggttgcaagcgactggagtcccagcagctacgttcagccggctgagatgggaggatggcttgagccgcggaggtcgagactgcagtgacttatgatgttgccactgcactccactctgggccacagagcaagatcttgtctcaaaaaaaaaaaaaaaaaagaaattcttacattgctggggtttactgtctgctaaggacacagcccagaaacaccattaatgagtaaatcactttgtcgtcagcgataagggtgggagagaatcggtcgggggaacacggaatccagggggtgggacaggagagaccctccttatctgaggagcggcaagttcccatcacaatcctgcccgggcccgccccacccccactcgccctgagccgggggcgggagcgggaaattgggaggggcctgtgcccgggagcagcgggaacctatctgctggtgggagaggactcaggctaaggtggcccccactgaagactcctgctaagcaacccactgaagacccctccgaatcatcgacggggcgtccttggggtgcagcccaggaagctcagttcacaggtgggtgggcaatgggagggcgcagtgcccggacacccaggacagaggagacccctccgctggggagaagaggctcaggctgcgaccgccctgctgcagaaccctccctttcccgcctctccgagtcctccca

SEQ ID NO: 34834 - DNA, 1042 bp, Artificial sequence
  DNA replication origin
agggagctgtgatcacggcactgtgccccagcctggatgacagagtgaggcgctgtctcacaaaagaaagaaaaatcaaaaaactgtgagcccttaacctttaggaatctgggcagagggacagacctgccttcctggagctgaggctctaggtcagagatacacattaggaaagatgaataaataaatgaaatgaacaaggtggccgggcacggtggctcacgcctgtaatcccagcactttgggagggggaggcgggcgattcatctgaagtcaggagttggagaccagcctggccaacatggtgaaaccccgcctctactaaaaatacaaaaattagctgggcggggtggtgcattcctgtaatcccagctactctggaggctgaggcaggagaattgcttgaagccaggaggcggaggttgcagaggcgaagtttgcagtgagcccaaatcgcaccactgcactccagcctgggcaataaagggagattacaaaaaaaaaaaaaaagcaaaagcaaggtgatttcagataatgccaactgccatttgagatgagggacagatcagggaaggtctctctgaggaggtgaccagctgaccagctgggaaggggtggggagaagggtgctccaggccacctggcccccaagttcaaaagtcttgaagtgtgtgtggaactcggaggagcccgggaggcagaagcagagtggagcagagagaggcacagaagtaacagaaagagacaaatcaggacggcatatggccttgtccttgcggggtcctcactgaggacttgatcacttactctgagaaacacagggagccacgggagggtttggagcagaaaagaaatgtgatctgagttttaagaactgtggccaggagtgtggagtggcagctagggatgggactcccaacatctgtcgagatcctggagcctgagtccccagggtcccaattcgtgggaaagaagttcagggaggcagctggagaggcaggttgctgagcccgggacccgcagccggaagagccccattttc

SEQ ID NO: 34835 - DNA, 1273 bp, Artificial sequence
  DNA replication origin
gcactgcactccagcctgggtggcagagccagaccctatctcaagaaaaaaaaaaaaaaaaagaccgggcagggtggctcacgcctataatcctagcactttgtgaggccaaggcaggtggaacacaaggtcaggagttcgagacaagcctgacccatatggtgaaaccatgtctctactaaaaatacaaaaattatccgggtgtggtggcgcgtgcctgtaatcccaactactcaggaggctgaggcaggagaattgcttgaacccaggaggtggaggttgcagtgagcccagatagtgccattgcactccagcccaggtgacagagtaagactccgtctcaaaaaaaaaaaaaaaaaaaaaaagggcagggggagtgaggagggtgggaatgggagtgggtgaaggggatctgagggtaccatgggaggcagtttgccctctcgaaggtgcagacccagctctgcaagagcgggcgctgggtggagctgcctctgtgggcgagggtgctggcagcagaactggcccagcgggtgtgctggcctaggcatgcttcaggcgggagggctgctgcaagacacagcaggaacatagaggccaggggtgccctgaacccgggaagagacagtttggcctgtggggtgtgggaggaggtatggggtgggggcgggtggtggcaatgtctggggctgattccttatgagcccattgccctaattcttctttggggatacagtggtgaccaataatagctgcactgacatttgtggagctctcattgtataccttggctctgttccaactgttcatttcatcttcaacaacagccttggagtgggtgcggttatctcaattttatttttattttttttttgagatggagtctcactgcattgctcaggctggagtgtagtggcgcgatcttgactcactacaacttccgcctgccaggttcaggtgattctcctgcctcagcctccggagtagctgggactacaggtgcgcgccaccacgcccggctaagttttatatttttagtggagatggggtttcaccatgttggccagtctggtcttgaactcctgacttcaggtgatctgcccacctcggcctctcaaagtgctgggattacaggcatgagccactgcacctggctattatctcaattttacagataagtccactgaggctcacagtgggtatcacttgcctgcctcaagaccttgagtcctgtctcactcctgtaatcccagcactttgggaggctgaggca

SEQ ID NO: 34836 - DNA, 1164 bp, Artificial sequence
  DNA replication origin
gcgccgggagggcggaccgagggcccaggtggggggctgcggccgctgccccccaagggcgacccgcagccggttcacggggcccggggaaggcgctactcggcccccgtccccagggtaccgggccaggcaacagccgccgccgctgctaccgcagccatcgccatcttagcgggccaggaccccggatgacggtgggcgtggccaagccagacgccccgccccgccctctccccgcccagccgcctttcctgccccgatcccgggtcgccaggcggggacctcaaaccccgacgccttcccgcggcctccccccgccctccttatcacaccgccaggagcgcgacagccccttcaggcccttatcggaggcagcagagctggggaacccctgcccctggccccgcccctagtcctgccccccagggcccaggactgacctcctggcaggcgcccaggtgagactgactgcgcacctgcagcgcccgccccgcctcccgagtgcacctgcgcgggctgccgacccagaacccgccctggcctgggaccaaatcgactagtgtgacctccggggcaagccacgcctctctgtgcctcagtttcctcatgtgcaaaatagggctggaatacacgcaacaacatagacgaatcttcatgagaattatgctcagggaaaaaaaatccaggggtaggcaggcgcgggagggagggatgaatgaagtgctccaggaaagtttttttcagtgtttgttttgtcgagacagcatctggctctgttgtccagactggagtgcagtggcgctttcatagctcactgcagcctccaactctgatcctccaacctcagcctccagagtagctgagaccgcagacaggagccaccatgcctggttaattttttaaattttatttgtagataaggggtctcgctatgttgtctaggctggtctcaaactcctggcttcatgagatcctcccgcctcagcctcccaaatgctgggattacaggcgtgagccaccacctcaggcaggaagacattttttggagctgtggataaattcagtatcttaactgtaatagtggcttcacaggtgtgaaaactcatcagattgtacgcttaaaatttgcatggttttgtatatgtctattatacctcaataagg

SEQ ID NO: 34837 - DNA, 1803 bp, Artificial sequence
  DNA replication origin
gtcggggtttgaggtccccgcctggcgacccgggatcggggcaggaaaggcggctgggcggggagagggcggggcggggcgtctggcttggccacgcccaccgtcatccggggtcctggcccgctaagatggcgatggctgcggtagcagcggcggcggctgttgcctggcccggtaccctggggacgggggccgagtagcgccttccccgggccccgtgaaccggctgcgggtcgcccttggggggcagcggccgcagccccccacctgggccctcggtccgccctcccggcgcgtccatgaactcagtgtcgccggccgccgcgcagtaccggagcagcagcccggaggacgcgcgccgccggcccgaggcccgcaggccgcggggtcccagaggcccagaccccaacggcctggggccttccggagccagcggccccgctcttggctctcccggggctggcccgagtgagccggacgaagtggacaagttcaaggccaagttcctgacagcctggaacaacgtcaagtacggtgaggagggggcccggagatcgtgggggtgtcgggggccgttgaggaaaaccagaccccggtcctgccagttatcccacccttgttcccgtcctgagtcacctgtgggtcccctccctgcccggcccagggtggacctgtggcaggtccaatagtgttttcaagccccgcccattcccctgtgtgaccttgggcaagatcctttgcttcctggcgcctccgtttttgcccctctctgtaaaatgggtacaataatcagaactaccttccttcatcctgaattgatggtggacactcctgtagctgtcactgggggccccacctccgacggaatccccggagccaccccggagataggaactaggatcgtgcccatttcacagatgggggaatggaagcgctgttgctgtcatgcaagtgcttcatctcgctgggcgctgcccctacgtctccccaggttgggtggttaaaagccggaccagctttagcaagatctccagcatccacctctgtggccgccgctaccgtttcgagggcgagggtgagctggtggttgggaccagggctgggggaggcctctccacgcccgccggagtgtccctggtggcagctgacagacccgctcttgtaggtgacatacagcgtttccagcgggactttgtgtcccgcctgtggctcacataccgccgggacttcccgccccttcctgggggctgcctgacctcggactgtggctgggggtgcatgttacgcagcggccagatgatgctggcacagggccttctgctgcatttcctgcccagaggtgagccataggggggaaggggtgcactaggagtacagggtcaactgccatatcagcagtattagaattacttaccaactaagagttcaaagtcacgttagaattgtgtgtcaagtaagttttggagagatgagagttgtttataagagtttcagccggggttggaaacggtggctcatgcctgtaatcctagcactttgggaggctgaggcggatggatcccttgcggtcaggagttcaagaccagcctggccaatatgatgaaaccccatctctactaaaaatacaaaaattagccggttgtggtggcacacgcctgtaatcccagctactcccgaggctgaggtgggagaatctcttgaacccaggaggcggaggttacagcaagccaagatcgcaccactgcactccagcctgggcaacagagggagactctgtgtcaaaaataaaaataaaaaaaagtt

SEQ ID NO: 34838 - DNA, 1508 bp, Artificial sequence
  DNA replication origin
cctcgaggagggggaccttgaagacgacttcgaccctgcccagcacgaccagctcatgcaggtgcggccctcatcccggcccaacatgacgctgagttcacacaaacatggctctcactggccacggtggctcacgcctgtaatcccagcactttgggaggctaaggcaggcagatcacctgaggtcaggagttcgagatcagcctggccaacatggtaaaacctcatctctactaaaaatacaaaaattagccaggtgtggtggtgtatgcttgtaatctcagctacttgagaggctgaggcaggagaattgcttgaacccgggaggcagaggttgcagtaagccgagatcatgccactgcattccagcctgggcgacagagggagcctctgttttaaaaaaaaaaaaagacctggccgggtgcagtggctcacacctgtaatcccagcactttgggaggccgaggcaggcggatcacgaggtcaggagattgagaccatcctggccaacatggagaatccccatctctactaaagatacaaaaaattagccagggtgtagtggcgtgcacctctaatcctagctactcgggaggctgaggcagggaatcgcttgaacccgggaggtggaggttgtagtgagccaagatctcgccattgtactccagcatgggctactgggtgagacgctgtctcaaaaaaaaaagatcttagccgggcgtggtggcacatgcctgtaatcccagctattccggaggctgaggcaggagaatcgcttgaaaccgggaggcaagggttgcagtgagccgagatagtgccattgcactcctgcttgggcaacaagagcgaaattctgtttcaaaaaaaaaaaagacctggggcctgagtagtgcaccaggtggtgggcaccacaggggcgaaggtgggtaggacggcgaagaactgtggatatgtggaactgaatggcggccagtacatcacagggtagacagcaggggagttggcggaggatcctggacatgcagggcctcccacctcaggagctaggtgctgggagggctgtagggagccctagctgtaggagtaaagttgccaaggagggggtcattggcggcatcgtagggggctcagctcctatgtctcgagtgggctctggtaaccgccagccctgaccctgcagaagtgctttggggacgagtactacggggccgtggaggaggagaagccacaatttgaggaagaagaagggcttgaaggtgagatcagctggggcactgggctggggattggggactggggactgggactgaagcccaaggtcccaccctggccccacctgtctgttctccctgcatccagacgactggaactgggacacgtgggacgggcctgagcaggagggagactggagccagcaggagctgcactgtgaggaccccaacttcaacgtaggtatcacgggttgagggagtcccaggggccctgacggggggctggtgggatctgac

SEQ ID NO: 34839 - DNA, 896 bp, Artificial sequence
  DNA replication origin
cccgtaatcccagctactcaggaggctgaggcaggggaatcgcttgaacctgggaggcggaggttgcagtaagccaagtcacgccatgcactgggcaacggagtgagactctgtctcaaaaaaataataataatggccgggtgcggtggctcacgcctgtaatctcagcactttgggaggccgatgcaggcaaatcacctgaggtcaggagttcgagaccaacctgaccaacatggagaaaccccatctctactaaaaatataaaaattagccgggcgcggtggtgggcacctgtaatcccagctgcttgggaggctgagacatgagaacagcttgaacccgggaggcagaggttgcagtgagccgagatcatgccattgcactccagcctgggcaacagaatgagactccacctcaaaaaaaaataagtaaataaataataacaacaataataataatcaaagcaggaattactgactgaatgaccccaaccccaccagatggtgacaagcacaatactcttggacagctgggaattggtggatttgggatttgaatcctctgtctaaccctggccctgccctgtgggattctctgccacggcaaagaagggggttgtgggtgatggcaggtgtctttggtgggttaacagcatcgtcatcagacagtgaggaggacccagaagccttggagaagcagaagaaagtgcggcccatgtacctgaaggactacgagaggaaggttatcttggagaaggcagggtatggagaaggcctacatccccaccccctggttcccagccctgtcaggtctatgggggtcttaggggcaggagagggaaaaaagctggcagcctgggccgggcatggtggctcatgcccataatcccagcactt

SEQ ID NO: 34840 - DNA, 1208 bp, Artificial sequence
  DNA replication origin
aaactccatttcaaaaaaaaaaaaagagaaatggggtcttgctatgttggccaaactggtctcaaactcctggcctcaattgaccctcccacctcagcctcccaaagtgctgggattagatgcttgaaccacctgcccagcctggtggagttggaatcattcagtcagcaattcccaccttgaatagtgccaaggacacagtcattaactccaccaccaggtaataacctaggctctgctaaggacttgtgacttgtgaagcaattcattcaatagtcaaaacagatgaactgtgtaaactgggtaaatcccaatctatccttaaaacagccctgaggggagatgctaccgttagatatactttacagacaggaaaagaggctcagagaagtcaagtcacttctctgaatccacagtcaggaaaggaccccggattctgctccagaggaaggagaggtttagacaggagtggccccggacctgttctgttatagaaggtggcatctttctgataaatgcgggggtccttcttcttcaacaaggagagcgttttgtaaaagtcccgctcctgctggggatcaaattcctagggcaggaaaagggttggggatagatttcagaagggagataataagagccctggcgccagcaggtgagctcagcgtagggattaggatggaggggggtggatctggctggggaggtcaaacaggtggtcaaacagcaggagggagaggggccctcttggggtgggcaggggcaggccacaggtaggtacaggatatgggtagaggaaggtgaggggcaaggagaaggtaattcctggggaagacaaagacttgacaaggggcaggtgggctgagggcacaagagagacagcggggaggggctgggccaggccgcacagtggggccaggatcagggctgatgtgagaagttgggcgccccacgtggcgcaaggagtacactaaaaaatggctagactcttgaggatgaaagaggaaagggggggttcttgggggacagagtcgccccacacatcagagtgggcaggtggggatcgtggcaggggagagaaaataacggggatttggctcccctggggagagggggggcactgtctgtccctcatgggatggggagcggaggatgggacgctcccgcagggcgctctggggttgggggttcccccccgtctacatcggggt

SEQ ID NO: 34841 - DNA, 1680 bp, Artificial sequence
  DNA replication origin
gcggcggcggcgcaggctcagagcagaccccgcccggcgaggaggagggagggtgagttagggggagacccggcccccaaggggcgggcgccgggcagggccccgcgggcggccgagggttgggcccggctcccagcccctcgccgtcctccggctgacagggggaggagcccgccgggagggccggggtctcgggctggggagccgggacgggagagcagcgcagccgggtgcaccgcggccgcgccccgggagggctgttcgggccagcgcccgccggctgctccgcgctgacagcgccgggctggggcggggcggggggctttgcaggccgccagtgtcgacatgctgctggaggaggttcgcgccggcgaccggctgagtggggcggcggcccggggcgacgtgcaggaggtgcgccgccttctgcaccgggagctggtgcatcccgacgccctcaaccgcttcggcaagacggcgctgcaggtgaggccgggccggtccaggttggggcggggcggctaagcgggatgaggatcgagaccccagagctcctctctggtctcctggccctggtggtgacccactgggaaccggtccttcttctctaggctttcattgttcccccacagtcccccttcgaaggtgggtggtgggtgaggctaggttgtggggggaggggagagctttttagcatcttctctgggaggattcctggttctctgagtgccggggattcactttccctggggaggttcttattccgtgggtgcgggttcagctcctttggatgccgtttccatggggacggctcacgtttcttggggcttctatggggagatccgatctctggaaggagaggtcctgtctctaggggttcctcattttgtagggggctctctgagacaaatctggttacttgggggtggggtcttcattcctaaaggttatgcggatccttgatatagtatgggggccccaatggaggaacaatgtcagattgcaagacatccctatattccctgggagacattttacagggaagtctcgtttctcttttattattacttttggaatcccgcttcttgaaaggagctctcaggtactctgaggtgacatcaccattatgtaggaggaggctatttcctggagaaggggttcgctttcctttgacatcttttttcccttatgaggactatcaattctttgggggtagttctccatctctgggggcccatttcctggaggggattttctgtttcctggtgattgcccatatctgggggcgtctttggtcccttgggggagagtcttaggttccttgaaagtttccatggggggctgttctctgggttggggggtctcattcttaagggagtgaccagcttttggggggggtccctattcccagaagaactttcctgggggcttatgcagcttctccgttcactagaggacccctcctctagcatttcctgtttctgggagatgcctctttctggatgacccttctctttccagtgaccccttttgtggaacctcctcccttgaggacctcctgatcctctgtccctcacacaggtcatgatgtttggcagcaccgccatcgccctggagctgctgaagcaaggtgccagccccaatgtccaggacacctccggtaccagtccagtccatgac

SEQ ID NO: 34842 - DNA, 1090 bp, Artificial sequence
  DNA replication origin
ccagataacgggacctccccgggcggagcatgcgccgtgagccccggcccatcagccggagggggagctggggctcccggggaggggacgcggggcgacccggttagagcagggggcgtgggatccgcgcagtgtcggatgcgggggcccgagcgcggagggccatccagccgcagcgccggtgcctagggtctcagatgtccccctggctcaaggtcctcccacccgcaggtcagcagaggcggcccctgaccggaggcggctcctaccgtaggctccgtttttccgctcgtcctccatggccgcggcggggcggggagcggagtccgagccagcgcgaccccagcccgggcgggcgggaggctccgcgggctgcagcgccccgccccgggccccggccccgcccctcccgccgggccagcccccgcgcgcctcctccaatgggagcctcgagagggcgagggcggggaccgggggcggggcctggcccgggaggggtggggccccaacctttgtttccagtcttagctctcaagtaaccctcttgagggtgtgcatggtgagcaaacagaggtcattcattcattcattcatctatgcatttcatcgtcaaggagatattgaggctgggcgtggtggcgcgggcctgtaatcccagccactccggaggctgaggcgggaggatagcttgggccaaatagttccagaccagcctgggcaacataggaagaccctcatctgtacaaaaaatttaaaaaattagctgggcttggtgaggcacacttgtaattcagctactcgggagcctgaggtaggaggatcacttgagtccaagagtttgaggctgcagtgagctatgattgtgccactgcctgggcaaccctgtctcaaaataataataagaattaataataataataggccgggcgcagtggctcacgcctgtaatcccagcactttgggaggccgaggcgggaagatggtcaggagatcgagaccatcctggctaacacggtgaaaccccgtctctactaaaaatacaaaacattagccgggagtggtggcgggcacctgtaatctcagctactcg

SEQ ID NO: 34843 - DNA, 2777 bp, Artificial sequence
  DNA replication origin
ccccacccctcccgggccaggccccgcccccggtccccgccctcgccctctcgaggctcccattggaggaggcgcgcgggggctggcccggcgggaggggcggggccggggcccggggcggggcgctgcagcccgcggagcctcccgcccgcccgggctggggtcgcgctggctcggactccgctccccgccccgccgcggccatggaggacgagcggaaaaacggagcctacggtaggagccgcctccggtcaggggccgcctctgctgacctgcgggtgggaggaccttgagccagggggacatctgagaccctaggcaccggcgctgcggctggatggccctccgcgctcgggcccccgcatccgacactgcgcggatcccacgccccctgctctaaccgggtcgccccgcgtcccctccccgggagccccagctccccctccggctgatgggccggggctcacggcgcatgctccgcccggggaggtcccgttatctgggcggctcggatggcgggcgggggaggggaggcgcggcgatctgggctcggaaaagagacagggccctgacctcctcaaatccccctcctcttccaatcccctttgtccatttcttcctccttcccttttccgccagaagtagccgtccggggcttttggccagatggggaaactgaggcaagactgggcagaccgaatacccagctgagagcccaccgagtctggccagccgcctggaaacggcggaaagaagggcgcctttggtgagggggcaggaaggaagcaggaaaaaattgagaaactttcccctccctgtgcaaggggctggcggctcccacctcccatttcgagaggtgctggcgactggaacttcctccggcgaacctcttggggcgacctcaggcatttggccccggggatgggcccaggatgtgggcttctccatcaccagcgccctgtggtgccgccctcccctgaattcccacggtgggaggagttgccatcctcagtttctcctttctcttctccattttgggtccccaagacccaacggagccccagccccacgtgatactaccctgggggcaaagaagcactgtcgcgcccctctttgtgtgacaagaacttcctggaaactgtgacactgaagggccctggggagggggccggaaacggctcgaaaatattcaagaaaaacaagttgggtagagctgtgcctccctgcccccagggactgtatggcctcaggaggctgccaggagagacagatcagggaggctgggaccttccctgcagagcccagccaaggggaggcagcaggacctggccacctcccagcaccccctccccaattgaagcttccagcccagtcccctggagggacccccttggtcttcatttgggctcaaattccagccccagtggctgtgggtgctgtgtgtcccttgggtgtggcaggctgtctctgacctgagagtctcagcctgaggttctagccaggtcttgcccgcttgtgggcagcatctgagggggtcttgggtctctatgaagtttggctgggacagggacgaggggcagaatggacaatgatatgattcacccagccttgaatttggccaaaggatggaattgagctgtggtcggagctaggcagacctcccaggcccacacatgagacaggggaccctgccagacagagcctttgctgggcttaagggagtaccttcaatcaacaaatatttattgagcacgatttaggcaggggtctagacactggaaacccagcagtgaatagaccagtgaaatccttgaccgcagggagtagtcaagggaaggaatgtgtaattttaggttgttgtaagttgtgaagcaaagaacaagacgtcgtgtgatcttgtgtggcagaaacagcagcgattattttaggttactaagggctggaggttgagccagccgtgggaagatttaggggaagtgtgtttcacacagaaagaacagcaaacaaaccacgtagttacttaattacattttgccttggggccaaagggggcatctggtttgattgcttgaagtaggggttttgcttagcttggaagtagttccttcacatcagaaccaaaaacctgggggccttggactggcccatgacgtccctgatagatgaagggagctttcccctggggatggtgtggaagaggggctcacttatcctaccctcctgccccagtggcttcccatccgtcatgagtttaggggctgacatcagacaaacctaggctcaaatcctggctctgacacttaggagccgtgtggccctgggtgagtccgtgacctctctgaagctctgtgtctttgtctataggactcggtggaccacactcactggtgggggaagaattttgcataggctgtcaagctcgatgtgctcaggaggcctctggggctggtagtactggggacatggctttcccgtgagctgatagagaagcaacccaaggcattgacttgggtgagaccaggttgggcaggaagtgcattcctcagcagagatcatatctaaaggaaggcagcagttccaagggaaatggggaaatggctctgggccccggcggatgtcagcaatgggcattgccatccttcccagccagcccacccttggcaagagcagtgcagaaaaagattctgcaatccaaaacaataaactctgaccatggagaaataaaactggggtcggggggacagtagtgatgcttatttaaaaaacggactcttgcc

SEQ ID NO: 34844 - DNA, 1205 bp, Artificial sequence
  DNA replication origin
ctccaggcgcagatttgcaattgcgctccccctccagcccccttccctgcgccccatgttctctcaaggccccctccgagggaccgaggggtcggcccggggctacgggcgggggtcgctgcctaccgtgtttcccgtagtagtggggccgctcgtcccccatccctgcaggcgaccagccccggcggccgcccgcgctctctcccgcgccccctcgaccctcccgagtctggagggaggcactgaccgcgcgactggcggcggctcctcccagcacagcgccaggcggggcggcccaaaccggtcagaccggcccgagctgggcagctgcccagactaagggacccgggagggcgcgggcggggctgcagctgctcccgccactcaccggccggccgcatttagccttccccgcccccacccgggaaccctgcggcttcaccctgggaacaccctgccaccgggcgatgccgcctagaacccctggccaccctgaaagggcgtttccgtggcttcgttttgcaggtgtggaaactgaggcactgggagggaaaacggcctactgcccaaacccagacaaccaactgtggaatgttggtgctgaaaacttctccaagctgtgcaggaaattagttttctttctgtctgctgctttttttttttgagacaggatctccctctgttgcccaggctggagtgcagtggtgcaatcacagctcatcgcagtctcgacctccctgcctcaagccatcctcctgactaagcctcctgagtagctgggactacaggtgctctactgcactcggctaatttttaattttttttgtagagatgggatgttgctatgttgcccaggctcatctttaactcctggactcgtgggctcctcccaccgtggccccccaaagtgctgggattacctgcgtgcactactgggcctggtcttagaacaagtatttattcagcccttagtgggtgcaggccttgggcggggcaccgcatacagtgaggaaccagagagacccaatctccacccttgtggagcccacatcctcctgggtcgccctgaattcaaatgctccttctgcaccctctgaactagaggatacttaacaaagggcttatcttccttaagcctcagtttcctcaactgcaaaatgaggctaaagtatgaaaccaaaactgacctcaaagagcaggcatag

SEQ ID NO: 34845 - DNA, 1287 bp, Artificial sequence
  DNA replication origin
gtctgggtttgggcagtaggccgttttccctcccagtgcctcagtttccacacctgcaaaacgaagccacggaaacgccctttcagggtggccaggggttctaggcggcatcgcccggtggcagggtgttcccagggtgaagccgcagggttcccgggtgggggcggggaaggctaaatgcggccggccggtgagtggcgggagcagctgcagccccgcccgcgccctcccgggtcccttagtctgggcagctgcccagctcgggccggtctgaccggtttgggccgccccgcctggcgctgtgctgggaggagccgccgccagtcgcgcggtcagtgcctccctccagactcgggagggtcgagggggcgcgggagagagcgcgggcggccgccggggctggtcgcctgcagggatgggggacgagcggccccactactacgggaaacacggtaggcagcgacccccgcccgtagccccgggccgacccctcggtccctcggagggggccttgagagaacatggggcgcagggaagggggctggagggggagcgcaattgcaaatctgcgcctggagcctccccaccatcagccaggccccttcaccccacttatcccccgcagcctcgcagacgaccctccttactctcccctacccgaaggacctgcccctgtacccctctgcctggcactgctgccggcgcctccttccccctatcccacctcagatcttccccatctccacctggttccgtggtggtcaccatttcagccctcttcccagtgggtggccgccagttaataagtttgttcacagttagtgatccctccttcctcccctgtcctggcctgccagaactgggggcttgggtgtggtcacctggaggtgggtgaggcagaaaattccacaggtctctgaattttattcttgccaaggcaaagacacccctaggggcttttgggagggggctctcccagccctgtcttggttcaggtctccaatcccatccatcttaatcttcttgactttcaggaacgccacagaagtatgatcccactttcaaaggacccatttacaataggtaagagctctgggttttggggggttctccccgctaatactaccccaatccctgtctcttcacaccccctcccatctgttctccaacaaactggtgacaaatatttgaaacttttttttttttttgagatggagtcttgctctgtcaccaggctggagtgccgtggcgcgatctcaatctcggctcactgcaaccttcgcctcc

SEQ ID NO: 34846 - DNA, 1985 bp, Artificial sequence
  DNA replication origin
ccgccgcagccgccattttgtttcctccgcacaatggaagagagttaacggccgagcgcgggagcgaggccggcaagggaggaacgggccaggcgccgggatgagggaaccgggcggaggcggcgagcgtgggatccctccagccttgtcaccgcgaaccctcagtggggatctcactgagggcgggcggggggaggggcagaggcgggagcgggcccggccgccgccacattgacgcttaccttgtcggcgtccccttcttcgaccgcagccgccgccgccgccctcctgccacagcccgccggggtctgcccccaaaagccacgcggtgcgcgccgggctgctgggtccaactgcaatggcgagaagaggaggaggaggagtccggaccgggggcgagcgggcgggcgggcaggcgcgcgccggggaggtgcgggaacacgtgaccggctgaagccccgccccctttgacgccgcgttgcgcctcgacgcaggcccaacccaaatgggagggaggggcgaaaagagataaggggggggctgagggggtgggcgtgagttgcacgtggtgcaagcgggagtgtttgcgtgcgtagtcacgtgacttcggcacctttccctccgctttcgataggttgctccatcatgtgacaatggcgaatttcgcggtttccttcgccatctgacaacttttggcgccttccctttgccgtactgggagtcctccatcacgtgacgagggcacgctctggttttcgctaaggcgttttttgagcggccattaccacgtgatgcaaggcaagcgtcagaggcggagcctccctacggctgcgacattttgcgcctgcgcggccgccatcttacgcccgtcgccctgagtacgttagcggaaatggctccgagaggctttgacgcatgtgtacctttttagtggcggtatctcggccggggattttcgggctccagtggaggtggctatgctcaccccatctcccttgagaggcacagaaggttagagatgtgtgcgaggaacggccaggtccagcgtctcctcgttgctgccccttgagcccgggaccggcgccaatgcgcgcccgggttcttgggttctttcgtcccgcagacctgccttggtgtggcgtccctgggccgtagcttccgaaggctgcagccgacctggtcggggtcctctagcccgccttccccttcccccattgacagatggagaaactgaggcccaggccaaaaaatatctcactagagggctcaccgccatttcctggaaaaattggggctgggactcaacggacgctcgtccagcagcagcgcggagctccgaagtaaaggcgcccgtgaccgagtgctttgtccttacaagcgtggtgttcttgaatgcttccaggcgccttatgaggcccccgatgtacaatctgtgcttaactaaaccccactgtcttccagggtcaggttggccatccgcaggcgtagttgctaggaaggtttgacagatgtccgcctgttgattcagacgttcccaggatttggagcaagaagagcaaggaaggccaggcgcggtggctcacgtttgtaatcccagcactttgggaggccgaggcgggcggatcacgaggtcaggagttcgagaccagcctggccagcatggtgaaaccccgtctctactaaaaatacaaaagaaaattagccgggtgtggtggcacatgcctgtagtcccacctacttgggaggctgaggcaggagaattgtttgacctggcaggcggaggttgcagtgagccgagattgcgccactgcactccagtctgggcgacagagcgagactctgtctcagaaaaaaaaaagagcaaggaggtgttgaaaatgggtttcctggctgggcgtggtggctcacgcttgtaatcccagcactttgggaagctgaggtgggcggatcacttgaggtcaggagtttgagaccagcctggccaa

SEQ ID NO: 34847 - DNA, 843 bp, Artificial sequence
  DNA replication origin
cagcacagctgctgggtgcaggtggggctgagcagcagggctgaaagtgtgcagtgcagccactacattctcagccgcaagctgaaaatgtagcagtgagaccccacttctggtcactaggtttgtcaatacacggccccgccagaggctcgagtggaacaaaggggacggcactggctgagggaatgctgcaccccaagccttgcaagggagccccacacagggagcctccacagtgggtgtgggaaggctcagagggtgggtgaggtgggaggctgggtcatggtggtggctctccagccaagctggccaacgcccaagcgctcaccaggcgcagctgagttcctgggctctcagagcgggtcggcttgtgaatgcagccacctttgcccagtcaggctgcccagacctccaggcccagggtgggtgggagggaaggggaggctcccacgctgcctgtccttccttcccagattgaggacactaagggcccaccgcctcctgggtagggtaactgggagtcctcacgtgcctccacccactggagatgtgtaccccacgctggtgtggtgggctgcctgcatgacaacgtggacagaactatctgcaaccttcagtttgtgttcttcaggcaggcctcctccctcgcccgccatcacaaagccaagacaccaagggggaggatgtgtcccacaatgccagaaagcgaacatgcggcagctcagcgaggagactgggaggatgggatcttcagaacccccccaccaggacccacaccccacagccccacagccccagcttccccagtgtcctgcactgagcacaccacctcgccccgcctga

SEQ ID NO: 34848 - DNA, 1415 bp, Artificial sequence
  DNA replication origin
tctgccactccgtgggctgcactgctggggcctggaccctggcccggccgaggggctctggaagccaactcactgaatttgctctcgtagttgtagtcggatccgcccccgcccccgggagagttgtaggagttcgagtaggagtagctgccttgtccatggttatagcctttctgcttgccctgtggagggccatagttgctgtaggggctctggttgtaggactgctgctggccctggtgggactggtagcccgagccgtaggagggcttctgctggcccccgtgcggctgcttcttcccagcgtgttttgggggcaccggtgagttgtagttgtcaccttggtagtaggagccatagccggaggagccaccaccgcccccgccgccaccgccactggcattcccagaatgccctccgttgctgtagaactgacctaaacagggaggcagtgggtcaggcggaggacgggaaagggcagggggaagggagggaagggcaggcggcagccatgggtcctgaaggctgacccacaagcccgggtcagaggcagtaggacaaggagggagaggagcagtggctccggtccttagcacagccgtttgggctggcccagccttcagctccactcacccagcagctgatgacaacaatggggctttgccaagcagcacgcgccagcagcttttgcagcggatgtcaacattacaatgagatggactccgagcgcgggacgacattcacagctagctgacggctacccagagatccccaatggtgacaggaaaagcaaagccccagagaagcagcagccacccccctcctccctgctgtgctgggaacaggctccacaggcacaggcctggaggcccctaaaagatgctatttaaagaggccccggaccgtcatcatcctgagaagaccaactggtctgagctggtttggttcttggaagacaaatcgagactcagtcaatgatgcaggcacctcccttgcgatactcatgcaagcatgtgactcaggatgtgaccaagccccagcctggctggcagagggcagtggccacggctggggcaggaaagccgggtgaggcctagacctacagccctaatgactcccgaggccccttccttgtccccagcacagctgctgggtgcaggtggggctgagcagcagggctgaaagtgtgcagtgcagccactacattctcagccgcaagctgaaaatgtagcagtgagaccccacttctggtcactaggtttgtcaatacacggccccgccagaggctcgagtggaacaaaggggacggcactggctgagggaatgctgcaccccaagccttgcaagggagccccacacagggagcctccacagtgggtgtgggaaggctcagagggtgggtgaggtgggaggct

SEQ ID NO: 34849 - DNA, 1193 bp, Artificial sequence
  DNA replication origin
ctggggtctcaagcacttcctcagctgctgctgggaagtttgggctgcaggaacagatgggaaggcaccccagagcagggctttggagcttggtgaccagcccagcccagggccaggtgaccctgcagggctccagctggcccctggtacttacctgatgggctgatgtgcgacattgaagcaggcagggagaagagttagaggcccagggtctgggccaggggccggccgcgtctgaggcgcaccacaaggcccccgggccgcccaaggtgtgtctttcctggggccccttaaccatcctgtcttctctcccccagactacagtggtagtggaggccgaagcggcgggaacagctacggctcaggcggggcatcctacaacccagggtcacacgggggctacggcggaggttctgggggcggctcctcataccaaggcaaacaaggtgggcctggagcccctggtggcacagcatggggggcctggcagctgctgtgaagcgggatatggacctggtgggagcagacagcagcgtgggcagggctgcagtggcaggtgggccctgtgagaacacgcactcggatgcactggcagctgctaaggctttcgggagcagccggagagccagcagtgtccccacgcttaacccctggtacctgtgtgaaatgtgggtgacaccaaggccaaacagctgttcccccggttctggccagtagctcagccttgggctcaggtagcttctcccagaaacgagggtcacagtggtcccacctctcagagtcttggtgccagcctgatccagtgatgtgtggtaggcaggcagagccgcacaggagcccataagtcttgcccacctgcatcctggccgaggcttgggtgtgggctgcctaacctgagccccgctggctgggcccctcggctctaatccaccactctctctcctaggaggctactcacagtcgaactacaactccccggggtccggccagaactacagtggccctcccagctcctaccagtcctcacaaggcggctatggcagaaacgcagaccacagcatgaactaccagtacagataagcccccgcggggcggagatttctaccttctgcacttactccccatcagaagatcgagttttatgcatcacagttaacatgtcagctggccctccaggcccccgcccccatccc

SEQ ID NO: 34850 - DNA, 1271 bp, Artificial sequence
  DNA replication origin
tttgagaccagcctggacaacacagcaagaccctgtctctataaaaaataaaataaaaataattagctgggcatagttgcgcacgtctgtggttccagctactcgggacgctgaggcgggaggatcgtttgagcccaggtgcttgttgaattgagctatgagtgcactactgcaccccagcctgggcaacagagtaaggacccagtttctaagaaaagaagattcattagctagacgcggtggctcacacctgtaattccaacactttgggaggccaagacgggcggatcacttgaggccaggcgttcgagaccagcctggccaatatggtgaaaccccgtctactaaaaatacaaaattagctgggcgtggtggctcacacttgtaatcccagctattcgggaggctgaggcaggagaattggttgaaccggggaggcggaggttgcagtgagccaagatcgcgctactgcactccagcctgggtgacagagtgagtaccccgcctcaaaaaaaagaaaagaaaaaagattcatgatctgctaaagttgaagaagtgggggaaaacattggagtgttagcggcgtcaagatcgggcgtgagcagaaagggcacagcatttgcaaaggcgtggaggagtgattttattgcgttctatccctaggaagcaatgacttggcctctaccatttgcagagcgcattgggaccctgctcccagagctggtttgcagtctgggaactgagatgcgctctgggacttgtagttttccccagtgccaggaaactcaaaaatcgagacatcggatcccaccacgaggtgtcgcccttgagcgagtacggtgggatctatcctatacttcagaaggctgttgcagacatccaacaatcacaaggaagaacgggagtttttctgattgacagatatggttctcaatgatagtcaagattcggatgttaaagcccgccctcttttgcctggttggctggagcaacgaagtgatatttatatgaaccaatgggaaattcttagggaacgaggtagtagctcaatccccaacaccattggtccacattgtctactggcacgtctgcctgccaataagatggtggaacttcgccaatgggcagagccaacgtgcctttttcggaaacacccccttcctctcttgacaacttgctttctgccgctattggctgttgcacaacagtgacggttcttttgtccaataagtcagcaagacggtccccagggggaaggtttactcaaccat

SEQ ID NO: 34851 - DNA, 1479 bp, Artificial sequence
  DNA replication origin
aaacaccccccacccccgtcccagaagcctgggcaggcaggaagatggtcactcaaaggggcccacaccacagtccagcctgagatcaggccaggcccagctggctgcaagtccacacctttccaccacggtagacagaaggcaatgagctagagacaaggtagcaaaagaggagatttgtgctgcttggagcaaagccccaaggctctgggatggcagacacaaggccttacgccagcctagtggccttgggtgatcacagtcccttctgagcctcccagctcagctaaggtggggatgataacacagcctccaccccactccttacttgggattcaagatgttgaatcaagaagggacattatcccttgacaatgataacaacaataacaatgacaataatgacaggaggaggatgttatcatttggcagccacaccaccacaaatgagtagttcctggaatggagaagtggccgcccatctgggagacaagaaaggcaagaggggttggtgggagggagaggtggctgcacgggctgttctcattcatttgcttcctgaatcctggaaacagccccagagagtggagtttgcccactggacagatgggcacaccgcggcttctcaaggctgtccagagaaggctacatcccagcgctagccactgaggcctgatcacgcaagaagccccttcccaggctccaaaggagggcccccaatttgtaggctgtagctgggaggcgggcccctgtgttctagcactcggaaaggaatcctgaagtaaggtacccccagagtcctccttccagctgagaggggaagtagggtccaaacctcctccttcagctctgttctcccctctaccctcctaccacccctttccagagccgttgtgccagacactcaggggtagtcatgggcagactaggagatggccagacagacagaagaattcacacggaagagaggagccagcgctagccaggaatcaagctgtaagagtcagccagagagaatcaaacagggtcccctaggagtcagctagccagtcagacagtagaggccagctggtgtcacccaacagagggactgctcagtgttaaagtctgtgaggggcacggatgggcggccagacagcagaggtcaccctggacagctagccagacagcagggggctgccaggtgggactggacagatggacaaccaaatggtggtggcagggaggcttgcccaggacagagagacagccaaccagacggcgggggcagctccagatacaagaacaagccagccagaccgcagcggtcgccccaatagatatctagatggccggtttcacctctgatggacagcccgaaagagcagaagagggatctaccccagacccacggccaaccagatggcagacttcacccacgaaagctgggaccagatggaccgcagggttccagcgcacctcctgtcctacggcgccctg

SEQ ID NO: 34852 - DNA, 1166 bp, Artificial sequence
  DNA replication origin
ctgtttaagaaaagtacatatcctggccgggtgcagtggcacaggcctgtaacctcagcactttggggaggccgaggtgggcggatcacttgaggtcaggagtttgagaccagcctggccaacatggcgaaaccccgtctctactaaaaatacaaaaattatccaagtgtggtggcacacgcctgtaatcccagctactcaggaggctgaggcaggagaatcgcttgaacccaggaggcggaggttgcagtgagctgagatcgtgccactgcactccagcctgggcgacagagcaagactccatcaaggaaagaagggaagggagggaagggagggaggggagggaagggaggaaagggaggaaagggaggaaggaaggaaggagggagggaaggaaggagggagggaaggaaggagggagggaaggaaggagggagggagggaaggagggagggaaggaaggagggaaggaaggagggaaggaaggagggagggaaggagggagggaaggaaggagggagggaaggaaggagggaaggaaggagggagggaaggaaggagggagggaaggagggagggaaggaaggagggagggaaggaaggagggaaggaaggagggaaggaagaaaggaatcaattccatgtctttcacaatggaaaagactcaggcacaaccaccccagaagatagagggagtagcctgctccgacttacagtgaatacaccaggattccagcaaggaggaagacaggaagtcaccctgtacactcagaaaggaaaatgaaagctttccagtgaggactgaagtagaaacagtgggctcggggtacattaaaggctcgaaaggaaattctgttgtttcatacaaaatggtgaaaggttctaggcacagggaatttctttttcttttttttttttttttttttttgagacagagcttcgctcttgttgcccaggctggagtgcagtggctcgatctcaactcactgcaacctctgcctcgggttcaagcgattctcctgcctcagcctcctgagtagctgggattacatgcacgcgctaccatgcctggctaatttttttgtatttttagtagagacagggtttcactatgttggccagagtggtctcgaactcaacctcaggtgatctgcccgccttggcct

SEQ ID NO: 34853 - DNA, 1842 bp, Artificial sequence
  DNA replication origin
atcaaagaggtctggggtttgggggtgtgggctcggtctggggtgtagttacagaagggccacggggggttgtcattgcacagacagacagccaaggtgtgcggagtcctctaacattcatgtccatgacacctggctctaggacgagcgttttccaacctgtttggactgttttccccctcccttttctaatcgaagaagcttaagcagcaaatgtgggcttttccagactaagaacagaggggctcaagcagaaattccctggcaacccggagcgctggggacactgtggtcgcgcaagcacagactgcccactgggaggcatttcagctgcttggccaaagcgtgctgccctgggaaccaggcccgcggcgttggcgcgggttgggggagcccggcgcgtcctgctgagtggaggcagtggctcgtcgagagcgcatagaggcactgtgactaagtggatccaaaaatgggctgcccctgggggacagcgtggggtgcagggggtgggcaggggcacttaggaccccagctggctctcatgatgtcgctggcattcaggccattcccggagctgagggacagagaagtcggtggctccagggaagtctgagaatgccgggcattggtcaagaaggggtgacagccagggagcttcaaggagctcagcctccagcagttgacgcggggggtccctctctgcttcccaggaggcagcaaagcaacagcccagtgaaaccccaatttcatcagacacatgctaggcttggtatcagggtcccagggacaactgtgcatctgtctggccagtccaggaggcctggcactcccctgtgtgcctgggcccaggcctacatgctcctgccccagcctctggggagaggccaagttcacggacacaaagcgatatggggagaaaaggcaccagtgggggccaatgaggcgctgggagcctgataccaaacccccgtacccccgtttccacaaggtcaggagtcaccctgccgagggagcaataccttactggtacactgcctaactgtattgattagctcctggataaccaggtcgacacatttcagacagggctctttcagcttgacgacctgctttttcacaatggcctcgaatgccaagtccggggtgaaaagcccggtcctgaaaccgtccagacccgggggcaggggagataagtcagagagaaacaaagcatggtcagcaatttcattggccctggccgggtccccaacaaggaatgaaggttgtgtcatgtgtggggtcggatgcctgagtccactgcccggaaaccctcagggtgacccgaggaccccacggcgatggaagggcagacacctggagcaactacctttgttagaataaggaggggacccaagaggctcacgaggaagccatgatggggactcatgctggcttcccaaaaccctgattcagtgccgccccgcccctccccaggcaaatctgcagtgagcattcttagtttagcatgaggttcacaccaaccgactgggcaggaactaagccctatttgatcaggagctgcagacagccctgaagcctgcaatggacgcaggactaagacacatccaccctcatgtgcccttggagaccctcagggaggggctcgcagctacagaaaaccatccaagagccctcttaaggcctaacgattagggactcagaggtgtgggtgacccaattagctggggggtcgcaccacggagaggaaggaacagtggtgactctcctcgtggaacttgcctgactccatggatgttcttaatggcatagctgatctcccgtcgtaagtccttctcgtcaaac

SEQ ID NO: 34854 - DNA, 1485 bp, Artificial sequence
  DNA replication origin
catccggactaccccgacccaccccgggcctgacattctgaaccagggccaccagcccacagctccagcggctccttggtggctggatgtgagtgctaagccccaggtggccatgaagacggaggtggctaaagagtacccagggacccctggaccatgcagaagtcactgcccaggctggggacagcatgagatgccaccgggcgccccttgttaaggccaagggtacagacttatccctccctgggatgagcagacaggactctcacagttgtttggagcaggcagtgacccctggcatctggccattcacgggctgcctggtggtgggtgagggggctgaggccagcagcccctgtgaggtcacagcatcccctctgggaacgcagtgacgagctcttcctggtctgtccaggacgtcctggtgttagcaccaaaggtctggcagtctgggaatgcctccattcacccggggggagcggggtgggggcactgccttgtctcagcccagagctgggcacagaacgagtgcttagtagaccctggttccatgactgaatgacaaccaggtgagggaaaacagggagacaggctgtcggtgctcccccagagaaatgtgaggcctccatactcctaggcctggcccggtttctaaggagagggatgtgcccgcacacccctcggtggcctggctctcctgcctccagccggggttagtgttggtcagagctggagcacagggcccacgctacactttggggtgcatggccacagggccagggcactgatcggggccatgctggggatggcacaccaagccttggggcaggacgtctggcagaagccctgaggtgcccttctccacacgggttcagagacaaaatcccaccctagggagctgcaagctgtgggtggcaaacaaaggcccgttagccatccaccacttgtgagccagagaaagggagcagccaggcctcagcagaaagtcaggtttgcatccaagggacacatcccaatgggactgggcttagaaggaagtaggggtgggagagacagaagaggcggcaggccgttgcgggctagggtgcacagtgacaggcaggcaggcacatggggcggtatgggtggcagggcaggcagggggcggcaaagcagggatcctctggcaggctgctccagtctctttcctgggtgagggtcctggcctgagtctcccgggtagagatgggaaccacagatgggagacccagaggccacggccacgctcatgacggggctgggctatgtggcctctggtaggaaaagaggaacccctaaacctcttggggtacaagggagaagcaggttcctggtcttggcctggcaaattcaaagggactggggggaacacatgaggaacctgaaaaccacaagcccgaggccaactaattcctcccgtcactgccccacccatggccctatctgcacacccaggccctgggagca

SEQ ID NO: 34855 - DNA, 1086 bp, Artificial sequence
  DNA replication origin
attacaggcgcgtgccaccactcctggctaatttttgcaattttagtagagacggggtttcatcatgttggccaggctggtctcaaactcccgacctcgtgatctacctgcctcgccctcccaaagtgctgggattacaggcgggagccaccgtgcccggcgagttacagtcctaatggtgactcagggcagagtggcgcagtgactgagttctgcccagagggagcgcccacccgctcttccctggctgccccacctaccccagcagccctgctcccgcctgccactcacctcctcatccttgtaccaggacagtgactcggcagtcagcacaaaccagtactccttggagccgcctttcatcaggctgatgttgttgatggtcagccagcccctgcggatcacctgggggaaagcgcgcagcttagcagggaacctcgctccgtgccccagccatcccccagcgcagcagccttgcccacagctcagtgggaagccagggaccgcaatagagacacctccagccccaaagcccaggaaacccagttccaccctgtcccaagcatttccagcaggaaaccaacatgaggcgccacctgggcaggtgggcggacagacagactcactgggccaggggctgatggggtatagactcacagaggcctgatggaaaggggcccatgggaggagtccctggggcttgtgtgtggggctgtggcacatgaaatgtgacatctgaggaactgcacttgtttgcgtgagataaggttccaagggtagcatccacacagagggctagggtcaaaggtgtgagcccaggggccctccccaaggacattgaaggagcgcggctcatgtcccaagctggctgcaagcctggtggtcatccttttgactgacacatcagggtttcaggctgggagaccccatggatggggattgtgtggctgtagctgtcatctgcgtgggggtcagaacccaggcctgcgcagggactcacctgacaactaacggcaggcagcctgggggctgtgctcccatgctccctggccgctggaggcatgtgtgggcagagccccccacccc

SEQ ID NO: 34856 - DNA, 1527 bp, Artificial sequence
  DNA replication origin
agcctaggagtgagttacctctgtgatgccattttacagaggggaagactgaggcagagaggagcagggctgggatttcaaccttggccgctttaggacatcttggggctggataggtcctgggccaggtgctgcagaagccttactccctttctttattattatcattatcattattttaatagagatggggtctcgctatgttgcccaggctggtcttaaactcctgggttcaagcgagcctcccagagtgctgggattacaggtgtgcaccaccgcacctgccctatcacttgctttctaaggttggccctgttcaggaagcaccaagtgccagccacggctgtccagactgctagggaggcagctcagaggtgggcccctcggccaggggcaaggggctggcgagtcacggagctgggggtggcaccctggagtcccacactcacccagtgatgtgtgtgcccacccgccacagcagcagctcttggggacccatgccatgcactgcttggtctcagttcacggatccctcctagctcagagagggaagctggctgccgaaggccacacggcaggcagcgcaagccacagcaggacttcagaggccaggtctctgtgacccaaagcccagtcctccccacagtgcccctggcccttcttctccctgggccgtctctggaaactcctctcatgtcccctcactgcgctgccccagcacaaagcctaacctggctgccgcctccaagttcaggagcagccacagtgactgtggagaaggcagcgggggctccctggcaagtgggggccagctgggactgtcaggactttgcaaggggagccaggatgaagcagtgggcttggcacatgggctcagcctcagggcgttaggagctcagcatggttgaggtgatgccagccctgccctttcctggccgtgtgccctcgggcaagccacttccccgccacctcccatttcatctcagtttcctcatctatccaaggaggatggaggagcttggtgcccactgcagagctggtgcccatgagcacccgggattttctttggttgctcttgtgagcggctccaggattagcctgccaggctctaggcaaagaagtagggcagagcataggaagaggggcccggtggccatggagggagcagagcataggagaggggcccggtggccatggagggagcagagcataggagaggggcccggtggccatggagggagggatgccgctgcggacccaagggagggaaggtgatgaagaaagcctgcacccgtcatcccaggcaaggctgggtaacacagggcctgggtccctcccacctttcggggaagagttttgggggctttagaaggggctaggggagggggctctgcagaagccctgcccccggctcggacgtttgcccaagggcctttgctgccctgaccctatcatatcacgcggccggaagcttccagccagcagggccaagtaactgagtcacaggccattccagctaatgccaca

SEQ ID NO: 34857 - DNA, 1382 bp, Artificial sequence
  DNA replication origin
gactgggctttgggtcacagagacctggcctctgaagtcctgctgtggcttgcgctgcctgccgtgtggccttcggcagccagcttccctctctgagctaggagggatccgtgaactgagaccaagcagtgcatggcatgggtccccaagagctgctgctgtggcgggtgggcacacacatcactgggtgagtgtgggactccagggtgccacccccagctccgtgactcgccagccccttgcccctggccgaggggcccacctctgagctgcctccctagcagtctggacagccgtggctggcacttggtgcttcctgaacagggccaaccttagaaagcaagtgatagggcaggtgcggtggtgcacacctgtaatcccagcactctgggaggctcgcttgaacccaggagtttaagaccagcctgggcaacatagcgagaccccatctctattaaaataatgataatgataataataaagaaagggagtaaggcttctgcagcacctggcccaggacctatccagccccaagatgtcctaaagcggccaaggttgaaatcccagccctgctcctctctgcctcagtcttcccctctgtaaaatggcatcacagaggtaactcactcctaggctcgtttcaaagatggagcccagataaaagttccattcacttcgtgcaaggcgaggggcagttgtgttgtgcgtgccgtcagccacatgtcagcagtgaactcaacaggagtccctgccctggagaaacttgagtcagtccagtggcagtcagccacctaggtcaataagcacaggcagtcaggcacctaggtcaacaagcgcaggatacgtgacgtgttgtgtgagggaaaaggaggatggaggtggggagggtgcgggtagagttagggcaggagggagccatgcaagtgtcaggatcaggcagtagcccggtcgtccgaaggccctggggtaggaacccaggtgggatactcagggagcatcatggagggcagcgtggctgggacagagtgacggacggggaagggccggcagatgggctcatatacagcagcgaccagcattgagaagcccccggggctggtggtggcgcatgctacacgctctggcctggggcatcctgagttgtcacgtggaccgctcagggtgactcttttccctccaccctcaggagaaagagaagaagtacatgctgcctctggacaacctcaagatccgtgatgtggagaagggcttcatgtccaacaagcacgtcttcgccatcttcaacacggagcagaggtgaggggcccaggggcctggggatggctcggggtgaagaccaatggcctcattcacactccacaaccttcactgagcactgagca

SEQ ID NO: 34858 - DNA, 1826 bp, Artificial sequence
  DNA replication origin
ggacgacatgctgcgcatgtaccatgccctcaaggaggcgctcaacatcatcggtgacatcagcaccagcactgtgtccacgcctgtacccccgcctgtcgatgacacctggctccagagcgccagcagccacaggtccggaagcctggttcccctaccctcaagcattcggcctgcaggttcctgccctccctgtgtgtcctgcagggtcctggcaggaaacaggacacagcccaagggtggcacccagggctgggcactgtgggagctgctgccctgctgaggccggaggagggagagaaggggtatgggggcgagccagccctacagctctagggcaggaccctgtgaataaataccccgcctgccctctgctggtgccttccattggcacagcccaaatggaagctggggtaagaggctggaggggcagcagccacaggagagagatgagcctcctggagcacagagaagggcagatgggaggctctggaggggcaaacgcaaggcgtggccagagctgctgccgcccctgagttgtccattgaggccgtcgggcagggaacctcagagggggctgccttgcagagccctgggggagccatggagttccttaaggggaggatatcgcacccaggcctgcaggtggcagggactgaggcccaggagggaatctggatgtctggacagggcttgcaggttccacggcccctagagatattagggcttgatctggaggactctggaagtgtctttggctgtgagggtggatcccaggcccaaggcctgagggggccctgtgagtgggaagtgcctgagggggccgagggcaagggaaggtgggactggcgctcaggttggggtgggaggatcccactgcgcctgcgctgtccccatagccagcccccacctcaggttctggcagccacagtggcatggcgggggctcctactccatctgtatctgtagctcacaccctctccttcctcacagccccactccacagcgccgaccggtgtccagcatacacccccctggccggcccccagcagtgaggggccccactccagggccccccctgattcctgttcccgtgggggcagcagcctccttctcggcgcccccaatcccatcccggcctggaccccagagcgtgtttgccaacagtgacctcttcccagccccgcctcagatcccatctcggccagttcggatccccccagggattcccccaggagtgcccaggtaaggccaaccccctgccctccaccccaactgcctgcaccctggggtctctcctcctgtctcacttcctcccagtgagctctcactacgtgcccagctgctggagtggaggaatcgtcctcatccctatttggcttgcgaggaaacaggcccagagaggccaagaggcttgttcagtgtcacagagtagcggagccctggtgactccggggctcccagcttgccctctgcctactggggtgtgccaccaggcagctggggaaccctcacactgggcacctcctcccactgtttaccttcttctccttcctgctcctgcctgcctcaacctaccgtgggccaggctttattctccccacttctccggtggggaagctgaggcccagggagggcagggggctcactgagggtcaaacagcaggcgagttgatgcctaggtttggcactcctgcccgacaccctggtggcttgcggaggtcagcctgggaacaccctggggtggtgtgtgggtgggggctgggtcctcaacccaggcctgcctcttgctcccggcctcactgccgtctccccctccccacctg

SEQ ID NO: 34859 - DNA, 1104 bp, Artificial sequence
  DNA replication origin
aattttagtttcctgccaaaacgggagtgtgcagtcagggcctgcggtctggccccatgagtctccttccgtcctcagcgggcagggaacacctctggcttgtagaagggacggctcagtggctgcaccgacggtcctggaaatctcacatggtgggcactgcagcgttggaacgtgagcctcggatttcctggcccctctactgtaaatgtgccttagcctaagcctcccatcctgtgttagcgttgcctggtgcggggcagggcctaacaaggaaacctgggccctccaagccaggttgaggtctggtaacagaatgccaggaagggggcctggaagaccacctgccccggcccctctcctgcaggggccccacacaggcatgagggatggcccggccaaagtctaggcagaagcctcctataacaaagggtggtgtggcctgggcattggagtcaataaattatggtcagaaaatcacaagagcctgctgattggggctcagggacaccagccaggacagaccggcccccgagggggcagccagacaggtgggaggggcctcccacgaagctcagaagaaaggtcgtgcgggagccgatggaggtggtcgcctggcacaagagaaaaatcagaaagcaaagtttaactgagccccagttgggccacgaggcttgggcttccccacgaggtgagagaagcagggcctgagggtaggaagggggtggagcgctggggtccccgcttcaccaggcagcagccaggcctgtgcacgtgggggtgtgcagggggtcagagaatatctgctcccactcctcacatgctaaggaaagtaaaagctctcccctgtatcgagtggcttcctctgaaaggtgacacccccgaaagcagagccctcagggagatgggaggcacttatgagtgcagggacttgggcatccttatgggaggcctgatggaggtggcacccatgtccccagcctgaacactaacacaagaggcccacacagcagccaccagcagcgtcttccctttattttagtttattaatagaatacagagtgcaggcacttacagtggtcaaactgagcgaggagtgggtga

SEQ ID NO: 34860 - DNA, 1236 bp, Artificial sequence
  DNA replication origin
tttcctccaccagcggccgagaagagagccgaagcctttgagaaaaatattcccagacggttgagtgtttctgggcacatcaggcattcattcgggccgcctgccctctagtgggggggtccttcactcctggcacctctggttacggacaacatacagaagccactgccaatgagctccgccgagtagcaccggggcagggctagcgcttaaaggagccgcgacccctttgcagaccagagggtgacccggatgatggcggccggcgcggccctagccctggccttgtggctactaatgccaccagtggaggtgggaggggcggggcccccgccaatccaggacggtgagttcacgttcctgttgccggcggggaggaagcagtgtttctaccagtccgcgccggccaacgcaagcctcgagaccgaataccaggtagagggtcgcgggctgggcggccagcagagtcagggagagggggcgtggccaagcggtcgaggcgaggcgcgctttaggaggaagggggaggaatccgtgcttgggagcgcgggggcggagctagaaagagatggacagatggggcggggacggtgtgtgggagcggaaggggagggagtaatgaagcaggcggggctagagtaagagatccagagggggcggggccatcgataagtatagggagcctctgagaggacaggactctggctggtgggcgtggcgatagtgctgataggtcaactgcgggggcgttgcccacacaggcctttctcgggggttagactaaggaaaaaggctgggcctatcctctttcggaggcggagccaaccaggggcgtggtcaggtaaacgtccattaagtacttttggtaggtgcgtggtcagctgaaagtatggaccccaagctgtcatatcaatgagggtggaggcaaggggcgcagccactgggacaggttggggcgggtgtgggtgtgccgccgttcaggtaagcccttggtggtctgtattgatcagtgttggttcagccgtagccctcttcggcaggcgcccttggcctaccgctagccctccacccgctcttacctgccccccaggtgatcggaggtgctggactggacgtggacttcacgctggagagccctcagggcgtgctgttggtcagcgagtcccgcaaggctgatggggtacacacgtgagttcagtcttgatgcctgcctgggttcagttacagccctgccct

SEQ ID NO: 34861 - DNA, 971 bp, Artificial sequence
  DNA replication origin
tggggagtgcagcagtgccatgccagggtctctgcaacggtacttgcattagagggtttaggaggtggaatgacaggggctacgggtgagggacatgaaggagaatgagggcccctcgcagtggctcacacctataatcccagcactttgggaggccgaggcagggggttgcttgagcccaggaggttgaggctgcagtaagctatgatggcaccactgcactctagcctgggcaacacagtgagaccctgtctcaaaaaacaaaaggggccgggcgcggtggctcatgcctgtaggcccagcactttgggatgccgaggcgggcggatcacctgaagtcaggagttcaagaccagcctgaccaacatggtgaaacctcgtctctactaaaaataaaaaattagctgggcgtggtagagcatgcctgtagtcccagctactcgggaggctgaggcaggagaatcacttgaacccgggaggcggaggttgcggtgagctgagatcgagccattgcactccagcctgggagacagagcgagactccgtctcaaagaaaaaaaaaaaaaaaaaaaaggaatgaggcgtaaatgaggtctagggaagagttaaagctggagtgctaggaagtggcccaagctcactgggtcgcccaaaagagatggggccacccaaaatgaagggggatgcagagagaagacgggtttgtgtggcgggagaggggccctgcgccgggccaggctggactcagcatcgttggaggaggggctgagagaggagggggtcaaaggatatcttgtgcgaaaggagacagtcaaacattaaggattaagaaggcaatgtgggcagagatgatggggaagggaggaggagcggtcgaatgtcggggaggggtcctttcaaccgggctcaggttgctcctggaggccagggctcatcggaaatcgtcggtgcgggggcggtggggggaaggg

SEQ ID NO: 34862 - DNA, 1672 bp, Artificial sequence
  DNA replication origin
cgtggccggcaggcggcgctgcccggctcggcctcggcctgcacggcggctgcggcggcggtagcggcagcggcggcggcggcggcggcggcggcggcggcggcggcggcggcggcggcagcggcggcggcctgggcccgggcgcagcggcggcggcggcggggcctggagccggatctaagatggcagcggcggcggcggcggtggggccgggcgcgggcggcgcggggtcggcggtcccgggcggcgcggggccctgcgctaccgtgtcggtgttccccggcgcccgcctcctcaccatcggcgacgcgaacggcgagatccagcggcacgcggagcagcaggcgctgcgcctcgaggtgcgcgccggcccggactcggcgggcatcgccctctacagccgtgagtacggggccccggggcaggcgcagggccggggctgctcacgaggccggcccggggcgggggccggcggggaggggccctgagcgcgggggcctggcgtggggtccccgggactgagccggtggcctgcagggagcgaccgtggagggccggtgccaggggacagacagagaaaagagggcgtgcgtggtggccggaggggcaaggtgcccagagtgagcaagggagcgcgaaatggggagtgaagggcctgagatttgggaggggtgggtgagcaggaagtggggggctctgagtggaaggggaatttggaggacgccaggcgtggtgggcttaagcgtgggggagggaggtccggggtgcgggagaggtgggcgtctcgggggcgggcgtggccgcctctgcagggaggagggtggggcgtgggcggcccgggatccctctggggaccccctggatagctcaggacggttggaaagtgtttgctggtctggggcgcccgcgagtaccgagttccaccgctgtgcgaggtgtggcgttcaggacccccgaatgggaaacttcaggatctggggagagggcccatgcggggacggtgggagccgcagggtgagctcctcgtggaaacgtggacgggacgggccccttcctgatgccgggcttcgaagtaagagctaacagcctcctcccatcttcttttgggggatgtgagaagctggttacattttccgaagctgctttcaaaactgacatttcactggggggaaaagaaaatcacaaatgcgtttgccagcaccccccacccccgctcccagtctttgtagttcattcttcttcttgttactccttcttatctcttctctttgattccttgttcacattttgctactctgtgtcatttggctttgtctttcagggcttcttgcactgatgccctggggaacccctcaggaggcctctagctagcttgggtcctgtgtgaattttttgccactttggaaacggcccgattaaaggaaagcccgaggagcagtccgttcacactgggttttccctgcacctcgactttgaaaacgtggactaaaggagttgtgtctgctgtccgagggtgccgtctctttttgctggtgcagagcctgggtcttcttggaccagatgagaggggaaggagggtatttcagcgggggtttcagagttcaaggcagacactcagctcaacagaaccccagatcataagcaaaacctattcactgggcaagcattggta

SEQ ID NO: 34863 - DNA, 1228 bp, Artificial sequence
  DNA replication origin
cagaaacgacgtaagcttcatggcaggaacttgcatgaactgcagggcggcattaccactggagcgagtgagctgcagggaggtcacaggcgaggggacagatcacacaagcctcccatgctgtggcaagaagagatcttttttttttttttttgagacagagtctcactctgtcacccaggctggagtgcagtgatgtgatctcagctcactgcaatcttcccctcccgcattcaagcgattctcctgcttcagcctcctgagtggctgggattacaggcacgtgccaccatgcccggctgatttttatatttttattagggacggagtttcaccgtgttagccaggctggtctcaaactcctgacctcaggtgatccacccgcctcggcctcctaagtgctggaattacaggtgtgagtcactgttatctggccgagaatggatctttaagtgttttcggggtccctctcgccatcatgagtggcgagggcggaagccaggaggctggggtggaggcggccacatggtggggactgtggatgtggagagtggcactggattctggaacgtgctggggaagtagaagagactggctttgtggctagataggtgggggtggggggagtgggaggttaggagcggaggcaggctctagggatttctgcctggactaacgggatggatagagttgccacgtatccacgggaccagcttggcagtgagggcagagggcaagggtgtggatgaagccggagatgcccacccgggagcttgaactggagcctgcagtgctcagggcagagccctgggctctagaggaggcataaggccctgggcttgaaggaggtcatactatgggtgaacgcagacatggaaggggccaagaactgggcctggctgctccccatggctgaaggggtcagagagtcaaagaggaggtgacaggggttgaggaattggcaccaatgaggtgagacacaggccaagggtgtgcagtcctgagtgtttcggggagggggatgaactgacagccagcactgggctcagccaccaggaggcccccggtgtcctggtgagtcaggcaaggtgcttaggaagaggctggggtctcagcacagctcagtcaggatacatgtctgcttgtcctgggagtgcagggcccgggaccctgactgtgccccctacccccaggccccttctggatctgtgccacgttggcctttgtc

SEQ ID NO: 34864 - DNA, 1005 bp, Artificial sequence
  DNA replication origin
ggctcacgcctgtaatcccagtactttgggaggccgaggtgggtggattacctgaggtcaggagttcgagaccagcctggccaacatggtgaaatcccgtctctattaaaaatacaactattagccaggcgtggtggcacacgcctgtaatcccagctactcgggtggctgaggtaggagaattgcttgagctcgggaggcagaggttgcagtgagccgagatcatgccactactccatccagcctggccgacagagcaagactctgtctcaaaaaaaaaaaaaaaaaaaaagagagggaaaggctgagttctttcaggtggggcatggaaagagaagggtggaggtcagcagggaaggagcctctcaggacaagggagaagctcctggcagacttccatccttgaccttggccttgcccccaggtcctggaccggatcaaaggctcactgctgccccggcctggccacaactttgtgcggcaccatctgcggaatcggccggatctgtatggtgagtgaggttgtgcatttggttccttgatggatcactcaacaagtgtggcctgagttgcagatgccagtgtatagctgcggacaaatcagtcactcagacagtgtgacttacctgctgttcagggagacagagacatgaaggactgcagagggtggcgggtagagagcagcagagcagacaggaggagtggccctgcagttctgcagggtgcagcagggcaggcctccctgaggagggtgagggaatgagccttgttggcaacaggaggggtgggggagacctaggaaaagaggcttccagaaacgacgtaagcttcatggcaggaacttgcatgaactgcagggcggcattaccactggagcgagtgagctgcagggaggtcacaggcgaggggacagatcacacaagcctcccatgctgtggcaagaagagatcttttttttttttttttgagacagagtctcactctgtcacccaggctggagtgcag

SEQ ID NO: 34865 - DNA, 2312 bp, Artificial sequence
  DNA replication origin
gaggctggcctgggcgtcgaagggcgcctcgtacaccagcgagcagagccccaggttgacgtagcgcaggcggccacggccccgcagccagagcagcctctgcacgaaggcttcggactcgcggttgcgggtggccggcgccagcagcaggagggtccccgacgcctccagcagcgcctcctcgaaggcaccctcgctgggcgccagcgtgaagcaggccgccgcgccgcccagcagacccacatacacagcggcgcgccccggccgggccctagcctccgccgaagcgtccctgcaggcctcggcgtagtcccggagcagcgcgcgggcccaggaccctgaggggagaggagcgcggtaagagtgatccggccgcggcggccacccaccctgtcgcggcggccacccaccctgccgccttccgccgctactcacccagccgcgcccacactcccggcttcgccactaccgcgtcgcccgcctctgcgcggcgccgggaccaaaatctcctcagagccgccgcggccatcctcttccgtcttgggggtccttgctccgggaagaaactcctgatacccgacgttaagagcccgggagtctcttctgcgcaagcgccaactttaccggaagtggcttcccaacgggagaggatagaaagaggacaggcgccggatgttgctgtcaggtctgagtcggttggagtctgacgggtaggcgagacgcgcaggcgcagagagccccagccacgccggcccaggtggcctcaggtgagggggggcggagcgcacctgtggggacgggacgacgagttcaagcctccgtgggtgcagttggtcgccaggtagggctgggggccgagggaccggctcgggggcgggggggaagtgtgcctgaccggtctctgtcctcagcgagggatgcggagacgcccctgaacgaccatggcatcggccgacgagctgaccttccatggtgagtgcggccccgacgtggccggatctcccactcccgccccgggccagaacctccccccgatacggcttccaatttctctaccccgaagcctaggcggctgtgaaccctgacccaggagtgagacccatctctgactcgaaccccgcccccgccctgaactcagacctcaaacccgagcctctcgtccccagaccctgaccccatcccagcgtcaaccctaagttgcagttccactttaggaggaagggaacagatgtcctccggatgcctccaaactgaggaagttgggccccaccttgggggagatcaatggctcagcagagcctccgcccccagatgagcatcggtttagcttgggcccagtcgagttctttccacccctcaaacgtgcgtgtgtcccatatacctcctccacagaattcgaggaggccactaatcttctggctgacaccccagatgcagccaccaccagcagaagcgatcagctgaccccacaagggcacgtggctgtggccgtgggctcaggtggcagctatggagccgaggatgaggtggaggaggagagtgacaaggccgcggtgagtccctgtgtcctgcctccttgcagcccccagctgacccaggctctccgggcaggcactgaatgcccgcaatgtgcagctcctgcaggagcagcagcagcagcagcagccgggattctggaccttcagctactatcagagcttctttgacgtggacacctcacaggtcaggctggggaggcaggtgggatggggctcagagttatgctcagggttcagccactcttcccctgggcagggtgctggtgatggtgggtgctggtgaacgaactgtggtgctctcaaagggttatggtgggactggttatggatcgggactatgggaacacaggggacacacacaatctggtgggttagagaaaggcctcctgggggaggtgaggaattggctgagacctaaaggagacagaaggcttccctggggaatagggtagggaagcaggagtatatgttccaggcacagggaacagcatatgcagaagaccaaagatggactgggcgcagtggctcctgcctgtaatcccagcacttaagggggccgaggtgggcagataacctgaggagttcaagaccagcctggctaacatggggaaaccccgtctctaccaaaaatacaaaaactgccgggtgcggggtggctcatgcctgtaatcccagcactttgagaggcctgggtgggtggatcacctgaggtcaggagtttgagaccagcctggccaaacatggtgaaaccccgtctctactaaaaatacaaca

SEQ ID NO: 34866 - DNA, 1267 bp, Artificial sequence
  DNA replication origin
tcttcccggagcaaggacccccaagacggaagaggatggccgcggcggctctgaggagattttggtcccggcgccgcgcagaggcgggcgacgcggtagtggcgaagccgggagtgtgggcgcggctgggtgagtagcggcggaaggcggcagggtgggtggccgccgcgacagggtgggtggccgccgcggccggatcactcttaccgcgctcctctcccctcagggtcctgggcccgcgcgctgctccgggactacgccgaggcctgcagggacgcttcggcggaggctagggcccggccggggcgcgccgctgtgtatgtgggtctgctgggcggcgcggcggcctgcttcacgctggcgcccagcgagggtgccttcgaggaggcgctgctggaggcgtcggggaccctcctgctgctggcgccggccacccgcaaccgcgagtccgaagccttcgtgcagaggctgctctggctgcggggccgtggccgcctgcgctacgtcaacctggggctctgctcgctggtgtacgaggcgcccttcgacgcccaggccagcctctaccaggcgcgttgccgctacctgcagccccgctggaccgacttccccggccgggtcctggacgtgggcttcgtgggtcgctggtgggtgctgggggcctggatgcgcgactgcgacatcaacgacgacgaattcctgcacctgccggcgcatttgcgggtggtcgggccccagcagctgcattccgagaccaacgagcggctcttcgatgagaagtacaagcctgtcgtgctcaccgacgatcaggtggaccaggcgctgtgggaggagcaggtcttgcagaaggagaagaaggacaggctcgccctgagccaggcccactcgctggtgcaggcggaggccccgagatgaaaccctgaggcccccgagtcctggcaaactgcttgcctggggtggtgcagttctgagtgtgcctcacctgcagaacagctgagacagatgatgtgcaaagtgttttctcactggatttgcacaagtttggggagcctttctgccccccgtctttgttctttattagctgaagctaattcagagccacctgggtccgggagttggggacagcagaacgacttgacacatgttcatcactggcagagctggtcatgagccttttatataagcctttttcatcgggcctcagaggccctccttaaggaggtaccacattggtcagctgacttgcaaactcttctaaggccactta

SEQ ID NO: 34867 - DNA, 1744 bp, Artificial sequence
  DNA replication origin
agccgccggcgccgtcgacttcccggcgcctcccccgcccctccgcgcggggccgggggcagaatgggcgtctcgcttctcttcacgaaacaaagaagccgccgccgccgccaaacgaggggaagcctcgcgcgcgcgcccgcccgcctcggccaccgcccccccttcacacacacgcgcgccacccgcgcccccgctgcgcgcgcgctcgccggctcccctccccctcagcaccgcggcggcctctccagcttccgccgcctgcccggcctcgtgcgcgcgccagcccgcccttccgctcccggcgcgcgtgcgcgcccgtccctgggcggacgggggtgggcgtggcccggaggaagcacgcgcgtccgatgcaccgccccactcgggccgcgatggccccgcgcctgcgcacgcttcgccttctgcacgcctcgcgtcttgacgccccggagcatgcgcagagcggacgccactgcggcggcggtggcggcggccgcggtgacgatggggcaactggagaatgggatcccggtggccgtggggtccgtggggaaaggaggtccctgaggctcggaaataggaaccctggaccgtaggacgggccgcctggaccaagaccgggcagtggtttcccgcgggccaagggcgcgcctgggaaccgctttgatccctgacctggggcggcgaggcctatttggggaggcaaggcggggcccgaccgtggccgccttctctgcaaaacttcccaagtgccattaattagcttagcaaatatttattgatctgctactgtgtcccagccgccgtggagccctcggtctagtggggaaggaggacaagaagcaagattaataagcaaaatagtgcagtatgagaggccggacttggtggctcacgcctgtaatccagcactttgggaggccgaggcggccggatcacctgaggtcgggagttagaaacgagcctgaccaccatggtgaaacccgtctctattaaaaatacaaaaattagccgggcgcggtagctcatgcctgtaatcccagcacttagggaggcctaggctggtggatcatgaggtcaggagatgagactatcctggctaacacggtgaaaccccgtctttactaaaaatacaaaaaattagccgggcgtggtggcacacgcctgtagtcacagctactcgggaggctgaggcaggagaatcgcttgagcccaggaggtggagattgtagtgagccgagatcgtactattgcactccagcctgggcaacaagagtgaaattccgtctcaaaaaaaataaatagtacagtgtgaggtgaacactgggaggatcatggacattttaaatagggcagccacggaagtcgtcgttgcaaagaacacgtttgaatgcatacaggctggtggtgaaagagagaaaccttcctccgagagtgaaggccctgagcctcttggcctcttctgtgtgttttcttttttgtgtgtttgtttgtttgtttgtttgtttgtttgtttgttttgagacggagtcttactccattgcccaggctggagtgaggtggcacgatctcagctcactgcaacttctgcctcccagattcaagcgattctcctgcctcagcctcccgagtaactgggactacaggcgtccgccaccacgcccggctaatttttgtatttttagttgagacagagtttcaccatgttggccaggctggtttttaactcctgacctcaagt

SEQ ID NO: 34868 - DNA, 1651 bp, Artificial sequence
  DNA replication origin
gcgtgtgtgtgaagggggggcggtggccgaggcgggcgggcgcgcgcgcgaggcttcccctcgtttggcggcggcggcggcttctttgtttcgtgaagagaagcgagacgcccattctgcccccggccccgcgcggaggggcgggggaggcgccgggaagtcgacggcgccggcggctcctggtaaggaacgcgggccgcgggggcagcgcggcgcggggccggggagggcggtttgaatggagccggggcgccgaggggggagggggctgccggcgcgccctgtgcggggccggggtacggcggcgcccgagggtcaagaagcccagccggcagccgcgcgcgtggggaaggccacagtgtcgcgaggccgtggcagcggcggcccccgcggagcggcggggtgggtggggggcccgggccgcgtggaggccgcgcgatcctctccgcgcgcgctctcgccggggtcgccggacaaagctcgcccccctcgcccggcacccctacagtcgccctcccaattacagcggctgcaacaataggcaggcgttggggcttttctggctgcgtggtaacgggtccgacccgaatgttgcgtttttggcgaagctgcgatcggggctcagccaaacctccagatatgtccggcgtcggccggacacgggcattagcggtccccttgggctagccgacctcaaattgtcttaaaaacgtgtcattccagattttcaaggaaaggtaaaggactcccccgatgccttgcagttagtgacttcaaaatgtttgcccgaattggggttggggatggggtcggcggcaagtaggggagcacggaggaaatcctttgctgtgtaaaagcattgcttttcttttgcatccttttttctccttcccaattggtttttcagattaaggcttttattttcaacgtggaccttttgggcgagtgttttgtcccgatcttgaagataccagtcttgattttttttttttttttttttggtcagtgactccttggggaaagtagcaagggaataagcggaaaagccgcttcgcaggaatttgaagcaagttttcagtttggattgataggctgcattcaagcttgattcctggtgctgtcagtcacttagcacactgtcactttagggaagtggcttaacctctctgaacctcttagttttcctcctttgtgaaagctcctttgtgaaagggggtaatctcccaaatggaattggtgaaagcctgtaaaatggttcctcgcaagcgggaagcactattgtaattgtctggtccaatctccctcattgttcagcagataacttcttgaggccctactaagtgttggatggtcgggggttggatcctggagcctctgcagtcttggaggggagcgggtggtaaatgtgggaacaaactctcttggcctatcgtttattgctctgaacctgcactgtgagagggacacagcggacaggcaggggatcggtggtagccagagatcacgggggctgcttggaagagggggcctcaaaatcagggagggtgtgtaggattgtattttgtttttgaggcagagtcttgcctgtcgcccaggctggagttcagagtcccaatctccgctcactgtaacctccgcctcctgggttcaa

SEQ ID NO: 34869 - DNA, 1171 bp, Artificial sequence
  DNA replication origin
gtttttcttcattaccaaaagaaaactttgtagtgatattcccaaatttcacatgcagaaagcaagggagcgggaaacggtggggcaggtgcccgcggggcccagatcatgcgccagcacaggctggggtctgacgagctgaaccttctgttcatggccgtgggccctggggtagggggctgagccaaggcaggacacctccaacaagaaggcttccccccatcctccaagtaaggccctcggtccagaggctgcctgcagccctagtgggcagaggccgcaggtgcgaggcgggcacagggatccctaccttgtgcatctggtgcatgttgtcctgagggtaccctccaggcccctgggtggggatggggtgtcctgctgagggcggccctgggctgggccccatcatgctgtgggcggagcccggcgagggacccgggctagggcccagcatggctccaggggaagggccagggcccggggaaggacctggccgaggagttccgcccaggggtgggtctggagtggacatcttcacgggagctgcagacagtggcctcctgctggaagacagtcctggtcagtctggggttcatgaccaagggcgaggcaggacagggatagcaagggacaatcatacggtcacatcagaatctacatcccacaggaagccagtaccttccccaccagccacccaaaccgtttctccatgatcactctcagaggaagtcctacatctcaggcacacaagatcagtcagtctacccaggaaggggtgggccacgctcacagacaagcactgccccacaggggccttcaggggctcctgccatattcctgatcacggcagagggtgtctcagggggtgctggtctacccttcacactgctctccacttgcttatcttcctaacagaaagaacaggactatagctcaaatagcctctgactggccgggtgcagtggctcacacctgtaatcccagaactttgggaggccaatgcgggcagatcatttgaggtcaggagttcgagaccagtctggccaacaaggcgaaccccatctctactaaaaatacgaaaatcagctggacatggtggcacacgcctgtggtcccagctactccggaggctgaggcaggagaatcgcttgaacttgggagacggagatcg

SEQ ID NO: 34870 - DNA, 1574 bp, Artificial sequence
  DNA replication origin
tgagcagggccttcagtcagcaaggtggagaaggctctttatggtcacaagtctcttttgcatgtccctggatgtggttagaggacatattcccttatacatacagcatctgaaaggaaaggtcatattagcatccatgagaaaaggtgacatttctaagtgtcacgggccacaggaggtcccgggtggtagaagatgaggattgcttgaccacagtctcccatatgctcgtgctccactgggcgacatttattttgtgtacctgtctcgaggcctaagtaggtgtcagaaccttgccttggagtcatgctggggactggggagatgcgcgtcatcttcgggtggctgttctcggtgccctcgagcttctctcgggcagcgcatagctgcgctgccacctcacgttccacatgctgaccctgccttgccatggtccctctcgcagcccatggagtccatgcatgagaagggcatgtcggacgacccgcgctacaaccagatgaaaggaatggggatgcggtcagggggccatgctgggatggggcccccgcccagccccatggaccagcactcccaaggtacagaactgcgttccttcctgccttgtgtttgtcatactccagagtcctcagatcattttcctcccctgggttcccacaggatggattcagggagtacctaggatgatgtagccgggtgggtggcccgccacagagagctgtctggcatggcgtggctggtgctctgttctggccacctcgtctcggagcagccctggaaggggaaatgctggttggggggcagaccatgttcagcatgggtgatagaggagggctgtgcagggcagcagccccgtgccacccaggaacttactggaaatacagattcctggggcctgggactctgctttaatgagcccagcaggtgccttttctgtacgaggacaattgagaagtgatatggtgggtgactttccaaggccttgctgtcatcaggggtgggaagctcaggggctgcactgggaatggaagtgttgggggtgggcctggcgagcccgaggatgtggaccccgcctgtggacaggcaggcggaagccgggagagagccgtgatttcatgcacaggttctcagcattaaccagaagcaccttactgagacgtgggccaaaccaaatccaccaggtcggctgctgggctgaggtgccttcagcatgtgccctccaggtgcccctggttgactcaagagaaggatgccatttggctgtgccctgtctcagagtaggagctggtgtagggggaagaggctgtaaaaatcacagacatatgctgccgagtgaccagtgggctgacctttctctgcaggttacccctcgcccctgggtggctctgagcatgcctctagtccagttccagccagtggcccgtcttcggggccccagatgtcttccgggccaggaggtgccccgctggatggtgctgacccccaggccttggggcagcagaaccggggcccaaccccatttaaccagaaccagctgcaccagctcagagctcagatcatggcctacaagatgc

SEQ ID NO: 34871 - DNA, 1197 bp, Artificial sequence
  DNA replication origin
cttgaagccaggagatgcaggttgcagtgaaccgagattgtgccattgcactccagcgtgggcaacaagagtgaaactccgtctcaaaaaaaaaaaaagagagagaactcaaactgctgtgtgggaaacagaccgcagccagggtgggagcagggaggtgaggaaggaggtgtaggccaagtggcagtggtgggcacagggcactgtttgctagagtgggggagaaagttgagtggcttccccagggggacatgggggacacagggcagtgaccttggcaactgggccccgccctcacctgtactcgcgctcctgcaggatctccacagggtcgaggccccgcggcttctggatgggggtgatgcggctctgcttctggtgcagtggcaccatgggcgcgggctgggccggctgcccgggggactgggtctgcggtggcatcacgggcgaggcggcgggtgggacggcagggggcgcgggggaagggcggcccgttggctgcgggggaatcagcttctgaggggtgctcgtgggggcagcagcattcgccatgggtcctgggagaaggcaaggggccagggcgtcatgttgagctctggggcccatcccgggctggaaatggaaagctgctgagctgcttgaggcactggggacaggcagaccccgcccatctcccacctttcacccaggggtgtccttcacacctgccttgggctccaacctcctccagatctcagcctcaccctcgtccttcacaccctccactggggccagccccaggctcccaaggcctttttgttctgtctgtggctctatggcagcatttcctgtcatctcctcctagtgccaactaaatccagtggaagcaatttgcccctcaatgcccatcgctaaacctcaggctccaagaggatgggtaatgagtcccactgcctctttgagcccaacagatgggagcctgcagcacttactgagcaattacatatacagggctcagggactgggtgaaggccacaagctgtcagaggagggatgaacgacagcctttgggaactgactggctacaggggagacccggggaccaccacaagaaaagtacaggctgcagttcagcctgaccaccctcggccctttctccctgacaaagctcatctcaaggacccaagcttgagatggggagtaagggcacgggtgcac

SEQ ID NO: 34872 - DNA, 1297 bp, Artificial sequence
  DNA replication origin
ggcactcctcaggaccgggcctcaggggacagcaaacaagattcctgatagacgcgcccaggtcatgccttttcagtggtgtgagccaggttctggcgtcaggcgggccaaggttttcatgcagctctggcatggatgaggcgcagggcggtgggaatctatttcaactgcacacctcagcattctcacctcaaaactgaggcaacccctcggagtgaccctagaggcttggtctgaaggttacgaaggttacatgcgaaggttatgtgggctaattctcttaatcagtctttctgcacatactcattgagcaccaactgtatgccagggaccattttaagtgcagggccttagcactaaacaagaacaacaaagcaaggaactctcagtctcattagaaaacacaggccataaaggagatttaaaaaaaataaaatatccactgcaattccagagagtggctggaagtgacaggaagggcctccatgaggagggaaccccagcaatcaggcctgaatgagtagaaggagccatgcacagcctgtgcaaaggtcctggggcaggaacaagtctaacttgttaaataaatgaaaagaggaacagagagactgggatgggtgaggaaggatgctgggcaggagtggacataaggcaaagcttattgggcagataattgaagctacaggcaggttttaatccacggagtagatctgatatcaatcataaaaagagaattcatgccaggtgcggtggctcatgcctgtaatcccagcactttgggagcatctgaggtcaggagctcgagaccagcctgaccaacatggagaaaccctgcctctactaaaataaatacaaaattagccaggtgtggtggcgcatgcctataatcccagctactcaggaggctgaggcagaagaatcgcttgaagccaggagatgcaggttgcagtgaaccgagattgtgccattgcactccagcgtgggcaacaagagtgaaactccgtctcaaaaaaaaaaaaagagagagaactcaaactgctgtgtgggaaacagaccgcagccagggtgggagcagggaggtgaggaaggaggtgtaggccaagtggcagtggtgggcacagggcactgtttgctagagtgggggagaaagttgagtggcttccccagggggacatgggggacacagggcagtgaccttggcaactgggccccgccctcacctgtactcgcgctcctgcaggatctccacagggtcgaggccccgcggcttctggatgggggtgatgcggctctgctt

SEQ ID NO: 34873 - DNA, 1397 bp, Artificial sequence
  DNA replication origin
agggctcgaagctggagtcccagggactactcgtggtttgcccccaagcagctccacgagggaggtgctgtgtccaccatgaacccatctccagccccgctggaagccacagccaaccaggcggcacagccaatagacagaaggacgcatggctgtggtgaaggctggggagagttcctgaagaagcgtggggagcagaggctcagcagccttgcgcttctgctgccttttgccctgcccactctcctagaactctttcctgcccactctcctgcatgaggcgagggaggcagtgcagccgtcctgcaaccatgaggtaaggagcctgagggttggagtcacccaagaatgactgggcagaaacctgggggaggctgggtccctgatggcatcttggagccaccggacctggcccgtagggcctgaccctgtgcttccgctgactcaggaacagtgaaacctccctggagtgatggggacagtcagcgcaccaagggagaagccggaggtgtgcggagcatctgcactgggagggagaagagccaggagcaagggtcaggaggggactgaggggacaggtcccagagacagaggtccaaacggaggcaggacaagcagctcatggcaggaggcagcaattcccagtgagagggccggcacagccggatgcccatacgccgtaaacatttcctagcgcgcgggccctcttctggcctgcaggagctggcgttccacagcatggacgcttgcccaggtggggcgcagtgggaaagactgcaggagcacccacctcacaacctcactgaagtaggggaagaaggtgacctctatcaccctggaaatggaatctgactgcaatctggaggtctgaacacacaaggaactggccccaaggcctgcgctctagtggctcaagatgcttcccggaggtaccggctcactactctgaaactgttgtccacggaagctgagaatgggcgcacacacagggtggaagtgtgagaaggaacctgtggtcctcactcagagccgcagacagtggtatgaactcacgttcagcttaacacagaaacagatgccgaggcagagaaggccttttagacgatacgtgcacaaagcatcagcacgcgcacatgaatctcctagcactgaccactgagagggccccaggagcaatgacaccccagaagcaacaggcccatccaggacccaggtcttggttcccaaaaccattctgtaagaagggaaaccagggctccttggagaaatggctgatttgagggagtgggcgggaaatagactacatgagcctgcagcatctcttggtgccaaaaagcaagaaagtcctcaaaattcacccgatgctgggggcgtgtcaaaggacagaagagccaact

SEQ ID NO: 34874 - DNA, 1517 bp, Artificial sequence
  DNA replication origin
ctaaaggggcctacagcacgctacagcctctagctgtgctctccacacgcttgcggtcccacagctgcctcagggccatcttcctcaccatccactctgcacctggagcatagggtcagagacgccccgagcattccgagattcaccaccatgacctctgccctgctcccctggggcccttgtggctgccccagccttgggttccagggctcccctgctccatgcagatgcagactctcaccaggcacccagcacaggcccagccagctgtagctggtgctcaacacgttccaaccagcaaagccagccgcacctggaaccgtcagcatgggcacagctgggcaaacccaccttttccccggtcatggcaaagggtgcgttaaaccactgctcgaaggtgctgcagctcttgaagatggtgggcagcaggaagttgagcagcgcccagagctcgggaagcttgttctgcagcggtgtgcccgtcagcagcaggcggcggggtgccacatagtgcgtgttgagcacctgcgtcagcttgcagtggtggttcttcatgcggtgaccttcgtccacaatcatgtacttccaacggatctgcgggccccagagtgggcaatcagggcagggggcagcaggtggcccggcacatggggagaatctcccactctgcgcccagcagccaggaaggctccaggtggaagagcgcagctgggtggagagcacaggcctgacgtcctgccccggggctgactcaccgagttggagccacacaacgtagcctcttgcaagccttgggcagagacaggcccgtgaccccatgactattggcaggtgaacaatgcaaattgcaaaaaagcaatctggcttccctgcaaaatcacacatatgaatctacagcacagaaaaatgccgagcacgttctggcagaagacacatcttgctgactgggggacttgtcctgctggtgtggagggtctcaggggaactgggttggtgacggtacatttctaatgagcagcctgtggttcagaatgtgggccccatggggtaggggccagcgccactacatacagggccatgcgggtcgggagggggcgcagtggccgcactcaaagagcactcccactgcagggtgattacatcaactgagccactggcaggggagcacggggtttcagagcctggttcctgtgcctgccaacggcctggctttgtaaggagtcagcaggggtgagccacaaaggaggcacctgaagcatggacctgaggtaagagcctgcacgtgggatacccagctccctgggcctcagtttcctcccttgttggctccgggataaagcacccagtcctcggaaggctgaggcaggagaatcacttgaacccaggaggcagaggttgttgcagtgagctgagatcgctccactgcactccagcctgggtgacagctgtgagactctgtctcaataaaaaaaaaaaagaagagaaaaagaaaagaaaacacccagttcacagcccca

SEQ ID NO: 34875 - DNA, 1113 bp, Artificial sequence
  DNA replication origin
caaaaagggttctgactcccccacacttcactgaagacggtggtgactcttgacgccccgcaacgtgagaaaagccagtgagccaaagagacgcagcaggaccccactgtggggggacacatccccagagaagtctccaaacgctcctgctctctgagggcaagctttcagggccctatattcctatcgcacgttgcgccctaactgctgggattcttcccgtaagcactggtgaagcgaagaccaaatgagagacagatgtacaggcattacctaatgaaaatattcgagtctgtttttaaagagctgtcgaggagaagccagctctgcctaggagctcagcagacagcagggcctgagccgtcccagccgcggcgggctcacctcgatgtgctggaacatgtaggggtggttgcagatcttccgcagctgcatgatggtgttcatcagggtcttggtgccgcctttgccctggaaggcagatgagagggacccaaatggggtcttgccctcctggggtggggtgggcttggtggatgggtgggtgttgggagaagggccatggggacgctctagtggggaagagtggcttttggcacagcaattgggagtgaggagatggcaggctggaggcccggaggcccccaacaagccctgggaaacaaatgactgcctggcacagcagagggcagatggcagggacagggccagcaggacgggacggaaacaagactggcaaagggctgaggcagagtccccgatgctttgtgatgccagctttgttctgggcactgttactgtgggggtccctagagggtctcagctgggcaagagggcctcagccgggtgagccatgactcagggctccctgggctccaggatgaggaaggaggtgggggcggggcggggggtgcatgctctgggctgggaatggactagggaacacactgctgctcagctcaggggagaaggggcacagacacaacgtctcggggaagccaggccgaggtcaaggccttgggggcagaatcaaggggtctggtgcatttcctgggaggataatttcactgctggtgaggagagccaggcaggtggggcctggggcctgggatt

SEQ ID NO: 34876 - DNA, 2742 bp, Artificial sequence
  DNA replication origin
ctgacagggcaggagggctgagcggcagacacaaggcactcctggtccccaccagctgtggcctctgccaccccatgggtgccagtcttaagtttcagagcatcactggtactcaccctggtcctgcagctcctgggcccagagacaggatttcgtgttagcctcctcgtactgtgctggggtgatgataaaactaacaacccaggctggacgcagtggctcacacccgaaatcccaacattttgggaggccgaggtgggtggatcaactgaggtcaggagttcgagaccagcctggccaacatggcgaaaccctgtctctactaaaaatacaaaaattagccaggcatggtggtgcatgcctgtagccccagctactcaggaagctgaggcagaaaaatcgcttgaacttcgggaggcagaggttgcagtgagctgagatcgcaccactgcactccagcctgggcgacagagcgagactttgtctcaaaaaaaaaaaaaaagaaaaaaagcccatccacggcacctgcattgttgggagctaactgcaccagtcactgggccacactcctggtgcttattcactcattcgaggtatgcagtagccacgggttgggccccatgtaggctgagggagttttgaggctcacagaggtgagacctggttccggttctgtgtgcactgtgagagtggcagggcccacagccaaaccaagcactgccacaacacggccgagcttcggccccctgttgtaaatggtgctcgactgtgtaggtccacgctgtggggagctgtgccgctgccacgggagctgcttgagaatataatcccctggggggttggtgctttcttcccgaatatctgtggggtcccaataaggtagaaggtggcacttctggaggaacgtgatgagagtccccttcccccgagggacacatggcggcccaggctccaccagctctgttttcatgcggcggcaggtcaggctgggcagaattgtcaggccgagggtggcacgcacagcacacctctccagctagtgtcagaggccaccttcccttttatgacctcctgggctcctttgggactgactggcacctcttcccccaggacctgcaagcgcaggaccgagcccaccgcatcgggcagcagaacgaggtgcgtgtgctccgcctctgcaccgtcaacagcgtggaggagaagatcctagctgcagccaagtacaagctcaacgtggaccagaaggtgatccaggccggcatgttcgaccagaagtcctccagccatgagcggcgcgccttcctgcaggccatcctggagcacgaggagcaggatgaggtgagcccagcaccggccccgacccctccccagcgtgaatggtggacgcgtgagcggctttcatttttgtttttttaccttttttgcactcttattttttttgcatccctttggagtaaagggagtgtgggctgaacggaaagaggatgagtacttgctttttctttgaagtggtttttttttctaaactgctggtgaaagacgccggattgacagccctggagactgaagtcctctatttatccacagagcagacactgcagcacgggcagcggcagtgccagcttcgcccacactgcccctccgccagcgggcgtcaaccccgacttggaggagccacctctaaaggtgagaggggtagttcagtctccatgcccattcaatcctcggcttctcggctgagacggccagcaagggccctggtcccacggagcgtgcgtgtgcgtgtgcgtgtgtgtgcctttcgctgccgtgtgggtccccatccaccgcagccgtgccgggaccaccagctcattcccacggacgccgccgctcgcctctgagctcggccgccgcccaccccggcccctcctcagcggcactgacagtttgcaatcttataggaggaagacgaggtgcccgacgacgagaccgtcaaccagatgatcgcccggcacgaggaggagtttgatctgttcatggtaagcgctgcaggctggatggggcagttcaggcatcccactctgctgccaccaggagcaaagcagacgtcctagtgcccatggtggtatccctagcaggtcagggagccagggacagctcacagtgcagcccactcccacctccagactgacccgtcttccacccccagtctcctgaggatggcatcggagggcgagatgcacacccagccttctgcatgtgacccgagacctgccccaccagctctgttttctaacgggctctccagggcttcatgcactccctttcagagggagttcgccctatccaaggccaagggactgaccaggccttcagtcgcagagcccccttgcccctgggtgggaaacaggaaataagccacccaagcaggggccccttggcccgcaggcctcatgcctccaccaacgctgggccacgcagctgctgcccccctgctggggtctgcagccctcttgtgcaaccttccatcttttcgagtttcctctgcctcctgaggcagagcctctagtcagggtctgacggagccaggccaggtcagccactgaaaaatcgagagctactgtttaactctcgcagcagcgtggagccccacgggcagagaaaggcccttctgaactctcggtgttctggctctagcgtgcccctggtgcctgcatgctgatgcctctcccgttgcctccctgcccaccagcgcatgga

SEQ ID NO: 34877 - DNA, 1376 bp, Artificial sequence
  DNA replication origin
cgcagcagcgtggagccccacgggcagagaaaggcccttctgaactctcggtgttctggctctagcgtgcccctggtgcctgcatgctgatgcctctcccgttgcctccctgcccaccagcgcatggacctggaccgcaggcgcgaggaggcccgcaaccccaagcggaagccgcgcctcatggaggaggacgagctcccctcgtggatcatcaaggacgacgcggaggtggagcggctgacctgtgaggaggaggaggagaagatgttcggccgtggctcccgccaccgcaaggaggtggactacagcgactcactgacggagaagcagtggctcaaggtacatgctggagaggcccagcagctgccgcaggccagcgccaggcagggctggggagacaaagggcccaccgccaggactcaggcctgggtccaaaatgctttccttgggccactcctggccaggctccgcaggcagccgagagccttccgatgtgggccagggatggtcaggtccttttggctctgccttggaatgcaagaaggacccacggttcctgagcagctcaaaacctgctgctggttatggttggtctttcaagtaaaagggtttacctcttcccgaggttaaaaatcatgttgctgatctcagtggactgctggctttcccagtacctgccaggagggaggcacaagggtgaatcatggactattgaggcgccctgcaaagcgttgcactgctggctgcaggcagcctcactttgggcaagtccccccccatgagctggggagactcagtcatggggagggaggagagggcaagcccccaagggcctctgaacctggcaggtgctgcacggggctggcagttgcttgtggagctgacgtgagggcccgttctcagcagatggcagctggccctgcaacagcagctgcagatgtctttgagtcagtcgtgcggtgctcctggggcttcacccgacccaactttcccagcccaaggcacactgtgacagatgcctggcactgatgtcctcactggggttacggtgacagatcagaccccttcccagctcaggggctctgagttatagagacgatgattcagaatccatccctgaagttgtgtcataaaaatgtcctgaagcaataattccgagaaggcaggtggcagcttttggctatgccatgcaaagtgccacacccaggaaagagccatgtggcctagcccatgtggccaaacagccccggttccctcctgggacctcagcagcccagactcatgagcttgcctgccaagctgtgcaccagagggcgctgttgaaacacaccaggagcccaggtgacagacaggccatcctgttccccagccagcct

SEQ ID NO: 34878 - DNA, 1238 bp, Artificial sequence
  DNA replication origin
tagagaaggacgtcatgctcctgtgccagaacgcacagaccttcaacctggagggctccctggtgagggcaccgctgggggttggggatgggccactcccacagctgggctttgacccaacccgcccctccttcccttctgaattgatgggttaaaaacaagtcccgctagctgtggtggttcgtgcctgtaatcccagcactttgggaggccaaggcgggaggatcacttgagaccaggagttcacgaccagcctgggcaacataacaagaccctgtctttaaaaaaaaaaaagaaaaaattaaaaatttccaacttgggatattttagcaattacaaaagcagtatgtatttaccgaagaaaataaagataggcacaacagaagaaatagactcagagtcctctgtctgttggaattttattttaaattccctggggcacattctcttcaaaggaatcctgtgggtttgttctttcctgtgatagaattgacacatacacagcctcaacttggcaaactttcttaagtgtctttgggattgattcctctcagaaaaaagacttgactttgatgagtttgggaaagatgctggcttcaacaaggggcatgtatttccaatgttattgcagacctcagagattgtgcagaaggagggaggcacctgcagctattcccaaaccagtgtgcctgacctttcaccctggagcatttcagaagtctgatgctcgggcccctatggaggaagattatggagagggccttccaccctgggtgggctgaagccccgacccgctgaggctcgcattggccactgatcagctgtccaggggcaacacagggctggggctggggctggggccagggccgggcaggcagccctccagtcgggcccatccactcaagcccctggtgtctctgcccagatctatgaagactccatcgtcttgcagtcggtcttcaccagcgtgcggcagaaaatcgagaaggaggatgacagtgaaggcgaggagagtgaggaggaggaagagggcgaggaggaaggctccgaatccgaatgtgagtcccgggggggttcaggacgccggggttcacgctggcccgagagcccccaaggccccagcttttcacagccctcccggctcccagacgccccttgctgtgggggtgctgcattcccagagctcaaggctgtctttccctcccggtcccctccagctcggtccgtcaaagtgaaga

SEQ ID NO: 34879 - DNA, 1116 bp, Artificial sequence
  DNA replication origin
cccagagctcaaggctgtctttccctcccggtcccctccagctcggtccgtcaaagtgaagatcaagcttggccggaaggagaaggcacaggaccggctgaagggcggccggcggcggccgagccgagggtcccgagccaagccggtcgtgagtgacgatgacagtgaggaggaacaagaggaggtgaggccgggcccccgagcaggcagagctggcatgtggcaggaggcatcccggggccctgatgggacagccctgtggggcggtgctcccacgcccccacgctgcaggtgggaaagctgaggcttgacctgccatggctgaccccaggtcacacagccagtatgtggcagggctgccactcaaagccaagcctgtgtgaccccggaaccagctctcagtacccgtgggtgtctggggactgggggacacgtgagtcctcaggacaggcagcaggcggtcccagggcaccagggctcctgggctgaggccgggcaggccagggcttgattagggttgggtaggaggtgctaggattggggacccaccagacagtgccccgtctcctcagtggcatagagaatgggcagaaacgccaagaccacagtggatagtttttggggtgcagtggggagccggagaagatccacttgctggctttaaataatctcacctctgtctctggcccttcctggctgtgggacctggcaggtcactttgcttctcaagcttcagtttcctcttatgcaaagcaaggaggctgcatggattagggggctgcccccaccgaagggcctggctcccgctgaagcccagcgaatgccattttgtcatcacagaagcagcaaatttcagtgcctgggaattagtctgacgaaagacgcacgtgacgtttgaggacattcatgaagtcctcatgtggaggggaggcccctgtgtcaggcaggagggtctgggctgtgatgctgtctctcttgcctaatccagagcagggtgttttatggcccatgccaggctgtttaaaaaggttttatgaggccaggtccagtggctcacacctgtaatcccagcactttgggaaactgaggcaggaggctcacttgagcctgggaggt

SEQ ID NO: 34880 - DNA, 1050 bp, Artificial sequence
  DNA replication origin
gaggagaagccggtgtggtggctcacgcctgtaatcccaacgcttctggaggccgaggtggggcagattgcttgaggtcaggagttcaagaccagctcagccaacatggtgaaaccctatctttactaaacacacaaaaactagccaggcgtggtggtgcgtgcttgtaatcccagctactcaggaggctaagagaatcgtttgaacccaggaggtggtggttgccttgagctgagatcgcaccactacactccagcctgggcgacagagcgagactccgtctcaaaaaaaaaagagagagaaacaaaggaagaaagaaggaaggaagggagggagggaggaaggaaggagagagagaaaggaaatgaaggaagaaagaaaagaaaagagaaatgagtactgtaagcctgtggcccgccagaccctccttcatggagccacaccccagtggaggccactgtgtcagtttttctgtagacgggtggcagagccagggctttaatctgagctgagtgtgttcagagcttgtgctcttaatcctgacccacaaatgaacgctgtggggtggtggggggtgacgctctgtggctctgtgggaggcccagggaggaggtgtcatttgtcccagacttgagcccccaggggataaaggtgtggagactgtgagccaggcaggggaaacagcaaggctggcatggaggagaccaagggggatggcaggagggcaggggtccttgatcacgccaggcctgcagtccacagggcaatgtggggaggattttccaattccaagacaagccccagctctgggagaagggaacctgacatggccccttgacacagtggccccgcctgtctaggtggctgatgtcactatttactcccaagctccccgctccccatcccaggaacagccccagagcagcccagcccaggggagggacggctccggatggagcagaaagttgccaggaaaccccagcggccatgctcagtggggtgatggggaccagggactcccactcagaaccctccgtggcttttttattc

SEQ ID NO: 34881 - DNA, 2195 bp, Artificial sequence
  DNA replication origin
atcaccctgcccctagggagggcttgggggcttcactgctgaagttcagactccagggtggtccttgtcctgtgtgcctcagtttccccatctgtaaaatggatggtcctggggctgagcctcagtgctgcagggactagtgtggaaccctgtgtcctggtgcctgaaaccttactcccacctcagcagggctgggctgagccatcagcaagcctctggccggcctccatcattcaggaaagagccggtggctgaaggcacagctctcagagggagaacaaacgggggcgggggtgggatgggggcggggccggaggccaccggcctcaggctgtcctgggcatccagccagtgctgggcagtgagtcaggggccaggcatgtggagtggggcctctcccagccccggagatcaggcacctcccggaacccgcctgctgggcccccaccaggccgcgttcctctcccactcgctctccccatagaggggaccctggacctgcctgggggggacgaggatggggatgtggctggtgggcacagggcctctctgagccccggcacaggccgcctgatgggaccgtctcttccttggggaaactgaggcccaggttgctggggtggaggggatgtggagtgacagggcagggcaatggctcctcggccccctccgggaacaaagccaggtcattcctgtggggagggagcgccaaccccagggttggggggggcacgggccctgggtcaggggtacagataagcctgggctcccagaacccttgtcacagcggcacccctgccccatgcctgctttctctccagggcactcagagctgcagtttgcaggacgagagggagacgtgcccaatccccccatcccaggacgctcagccgtgcgtgggctgggcccactccactcccggcgcccacagttgccccagtgaaccggccagtggaggcatcctgtcccgtgtgcgggaaaggaatgaccgccaaggtgacagcagcgcttagccaaccctggcgctgacacctgacttgcaaactgctccctgcctgaggcttcaaggcaggcgagaggctttgtgtgtgtgacttcctccccgaagggacactggcaacagctggagacatttcctgttgttaaggctgagggggagctgctggcatttggtgggtggaggccagggatgacgttaactgttctactacgcccaggacagcccccaacacacacaacagcctggcccaatgtcacgagagctgaggtggaacagccctgttctgcttcaggtcttcaggtctttgggggtcaaggatgcaaatagaggactctgctcccaattcagctcacataaaagaaccggccgggcgctgtcgctcatgcctataatcccagcgctttgggaggccgaagtgggaggatcgcttgagcccaggagtttgagaccagcctgggtaacatagcaagatcccatttctacgaaagtacaaaaattacctgggcacggtggcatgcacctgtagtcccagcggcttgggaggctgaggtgggaagtttgcttgagcccaggaggttgaggctgcagtgagccgagatcatgccagtgcactccagcctcggcgacagagttagactctatctcaaaaaagaaaaaagagagaaaacccaccaacttggaaaattaaaacagccccaagggcatctaggaacagttaactgcacatctaaacccaggcccgccgttcttagaagctctgcaagctgcatggactgactcctgacatttcagggctagactcaaaaatccctttaaaaaaattttgtttctgagacggagtttcactcttgtccaagctggagtggaatggcacgatctcggctcactgcaacctccacctcctgggttcaagtaagtctcctgccacagcctccagagtagctgggattacaggtgcccgccaccatgcctggctaacttgtatttttagtagagatggggtttcaccatgttggccagactggtcttgaactcctgatgtcaggtgacccacctgccttggcctcccaatgttgctggtactacagacatgagccaccatgcctggtctcttcttttttttttttttttttttttttgagacagtctcgctctgtcgcccaggctggagtgcagtggctcgatctcggctcac

SEQ ID NO: 34882 - DNA, 1397 bp, Artificial sequence
  DNA replication origin
cgttagaaccccaccctgcacagagcaagcgctcgacctatggagaaataaacagccgctttctctcccgcgcaggcgcatcgggaaggataacggagcctcccccttcctgcgccgattggtcatcaccgatgactgacggaggagtggtcgcaggcgcaccaggccagaccaaaggcggcttagcccagtctaagatcctgttccccatgcctattggccattgcttatgactgacgtatcaaaaaatccaatggaaagcaacctcttctggaagagggcgggccccgcggacagtcaaatttgcgcgggttggagcctggcgtagtcatggccgccttccgcgacatagaggaggtgagccaggggctgctcagcctgctgggcgccaaccgcgcggaggcgcagcagcgacggctgctggggcgccacgagcaggtggtggagcggctgctggaaacgcaagacggtgccgagaagcagctgcgaggtgagggtcggagcgtggtcgcgggcccacgggggaaggggcccgggtgctgggagggggcgaccaggcccacctcaaaaccccttctctcctggactctcccatctcctgccctatgccccctgggacggccccctctgagccttagtttcaccatctgagaaatcggctttatgacagcaaccatcccccaccccccaggggtttagtggtaaatataggagtctggaggggttggccccttctgagctctccgtgagcaggagctgggggtctcagggtttgaactggggctcaggagtcaaagctccgggtttgaatcctagcacccatccccatgtccgctgtgagacttgaggtgagtttcttaaattctctgtgcctcagcttccttccttgtcaaatggttgtgacaatagcccatcccttcttcctgaaggcattcagatgttttatggagcatctgctgctgccaggccctgggctcaccgcaacctccacctcccgggttcaagctattctcctgcctcagcctcctgagtagctgggattacaggcgcttgccaccgcactcggctaatttttgtatttttggtagagacggggggtcaccacgttggccaggctggtctcaaactcctgacctcaggtaatctgcctgcctcagcctcccaaagtactgggactgcagacgtgagccactgtgtccggcccatcttcactatctgtaactgcacagttcagtggccttaagcacattcacactgctgtgcaaccatcagcaccatcatccatctccagaactttctcatctttccaaactgaagctctgtccccatgaaacactcactccccatccccttctcagaccctggcacccaccagggttctactttctgtctcaaat

SEQ ID NO: 34883 - DNA, 881 bp, Artificial sequence
  DNA replication origin
atggcgccagttcggagtctggccctgaaggactctcacagcacctccgctgtcctcccctccaggcgggcccccggcaggcgtgcgatctatcatgaaacggaaagaggaggttgcagaccccacggcccaccggaggagcctccagttcgtgggggtcaacggcgggtgagaggagaagaccccaccccccaccccatacttcccgcccctcctccattcatccacgcacgagagcctcctaattacctcattctgagctccttgctttggttaattcgtttaatcaaaccacaacacagagatgaggaaactgaggcataggaaggctaagcgcatttctggagctcactcagtgacccaggagtcagccctgcgtgccctggctcaagagctcaaggtgtaaccactgcacagctctaccccacagaaggtgccggacgccgcttcctgccctgatagagctcctggtccagtggggagctgggtgctgatgggtggttggagccgtgatggggaacactcaggtggtgcaggtcctcaagaaagacacaggtggccctaggggagtcccagaaggaggagacacaggtggtacgggagaagtaggagctagcaaggtgaagagagggtgtggggagggctcttctggcaggggcacagcgtgggtaaaggctcagaggtgggaaagcagagtgacacgagaagtgggaggtgcagggagtgatggttggtttggggccttgaatgccgagcctagaagcttgattaggttttgtccagagccagcaagaaacacgagagagccctatttgcagtggaacaggagtctgaatcacctgtgttaaaagggctagaagtggccgggcgcggtggctcac

SEQ ID NO: 34884 - DNA, 1896 bp, Artificial sequence
  DNA replication origin
aagctgcggcagctggaggagcaggtgaagctgatccctgtgctccaggtgaagctctcggtgctccaggaggaaaagcggcagctcacagtacaacttaagagccagaagttcctgggccaccccacagcgggccggggtcgcagcgagctctgcctggacctccccgatcccccagaggacccagtggcactggagacccggagtgtgggcacctgggttcgagaacgggacttgggcatgcctgatggggaggctgccctcgccgccaaggtcgctgtgctggagacccagctcaagaaggcgctgcaggagctgcaggcagctcaggcccggcaggctgacccccagccccaggcctggccaccgccggacagcccggtccgcgtggatacagtccgggtggtagaagggccacgggaggtggaggtggtggccagcacagccgctggcgcccccgcacagcgggcccagagcctggagccttacggcacagggctgagggccctggcaatgcctggtaggcctgagagcccacctgtgttccgcagccaggaggtggtggagacaatgtgcccagtgcccgctgcagctaccagcaacgtccatatggtgaagaagattagcatcacagagcgaagctgcgatggagcagcaggtaagcggtcgcaggcaggcaggggagaatggcttggggggggggggcctctttcttcccatggctcatcctggactctcagaacgccagggtccaggcagggtgcggtggcgcatgcctgtaatcccagcactttgggaggccgaggcgggcagatcacttgaggtcaggagttggagaccagcctggccaacatggtgaaacccatctctactaaaaatacaaaaattagccaggtgtggtggcgtgcgcctgtaaacctcagctacccaggaggctgaggcaggagaatcgcttgaactagggaagcggaggttgcagtgagctgagattacaccactgcactccagcctgggcaacagagggagactctgtctcaaaaaaaaaaaaaaaaaaaaagaatgccaaggtccagccccagcccccgaccttccaccagacacatcagtccaactcttagagtctctgtcttatcatccacaaaaggaggagaattgtgcagccaaccctcagggctgtagcaaccatgcagagaaattaggtgactgccactttgtcagtatccagaaagtgggaggtatttgggggaaagttccccaaggctgttggtttaccaggcagaaacctccctgtttattcagtaagtggcaggaatcaatctcggagctgttcaagcagtgaaaaggaaatgtgttattacgtaactgatgacagcttcaggcatggctggatccaggtgcacaaatatcttgttcttgttgtcgttattaagagatagagtctcgctccattgcccaggctggagtgcagttggtgtaatcatggctcactgcagccttgacttcctaggctcaagcaatcctcccgccttagcctcccaagtagctgggtctacaggcatgcaccactgtgcctcgttaattttttttattttttgtagagacaaagtcttgttatgttgcccaggctggtctcaaacttctgggctcaaatgatgctcctgtcttggcctcccagagtgctgggattacaagcatgagccaccacgctggcctcagtgctcagatatcatcaggaatctaacttggtgcctttctcttcttgttttccctgggagcttctctttcaggcaggcaagggaaagtgacctcactgctccaggcatctgtctgtccagtttagtggagagggagatccttaatccaaagagcaccagtaaaaatcccagagggggccct

SEQ ID NO: 34885 - DNA, 1348 bp, Artificial sequence
  DNA replication origin
gttgtactgtgagctgccgcttttcctcctggagcaccgagagcttcacctggagcacagggatcagcttcacctgctcctccagctgccgcagcttccgcagggcacccgccatctgctcccgcacgtgggccaggtgcccggcactgggaggcaccggtgtggacagtcctgaactccgtggtgtcgggggtggcaaccccacgcccaccagggaggctgtcgagccggccgcactgggggtcagggagcccaggccggtgggtgtggccgcctggtcctcgagacggcgacgggcatccagcagcgtgcgctccacccgcggattgaagccaccgcgggtctccagagcaccatactgagggtagaagccacggccgcagtaggaataggctgagtggcggctgtccccactggcattggagcacagcgactcagtggacgtccaccaggagccagggccacggggcagcgagctcaggcgggggcggcgctgcactgccacgcgtcgcagcgtgtggcccttctcgatgtcatccacgtacttgaggaagtccaggtccaggcggtagccatagggggtctccacggagtagggtggatcggggtccttggcagggaaggcaggtggggaggctgggccaggggtccctggggatgggagaaacaccaggacctttgaatcctcttgtccccattctcagggtgaagactgatgcctggggagagttggggtttatttgccgaagagatgggagcccacctggtactcaaccgcgtctgctctcagaccctccagagcagggctatgcctccccttcagactcccggcgctaggctatgtcgcctctcaaatcccccaggacagggctctatccctcggcttagactaccccctttttccggtaagactctgcctcccccttcagaccctcccagggcaggactctgcctcctccctcagacctctaattgttgggctgtgtcccaccctcaaagtccccagggcaaggtccccagccccctcaggcctccagaactgaagctccccggggcagggccctcttccctgagtcccctgacctgggaagggagcaggcacgtgcaggacctgggccatcttcttttctacagatgctccttggaagtcacttgagggactgcgagtcagactgcctgcagcaccggctgaggcttacctggggaaagagaaccacggcgccgggagttaggagtctgtagggggaggggaggagatgaggccagccccctccacagctggttcacccagccccccaacccaggtctgggacccactcatagacgcacacccagcctggctgcggaa

SEQ ID NO: 34886 - DNA, 1041 bp, Artificial sequence
  DNA replication origin
accccctccacacacacctactaccctaccccccgcctccaaccctgggacacgacctcgctggtctcaacgagccgctgcctccaactccaccttctgtgcccaaactttccagacttggagtgtctgtccccgcgtccctgccccctcctcgtctttgaccccatacccccatcgattcctcccagtaccccccatcgattcctcgtgccctgcccgtttctcctgtcttggctcccctctgcccgctctcccctgtctctgtcccactttctgcctctgttcctccccggctctgccctctccccgcactgtcccccctcgccctcctccgcggccatgccccagacggcgggaaggcggccgggcgtccggccgggctgggcctgggcttggcggctgggccggcgtggggagcggcagctgtttgccattagcccgggatcccacaggccccgccccctctctgcacggggcggggtccttctcgcctccccccaccccgagtttggggcgggaagacccccccccaccaccaccaccgacctccgcgatgtgcaggccggtcttgggtggtgggttggggagacccgcgccccttccctgcgctccctacctgtcccctcttataggctccagtctctccatctctgtcttatcctgtcaccccttccccattccccaggggtcccatggcgagagaagggtctcagccacagacatccatctcccccaccacaccccctcgtctcctttctcttccccttactcgggacgtgctggtcctcatcgagggcggtgagatgactgagtaccctcagacctcagtctccgtatctgggaaacgggtagagatatctgatgtggagtctgagggtggtggcttggtgggcagtggggggatccaccaggcttaggttcatgttcaggcccagccacttccccatggccccagtgaccccgaggaagccactgtacctttctgtaccctctgcatcccctgtctgtgaaacggggcgataagtgcccatctcatagaat

SEQ ID NO: 34887 - DNA, 955 bp, Artificial sequence
  DNA replication origin
tctctacccgtttcccagatacggagactgaggtctgagggtactcagtcatctcaccgccctcgatgaggaccagcacgtcccgagtaaggggaagagaaaggagacgagggggtgtggtgggggagatggatgtctgtggctgagacccttctctcgccatgggacccctggggaatggggaaggggtgacaggataagacagagatggagagactggagcctataagaggggacaggtagggagcgcagggaaggggcgcgggtctccccaacccaccacccaagaccggcctgcacatcgcggaggtcggtggtggtggtgggggggggtcttcccgccccaaactcggggtggggggaggcgagaaggaccccgccccgtgcagagagggggcggggcctgtgggatcccgggctaatggcaaacagctgccgctccccacgccggcccagccgccaagcccaggcccagcccggccggacgcccggccgccttcccgccgtctggggcatggccgcggaggagggcgaggggggacagtgcggggagagggcagagccggggaggaacagaggcagaaagtgggacagagacaggggagagcgggcagaggggagccaagacaggagaaacgggcagggcacgaggaatcgatggggggtactgggaggaatcgatgggggtatggggtcaaagacgaggagggggcagggacgcggggacagacactccaagtctggaaagtttgggcacagaaggtggagttggaggcagcggctcgttgagaccagcgaggtcgtgtcccagggttggaggcggggggtagggtagtaggtgtgtgtggagggggtgcacactcgatccccgaaccagacttgaacccctacccagccccgggtcccactcgccttgcgcgctccggccgctgccttccctgggtcccgccgcccg

SEQ ID NO: 34888 - DNA, 3435 bp, Artificial sequence
  DNA replication origin
tcccagcattttgggaggcctaggcaggtgaatcacttgagttcaggagttcgagaccagcatagccaacacagtgaaaccctgtctctaccaaaaatacaaaaattagtagggcgtggtggcatatgcctgcagtcccagctactcgggaggctgaggcaggagaattgcctgaactcgggagatggaggttgcagtgagctgagatcatgccactgcactccagcctgggcgacagagtgagacccccatctcaaaaaaaataaagaacgcaagggccatgtcggcaggttgagcagactctgatgtggggtctggggtctgagactcccggctccaccctcccgcccctgtccctgcagaactttgcccgtgtgaagatgcaggtcaccatgtctctctcgtccctggtggggacgacgcagaacttcagtgaagagcacctgcgacgttcactcaaaaccatcctcacctatgctgaggaggacatggggctgcgggacagcaccttcgcagagcaggtgacacctgctgggtccccgccccgcctccccttcatataactcccaaccccaccaccttggctcccttcacttcctaatgctctcattggcccctggacgttccccggctccaggtccaggacctgatgttcaacctgcacatgatcctgacggacacggtgaagatgaaggaacaccaggaggaccctgagatgctcatcgacctcatgtacaggtgaggtgggccagctggcaccttcagccacgcccacgccccaacaggtgcagggagaacagggatgagagtagatgtctaaggaggtgaggagggagcaggggagcatacagtccctaacagaggcaagtgagggggacaggtgagcagacagctgagcagacaggtgagggggacaggtgagcagacagctgagcagacaggtgagggggacaggggagcagacaggtaagggggataggggagcagacaggtgagggggacaggtgagcagacatgagggcacaagtaaggagagaacagatgagcaaacaggtaaagaggatgccaggagaatgtactgatgaggatgacagatgagagccaggacaggtgagggggacaggtgaggtgcttacaggtgaagggaaatgagatccagagagtagacccattgaggagtgtaggagaggcggacgggtgatggagatgggggaggtggggcatatgggagggataggtggatagacaagtgagatggtgcacaaggaaggggaaatagtgagttcaggtgactcaagtttccacaggtagagtcaactcaagagcggagggtcaagtgagaaatgaaaaggtggggcaggggggtgaagggatagacaggtgaggggttggataagcgaggagacaggtgaatagaggaagcggggagatgctgcataggtgaggagacaggtgagtaggatggatgggtgaggagacaggtaagtgggaagacaggaaaagggttggacaggcaggtgagtgggtgaagaaatggacaggtgaggacacaagtgagggggtggacatgtgaggacacaggtgacaggatagacaggtgaggggatggacaggtcaggaggtaaagaagtcaggaggtgaacaggtgaggagacaggtgaagggatggactggtgaagagatggccagatgagaagatgaacaggtgaggaggtggacagataaggagacagctgaagggatggccaggtgaggtgaacaggtgagggggtggacaggtgaagagacagtgaaaggatggacaggtgaggggtagataggtaaaggggtggacagatgaggggatagacaggcgaaggaatggacaggtgagagggtgaacaggtgaggggacagacaggtgaagggatggacaggtgaagggatggacaggtgaggggatgcacaggtgagggggtggacaggtaaggggatgggcaggtgaagggatggacaggtgagggggtggacaggtgaggggatagacaggtgagggggtggacaggtgaaggggtgaacaggcaaggagacaggtgaaggggtgaacaggcaaggagacaggtgaagggatggactggtgaagagatggccagatgagaagatgaacaagtgaggaggtggacagataaggagacaggtgaagggatggccaagtgagatgaacaggtgaggggtggacaggtgaagagacagtgaggggatgaacaggtgaggggtggacaggtgaagagacagtgaggggatggacaggtgaggggtggacagatgaggggacaaacagctgaagggatggacaggtgagagggtgggcaggtgaggggtggacaggtgagagagtggacaggtaaggggatagacaggtgagaggtggacaggtgagaaggtgggcaggtgaggggatagacaagtgaagggatggacaggtgagagggtggacaggtgagacggtggacaggtgagaaggtgggcaggtgagggatgggcaggtgagagggtggacaggtgagggcgggcaggtgagagggtggacaggtaaggggatagacaggtgagaaggtggacagttgagggggtggacaggtgagggggtggacaggtgaggggatagacaggtgaagggatggacaggtgagggggtggacaggtgagagggtgggcaggtgaggggatagacaagtgaagggatggacaggtgagagggtggacagtgagggggtggacaggtgagggggtggacaggtgaggggatagacaggtgaagggatggacaggtgaggggatagacaagtgaagggatggacaggtgaggggctggacaggtgaggggatagacaggtgaagggatggacaggtgagagggtggacaggtgaggggatagacaagtgaagggatggacaggtgagggggtggacaggtgaggggatagacaggtgaagggatggacaggtgagagggtggacaggtgaggggatagacaagtgaagggacggacaggtgagggggtggacaggtgaggggatagacaggtgagtaggatacacgtgaggagactggctggtcagtgggagacagcaggacaagtgaggaggaagatgactacaggaatacgtaaggtaggcaggggaggagacaggtgaagacagatgactggccagcaggtaagaaaataggcgaaggggaagacaggtggggagatagatgagggatggccaggtgagggaatgagtgaggggatggggtacaggtgaggagattggctggtccttggggcggacatgggggtaaccagtgaagagaatggacaagtgggaggcaggtggggaggaccaggtgagtcccctcctcacatcccccctcacctggactccagaattgcccggggctaccagggctca

SEQ ID NO: 34889 - DNA, 1015 bp, Artificial sequence
  DNA replication origin
aatgctctttccccagacattgcatggaatgatcccttactttcttcaagtctccccttaaaagctacacaagggtaaggatttgggtctgttttgtttattgttatattgctacacccagcacagggctgtgcacgttacaggcacttaagaaacagacaatgaatgaacggatccacccagcaaagtggattcctggtcttacggccaggagacactgggcaggattggcgcccccacctggctggctctatgtcctccctcaggtttcttcccacattgagaccctgcatctctcaccttgtggacacgggtgatgacctccaggcccacagagcccaccaaggcagtgatgtcgtccaggaagcgtccggggaagcgcagcttgcggggtgtgtctagtcgctggccaagcagcaggtgcagcgccatactcttcacctgggggtggggtgagagggctgtgggtgggatttgaagggctgtgggtaggacttgaagggctgtgggtggggcttgaagggctgtgggtggggcttgaaggactgtgggtggggcttgaagggctgtgggtggaggaggcttgacaggaggggcggggctttattagcaatggaggtgggctgaaggtaggtttgagccctgtagctgcaggtagaagctggggcctgagggatgtgggtggggcttgtgacctatggatggggcttaagaaagccgtgggcagatcctgtgagcatcccaggcaaagtgtagagagtgggaaggctgagaggatgtgggaggggcttatgcgggtctccccagggcaagtcagaggtgggacaaagggtggggcttgaggcactggatttgaagggagctttattggaggcccagaggggatgcagccagcaggccctgggaaggaggcttcaaataacctattgaagagttttagggatgtgtcttaccttgatcagaaagctttccctctttttttttttttttttttgagatggagtcttgccgtcac

SEQ ID NO: 34890 - DNA, 1161 bp, Artificial sequence
  DNA replication origin
ctcctgggtgcacgccattcttctgcctcagcctcccgagtatctgggactacaggcgcctgccaccactcctggctaatttttttttgtatttttagtagagacggggtttcaccgtgttagccaggatggtctcgatctcctgacctcgtgatccgcccgcctcggcctcccaaagtgttgggattacaggtgtgagccactatgcctggccagggggcttctctctttaaaaaaggaaggggctccactgggggtctcttgccaccaggcagggaggagggggtctcaccatgagctggaagaagaaccaggcgtgctggaggatggcctcgcgtacggcactgctgctgaccacccactgcagagccagctcctcgtgaagcagctggggacagaggcaggggtcacagagtgcgaggtgccaccccttcccgtaccccctctggagacatgccaggggaagatgcagctggagggctcggggttagtgcagcaggagccaggcaggaggagggggacaagaggagtggaagtgccctttccctgggctcgccagacccccctggactctggatgggggaggagcactggacccctttgctggggaccaggacaaaaatagcgtcatccgcacctccccccactaccttctgcacagtgggtctcagctgggtggctggtggggccgaggaggaaccctcgaggtaggaggaggctcggctagagttgcagtcgatggcctatgatgggatgtgatggcgaggagaaggttagtgtggatgaggtgaaggggtatgtggttggaggaaagacgtgttcacacagacagggatggggaaaagaggtaggttagtgtgaatatagagagagaaatgcttccacatggatggaccagggccatggatgccaatggggacaggcaagaaagagagatgggccggcgtgggttgggaggggaggctggttggaatggccagggtgctgtgggagtagacggggcagtggaggcagggacaaataaaagagtcgctggagagagctgggtgagtcaagatcaaggtgtgtgggtatgggagaagaacgtgaggctgggcggggtggctcaatacctgttatcccagcactttgggaggctggggcaggaagactgctcaaacc

SEQ ID NO: 34891 - DNA, 774 bp, Artificial sequence
  DNA replication origin
ccctgggacttggaggttgcggtgagctgtgatggtaccactgcactctagcttgggtgacagagcaagactccatctcaaaaaaaaaaaaaaaaaaaaaaggaggatgctgtaatcctagcactttgggaggccgaggcaggtagatcacgaggtcaggagatcgagaccatcctagtcaacatggtgaatggtgaaaccccgtctctactaaaaatacaaaaattagctgggcgtggtggcaggcacctgtaattccagctacttgggaggctgaggcaggagaatcgcttgaacctgggaggcagagcctgcagtgagccgagattgcaccattgcactccagcctgagtgataagagcgagactccgtctcaaaaaaaaaagaacgtgatggaggaggtgagaataacaatgaaaacacagtacgccagtgaccagtgacagcagtgcaaccacaacaggcaggaggagtgtggatggagtgggaccgagaacacacgaaggctgggaatgggtacatggtgtgtggggtgaaggcagaggagatgaaatcagtgtagacagcaagaatgtgtgtggccagagaaggtgagggtgagtgtagacgaggtgtagagtgtgaccgagtcagtgagtctagaggacagagaggaggatgcagaggtggaggagggtgagtgtggacagaggaggttaaacacaagatggggaaggaggagaaagacaaggcaggaagataaggacagaggaggtgagatgttggtgaggtgcc

SEQ ID NO: 34892 - DNA, 932 bp, Artificial sequence
  DNA replication origin
ggtcctgggtagggatgtggagtgagcagggtggggcctcagggaatgaagaccacccctgcctgaatcagcagcttcccttaaagctgggtccagctgaccaaagtcacgtccaaggcctgaggccagacctccccggccatcggcaactgttactcaatcgtagggcaggcaagaggggagcagggcgggactcttggttcccggcccaccccgtacctgggggtgcacagaggacacggctgtgagctccacactgaacacgcccttgtgaccgtccacccagcgcatgcccggaagcgccacctgtgggagggaggcaccaggtgggcactggtcagccctccctgactgatcaggtcacccagcggccccagccattgcgacactgcagcgtgagtgtagcccggtctgggggtgcagccaagcaccctgcccccagccctggtcccagtagactgagagggtccactgggcaggctggaaatccacatgccaagacgggggcagagaatggagacacagggtgaatgaatattcattgagtaggtcaggaaacaggataggaggatttgaggcctagggtcattaacaatggtgcattcatggggaatgataaggtactacgagggcaggggacagtgatcaggaaggcagtcagggtggctaaagtgggaatggagcagagaggcaatgggaatctttggggaggacatgtaggacacagagaggcattaataggggaataatgagctacacgggggccctggaggcaccagtagaggataacaagcctcccaggattgacaggaaggaaggcaggtgactcgggagtgcttctggggacagtgcattggcaggcaggagctccagggcacatacatcgggtgtgagcacggaatagctgggcggcggctggtccacagacactg

SEQ ID NO: 34893 - DNA, 897 bp, Artificial sequence
  DNA replication origin
caggataggaggatttgaggcctagggtcattaacaatggtgcattcatggggaatgataaggtactacgagggcaggggacagtgatcaggaaggcagtcagggtggctaaagtgggaatggagcagagaggcaatgggaatctttggggaggacatgtaggacacagagaggcattaataggggaataatgagctacacgggggccctggaggcaccagtagaggataacaagcctcccaggattgacaggaaggaaggcaggtgactcgggagtgcttctggggacagtgcattggcaggcaggagctccagggcacatacatcgggtgtgagcacggaatagctgggcggcggctggtccacagacactgggagacagaaggggccggtcctcaggcgcccgtgctgcagcagtgggatccactggggagaggctggaggtcaggtctgcggccaggttgggggacgaggagggctcagggggagggagggaggggacggctcacagtaaagcccacgggtgtctccagggcagtgcccggccggggctggcagctgacatggtagaaggtgaacagcaggtgatggttctctgtcacgcaggctggaagatgcagcttgaactcctcgtagaactcgggggacctggcagaatcgggctgggggatctgctgggggctggggtccccactgtctgccccatcacctctgccatgccacgcccttattgctgctaggccccactgtctctgctgtctgcctcagcttccctcattagcactctgggagcctctacctctcttcttcctgtcccccatcttcccatcgatgctgccttatgtgtatatataagggacatcctcctacccccatgagtgcccccaagttcctcac

SEQ ID NO: 34894 - DNA, 929 bp, Artificial sequence
  DNA replication origin
gatgggatttcaccatgttggccaggctggtctcgaactcctgacctcaagggatctgcctgcctcggtttcccaaagtgctgggattacaggtgtgagccactacacctggccaataaattcttactactagagaaactggtaacattttgtgagcacccagtaagtacccagcactgttctatgccctttaataatccatatgatggccgggcatggtggctcatgcctgtaatcccagcactttgggtagctaaggtgggtggaacacttaaggtcaggagttcgagaccaccctggccaacatggtgaaaccccgtctctactaaaaatacaaaaaattagctgggcgtggtggcacatgcctgtagtcccagctactcaggaggcttaggtaggagaatcgcttgaacctgggaggtggaggttgcagtgagctgagatcgtgtcattgcactcagcctgggtgacagagagagactcaaaaaaaaaaaaaaatccataggatgttcatcacctccccatgaagtgagtcctattttatccccattttacagatggggaaactgaggccaaagagcattgttgacttgctgggtcacacagatacaatgaggggctggggcagagggtcaggggatgggaggtgaggtggctgtcggctgaggtttccattctgacccccacaggctcacgctgacaagcagagccacatcctatgggccctcacaggccacgtgcagcggcagaggcgggagatggtggcacagcagcatcggctgcgacagatccaggagaggtgagcctggcaggggtttggcaggcagggcagttggatggggggcgcacagggcagctggaaaggggccccctcacctgggctgagccacatctccctccccagactccacacagcggcgctcccagcc

SEQ ID NO: 34895 - DNA, 1092 bp, Artificial sequence
  DNA replication origin
ggctgcagacatcagctcagcccttttgggttccgaaccccctgagctgcccctaagtcagactcaccttctgtggacaatgacccagtcctcaatatacatctccaccgcggccctcacctgggcatccagttttctgcagcaaaagaagatcagggtaaacagagacaaggcctctgtgaatccttctgctagcctgtaaggttagcactgtcctgcctattccagacaaggggagatggaggctcagagaaaaagcatggcttgtccaacgtcacggccaagccaggagctgaagtcgggctgttgatggggttggcagagacagagtggaatcacaggcagagagggcgtggggctgaacccactcatccttggggatcccgggctccgtggtccggcattcccggggctgcagcagcagctccaagtcatcagctgggaattctaccaggtccctgaggggcccgggctcagcatctggtggccggctcagaagtacatcctcaaagtccaggggctcgacaacttcagtcagtgggacctggattggagcaaagtggctgtgatcgcactacctaggaggctgagagtgggggcacgaggcaggggtgggtgcgcgctggcttcaaactcaaataggagggcggtgggagccatggagggtgttggagttacggaggaaccatggaggatgatgacctcagactctccacccccacctcagctttccctgccctgcccctccctccaggggctccaggaaggaaatcacaccccatgcctggaagggcagaaactaacagtggaaggaaagaaatgttgacagaggccaggcaagagacaattcctaaagcctccgcaaccctgtgggcaacatggccccacccctctcaggcgaaagtcactcccctccccaacttctccctcctccatccccatctaggtggtccaggtggctggagatgggggacatcaggagggagccactcccctgaccacccacagggtgacaagcagcggcagggagagtggccacaggaattggtgagactactaggaccaggacaggcactccctcccccgacactg

SEQ ID NO: 34896 - DNA, 969 bp, Artificial sequence
  DNA replication origin
cgagtcttgcccctttacccccatcctccctgattttttttttttttcgagacaaagtcttgctctgttgcccaggttggggtgcagtggcgcgatctcgactcattgcaacctgcgcctcccgggttcaagcgattctcctgcctcagcctcttgagtagctgggactacaggagtctggctaatttttgtacttttagtagaggcagggtttccccttgttggccaggaccttcttgaacttctgacctcaggtgatccgcctgcctcagcctctcaaagtgctgggattataggtgtgagccaccatgcctggccatcctccctgattttgaaggcctgctcagatccaggtggcccaggaaggccccagggcccaccttggttgcttggggttacttagaaggcctcccagctctgggccccgcaggccaggttgacctctgacacaatggcctcatctcaggatctctgtgacttcaggccaggccccaggctccgctctgcccagcagctctgtgaagtcagggcatcagctacagaagggtaaactgaggctcagaggtggaaatgacttatccaaagccccaaagcaaggatgggaagggatgtatgttctggatggggtccaggggcagggctgggtgtgttggggaacagcaggatggacagaggtcccccagatgagggagcagaggccagggacccgtgggcctccctccagacctggaaggccacaggcccagccgggaggggaaggagagtccgtgatggcttcagaccccactggtggcagcattctcatctcctgatctgtgcttgatggggaacgcgttgggggaactggggagctgtgggcccttaaagcctcagcactcctggttctcttggccctcggcctatttatttcgttccacaatctggattttcctcatagaaagaatctgtccgctccgctgcctgagtttt

SEQ ID NO: 34897 - DNA, 1733 bp, Artificial sequence
  DNA replication origin
cccgggagtctggggcccgcccagcctggatcccggggcctcctctccgtccccagcctcagtttccccagcccccaggactccaggcgacccctccggcctgcaggggcagcacggagcggcccgggccacccggaagggccccgcccccgcgccggccccgccccgccccggctgcccagaaccgggaggcggcggcggcggcggggccggggcccggggcggcggcggcgggacgcgaggaccatggctgcctccgagcgccgcgccttcgcgcacaagatcaacaggtagtgtggccgcggggccccctcccacctcccccacgtggcccggctccgccccggggcggtgcgaccctccccgcccgggcgcccccaattcaacccctttccgcctcggcccgggtcccgccagcttcctccggccggggctgggagcgggagaaggcggggagggccgcgggggtcccggcgggggtcccagatgggagtcgcgtcggggctgggagcgcgatggcggctgccgttctgcctccgtgacgcgcgggggtgtgtccggagggcttcccggaggaggtggcgtggggatgcggatgacgggcgccccctgaactccctgcgctccccgtccgcctctcggcccctcactgtccccgcgctctcggagatcggggtgggccggactttctgttccttcctcagtgcctggtttggggcagggaggctccaggctctgagatttggggacagagatgggctccttggtggcgtttgaaacccctcgaggagtttcccgtgcccttccccctccagggtccagtgcccagctgtcggggggggggaagggggacagctgtggacgcccccccaccttctgcttcaggctctcccgtcacgggctggaccgcgctggggatggatgggtgattgaatggagggagtgggggctggggacagaaccagctggtgggcagacgggggaggggacaggccccaggcgctgggggatccatttccgtggccactggggattgtgagagtcacagcctgggaggggtatatcagactctctggggctgaaaagcctcgcccccagttggcggggggtctttgcgacaagggtgcgttcagaagctcaggtatcctctccccgggggacctgtcctgactgcccccaggtgaaagagctgccctgtgggttgggccctggtcttatggagacaaaagatccccctcttgggatatagtggcggagagagaccagaagcctgatcgagtagattacctgtcagtgacaagtgctgtagggacaagaagacagggaagggggatgggagggtgggggctgcttgagatgcgggaggtgggtcaggaaggcctggatgagcaggtgcctttgagcaaaaacctcaaggagatgagagagggatcgatcgaggccagtttgtggggggaaagagtgggaagggtttgtgcaaaggccctgaggcaggaacagagagctggagggggacagtaagagtagaatgtacagggtcgtgtgggctgtgcaagggactttgactttggaccccaggtgaggtgggagccatggggagttctcagcagaggagggatgagacttggtggctggggcgtaatggctgggcaatttttatgttctatcattatctttgtctgtaaattggctttcaaaatgtcttagacctttggcgtctttgaggctgcaaa

SEQ ID NO: 34898 - DNA, 1866 bp, Artificial sequence
  DNA replication origin
cgggaagccctccggacacacccccgcgcgtcacggaggcagaacggcagccgccatcgcgctcccagccccgacgcgactcccatctgggacccccgccgggacccccgcggccctccccgccttctcccgctcccagccccggccggaggaagctggcgggacccgggccgaggcggaaaggggttgaattgggggcgcccgggcggggagggtcgcaccgccccggggcggagccgggccacgtgggggaggtgggagggggccccgcggccacactacctgttgatcttgtgcgcgaaggcgcggcgctcggaggcagccatggtcctcgcgtcccgccgccgccgccccgggccccggccccgccgccgccgccgcctcccggttctgggcagccggggcggggcggggccggcgcgggggcggggcccttccgggtggcccgggccgctccgtgctgcccctgcaggccggaggggtcgcctggagtcctgggggctggggaaactgaggctggggacggagaggaggccccgggatccaggctgggcgggccccagactcccgggctggggggacgctctttctaccctaggagaagggctggggaaactgaggctgaggagggaagttagggagaggaggcgctgggacccagactgggggtgccccagactcccgagctggcgggggcgctctttccaccctgggagctgggctggagaaactgagcctgaggagggagggagggaagggaggcgctgagacccgggctaggtggaccccaggctcccggggtttagtggggtggtcttaccaccccaggagcagggctggggaaactgaagctcaggagggagggagggaggggaggcgctgggacccaggctgggtaggccccagatttccggggtttggggggcgctctttctgccctctgactcctggctggaaaacaataacgatgttcatgtatctaataatcatacctgtaagtataatcgtggccgtgcatggtggctcatgcctgtaatcccagcactgtggggggccaaggcaggaggattgtttgagcccaggagttggagaccagcctgggcaacataatgagaccccgtgtccacaaaaaatgcaaaaattaaccaggcatggtggtgtgtgcctgtaatctcagctacttgggagtctgagggaggaggatcgcttgagcctgggaggtcaaggctgcagtgagctgtgattgtgccatttcaatccagcctgggtgacagagcgagaccctgtctcaaaaagtctaattgctaagatgtcattgagcctggccctgcaattcacacatgcagaagaaattattgttttcctccttttacagatgagtaaactgaggcacagaggtgttcgggtgcttgctcagtgtgactcacaggggtctccagcgcctgcattgtccgtgctcccagtctacagcatgggagtcagaggagcctggctaggcactggagtgctcggagatgtgccccaggtccaggtggtgggacctgagtgagccagtttgggagtctagactttcggggccgcctctaccaagaggaagaggtggggatgtcttggttaatctatggtctcaaatctctccccactggcctctctcccagcactgctgcagcatttttagagaattctccagccgacactcccctctggaggagctcacccctttctcacctgcatgcctctgcaccggcaggtccttcctcctggacagcccttctttccctggtcagcaaatgccccagggagaatttgaggttgaatcagacaaggccgtggctctgcctcagggcctttgcacgtgctgttctc

SEQ ID NO: 34899 - DNA, 839 bp, Artificial sequence
  DNA replication origin
tctgggaagcgaggagcgtctctgcctggccgcccatcgtctgggatgtgaggagcccctctgcccggccgcccagtctgggaggtgaggagcgcctcttctcggccgccatcccgtctaggaagtgaggagcatctctgccccgccgcccatagtctgagatgtggggagtgcctctgccccgccgccccgtctgggatgtgaggagcgcctctgcctggccgcgaccccgtctgggaacggaggagtgtctctgcccgaccaccaccccgtctgggaggtgaggagcgtctctgcccagccgccccgtctgagaagtgaggagcccctccgcccggcagccgccccctccagaaggtggggggcagcccccgcctggccagccgccccgtccggcaggtggggggcgcctctgcccggccgccaccccgtctgggtggtgtacccagcagctcattgagaacaggccatgatgacgatggcggttttgtcgagtggaaggcggggaagtgtggggaaaggaaagagaaatcagattgttgctgtgtctgtgtagaaagaagtagacatgggagactccattttgttctgtactaagaaaaattcttctgccttgggatgctgttaatctataaccttacccccaatctcttgctctctgaaacatgtgctgtgtcaactcagggttaaatggattaagggcggtgcaagatgtgctttgttaaacagatgcttgaaggcagcatgctcgttaagagtcatcaccactccctaatctcaagtacccagggacacaaacactgcggaaggccgcagggacctctgcctaggaaaaccag

SEQ ID NO: 34900 - DNA, 1101 bp, Artificial sequence
  DNA replication origin
cagcacatgtttcagagagcaagagattgggggtaaggttatagattaacagcatcccaaggcagaagaatttttcttagtacagaacaaaatggagtctcccatgtctacttctttctacacagacacagcaacaatctgatttctctttcctttccccacacttccccgccttccactcgacaaaaccgccatcgtcatcatggcctgttctcaatgagctgctgggtacaccacccagacggggtggcggccgggcagaggcgccccccacctgccggacggggcggctggccaggcgggggctgccccccaccttctggagggggcggctgccgggcggaggggctcctcacttctcagacggggcggctgggcagagacgctcctcacctcccagacggggtggtggtcgggcagagacactcctccgttcccagacggggtcgcggccaggcagaggcgctcctcacatcccagacggggcggcggggcagaggcactccccacatctcagactatgggcggcggggcagagatgctcctcacttcctagacgggatggcggccgagaagaggcgctcctcacctcccagactgggcggccgggcagaggggctcctcacatcccagacgatgggcggccaggcagagacgctcctcgcttcccagactgggtggcggccgggcagaggccgcaatcttggcactttgggaggccagggcaggcggctgggaggtggaggttgtagcgagccagagatcacgccactgcactccagcctgggcagcattgagcactgagtgagactccgtctgcaatcccggcacctcgggaggccgaggctagcaagatcactcgcggttaggagctggagaccagcccggccaacacggcgaaaccccgtctccaccaaaaaaaatacaaaaaccagtcagtcgtggcggcgcgcgcctgcaatcccaggcacttggcaggctgaggcaggagaatcaggcagggaggttgcagtgagccgagatggcggcattacagtccagcctccgctcggcatcagagggagaccatggagagagagggagagggagaaggagaccgtg

SEQ ID NO: 34901 - DNA, 1373 bp, Artificial sequence
  DNA replication origin
ccagtcagtcgtggcggcgcgcgcctgcaatcccaggcacttggcaggctgaggcaggagaatcaggcagggaggttgcagtgagccgagatggcggcattacagtccagcctccgctcggcatcagagggagaccatggagagagagggagagggagaaggagaccgtggggagagggagagggagagggagagctctttttaattttttttgtagaggccagagtcttgctatgttgcccaggctggtttcaaactcctggcctcaagtgatcctcctgcctcagcctcctacagtgctgggattacaggtgtgagccactgcacccagctggctatgtggtttcttgtgcatcactctatccctagtgcgctgcacacagcctggcacacagtaggtgctcagtaagtgctttctgagtgaatgattgggagaagcagaaagtattccaagggaggcatgggcaattgtttttttgtgtttttttgagatggagttttgctcttgttgcccagggtggagtgcaatggcacgatctctgctcactgcaacctccgcctcctgggttcaagcaattctcctgggttcaagcgattctcctgcattcaagtgattctcctgcctcagcctcctgagtagctggaattacaggcatgcgccaccacacttggataattttgtattttagtagagacggggtttctccctgttggtcaggctggtctcaaactcccgacctcaggtgatccacatgcctcggcctcctaaagtgctgggattacaggcgtgagcctccgtgcccagccaggcaattttgttaatcgctgaatcttccagtttccacatgcctcctcctctctccaacccttctcgccctaacttttccagattgtgcatgaaatttctagattgtgcatgaatgccctgcccagccctgcacattcagaattcatttgaattgaacctgagaggtggaggttgtaccgagctgagatggtgctactgcactccagcctgggcgacagaccgagactctgtctcaaaaacaaacaaacaagcaaaaaccacaaaaaacctgtacatgagctgggcaaggctgagtgtggtggctcacacctgtgatcccagtgcctccagagggtgaggcgggaggaatggcttgaggtcaggagtttgagaccagcctgggcaacatagtgagaccctgtctataaaaaaaataaagaattagccaggtgtagtggcgcatatctgtggtccctgctacttgggaggctgacaagggaggttcgcttgagcccaggaatttgaggctgcagtgagctatgattgtgccactgccctccagcctgggtgacagagtaaaagacaa

SEQ ID NO: 34902 - DNA, 1245 bp, Artificial sequence
  DNA replication origin
agatgttgcttggctaggacgggctctagacgcttggtgcagcttccagcccctcccacccgctctctgaaagccccgcccaagactcggcccctcttcgtcctcccccatcccccgctccgggaacggcccttcctccgccttctgggcggagcccgcgcgggatccgggtggctgcaggctgctggcttctgcggctgcggggtcggggtcgcggccagggccaagccgcagcgagttcacaggcggaacccctgcaggcggcgccccctacgcgaggtcacccctgggaaggagcgcagcccacccggcccctccgcatccgagcaggtctgtggggtacgggggtttgggaggaaggtagggggtctggggaacaaaggcggggctgcggggaacgcctctgccctcgcccccacccagctgggcacttgggaagcgctgatggggcgcgggcggggcagagagcccagctggggacaggcgttgggaccatatggtgatgggggaaactcctgagtccacctgcattggctggggcgccccaaatctagtgaaggggaacagaggcgagccctccggggccaggcttgagggagggtcggcagatggttagaaagaggcgggaccgactgacacaggtgagctaaggctgggggaggtgggggccccagccttgcggccctgccctgcgtggggaaaggtttcctgcctcttctcttcccctccttaaactcgttctcctggaacacggggtggggccggttgggtcctggtttaaaatggaaaaaagccccaaaggcagttgagaaatagctgtgccagggctgtctctgcctctgccccgcctgcatccaggccttctgcagcctctccgtgcggttcccgcagcggccatagacagctggggaaactgaggcctgggagaggttatgagggttgagggagcaccttggactcggatgaagcagcatgttggagtgtgggcagattcaaggagcctagccgtgggacagattgcctggaaagaccaagggtgggcggcagtggtcgtggtggtggggttgtgttaattaagtggctgggatcgtttccttgggtataaggactctcactcctgcctccgtggactggggctggagtgagtcagccttgggcagaaggagacaggcctggcccctttgacaaatagaaaatagcagtacccatttagggggtagaactggactctaaacctgggccctg

SEQ ID NO: 34903 - DNA, 1125 bp, Artificial sequence
  DNA replication origin
ctcaagcctggccccggagggctcgcctctgttccccttcactagatttggggcgccccagccaatgcaggtggactcaggagtttcccccatcaccatatggtcccaacgcctgtccccagctgggctctctgccccgcccgcgccccatcagcgcttcccaagtgcccagctgggtgggggcgagggcagaggcgttccccgcagccccgcctttgttccccagaccccctaccttcctcccaaacccccgtaccccacagacctgctcggatgcggaggggccgggtgggctgcgctccttcccaggggtgacctcgcgtagggggcgccgcctgcaggggttccgcctgtgaactcgctgcggcttggccctggccgcgaccccgaccccgcagccgcagaagccagcagcctgcagccacccggatcccgcgcgggctccgcccagaaggcggaggaagggccgttcccggagcgggggatgggggaggacgaagaggggccgagtcttgggcggggctttcagagagcgggtgggaggggctggaagctgcaccaagcgtctagagcccgtcctagccaagcaacatctcattttcccagctgcttgtaaagagcttctactatacgcacggctgttaaaagcatagagtcttgggcctggttcgagtcccagctccaccactttctagtcttgtggctttggacgcgttacttaacctctttgagcctcagtttccccatccgtcaagtagctcatagcgagagtacccaacctcacagagttgtgggaggattctgatctgagttagtgtttgtcaagtgcagtgccggccttaaagtaggctaggccaggcgcggtggcctgtaattacagcagtttgggaggccgaggcaggagaatcacttgaggccaggagtttgagaccagcttgggcatcgtaaggagacctcatctctactaaaaataacaaaaattagccaggtgtggtggcgtgcgtctgtaaccccagctacttgggaggctgaggcaggaggattgctggagacatcgaggctgcagtgagccttgattgcaccacagcactccagcctgggcaacagagcaagaccctgtttcaa

SEQ ID NO: 34904 - DNA, 1356 bp, Artificial sequence
  DNA replication origin
gctggcccaggagatccgggacaggtcggggatggcgggagggcagcttggagtccacaggagggaagggagacccagaactggggaatggaggcaggatgggggaaatggcagatgcctgggggagggggactgagggatggtggaaagcctgagggacaagaagagggaatgaggccgggtgtggtggctcatgcctgtaatcccagcactttgggaagccgagatgggcggatcacctgaggtcaggagttcgagaccagcctggccaacatggtgaaaccccatctctactaaaaatacaagaattagtcaggcatggcggcgggtgcctgtaatcccagctactagggaagctgaagcaggagaatcactggaacccaggaggcagaggttgcagtgagctgagatcgcaccactgcactccagcctgggcgcctgggcgcctgggcggcagagcgagactctgtctaaaaaaaaaaaaatgaggaggggatgagaggctcaggggagacaggtggctggtgggggcgggggagtgggaaactgagaggccagaaggcagggaagacagaaagctggaggtgggatggaaaaggaggccaggggatcagaaagggggatggcagggaagactgagaggacaggagactgggggtatagaaagtcgggggacaggaggtggggaggtggaggccaggtgataggaggctgagtggggtgggagagactgagagaatgggaggctggggatcagaaggagaggagggggatgagggtagggggattgtagaaggggaggggaaaagggcagggaagtgtggggaggggacagagcttgcggggatgggtggaggcacagataggggcatgggaggtcaggggccaggcagggagtgcaggtctaggctgcactgtcccctcagcaagaagttcctgtgggaggagctggaactggtgcgggaggaggtgaccttcatctatcagaagctccgtgagttcctggagcccacagccggtgtgtggggagggggtccttcttcagcctttgtccgcctgagccccctccctccacagaagcgcaggaggatgagatctcagagaacttggtgaacattcagaaaatgcagaaaacgcaggtgaaatgccgcaaagtgagtggaggagatggggaccctggggaggagtgggagagggagggatggggattttggccagcctccaccatgagattggagcctgggttcaaatctcagctctgccactcactgctgtgtgactgtgggcaagtcacttgacctctctgagcctcagtttcctcatctgtataatggatgtaataataactcatcttgg

SEQ ID NO: 34905 - DNA, 1516 bp, Artificial sequence
  DNA replication origin
gatgacagttacacaaccacacacagacacacaatgacaaccacacaatcacagttacccacagccgccctcaccaccggtgctggctcctcggcccggggtcccctcccccagcccggtcccctcccccagctcgccgcctcccctcccccgcccctccccgcgctggacccagagggacccaaccctcaggaaccggagaccgacaccgggggtgggaagcccacgggaggggatgaggggcgcccccaccccctcctctcaccgcgtcgaggccgccgccgcctgagcccccgctccgcctagactgccccggcgcggcgggatggacagacggactgccagccaggctggcagacgcgaagaccgagacgcggtcggccgggcctggccgcgccgcgcagactccgaggtggagggaggggcggggcctccgggcgtctcatttgcatagccccgtggggcggggcctccgtgatcttggaggcggggcgtgttagcatcgattgtaggaaggaaccaagaatggaagtagagagggaggaccctggggtgggcggggctccgagggtaataggagggaggggcttcagagtatgtccctgggccgcgcctctccctctctgggcctcagtttccccattcgccagggccccccagaaaggaaggctctgtggccagtgtggaagtctgtctggctgctcgtgtctggacagaatgactccttgccttgtcatatattaaatctggcttcagatgtcccctgattccaagcccacacatcccgaatgacccctggggtctctacacccctcccccccaacaatgaggggtaaactaggagggcagggggattcctaggcacaggaagcagcaagactaacagtcggggctagaggagggtctgggctagtttattttctctctggaggggtcttcagggagagcagtcccggctgctcaagctgtggagagagagggtgggtcagggcctggccaggtccaggggactccggggctgcaggtcagggaccgcatgcccagatcaggatctgggcctgttctgagggtctagactgtgggagtcaagggcaggtcaggagggaaatgggtggagggggggactggggaggatctgcaccgggtgggaaggagcggccgctcttgctgaaaggtggctgggagaggtcctggtcacagtcggagtcagagtcccaggaggggagtggagggctcaggcactggtgccccttgtggcctgcaggagggacaggttccctgaatgtgaccctcaagtaacccccaaatataggccctgtgtcccttcatagtatacctcattgatacttaaaccatgacccccaattcccttgaatgtgatccagtgtgacaccaaattatgacttcaatgacccttgcattttacccaattgacacttttttttttagagatggggtctcgctctgttgcccagactggagtgcagtggcacgattatggctcactgcagcctca

SEQ ID NO: 34906 - DNA, 1279 bp, Artificial sequence
  DNA replication origin
tattaccctcggagccccgcccaccccagggtcctccctctctacttccattcttggttccttcctacaatcgatgctaacacgccccgcctccaagatcacggaggccccgccccacggggctatgcaaatgagacgcccggaggccccgcccctccctccacctcggagtctgcgcggcgcggccaggcccggccgaccgcgtctcggtcttcgcgtctgccagcctggctggcagtccgtctgtccatcccgccgcgccggggcagtctaggcggagcgggggctcaggcggcggcggcctcgacgcggtgagaggagggggtgggggcgcccctcatcccctcccgtgggcttcccacccccggtgtcggtctccggttcctgagggttgggtccctctgggtccagcgcggggaggggcgggggaggggaggcggcgagctgggggaggggaccgggctgggggaggggaccccgggccgaggagccagcaccggtggtgagggcggctgtgggtaactgtgattgtgtggttgtcattgtgtgtctgtgtgtggttgtgtaactgtcatcgtgtggctgcatgactgggattgtgtggtttcgggaggtccgcgggtgtgtgtgtgtgtgtgtcactgtcattgtgcggctgtcgttgtgggtgtcactctgatggtttgtgtgtgtgtgtctggctatgctgtgactgccattggccccccgtgtggctgctgtctctgtgtgtgactgtcttggtgttcgtgtggttgtgtgcataggactgtcattgtgtggctcctgttgtgtgttcattctgatggtgtgtatgtgtgtgtggctgtggtcgtgcgctgtgcacctttcttgtgtggcattgtgagtctgtgtcatggtccatggatgtggccatgtggttgtagatggcaccttgtctctcccctgtgactgttggtgtgaataagagactgttagtgtgtgtgtggctgtcgctgagtgccttgtaattgggggtgtgacgctgtgatgagttctgtgacccccattgtgtgcggtgactcttttctgtgactcttaagtgtgttgcaggcctgactgtgtgtccctgactgtagcggtgtgggggcttgtgtgggactgtgatgtgtgtagggtctcctgacatgtctctctctgtttggcctggggtgggggtggggacttgtttgatctgtttggtgtctctgacaggctatgagcccactgtgtgtgagtatgcagtgacatgtgttgtgtg

SEQ ID NO: 34907 - DNA, 1234 bp, Artificial sequence
  DNA replication origin
tagggtctcctgacatgtctctctctgtttggcctggggtgggggtggggacttgtttgatctgtttggtgtctctgacaggctatgagcccactgtgtgtgagtatgcagtgacatgtgttgtgtgtgttggacacctgtctgaacaagggggcccctcttgtttactgcaaagtggcgcccagcacagcgcctggaagtcggcaggtgctcggtcttcactgtgggatgggtgaacgctatgccatggttgtgtgtgtgtgtgtgtgtgtgtgtgtgtggtgccaggatggaggctgcggctgggttgtgcttcctaagggtgacagcatgggtgactctgggtatctaggacctctggcaaccatcaccccatatcacactgcagagtgagtgtcgtggttggggtgctggacccagagtgcctaccctcgcctgcctgggcctcagtttccacatctgcacaatgggggtgaccatccctgccctgctggctgccaggagcggctgtgagtcttcaggcgtggatgcagcctgggggaagccatagggcgctttcacaggtgagatggggctgggagaatggatgcaagcaggtgtgactgtgttgagccctaaagcgctggggactgggggtagccttgggggagggaagaggagaactgggaggcagaccggctgggaagagggggaaggagggagaggcagttggcagagaaggagggcttggctatcagcccaaccagacaccaacaccacagcccatggggacagagagaggggcccctgcagaggccatggaggaagcgactcaggggaagggtctggtagggatgggggccccttgggaaagaggatggtgtcccctaaaaactagtggggacccttctaagtgccatgggggaggggttcccatgaggctggggagtctcttctaaaggcccacctcctaaagggcattgggtcagagcctcccatgtaggctgtaaaggaagggacccccgtagactcttggggagtggtgtcagaggaggcaggtgtccccagtagggtcaggaccaacagggcaggacctggattgcagaggcatggccagaaggttcaagggacagagtcagggcctccccgggtcttcagggccaggggtgtggccaaaggactcaggggatgaagccagggtcccggtgacctgagccttcccctaggcacaccccctgggactcccactccctcc

SEQ ID NO: 34908 - DNA, 1385 bp, Artificial sequence
  DNA replication origin
agggggccgtcccatctgcccagtctgccagctaatatctagcgcctgtagcatcctgggggcctggctaggctataggggttccgagtcttgcacatcagggactgtcctgatgccatagggtagagccaacagtttccctcgcattactggctcaggaggcgtggccagagggcaaggggcggagtcaatggacagcgatagcctctgactgggggcgtggctaggatctgggaggaggagggagagcttccaacaggtcggggcgtggagcgagagcttccaacagcacccggggcgtggaagagcagaggctccaaccctggcggcttcctagctgctggtcgctgtccagcctgcacacccatttccgaccccgaagctcccgaagctcaccgctgtgtaggtgaccgcgtaggcgcagagggccgcatccttgcaggggaaggcgcggcgcgcggcggccacgaggctgggactgccagcgcaggcaccctggtcagtgacaaagcggtcgggacctggccgatccggagaaggtggcaggcagcccagggccgtgtagttggggcggcacacggacaggaagtgtggcgtgggattgccggtcaccacctgccccgcgttggcgaagatggtcgtggtgaagaggccgaaggagtagacccctaggggtgggatagtggaaggggttcatgcgccaggccctgatgctcccactgattccattgggcctcttagctcccttttcctgtgactgtcattaaagcacacttgggaccctgtagttgtgccaacatcccccttcctttaagaccaccatgaaggtactctgaggcctcctgcccccagggaccctcattatctggcccctgtctttctaggattaccactatgtcaggggcggatcctcccttggagccccattatagctgggcttggacccccgccccaacaccattacatcaggatccaccccatgcctaggacggctagggaaaaccctaatggcatacctggggctcttcctgcctgcccctaaactggctactactgagttcaacactctcctcctggggccactaataagttagagctgggtctcccgccctctgccctgggaccatcattataggtaaggtctgcccctccccctttcccacagccactacttgaggctgggaccccatttaaagcacagccagagtctcacccaggggccccagggtgtttgtcctgtgcctgtgtctctcttttgtgcctgagactctccttatggcattctgggaccctcttccgacagttgccatcatggttgggttaggccccacccatgtccctagaacctccattacatctggtctgagcctaagtcccttgttgct

SEQ ID NO: 34909 - DNA, 1203 bp, Artificial sequence
  DNA replication origin
ggcaactcaccaaaaaggtggcgatggccgcccctgtcaggaagccagccagcacgtccgaccagtggtttcggtactcggccacgcggaccacgcccaccaggaaggccgggcacagcaaggccaggcagagcgagggtttgaccaggcgggagcccttcacgcggaacacgagagtcacgtacatctgcggggagccggactggtcagggggatagcggaggcaagtcgccgaacccaagtggacgctcctttctgggctagagcgcatggccagagcgttggggctggagggagtggccaggggctccagggttggagtcatgggctcccagtgggcttttccagggagcgtgaccaaaaaggcaaaggggggggggtcagggattgaggtcttggagtctcgtgggcaccacctgcagggctaggtgtggccagagctcccaagagcagaggacaaggtctggggcccaggtgtccctggtccggagtcgcagatggggacagacacttactggattagggcgtggccacagaaccagagggtggagtcagggcgaagggagctgtaggagctgtaggagctgtaggaggtggagcccctgacccctaggggaccactgacagggtgggagcataaacccggatgccagaaaaaagagttgaagcaacaggggatgtgaccaggaaaaagcaggggacagagttagaaatcccagagcagttaagagcaaggggcgtggccagggctacaacaggagggaacaaggcccccaggagaggggcaagggctccagaagaggggcaaggactccagggggccgtcccatctgcccagtctgccagctaatatctagcgcctgtagcatcctgggggcctggctaggctataggggttccgagtcttgcacatcagggactgtcctgatgccatagggtagagccaacagtttccctcgcattactggctcaggaggcgtggccagagggcaaggggcggagtcaatggacagcgatagcctctgactgggggcgtggctaggatctgggaggaggagggagagcttccaacaggtcggggcgtggagcgagagcttccaacagcacccggggcgtggaagagcagaggctccaaccctggcggcttcctagctgctggtcgctgtccagcctgcacacccatttccgaccccgaagctcccg

SEQ ID NO: 34910 - DNA, 1026 bp, Artificial sequence
  DNA replication origin
aatagtaggggcaagtgcgcaccttccatttgtgcccatcgggatatctcagagggccagagaggcagatgtctcctaaatgtccttctagccatcttctaatgtctgggtctggctggcttggggggcaggggactttggcactcacgtggcacacgcacacacacgcgtggcagggaagaagtggggactgggcagattctgggtgggtggtcgggcctcacagcaggtggtcacggctggcaaacaggtaagggctgaagttgtcccggtggaagggggagggatagagtccactcagggtgtacaggtcccgcagcaggggcgtgggcagcagcagcttccggccacgtccaccacccccgcctggccccccaggtccaggggaggaaggcgaggggccctggctgggggtgggcgctggcaggggtaggggcaggggcaagggcgtcggctcagacctcaatcgaggacggggcacacggggcgacgaacacatggctggggccctggaggagacacagctggggatcaggtggccacggcgggcgcagttctgcgactctggtggtcagaagccagatatcaggggatcagaaaactcgggaggcagcataaaggcctaggtgagacctctggggcagtggctgcccacctggaagtccccctgtttagccccccactcccccaacactcactggatggggtgagccgtgccggtgtcgaatgcggcctgcagacctcgggttcctgagacaaagagacagacggaaggggctagtggccccctgggccctaccggccacagccacaaggagctcatcaggtgaagagccccatggaaaagacaaccacagttctcatgattaaccgtgtccccctgggaagaagacgggggtgctccctttcattctttggggctgtccgcccaggacctatgtccacagagatgggtgatccctccacttccccatggttctgagacccccacctcttgcctgacttccttcctgtctccttggcccc

SEQ ID NO: 34911 - DNA, 947 bp, Artificial sequence
  DNA replication origin
catgcatcccagccctgccactgatgtgaatccttactgcgtgaccttgggcaagtgcgtgtctctctctgagcctaggtttccatagtgaaagaggaccgttggcggggaggagtctgggcccagcgcccaaatggggagctcaccggcggtgggagagcagcgcgagcacggtcagcagcaccaggatgaccacgaggatgagggagagcgtcaggatgagggggtccaggtctaagaggcggggaggaggtcagggcggtgggcttgccccgtgattcgccctggctcctcctacacccccgcctggggcctcaccgctaggcgtcagcagcgacacaggctccgaccaggcgctccagaagccgccgaagctcggctcagccatacgcgcgcggacggcgaaggtgtagcgcgtccggccccgcaggttgctcagcacacactcggtgcggccctccaggatctccacctgggggcggaatcagggcgagggacgcgtagcagacaaaaatagatgacgtgggggcgggccctggtggaactgagccaatcaggggaaaggaaaacggtgccctagaattgcaatgggaccaataagagtagggggaggagcccaagaaagctcagggccaatcagagagagagtctctggtacgaaagggcgggacccgggcaatttaatatctgggctagcactcgtagagggacccgggcgctaaaggggtctagggttacgggccggagggagaagaagttggggttcaacaggcttgcgaggacattaggaaagggggtgtgtctgtgggcgtggaacggtcttcagcaccagggtaatgggatgtgggatgttacggaccggccctgaaagcggcaccgggcgcgacctcgagaggcgtggctgggccgtagtcagtggagctttgggggctgggccgtaggggctg

SEQ ID NO: 34912 - DNA, 2174 bp, Artificial sequence
  DNA replication origin
tgcctgtttctggacttcctgaccgggtcctgggggccaagctggcatctgaacccttagactgggtcctggatgggtggggggcggggtggggtatgttaggatccaagactcctgatcgcgtcccgggcaagagctagagtgggcttaacattcccgttttaccttttcagggagtctgggacatgctaaatcctaagggggctgacttggtgctaaggtccctggggggtggggaccaagccgaccctccctaggggagggagggtaaagcccgggtccgagttagaggggccaagccacaggctactgtaaacacggtttgtgtgagggcgccagatcacttgcccggcccggtggagggagggaggcggggggcacggttggcgctatcggttggcggggagcctgccggggccgatagggggcccgcctctccgcacacacccccagccgcgcgcgtgtcctaggctggggcggggctggcagtcccgagctcgaggtcttgaacgccgcgcccagctcagctggccgctgggtgggcaggtgtgcgccagtggtgacggcgggggacagtaaggcgagaaacttgcccctgggaattaggggggcaccacctctgcggacccctccaagggacccgcttgggaagatggcagggcggggcttttttcttatcgggtccgcccaggctgcgggagggaagaggagggggctgtctcccgaggatagagctcagacccccatgcccttcctttgtcgcccctccccagcggccttgctggcggcccgggggcccgaagagcttctgtgcttcaccgagcggttggaggacttggtgtgtttctgggaggaagcggcgagcgctggggtgggcccgggcaactacagcttctcctaccagctcgagtgagtccgatccggcgggtgcctccaagggcggagggagggggtggggcagagctccctggaggtcgtagcctcgtatgtcccctgctgtttgaggcccgacggcgcctccagtcgtggtcactggagggaaacctgcgggtccagggctggcacgccctctatgggccggggcgcgaacactcccgcgatcaccgctggaacgcgaccccaaacatcaggctgggataacaacgcctccaaatcgagggtaaggcgttactacgtcggggctgggacgccttctcgaggtagtatccaaaaggaggccagcagtggctcatgcctgtaatcccaactctttggaaggtcgaggcggaagaaccgcttgagcccaggagttcaagaccagcctgggcaacacagcgagatccccgtctcttaaaaaaaaattagactgggcgcggtggctcacgcctgtaatcccagcactttgggaggctgaggcgggcggatcacctgaggtcgggagtttgagaccagcctggccaacatggagaaactctatctctactaaaaatacaaaattagccgggcgtggtggcgcatgcctgtgatcccagctactcgggaggctgaggcaggagaatcgcttgaacccgggaggcggaggttgcggtgagccgaggtagcgccattgcactccagcctgggcaacaagagcgaaactccgtctcaaaaaaaaaaaaaaaaaaagccaggcgtggcgcgtgcctgtggtctcaactacttgggaagctgaggtgggaggatcccttaagccccagaatttgaggctgcagtgagccatgatcgcgccactgcactccagcctgggcgacgaaggaacaccttgtcacacacacacacaaggctagaccttgtgtcacacatacacactgccccccacaggccgggcaatgccaactccccggtcccccctcccaacctgctcccttccctgggcgcatagggatgagccatggaagctgtgtcgcctgcaccaggctcccacggctcgtggtgcggtgcgcttctggtgttcgctgcctacagccgacacgtcgagcttcgtgcccctagagttgcgcgtcacagcagcctccggcgctccgcgatatcaccgtgtcatccacatcaatgaagtaggtaagtgctctgggaatggaggagtggtcggaggagagggtctcagtcctcgcccacctgaccaacccccatgcctgcagtgctcctagacgcccccg

SEQ ID NO: 34913 - DNA, 1052 bp, Artificial sequence
  DNA replication origin
gagagagagagagagagaaaataatttttatttatttccaggctgggaagagatgctgatttctgcgataaaatcagtaggtacattttttggaatgttcgctatgtgccaggctagattttacagatgagaagtctgaagctcaggtaaggtaagtcacctgtccagggccacaaagaaaaaaaaaacgtgtgtctgaagccagaacgggagctgttgcggcccaactccctcccctgcccccaagcggcctctgggctcgggaagggcccctgcctcctcccgccaggcacttatctctacccaggctgagtgctggccccgccccctcggggatctgccacttagaggcgcctggtcgggaagggcctggtcagctgcgtccggcggaggcagctgctgacccagctgtggactgtgccgggggcgggggacggaggggcaggagccctgggctccccgtggcgggggctgtatcatggaccacctcggggcgtccctctggccccaggtcggctccctttgtctcctgctcgctggggccgcctgggcgcccccgcctaacctcccggaccccaagttcgagagcaaaggtaaggatgagctgcgtgtggacccctacgctggagcctgcaggaccatgctggggcctgaactcccagcctaggtcctgggggccatgcctgtttctggacttcctgaccgggtcctgggggccaagctggcatctgaacccttagactgggtcctggatgggtggggggcggggtggggtatgttaggatccaagactcctgatcgcgtcccgggcaagagctagagtgggcttaacattcccgttttaccttttcagggagtctgggacatgctaaatcctaagggggctgacttggtgctaaggtccctggggggtggggaccaagccgaccctccctaggggagggagggtaaagcccgggtccgagttagaggggccaagccacaggctactgtaaacacggtttgtgtgagggcgccagatcacttgcccggcccggtggagggagggaggc

SEQ ID NO: 34914 - DNA, 1231 bp, Artificial sequence
  DNA replication origin
ttgcaccgctgcacttcagcctgggtgacagagcaagaagaccctgtttcaaataaaaaggggtgtgatgtgattgcaccctagatgacccatgggcaagcagttacacaggtccaaatctgagcacgagtcggatttatgagtgatcacccaaacagggccgtgcagatgcatgcaatcccctggatggataccccgggcgctcagtgtgcctcctgtatacactcctggccccacaatcctgtgtgtacacatgtgcatgcacacacacgtgcacacacacagagcctgggtgcccgcaggcccgcatgcacacacaagccgtcttggtaccttggtgctggggccctggggccctggagaggccgggggactgccagcaggagcatctctgcttctaggacttgaggggggtgaccctggggacacactgggggagatgcagaggctgaggtggggtggctgtgctgactcctgatcccatgatccccagtcccatcaccaagcagaatgctcacctggaggtgggggatgaggggtccccgggactcccactaggtgatgagcttttctctcgggcaagcttcctaaggatggggacaggggatgaggctaaggcaggagcagcccttgctgatatctgcccacatcaccgcccctacacacaccccgagactcacgcactgagacgcttggtgaggctgatccgccgtcggatgcgtggggagctggggcaggaggcagctggtggctcaatgacccgggagagccggtagctgaggggtcaatatgtggatgaggtggtgggggcaggaaatacaggggatggagagataagagttggaatcagttgggaggtgggtttggggtgtaagggggagcagccagaggtggcaccccacatgccagggtcagggtggtaaatgagggtcattgagcatcaaggtcttatcagagatgggacaggatggctggtcaggaggtcacaaagagattcacagggtggcactaaggaatcaaattgggtcaggattaaagtcagggtcaggactgggtgcagtggctcacgcctgtaatcctagcactttgggaggctgaggcgagaggattgcttcgggtcaagagttcgaaaccagcctggccaatatagtgaaaccccgtctctactaaaaatacaaaaaaaattagccaggtgtggtagctcgcgcctgtaattgcggctaccggggag

SEQ ID NO: 34915 - DNA, 1387 bp, Artificial sequence
  DNA replication origin
cagtcttggattcaaacttgagagtttgtaaccctttctaatgatcaggacctcccagagttgcccaaacttctgacccagactcttcagaggcctgcgcggaggaagaggaagggctcatgcctcaaggtccccagctcctggacttcagcgtggacgaggtggccgagcagctgaccctcatagacttggtgaggatcccggacagggtcgggatgagccacagtgaggggacaggttctgctaagcaccaatcccacacccctcccctggcccaggagctcttctccaaggtgaggctctacgagtgcttgggctccgtgtggtcgcagagggaccggccgggggctgcaggcgcctcccccactgtgcgcgccaccgtggcccagttcaacaccgtgaccggctgtgtgctgggttccgtgctcggagcaccgggcttggccgccccgcagagggcgcagcggctggagaagtggatccgcatcgcccaggtgtgttgcgggcgcggagaggggatgcgggggcgggccctggggcaaggggaaaaaatgagggctccggagagagataggggcgagtctaggcgagggagggaacggggtggaaagttgatacctagggtgagacttgggttcagggaggagggtctgggtcctgcagagaggccgcgggcacgactaggtcccaagggagctgggagaagtagggagcccggaccggagaagtcaaggtcggaggcaggggctggaggggcagctggggaggggctggagcccgagggaggagggaggaagggaatcctagggaataagtgggagtcttggtagcttgtcggatgtgagacaacacccaggggtccgacctggcgtcacaagtcacgggatcaggctgggcgcagtgactcacgcctgtaatcccagcactttggggagagggaggatcgcttgagcccttgagtttgagaccagcctaggcaacatagtgagaccaatgtttctagaaaaaaaaaaaaaattaaaaaaattaaaaatgagacttacaaaaaaattagccgggtgtggtggtgtgcccctgtaatcccagctacttgggaggctgaggcaggataatcacttgaacccgggaggcggaggttgcagtgactcgagatcgggccactgcattccagcctgggggataaagcgagactctgtccaaataattaataataataataataataagccatgcatgatggcgcgcgcctgtagtcccagctactgaggcaggaggctgaggcatgtggatcgcttaagcccaggaattccaggcagcaagtgagctatgatcgagccactgcactccagcctgggccacagaccctatctctcaaaaaaaaaaaaaa

SEQ ID NO: 34916 - DNA, 1699 bp, Artificial sequence
  DNA replication origin
acaaaaacgaaatccacagccaggcgcactggctcacacccgcaatcccaaaactttgggaagccaagagggaggatcgcttgagcccaggtgtttgagaccagcctggcaacataatgagaccctgtctctacaaaaaataaaaaattagctgggcatggtggtgtgtgcctatagtcccagcaactcaggaggctgaggcaggaggatcactggagcccaaaaggttgaggctgcagtgaactgtgatcacaccactgtactccagcctgggtgaccaagggagagcctgtttcaaaaagaaggcacagcttacccctgcaatcccagcactttgggaagtcgaggcaggcagatcacttgaggtcaggagttcaagaccagcctggccaacatggtgaaaccctgtctctacaaaaatacaaaagttagctgggcgtggtggctcgtgcctgtaatcccagctacttgggagactgaggcaggagaattggttgaaacctggaggcggaggttgcagtgagccaagatcacgccattgcattccagcctgggcgacagagtcagactccgtcttaaaaaaaaaaaaaaaaggcacagagaggttaaaatacatgctctacacagcaagctagtggacgagtttgcatctgagtttgagactttctgacaatagccttccctgaaccaggaagtcgtatcacctctttccaaaaaaaagaggtcagattaatcttatcctaatacatgttaaaaatcataaagctctattttcttctctggcctttgagtacccggcttcaaacccctgccctgccatttaccaaaggtgtgacaaattgttctttgcctccctttccttaattgtaaaaggtggataaataatagtacctccctcactggactcacagtaactcagtggtgagttactgagtaaatccacactagctgcttagtgaacattactgttgctgttacatccttaaaaacactcagggccaggcgtggtggctcacacctgtaatgccagcactttgggaggccaaggcgggcagatcacttgaggtcaggagtttgagaccagcctggccaacatggtgaaagcccgtctctattaaaaatacaaaaattagccgggcatggtggcacatgcctgtaatcccagctactcagaaggctgaggcaggagaatcacttgaacccaggaggcggaggttgtggtcagctgagattgcgccattgtactccagcttgggcaacagagtaagactgtctcaaaaaaaaaaaaaaatttaagagagctctccgttttacaaatgaggaaagtgagcctcagagagggacagggactcacccaaggtcacacagccagtcttggattcaaacttgagagtttgtaaccctttctaatgatcaggacctcccagagttgcccaaacttctgacccagactcttcagaggcctgcgcggaggaagaggaagggctcatgcctcaaggtccccagctcctggacttcagcgtggacgaggtggccgagcagctgaccctcatagacttggtgaggatcccggacagggtcgggatgagccacagtgaggggacaggttctgctaagcaccaatcccacacccctcccctggcccaggagctcttctccaaggtgaggctctacgagtgcttgggctccgtgtggtcgc

SEQ ID NO: 34917 - DNA, 1101 bp, Artificial sequence
  DNA replication origin
ggcggagggccccgggggcagccaggtgaggagggggtttggtgggtggcgcggggccggaagcgaccagttgagggcggagctggagagccgagcacaggccgccaggtgcagtgggcggaaggaagggaggggctcggaggcgaccagatgaggcgaccaggtagaaaggggactgggggcggccaggtaagtggggggagatccagggaatggggtggggccaggcgatggccgcgcagttcccgagaggagcctagggacaacttggtaaggacagaactggacggcagagttgggaaaggcaggtttagagggccggggctggaaggtggaatggggttggtttagaagtggctaggtgagggcggatggggcagccagtgaagcgcgacaggagggctgagggaagccctgggtggaaaagagtgtgtggggcgggggcgggggggtggggggaggggacgggagggggaggggacgggagagggagtaggggacagggcatgggagagggagggtttccagggcaagttgcaggagctatttgtggatggggaggaacaataacttcaagcgggcagggagtggggcacacacctataatccctgcgcttcgagagaccaaggcagaaggccaggaattggagaccagcctggacaacacagcaagattctctctaataaaaataaaaattaaaaaactagctgtgcgtgatgatgcccagcagtggtcccagctactcaggaggctggggcagagggaccgcttgagtctaggacttggaggctgcagtgagctatgattgtgccactgcaccccagcctgggcaacaaaacaagacctgtttctaaaaaaaacaaaccaaaacaataactccaagaagccgggagacagaggaatcacatgaaagaatggtgctacaggcggggcgaggtggctcacgcctgtaatcccagcactttgggaggccgaggcaagtggatcatcaggtcaggagttcaagaccaacctggccaagacggtgaaacaccgtctctactaaaaatacgaaaaaactagctgggcttggtggcgggtgcctgtaatcccagatactt

SEQ ID NO: 34918 - DNA, 1512 bp, Artificial sequence
  DNA replication origin
tgggaggcggaggttgcagtgagttaagatcaagccactgtactccagcatgggtgacagaacgagactccatctcaaaataatagcaataataataaaaagtggaagatgcccccacacttgatcaagctagccccttccactggaggacagaggactctggtctggggacacacacatgcccccacacaggagctcccccacatctggggatacaaaaaagaccccttggggacagatatgtcctttcttctggggacagattgataggcacccagcggaagagccaggacctctcctgggctggcgctgggtccggctggaggcacccagaggctgggtccggcctgccctgccccgccccgccccagcagctcggccgctccgcccctctggcctcagcgcccggccactgcccgccgcccgccacccgccacccgccggcccttccgcctcactcagcggcgccactgagagggacgggcgccggccatggagcgcacagcaggcaaagagctggccctggtaaggggacaagggatccccggaccccgcatccctggtgacccgcaggtccagaaactccaagcgcccgcccgtcggacggtatctgctcccaatctgaacttgccctggagtcccctcctggggactcgcggcccttgacccagtgaagcgactggttcctcttagggatgggggcgcgagtctctgagcgcagtcggcagaaagagctagagacaggttctattagactgggccctgggacatccccaaatgccaccccatgtcctcaggacctgggaggaggggacccgcagcgaggaggggactagcctgggaccccagccctagtctcgcagcttctggccgggaaggggcgtggggatgcagcaggaggactcggcccgagtccgagcggccaaggaggctgaggccccaggacctgtgcccctttggtgccctgagtccgcctgtgcgtccaggcaccgctgcaggactggggtgaagagaccgaggacggcgcggtgtacagtgtctccctgcggcggcagcgcagtcagcgcaggagcccggcggagggccccgggggcagccaggtgaggagggggtttggtgggtggcgcggggccggaagcgaccagttgagggcggagctggagagccgagcacaggccgccaggtgcagtgggcggaaggaagggaggggctcggaggcgaccagatgaggcgaccaggtagaaaggggactgggggcggccaggtaagtggggggagatccagggaatggggtggggccaggcgatggccgcgcagttcccgagaggagcctagggacaacttggtaaggacagaactggacggcagagttgggaaaggcaggtttagagggccggggctggaaggtggaatggggttggtttagaagtggctaggtgagggcggatggggcagccagtgaagcgcgacaggagggctgagggaagccctgggtggaaaagagtgtgtggg

SEQ ID NO: 34919 - DNA, 1011 bp, Artificial sequence
  DNA replication origin
cctaagaggaaccagtcgcttcactgggtcaagggccgcgagtccccaggaggggactccagggcaagttcagattgggagcagataccgtccgacgggcgggcgcttggagtttctggacctgcgggtcaccagggatgcggggtccggggatcccttgtccccttaccagggccagctctttgcctgctgtgcgctccatggccggcgcccgtccctctcagtggcgccgctgagtgaggcggaagggccggcgggtggcgggtggcgggcggcgggcagtggccgggcgctgaggccagaggggcggagcggccgagctgctggggcggggcggggcagggcaggccggacccagcctctgggtgcctccagccggacccagcgccagcccaggagaggtcctggctcttccgctgggtgcctatcaatctgtccccagaagaaaggacatatctgtccccaaggggtcttttttgtatccccagatgtgggggagctcctgtgtgggggcatgtgtgtgtccccagaccagagtcctctgtcctccagtggaaggggctagcttgatcaagtgtgggggcatcttccactttttattattattgctattattttgagatggagtctcgttctgtcacccatgctggagtacagtggcttgatcttaactcactgcaacctccgcctcccagattcaaaggattcttgtgcctcagcctcccaagtagctaggattacaggtgccgccaccatgctcagctaatttttgtattttttgtagaggcggggttttgccatacttgccaggctggtctcaaactcctggcctcaagagattcgcccacctcagcctcccaaaatgctgggattacaggcatgaaccacggcgcccagccttattattttttagagacagggtctcactcctgttgccaaggctgcagtgcagtggcttgatcttggctcactgcaatctccgcctcctgggttcaatccattctcctgcct

SEQ ID NO: 34920 - DNA, 1779 bp, Artificial sequence
  DNA replication origin
agaggcctccccgaaacctttacatatagagttagagttcagaggctcccccatcacagacgtggccttgacctaagtccccgcccccaatggctaggatcgaccctgcaggtgggcccttacctcctaggccccgcccccgaaagaaaagccccgcccctgggtggagccttccaagaggccccacccctctcggctgacccggctctaccctggccgcaggaggacggccgcttcgcgggaaaggagctggatccccaggcagataactatgtgccaaacctgctgggcctcgtggaggaaaagctgctgaaactgcaggcgcagctccagggccacgacgtgcaggagatgctgtgccacatcgctaaccgcgaggtgccctgcagccatggggcagagctccagagatctaggagtagggctgggtcggaaaaccagggaaccgggggcaacttcgggagaccagattgcaggctgatcagccaggaaggggtctcggggacaacgggcgaggtttgacgagccaggggtgagcccgagccacgagggaagaaaccagaagaggtgcaggcgggtcctgtgaggctagaggacgcggctggggtatccggatggggagaggcctagtggcagggccccagagaccaggggcggacctgagtgatgagggggtgaagctgggtatcaaggtgcctgcttaaggagggatgggagtgggcagtggtctccagttggaactagggcatatctcggaatggggtagggaggagggggaacgtgacttctcggtggcccctggccccgcccaccttcctctctcgcttcccatccccgcttagttcctcgccagcttagagggaaggctgcccgaatacaacacccgcatcgccctgccccttgccacttccaaggacaagttttttggtcagtatgggtggggggatgaaggggtgcggttggggccccaagctgggtagcaggaggttgtcagataccctgttcagggccaaggtgggggtggagtggggtggtaaagggaaggggagccagggatggggacctggatcccacatcgctccctgctcatccccccaccccccttagacgaagagagtgaggaggaggacaacgaggtagtgacccgcgcatcactcaagatccgttcccagaaattaatcgaaagtcacaagaagcaccgtcgctctcggaggtcctagactcgtcctgacacccaccaggcggcccccttcggagcccccgatccctccgggtctagcgcaggccccacggggccccttcaggggctgaacgcggcccggaccgggaacggaggcggccagcggcgcccggaggggaggaaggggccgggccagacgttcccacagtaaatctccccagctgggtccgccccggcctcagagttgcgcaataaatgttaccgaccatgcccctgggtattcatctgtttttgaccctgcaccacccaagagacggctgtccctgaaaacccagggccacagactgcctcctccaacctgggtcatgatgactcccatcagctagtgacgcagatggagcttaaaaatgggagatggcccgatgtagtggttttatgcctgtaatcccagtattttgggaggctgagttgggaggatcacttgagtccaggagctccaggctgcagtgagctatgatcgtgctactgcactccagcctgggccacagagccagaccctgtctcaataaataaaataagggcggggtgcagtggctcat

SEQ ID NO: 34921 - DNA, 1067 bp, Artificial sequence
  DNA replication origin
ggacacccagaggggagaaacagggttggggtccagtgttcaccggcgggaaccaggacccaagggggacacagcggtcttagaataatgcaaggaagactttacagtgagggacccggcgcagggaccccacttgccaggatctgaggatggtactgggcggtccactgggtcccagaccatgttacagacactggagacagaacaagagacgaaactcccagttctcctagagctggcatggcaaaggagttagcatggtgcaagagagaacggaaggcgagtgtagaaatgacggcgagtgtagacagctcctaggggttttgctgcgaagggcagcagaaaaactgaacggtagctggagggggaagggatgtttttcaagaaaggagcaggtttgtgagctgaataaccgacctggcagagaggggagacagggtgtgtcggtttcaccggcttaggcacccctggggcccgtctggggtggggggggggcgcggcggagagggctgcgggcagaactcacgtgcgtctcgtcagtgccagtggcgtccttgaccttgccaaagatcacctccatctggtacatgctccagcgctgccgcagctcctcctccttggcatgcaggctgtcctggatggtgtcgtcggactgtagcagcaggtgctcgcggtgggtctgctcgtgggttgaggtcagagccagggtcagctggtggacagcgcttgggaaggaggccggggagggggatccagataggggcccgcgaggaacagggctcaaactggagggaagggagagggcaaaagcttggggccagataaaggcacccgggcaggtgtcaagaaagtgggacaaggtcgggcgcgggggcggtggctgtggctcacgcctttaattccagtactttaggaggctgaggcgggaggattgtttgagcccaggggttcgggaccagcttggacaacacggcgagaccccgtctctacaaaaaacaccaaaattagcagggcgtggtggggcgcctgaagtcccagctacttgggaggctgaggtgagaggatca

SEQ ID NO: 34922 - DNA, 1356 bp, Artificial sequence
  DNA replication origin
gggagatacctggacccccaaatgtccgatgacctctctaccaactcacccaggtggcacctccttccaccccaggacccggcacattgaagctgccatctgccttggtcccccacccagcaaagcccacccccacccttgcccattcggtccctctgaagccccctgctccttggcacctgacatctcctaggctccccgtgtgcctctcagcccccaaaagtccaccctccaccaggtaacccagcaagctcagaggcacagccaggattcgaacccaggtctggctttccccagagcgtagtggggctgggaaaagccatccgatcactagatgcctagacacactccctgaggctgagggtctgtgcccagctcctggggagagggtggtccccctatctcctcgcccagggcatcctggacctggccatccacgagtaagaggcggggtcacacggggcttgggatcagcctggaccccacgccgggggaacccaaggaggatctggctggtttctagaggcgagggtggcggggagggaaacccaggcccacggaaaggtgggcagctccaactaggggacactcacgtcccgtccatgtcatcatccagctccttgaaggcatcagccgccagctcctgctcctgttgggccttggcagcagccagctgctctgtaaagaagccacctctgtcaccccctgcccacccaccggctcccatcagcccccgcaccccacagggtcgtttgccaccaagcgcctactatatgcctggccccatgctggaccctgaggacacgactgtggaggagacaaaggtccctgcccttaccaggggagaacagacgaagagcaaggtgaatggttgaagcctggttgtgttgggggagaccgggacaaggtggggagtgcagaggcaggagggccactggtggggctggagcagggaggtgggaacccaggtggcagagggcagccctgtcaggccactgttgggacagaggtgggggcgagggcagaagccaggtgataacaagggctggcccaggctggggactgaggaagaagcacggagcagaggcagattctggggagacgcagatggagtgcgcagacggtcagaggtgggaggtggggttggggagaggagagcgaccactgagactttaggtttaggacctggcagaggcatgtcggggcagggctggcaggaatgagacttcatggccaaggatgctgggagatggggaggatacagggagggagaccggtcctgggggcatcttgggggtccccagggctgctcccaggaagaggggccagccggacagaaggggaccgagcctctgt

SEQ ID NO: 34923 - DNA, 1634 bp, Artificial sequence
  DNA replication origin
tgcggtcggtgttgtggactcagggtccacccacaccctcaggctcacaccacagcccaaggggcagcctcggtgtctctgcccctcctgcggggcctgcagggaggaccgacagctggggtcggggggtctcggtggggggtgctggggccacccagctggccagggtggccaggtgccagaaccagaggcagctcctttgtgaggcggggtgggggcagtgtggtgggaggaccaagtcccctcccttctcctccactgacctcggaccggtacttgtccctgatggcggcccagacgcggtcgtagaaagaggtggcgtctgtctgtgtgtccccactgaggagggcctgtgtgtgttgggggtggtgtcaagatctaggccaccacgtgtcccccatctcggccaccccggcacccgggctgcggtgccaggcacgggagggctgggccccgggccctgatgaccaggccagggccacgccagtgaggcactgcggccaggagggggcagcacaggcccgtgggaggggaggaggagaccaggggctggagtggttgggggcactgagacagaaagagagaagcagatggacaaacggacgtacagatggaggaagagagagcccaggaccagagagggccaggccctccaagggagaggccaaggcccaggctgcagatggagagggagaaacccaggggtgggcagagaagggaggccagaagccaggggccacggggaaggaggaggataggaaaggagacagacaggggacgagggtgtgggggaggaggggaatagggcaggacaggggtgggggaggaaggggattgggtgctcaacagcgggtagagtgggggcaggtgcggggaaacgggctccagcgcgacctggctccatcccgggtcctgccaggcgggaagcggccctgagtggctgccatcccagctcacccagaggaggcatcccaggccagcaaggagctttccttggtccccctcctgtgccctgaggtcaccctggggcaatgctccctagaagtccccaaccaaggggcagccgggggtacctgagcttccgcttctgacaacgccccatccccatctgtgtccagctccgggtgagtctgcagctcagtcaccgagaccctgcgggggcgtggcagaagcagactggaggggtgaggccccagtggctctcagttgggggcaccatgtggcccacctgttcttccctgcagggccccaccctggaacttgcttcaggacctcaaggtgtaggggcctccccaccctcctgccccctcctcaggactccatgaccccaaaggagctcaaagtaaggggtgggactgggagatacctggacccccaaatgtccgatgacctctctaccaactcacccaggtggcacctccttccaccccaggacccggcacattgaagctgccatctgccttggtcccccacccagcaaagcccacccccacccttgcccattcggtccctctgaagccccctgctccttggcacctgacatctcctaggctccccgtgtgcctctcagcccccaaaagtccaccctccaccaggtaacccagcaagctcagaggcacagccaggattcgaac

SEQ ID NO: 34924 - DNA, 1995 bp, Artificial sequence
  DNA replication origin
aaaacaaaaaagcagggaacatggggacacaggttgatagagtggccatgtgggtccatcttcctcagggcccgccgcctccccttgctggggcaggccgacgagactccacctccccgcccacctctgcgcccatccagctagagctcgtcatggtcgtcttcggtgggtgcttcaggcggtggctccgggcaggcggctggcgtcatcagctccatgaggtactcgcagcgactgggctctgtggtgctggtcaccatggtctctttcccgcacaggaggcgcacctggggatgggcagacgggtgctcgagagggttcggctgggccaggcctgggtctccccgccccagctcccctgccttgcaggcactcacggtggtggagcggttggggccctgccagcagcccgtgccttgctcatacttcatggcactgaacttgtcgtggtcggggccaatccatgagccccaggtgctgtgagagacacagggtgctgagggctgggccggtgtcggggcaccaggaggaggcagagggaaggggccagcccaagccactcacccaaggctggtgggagagcccccgagtttgggtttctgcgagacaagcttgaaggggcagaggcggtagacgtatctgtggaggaccgggacatatgggttggggaacgcagggattccagcctcctcccacagccaccccccaccgcctcctccagtccccacacacagggtacctccaactccaatgaccaaccctaaacctggcccctggcttctgctccccctcaatatggaaggcagcactctcgggccccacccgcagatggttccccaaccatcaggaaactgccggtgccacttccggggccacccgcctcccaccctgccagtgggggcccctgcattcctgggacgcactcgttggtggtgagctcgtagcactggctgtacaggtaagcaaactccccgttggggccaaagtcaaaagaaatctcttgctccaggttcctggaaggggaggcggagcggttaaggggcagctggggacgccagtgcctgacccaggacgacagacacaggagggtctggctgagcaatggtgcccaggctgtcctccctgccacctcccagggaccctccctgcagggaccaggcccagcctgtggttgcctcagtgattccccatcaccagctcccctgggagtcaaggagcagtcgctgtgggacaggtgtccccgctcctcagcccccgctacctgatggactcctccatgtccttcagcgaccgctcggcctcctcgaacttgttgcgggcctcctgggcagctgggagaggggttggaggtcagagatgtcctcaaccccatccaggaggatggggaacggggttccatggatgtggctgtgtgctcccataccctcattttgctctggccaaggacttcaccccgacagccttgagggcctcaccagctatagagcagccccgacttgctgcccaggctcccagctcctgagcgagtggggccaggagtgacacaaacaagctgcggcccttggggaggcagaagggccccttggggctggcgagggtgggactggcttaccctaggcccccttcctggactccccaagatactggggcttgtgctggccgagtcagagcagggtctaagctcaggatcttccctcgacctgtgccaccacggcaggaaacgctgggcccacccgaggagcctggcccccgcccaccctcaccatcgatgaaggcctgcgtctgctcgtcgtagggcggcattttgtcttcctcagcagggctggccggctgcgggggtgacagtggcggtggggcctcctggggcaggggcagggtcagtgagtagcccttcccccaccctctctgtctccacttctcccccaaacacggaccttgggctgctccccctgcacctcggaatcctcctcctcctcctcttcttcagcctcttct

SEQ ID NO: 34925 - DNA, 1170 bp, Artificial sequence
  DNA replication origin
gggggacttggggcttccacgtccctggggggcaggggccaggccaggggggagggggctcagcccctccacccctcccttcatcctgttatttattcggaaggtttcaaatcacgacagagtccatgttggaggtgataaaaaactgtaaaaaaaaaaaaaaaaaaaaagacaaaacaaaagacaaaaaaaaaaaaaaaacccaacaagaacacttcgcgttgcgtttagactatttattaccgggatcacaggcctggccgcggtaacagacttttacatggaattgtttaattatttgtacttttcatgccagaaaataaaagttcagaatcttaaggccttgggtgatctctgcaccgctgcgcggggagcacgcaggagcagcctgtgtagtagcgcccaggcccccgtccttctctgggcctgggtctgtctgcagcaggggctttggccccgggagggaacccttggcctccacagagcacagatgagacccagggaaggtgggacacgggcccggatggatgctcaagacagaaatggtccagggtccatccacctggtatcttcaggagtgatccccagatggtgggggaggcccgggtgggatctgcagaaagctgcgtcccctgcgctcaacccctgcccacaccccggtccacaccccagcaaagcgaggcagacacagacaagtttgggtgggggatcacatttattgtattgaggtcacaggtcaagtcattcactagtccccactaggaggggtggcagggacagggctgggggtggtggggcgagtcaccaaggtggggggcccagggagggcaagctcctttacccatctttgaaggctgttggggcctgggaatgtggaccagccccgcctgggccccagagcagggcacgaagccccacaaaggtcctgccgccacagaggagggcaacagagccacaggcaggcccagaggggcgggtggacggcactgcaggggctggcttcatgccttcttgaggttctggggcaagagaaagaccagattagaaagctggggacagctggacatggtgatgtttgcctgtagtcccggctgcttgggaggctgaggtgggaggatcatttgaggccaggagttgaccagcctggagaccttgtctattttctcttat

SEQ ID NO: 34926 - DNA, 956 bp, Artificial sequence
  DNA replication origin
aagaaagaaaactagggcgatgcaatgtccagacagaagccgggggccggggctcgagatcgggggctgtgtccactgcaatctggaaagacgaaaaacccaacaaaccgaaaggggataggtaggtgacaagtggacgggaaaggagtgtggggctgggcctttgggcccatccaccccaccctgggcctggcggggagtgccggggtcttgctgccggggaggcccagtcctggtgggggaggctcagggctgggcctctccctcagctgtgtgggccaaggcctcggcccagggggaggctgagccccggggacaggggtgtcctttggcctcaagtgttgtgggggggggggctgcctccagcccaccgtgacgccaaggtggaacgaggtatcgtgtgtctcaatgcatgtgcgctgcgtgtgcacgcctgtgttcgtgggcgccaaggagaccgctgggggtccaggagagatctctgcagagaacctgggggccagggcgagggggccgagagggtgagggagcgtctggggcagggtctggggtgggacctcctgcctgggcctgtgggatgctatgggcatatgtctgcgtgttcctgggtggtgtttgtgtttctccgtgacctggtgtccaaatttgatgtccaaatatctatcgctacattcacgtgtgcacgtggacaggtggatggattcgtgtgcccacatctgtggtctgtgtccacatggacgtagccccagcttctgtctctttctgtctatccctgtccacgtgtctgagtttggccaaccagtcccttaacgtgtctggggcatgtcgctgtgtccgtctgcgtctgtccgtgtgtccccgtggtgtgactgtctgcgtggttgtttctctgtgtggccccgtgggctgctagcccctaagccctgctccctgggccccccccacccccgccccag

SEQ ID NO: 34927 - DNA, 1961 bp, Artificial sequence
  DNA replication origin
ggaaaaatagatacagcagacataagggggagaattgctgatgaccacgccccagcctcttccccagtccctggtgacaggtcacccactgagcatttgagaggtggacttccctaccatgcttccaggacattgataaacacacaatgaaacaaggtcacacaatattccctgctttgtaaatagacttttctgtcccccattttacaatactcaccagtcaccaccgtttctgggaaataaatatatatgtccatctttttctctttttttttttagagacagggtcttgctctgtagcccaggctggagtgcagtggtgtgatcatagctcactgcagcctttaactcctgggttcaagtgatcctccagcctcagtctcccgagtagctgggaccacaggtgtgcaccaccacacccagctaattttttttttttttttttttgtagaggttgtggcggtggaggacgggggtgagtcttgctgtattgtccaggctggtctcaaactcctgggctcccttgatcctcctgccttgaacttccagagcactgggattacagccatgagccactgcacctgacccaccatttttttaaacacctgcagagagtttcgttgttgggttggactataattaataatgtgattcagataacagtgctaaaatgtgtctaattcctagttaggagaagtgctttgagaaagagtaataggggtggtggggggaggacaaatttagatgagagaggacagggaggatgtttcaactgagacccaaagaaagaagaggaggaagagcattccaggcagagagaacaggcaatgccagggccctgaggctgagacatgcctggtgtgtttgggaaaaatgggggaagttcaagttgctggaacacagtaattggggcaggaagtagggggagatgagggcaaggatgtcatggggaagaatgtgcagggttttgcggtccaaggaaaggactttggcttttctgctgaggaaggtgggagccatagagggttctgagcagaggggggatgcgacctggctcaggtgttcacaggcgccctctggctgccgtaggggggacagacagtgggggatgggagcagggggggccagggtggaggctgctgcactggtccaggtgatcagtagtgaaggctgggccagggtgggacagtggcagtggggtgaagtgtgtggattctggataaggaggaaggtagagcctacaggatttagagtgggttggatgtgcatgtgaagaacaggtgtcgagaacaacctgaacctggggacatgagcacttaggaggacagagttgccattagtgagttggggcagattggaggcgggcgggagcaggaggcacccgtgctgtgtatgaagtgcccttgacacccccatgtggggcacctggatgcagttgccaccaggggtgcagactggggacatttgggagctgatgactaaagacctgagtgtccctggggggcccagtgtagctgggaagagaaggggccagtgtcttaggtccactctctataggagtgggaagagtggctgggtgtggtggtgcatgcctgtagtcccagctacttgggaggctgaggtgggaggatggcttgagtccaggagttggaggctgcagtgcagtatgattgcacctgtgaataataactgcatttagcctgggcaacacagcaagactccgtctttcaataaaataaaaataggccaggcatggtggctcacacctataatcccagtattttgggaggccgagatgggagaactgcttgaggccagaagttcaataccagcctaggtaacacagtgagatcctgtttctacaaaaaaaaaaatttaaagattagctgaggccgggggaggtggctcacacctgtaatcccagcactttgggaggcggaggcgggcggatcatgagatca

SEQ ID NO: 34928 - DNA, 1944 bp, Artificial sequence
  DNA replication origin
tccctttgtttctcggcgcttcttcgcgggccgcagcctcgcgcgggcgcctcgggctgcggggagggggaggggagaggagggcccgcgggttgggggggcacctctgggctcccgggtctccgccccccgggagatggggtgggaggccgagacagcccccttaggccaggtccaggctccccacctcgccaaggctctgggccgcgaggtgaccttgagcgcggcccgcccgcctgctcgcccgcaccgctagccccgcgctcggtgctttcagcagccacggagctggtcagctcccgagcgcgcagcccctcccgccctgccacgccctgcctggccacgcccgggcacgcccatctaggccccgcccccagggccccgggggcccggcctcgcccgagccctcggattcccactcggcagcccgggcgtatcccgggggcggggctggccagttatagccccaccccggctccacccccgcccctgccgcgcgactccgctccccgcgccgccgcgcgtcctttgtctggtcccggcgcctgggcctccctcttccactcttcctatctctccgtctctgcgtgtgtgtctctgtgcattgtgtctctttccgggcccctttttcgagtcgtggctagcactgggggtgggggcatgattggcgctccctccatgcctaagcctctcccctcctggaccctgggacccgcccacctggctctgagaaatgaggtcccggaggcctggctcacctgctgtgtgacctcaggccgttcctttccctctctgggcctcgtgctgttcacccaggtctgggaactggagtgtggcctcctgaggacctcagaactcccgcaacagtccagcatctcctaagcgtcctctgatcggttctctcatttgaaaaaggaaactaatgcacaaagggaaagagggtgtggtcagaggtcacacaagggccttgaggacctaggttctccagtgagcgagccctggggcagagatgtatcatggggacaggctgggaggaagagaggtgacaaattaagaccaggaggaccctgcattgaagaagggcccagaagtaggaggctcagtcagcaccacgtggtagcccagcctcaccatgcatagccactcaatgccctattgtcgccggtatccaggcatctgtcactgtgactggggccaggggccgcagctgggggccgtgggggtcagacacaggaggttttaagaaaaaagtggcctcaggtgtgttcactgcaaaacccatacgtcagatgtatgtgcgatggtggaaaagaggaagagagagtgatgaggccagggacacagaacggttcagagagagggcaggacagtggagaagagagggaaacagaggaagaaagagggagagagaaaccaaaagtcgggggagacttagaagaagcactggagagaatgggaagcttccctaaccctccatcttttatctgccctcctcctccctgactttgccacccccccatctctgtctggggccagtcgccgaagtccctttgatgcccatgtagccaccatcccaggctgtgcacttactgcaggctggggcagggcgggtgtggcttccatcaatctgatccccattatcagctcagccggctcagccacagaggaaacgagatactggtcccgctaagctctggcacaaatgggagggagaacgggtggtggccagattagcaggctaggcctcaagaacctgggtctgaaccacccagtcacctcttcactctgctcaggttggggacaccatgggaggggggcagccagtaactctttcggctctagggtcatcggatcaggagtcagatgttgacaccatcccctccacctcctcctgtcaccctggacaagtcataggtccctgtgactaaccctcagtgtccccat

SEQ ID NO: 34929 - DNA, 1609 bp, Artificial sequence
  DNA replication origin
tggtgcactcctaggggggcgcccgatgctcacgctggggtcccgcccgggcggcctctggtgcggccgctgcagatgtggcgatgaaggcggcggctccctcgagggccagggacgggcccgaacccggggatgcgcgcgcggatggccgggccccggggtggcctgcgggcggcaggggatggaaagagggagcgggcgcggggttgaggacgccccctgcgcggccccgcggggcccggggaggttgcgcttcccgacagagatcgcggcgctctgcctttcgccgccgcccctcggtcggtcctgtccggtcccgtgtgttcaagtcctctcccctcgcccaccctccctccctccctccggcccgcgctgcgcgctccgcgctctggaccgcgccgccgccgcccccagccctttatagcagcagctgccagcgccggcgtcgctcattggctgcggcgaccgagctccgcctcctcgcggctcccgacggcgcggcaggtggaagtgagcgcgcactggtcgggactctgaatcccccaaaagcgcatcctaggtgctcgggttgccagatttgggccctccttccctcgaggcccttgcttcctaccctggcaccccttcttgggctggctttcgggccaggagacgggctcccctcctccgtccagctcctagagctggaggagccaacagagcgaggaggtattagtggcctgaatatgcgaccttccagaggtgttgtccactgagggaactggacaggggatcaggaaccaatattttagtaggcagaggcctgggtccccagatttggaggcaccagtgtagaccacctcaagaccacgggggagggtggctactgtggccctagtcttctgcagaaggagactgggacgctgttggttttgagtgagctggatccttctagggttcaaaaggtaaggactggcactccccagtgcaaggaaactccgcactgctccgaagggggtgaaaaggtttggggctcagtgttctggacaatcatcgctggagccatgcagctctgggaaaccacggatccttcttggaccccacagaactggggtgggtggatctgccacataaatgtcctggctttctaggctcgtgattggtcctcctgactgtggagtcatgctcgctctctgctagggggaacctggcctctctctaaggcgttgggggtggcgcagcctcctttggtgcgcgggcgccggtgcatgtttacgtcggggcgcgggaactagcacacactggggcggggtcgccagggcgtgaggcttcagcaccacagacagcaatccgacagtccggtcgagggcgctgccggcgaggtagcccagaccccctaactggagagcggcagtccccacccaatcctcgttcctgcacgccctttaggctccagactgtcagagagcgccaccagcgaggagagcctaatttgcccaatcaggggcggcccttgagataaccagttactggaagatgccctagagatcgagccaatgggagtgcgcgcaccaggggatgctgccacgcctggaaagggcaggccaatcgcagtggcccgcgcaatagg

SEQ ID NO: 34930 - DNA, 1132 bp, Artificial sequence
  DNA replication origin
tgggtgggaggggatcccagcaggtcccaggggcggcttcgccccaacgcagtgtctgggcccggttccacctgcgctcggccttgtagggccccgccccgccccgcccactctgaccccgccccgtcccgccacgggctcccggcaggtgcgagatctgtggctaccagtgccggcagcgcgcgtcgctcaactggcacatgaagaagcacactgcggaggtgcagtacaacttcacgtgcgatcgctgcgggaagcgcttcgagaagctggacagcgtcaagttccacacgctcaaaagccacccggatcacaagcccacctgacccacctgaccactgaccgcccctatttattcgtccgctcggacaccacgcccgggcttgccggggcctggacagctgcgagggccgcccggaccgcgggccggaaggaggcgcccccgccccgccccagagctgggccccctgggcaggttccccaccccgccccaccgcatccttctcggagctggtgcctggggctgcattgctggaactgtgtcaagagagcagagtgagattaaagagcgagaaaggagatgcccttcccctaggcctgaatgatttggggtgccaggcccctctctgtctccagcctacttgatcccttcctaagcgaggcagggaacgagggatgcccctgggcccagcagcctcgcacagcccctgctcccacaggatggggtgaggcttgggggtctggggtctctgggcatctcccggaactcaggaccctaatttccacttcctcctgttttatggggcacccatctcccaccctcagtgagctccgggatgagatggggaggtgttcagtaaacccctaaaatgagaaacatttgcagctagcgacaagcgccatgcaaaagagagagtgatgcgttgttttccggggatgctgtttaggtcggtggtcagggagggcctctgaggaggtggcatttgcgcatagaccagaatgacaaagatctatcccagaagaaagctgggggaggaaattctcaggccagaggaacaaccagtgccaaaaccccgaggtagaactagctcggcgtgttcctaaaacaggaagccgcggggggaaggggagt

SEQ ID NO: 34931 - DNA, 2057 bp, Artificial sequence
  DNA replication origin
gcggtggggcggggtggggaacctgcccagggggcccagctctggggcggggcgggggcgcctccttccggcccgcggtccgggcggccctcgcagctgtccaggccccggcaagcccgggcgtggtgtccgagcggacgaataaataggggcggtcagtggtcaggtgggtcaggtgggcttgtgatccgggtggcttttgagcgtgtggaacttgacgctgtccagcttctcgaagcgcttcccgcagcgatcgcacgtgaagttgtactgcacctccgcagtgtgcttcttcatgtgccagttgagcgacgcgcgctgccggcactggtagccacagatctcgcacctgccgggagcccgtggcgggacggggcggggtcagagtgggcggggcggggcggggccctacaaggccgagcgcaggtggaaccgggcccagacactgcgttggggcgaagccgcccctgggacctgctgggatcccctcccacccaatcctctagcggcacggggcggcctgtcactcactgcaggggggtctcgccggtgtgggtgcgccgatgtacctccaggtggttcttcctcttgaaggacttgccgcaggtctcgcaggtgaattcacggacacctgggggcggtggggaccgaggctgaggacggtgggctatggggtgtctctgatgtgctgcagactctgatgctagaaggagcatcaggctgtctccttggatctcccaggactgcaggtgcaggccgaccaaaccctacgtccttcccgtgcatttgcccacagacgccatcaagcagaactgagatcgaacttgggtccctgagaggcatagggtgcacactaccaagccaacatgggtctgaatttgtcttgtgtgtgtgtatatatatattttgcgacggagtttcgctcttgttgcccaggctggagtgcaatggcccgatctcggcttaccgcaaccacaaccttggtctcgcgggttcaagcgattcttctgcctcagcctcctgagtagctgggattacaggcatgtgccaccaaccatgcccagctaattttgtatttttagtagagacggggtttctctatgttggtcaggctggtctcgaactcctgacctcaggtgatctgcccacctcagcctcccaaagggctgggattaccaccacgcccggccttgtccctgatatttgaactttgggtgatttcgcaaaatgaaaacaaaaacaaaaacaaaaaaaacttctgcccagcacggtggctcacacctataatcccagcacttagggaggccaaggtgggcagatcgcctgagatcaggagttggagacaagcctggctaacatggcgaaaccctgtccctactaaaaaaaaaaaattagctggcatggtggtgagcgcctgtaatcccagatacttgggaggctggggcagaagaattgcttgaacccgggaggcagaggctgcagtgagccaagatcggattccagcccgggcaacagagtgagactctgttgcaaaaaataaccacacacacattaaaaaaaaccaaaaaaaacaaaaaaaacccccaaacttctgacctcctgtgatatcagaagctctggccctcagggcatgccctatcgctggacacaggcaccatggctctccactatgtccccagcccatgcagaagacctgcatctctgccacaagtggaaacagaagcccagtcccaagccagctgctcctctttgcccagctctccttcctgctgctgcttgggtgggcactggtctagcctgtggccccaggtgctgctataggttccaatctggaagagcagtggcggtgtcagctgctccctaagtctcgcatgagacctgctcttgggatcatggggcatggggtcgcggggataggagggaagatggccagccccacccaattcctgtgattgattggtaatagttcctgtcgctgtggctcacatagctacagcttactgaggacagggaggaggctcctaggggtgtagtcctgtgcccggagacccagcact

SEQ ID NO: 34932 - DNA, 2061 bp, Artificial sequence
  DNA replication origin
ggaggcagcagccgaggagggcgcagcgggccgaaaggcgcggggccggccgcgactcacggagtcggaccgggcccggcgacggctcgagtcccggaagaagtacgacgtgcggcgcgtgtacctgggcgaggcgcacgggccctgggtggacctgcggcgccgcagcggctggagcgacgccaagctcgccgcctacctcatctctctggagcgcggccagcggagcggccgccacgggtgagggggcctggccccgagggagggagggaggagacgcccccagaccccgccgggctttaccccgccccctccgcttctagggccagcccccggcacctgcggaccccgcccaggagccgggccggcggcctgggtctcgtactgcctggccgggacgcgcctggctcgtggccccgcctcccatcgttccgactgcccaatcctagggtgcacccagcccctcgacccgccttctgagcgcttggccccgcccgctagaactctggcggcccaatcctgggactggccccacctccaggccttgtaactaaccaggccctgggggggcagccccgccccctcaccggtctcatcctcccccgcttagttccccacctggcctgggactctggacaccctggggcactcagccctgcccttcttgaagttctggtgccccatctgggactccgtatggccccattcccacaaccctagatccaacacatccgggggacccttcacaacctggactgcactcccctaaacctatttctgtgaagcaactcagcccagggagactcggatgaagaggaaacccctagttagcttggcaggtggagggcagagaggcctgtctttgtaaattctcagtcttgagaaggagcagtgtggatggagtttttcccttcctgccttatatgttgatgtgatgattgagttaaaataggcaaagagcttagaagagtgcctggcaggtagtgggttccctaagtattaacttttacgaggatgacgtttattccgtatcacaagcagtgccgcaaggaaatccttgttctgccctggttttcaggtacacatgttctcatgtttctctggggggagattctgagagtcaagaatcaaacagatcctgctaagttatacccacccctttcccaggacagcaggctggcttatatgctcaagagcaggactggaaatgctgggagcgcaaagatacctgcctcatggagcggacattctggtgggcagaggggatggcttgttcaaaggtctggggggtttttttgttcgtttttcttttcttttctttttttttgagacagagtcttgctctgtcgcccaggctggagtgcagtggcacgatctccgttcactgcaagctccgcctcccgggttcacgccattctcctgcctcagcctcccaagtagctgggactgcagccgcccgccaccacgcccggctaattttttgtatttttagtagagacagggttttactctgttagccaggatggcctcgatctcctgacctcgtgatccacccgcctcggcctcccaaagtgctgggattacaggcgtgagccaccgcgcccggccctcgtttttctttttgagacagggtctcactctctcgcccagagtggaatgcagtggcatgatcacggcttactgcagcctcaacctcgtgggttcaagtgatcctcttacctccgcctcctgagtagttgggaccacaggtgcacgtcactccacctggctaatttttgtattttttgtagagacagaggtttccctgtgttgcccaggctgatttcaaactcctaggctcaagtgattctccggcctcagcctctcaaagtgctgggattacaggtgtaagccattgtgcccagccctgtttgtttgttcttgagacagggtctcactttgtcacccaggccagagtacagtggcatgttcatagctcacagcagcctcaacctcccaggctcaagggatcctcctgcctcagtctcccaagtagctgggactacagaggagccacctcac

SEQ ID NO: 34933 - DNA, 1178 bp, Artificial sequence
  DNA replication origin
aggagaggagcatgccttgagtggggggtcaggaggccttcctggcagaatacagaaaaaccaggagtcatcgcccgggtgaagtgtggagtgggcagcctaggcagcggggctagcttgtgcaaaggtttggaggcacaagaaagtggaaggaagccgggcacagtggctcacgcctgtaatcccagcactctgggaggctgaggcgggtagatcatttgaggtcaggaattcgagaccagcctggccaacatggtgaaaccccatctctactaaaaatttaaaaattagcccggcgtggtgctgtgcacctgtaatcccagctcctcgggaggccgaggcaggagaatcacttgaacctgggaggcggatgttgcagtgagccgagatctcgccactgcactccagcctgggtgacacagcgagactccgtctcaaaaaaaaaaaaaaaaaaaaaaaggaagtggaagggagtgtaaaatacctcaaaaaggtgtaggcatgggttagccgctgcagcccccactgtgcaaaccttaagggtgcatgtcttccaacagtggaggaaggccctgtcttcgccatgtgcatggcgggtgctcatgaccaggcgacgatggctaagtggatccagggcctgcaggagaccaacccaaccctggcccagatccccgtggtcttccgcctcgccgggtccacccgggagctccagacatcctctgcagggctggaggagccgcccctgcccgaggaccaccaggaagaagacgacaacctgcagcgacagcagcagggccagagctagtctgagccggcgcgagggcacgggctgtggcccgaggaggcggtggactgaaggcatgagatgccctttgagtgtacagcaaatcaatgttttcctgcttggggctctcttccctcatctctagcagtatggcatcccctccccaggatctcgggctgccagcgatgggcaggcgagacccctccagaatctgcaggcgcctctggttctccgaattcaaataaaaaggggcgggagcgctgttggttgtgcgcatgcgcagtttccattcttggtctccttttggcgccctggggcagcgagagaccgtgagaaatttctcggcggcgccgaagatgcgcgccacttccggtctggctcctaacaacggggg

SEQ ID NO: 34934 - DNA, 1543 bp, Artificial sequence
  DNA replication origin
atcctaaagattggtggttattgccaaatgggacagagggaggaggggacaggttggagggccgtgtaccagatccaggagaggtgtcctgaattccctggtatccccctttctgtttctctgtccccagttcctctgtaggggattgggggttacaagattatatccctactctcccttgcaggttcctttgcccaaagactcaacaggtgcagcagatcccccccagccccacatcgtaggtaagtccgagagcatgggggcagccaagtctctaaccttacccaggccctgccaggttctcgctgggcctaggctgggctccctgggcctctgggccgagtcccttgcagggcacagggcatgtatgtctccacaccaggaatccagagtcccgatcagcaggccgccctggcccgccacaatccagcccggcctgtctttgttgagggccccttctccctgtggctccgcaacaagtgtgtgtattaccacatcctcagagctgacttgctgcccccggaggagagggtgagggcttaaagcaaagcatgtgttggggctggggagtgggctggcactaccctgagggtgcatgggagaggctggaggagggagaccgagagagccctggcctctgaccccgcctgcactccccaccttggagtaggaagtggaagagacgccggaggagtggaacctctactacccgatgcagctggacctggagtatgtgaggagtggctgggacaactacgagtttgacatcaatgaaggtaaaaactgggccaggtgcggtggctcacatgtgtgctcgtaatcccagccctcctacaggctgaggtgggaggatcacttgagcccaggagttgaggttgcagtgaactattatagagccactgcactccagcctacatgatagaccctgtgtcaaaaaaaaaaaaaaaaaaggcaaaaacctggacaggcaggacttccaaacattccaaacaccacccaggatgaggggcggcctctggggtcaaggggtaggcccaggctgagacgcagtccacttacaccctcgtcctccggccgcacacactcatttgccccaggggctccagacctgaggtcacccagccctgttggcccttgttcattccctccctcctacaactctgtgctggctactgggtgtcaccaggacaaacctagtccctcgagtcagcaagggaacaggcaaattacactttggggagcttaggagaggagcatgccttgagtggggggtcaggaggccttcctggcagaatacagaaaaaccaggagtcatcgcccgggtgaagtgtggagtgggcagcctaggcagcggggctagcttgtgcaaaggtttggaggcacaagaaagtggaaggaagccgggcacagtggctcacgcctgtaatcccagcactctgggaggctgaggcgggtagatcatttgaggtcaggaattcgagaccagcctggccaacatggtgaaaccccatctctactaaaaatttaaaaattagcccggcgt

SEQ ID NO: 34935 - DNA, 907 bp, Artificial sequence
  DNA replication origin
ggggcaggtcccggggcactgggaaggggttgacgttcatgaatcgagggaaccacagcttcaggcgcaccaacttgagcatggggtagcttttgcgtccaaagatctgaatcagcaggaactccgtctccttgttgggcatcacacctgtgctgggcagatgcaggcagaacctcagagatggagggggaggagggaagggaagaggagaaaagaaaacagtgaagtgagggaattgatcacagacagggagaaaagaatcagagagaattagaaagaaaaaggctcatgcctgtaatcccagcacattgggaggccaaggggagaggatcacttgagtccaggagtttgagagcagcctgggcaacatagtgagaccccatttctaaaagaaagagagaaagagaggaaggaagggagggagagagaggcagggaggagaggagaagagaggagagtggggggaggagagggagggaggggggaggggaggggaggtcagagggaggcaagaaagagagatgagtgatgaaaagagggattcggagagggagaagagcgagagagacagagacggagccatggaggaaggaggggctgagactcaggagaggtgctgccagctatcagtgtagcccactccccaccctgcgccagcctcctggcctcaccgtggttctccatctgctccaggacagcaatcccacactcctgctgccgagggtagtggacgaagatgcgctggatgatgttgcgaggccggaagacctccttggggaagatgttgagcagctggttgtacacagccaggtcccgctcgacaccatactcccgcatcttgcgcagggccaggtagatgaagtcaatgtggccccgcttacgcacgctgtgctccgcaaatttctgc

SEQ ID NO: 34936 - DNA, 1815 bp, Artificial sequence
  DNA replication origin
ttctcccagctggagaactttaagtttccagcccactggaatcgccccaacagtattgccgagggaggagttcctgccccatttgacagaggggaacactgaggctcagggtggcttttcccagggtcccatggtgaggaagtgggggactgggttggaacctgggtcgagggatctcggggctggaggagggggctggtggggggcgggtcctcgggcgagagacagatcccagcgccgccctcctcccccccagcgccggccccagagccgcgcagagccgcgcagagacgccgcgccttataaggcggcctcggggagcccgggccacgctatataagggccggtttgctttataaagccgggctggtggcgtggggggcggcagggccagggccaggtgagggggccgcccctcccacctccccccactcacccgggagaagaagaggcagcccggtcccctaggggctgggagcctggctgggcttgggcggagggttctggagaaatgggagtggagtgggggaggggggggacagtggagagagggaaaagcagggaggtggggggagaggcagacagagatactgggagcctgagacaccctagggacagacgggggagggcgagccaggagcgagataagacctagacaaggatggaggggcagggagaggagacagagccccaccacccccaccccaggcaggaaacctggagacagagaaagacctagagaggcagatatacaagacccaggagccctacccctggccagacagggactagccacctagagagatggggacccaagactgggccaagaaaagacagcgctggggaagagagagacagaggagtcggggggataagagggagagagacatacagacgtgcaaggggtgggggctaagacagagacaagcccccaccactaaccagagacagagccctggagctgaagacctgggggacacggagagacagagatgtatgaccagcactcctctgcaagccagcacccagggacacctccttagacatccttcttcccttcctgaggtgccctctcttccaacagggggcacagagggggcagggctagaggaagagaagccccaagtttggcctgggcgaaaaaccagggtgccgggtgccacccctctagctcagaggatccagctccccacaccccacccctcatctacattccctggtgccaaacctcagaatgcccggaatggccccctgggcaggtgccacctcagccctggctctcagcccgccccagcccccatcccccaactatggatctggggcaaaattgccttagttgggaaggacgagggagatcaggctctaggaagttcagacaggacccagggagcccaggctgcccccaatgcatcctcacccctttctctgtgccccctgccctcccctcgccccagctggcccagaagtatgaccaccagcgggagcaggagctgagagagtggatcgagggggtgacaggccgtcgcatcggcaacaacttcatggacggcctcaaagatggcatcattctttgcgagtgagtgaggctctcgaagccgagaccctgcaacatcccccaactccatgcagcccctcaacccccaaaacaaccatgatcctggaactgagttgaacactttctattggatacctttggggtggccagtaatcattgtgcccatttaacaggcacagaaaactgaggctcaggtgaaatgcattgcaccaagtcccacgtggtttcaagggaaatgactctagaatcttaaccaccat

SEQ ID NO: 34937 - DNA, 908 bp, Artificial sequence
  DNA replication origin
ctgaaggcaatgggaggctcctggaggatttggaactggacggtaacttgaactgtttaaaaaaggccattctgggccaggggcagtggctcatgcctgtaatcccagcactttgggaggctgaggtgggcatatcacttgaggtcaggagttcgaaaccaacctgaccaacatggtgaaaccgcgtctctactaaaaatacacaaaatttagctgggcatggtagcaggcacctgtaatcccaactacttaggaggctgaggcaggagaattgcttgaacccaggagacagaggttgcagtgagccgagatcccgccactgccttccagcctgagtgacagagcaagactccatctcggaaaaaaaaaaaaaaattctggctgctggatgaagaagggtgggtctgtaggggatgaagtggaagttgggagctcattacaagaggccaggaaacagactctggtggctgagacccaggtggaggtggcggggagcagtgggtggttttctggactcattaaaaggcagagccaaagaactttggagggactggacatgaggctgagagaaggagaaagggggagttgggggcaagtccaagggctctggctgagcacctagaagggggcactgctaggcagggaaggtggagggaggggggagtctggagggggaagctgcatgtcaggagtctggagcagggtgagtttgatttgagacacccaggcacccatggagagagctgaatgagatggtaagaaacccaagctgcagggagatgagggagttgctggcatatggaggcacttaaagtcaagacactgaatgaggccaggtgctgtcactcatgcctgtaatcccagcgctttgggaggctgaggcaggaggatcgcttgagcccaggagt

SEQ ID NO: 34938 - DNA, 1042 bp, Artificial sequence
  DNA replication origin
gaggcggagtctgcagtgagccgagatcgtgccactgcccagcctgggtgacagagccaagactccgtctcaaaaaaaaaaaaacaaaaaacaaaaaacagtgttggccgggcacggtggctcacgcctgtaatcccagcactttgggaggccgagacaggtggatcacaaggtcaggagattgagaccatcctggctaacatggtgaaaccctgtctctactaaaactacaaaacaaaattagccgggcatggtggcaggcgcttgtagtcccagctactagggagactgatgcaggagaatggtgtgaagccgggaggcggagcttgcagtgagctgagatcacgccactgcactccagcctgggcaacagagcgagactctgtgtcaacaacaacaaaaaaacagtgtccaaggggactgtgcagcctggaggcccccttgtcagtccctgctttccctgccccacctaggcgaagacgaaaggaaacaaggtgaacgtgggagtgaagtacgcagagaagcaggagcggaaattcgagccggggaagctaagagaagggcggaacatcattgggctgcaggtaccgccctgtcctcactgcgcagaggtcatagaggccaggagggcaccctgatgtctgaaggcttttggggacaggatatttggcattaactatactataggccgggtactgtgcttatgctcatcttccattcacaaactcactcactctgccaacaccccagcagacaggtgcttgttatcaacataccctttccgcagatgagaaaactgagacccggagaagctggctcgcttttgcacagatcttccagctgatgcgtggcaggctggaacttcaatgctagaagtcagtcatgtgataggcccactctgggcctcagtttccagtctcgaaaggatgcctcaggcggggtgcagtggctcacacctgtaattccagcacttggggaggctgaggcaggaggattgcttgaggtcaggtgtttcagaccagcctgggcaaaatagaacccc

SEQ ID NO: 34939 - DNA, 2877 bp, Artificial sequence
  DNA replication origin
aacaaacaaacaaaaaaacaaaacaacaggagaagatgatgacagacctcacaagagcttggccccagggctgaaaccccacccagtgctgtggttctgcggctgtgggcccatgggtgcccccaaagggtcccaggcagatggaggctcctggttggcgtggaggaaggaaaaggatgaaatcggctcccctggccaccccttctagcccagctgcagctgcagtccgtgggtctgagccgacccttggggttcatcggcccattttacagatgcggagcctacagccgggaggcgtggcggctctgggcggtgcagggttccggggcggggaggccgaggcgcccgccctccccgccggggctcacctgggtcagccctgagccctcgagcagggcggatcggccgctgcctgcttaaagctggggccgccaggagtgcgatcgcctgcggatctgcagctgggcaccggccgcaacgcccgccccgcgacggcaggtgagatgcgggcggccccgtgggaggggtctctgcctgtcctcgtcacccacttccttcccgtttgttgctgctgcagggctgggaatgggggggaccaagcacttcgcagggtgacccggggagatctgtgagccagtggcctcagcgttgaatgagagctctctcccgggtccgcgctcgcagggactgaagggactcctgaatgtccgcgggacgtgtcgcggcggcgcccagcacggaggaggcaggcagggaggtgaggagcaggtcagaccggccgcaggtgcagggcctcctgccctcccaggctgcggtcccgtggagggcctgcagacagctgctgagactatgagggtcagaggtctgtggtcacgcgcgctatcaccagctagctgcctcctgcctggttcctcctgcaggaatgggagtctggggggaggggagggtgtgggcaggacttcctggaaaagggaagcccgttggtgtttatgtgtgggatggagagagggcagggggaggacggggacacacgcggagtcccccacccagatgttgtcaaacacagctcccacaccagacacgcaacccatcctagagatgcaacccaggcacacacacatggacacacacaaaactccatccatagggattcccacccagtgccacgtgagaacacaggcgtgcatcgcagacaagccacacaggcctcgcaggctcagcatacatgtctgcagcaacaccatcaggtacagagccgaggcccaggtaggcatgctcagctgcacgcaggaagcaagacacacccagacacacacaggtaagcccttactcagagaaagaaggtgcaggagatgtgtcttgggtaatcacagccacagcctctcaagtgtgcacacacacacacactcacactgagatacacagacacacagagatacctggacgtgtcaagcctacagcacaaacaggcccctgcaggtccacccggaggctgtgtgggccgaggctgctgcacacgtgtgcccagatcctcccacccccaccccaatcccgtgtcctgctccagggaagtccagggctcacatgacccaaggggagggctcccgggacagccctcggagaaactgcatcatcctcactaatgatccacttcctcctcagggaataaaggctcagggaccggcagttctactctagagcccaccagcctctcagagcctccggtgactggcctgtgtctccccctgggtgagtgctgggcaggctaggtggaaggagggtgaaatgggcctgcagggccatcttggtacagctcgccctctcacagaccgcgccccccttccctaagccagcttgtgcagccttgtgcagcttgtgtgtcctgagaattagggcaccaaggggttcccgcaggggcagcctgcagcaagcagtctccctctatctcagggcaggcgggggtctcaaggcctccctgcccttgtcacagcccgggccacctatgcttgtctctcttctcccagatggacatgtggacggcgctgctcatcctgcaagccttgttgctaccctccctggctgatggtgccacccctgccctgcgctttgtagccgtgggtgactggggaggggtccccaatgccccattccacacggcccgggaaatggccaatgccaaggagatcgctcggactgtgcagatcctgggtgcagacttcatcctgtctctaggggacaatttttacttcactggtgtgcaagacatcaatgacaagaggttccaggtctgtgcccaacagagtggggcaggaggtgggggcgggcagtggggagaagccgccttacctagtgaccttcctttggtgagggcagagggaaggtgatggggcacctttgggcgccgggagcattcagtgtctcccttatcctgacttggtgggaggatcggcatagccactgaccccagggaagaggcctgccctatctgtttgctacaggagacctttgaggacgtattctctgaccgctcccttcgcaaagtgccctggtacgtgctagccggaaaccatgaccaccttggcaatgtctctgcccagattgcatactctaagatctccaagcgctggtgagccaccctcagccctgccttccgagatcctcacatagcagggacacaggggccctgtggcttgagctgaccctgggacttctgcgcccaagatgtgcacccacgacctctatcccctccacaggaacttccccagccctttctaccgcctgcacttcaagatcccacagaccaatgtgtctgtggccatttttatgctggacacagtgacactatgtggcaactcagatgacttcctcagccagcag

SEQ ID NO: 34940 - DNA, 1626 bp, Artificial sequence
  DNA replication origin
agtatgagaggaagagagaggccctcagctgcttgggagtccctgctgcactcagccccccaccacactgaaaatctccccatacacagtttccatgccagaccccctgaagaacagggcctatcaataaagcagtaaggtcctctgtacttagaccaaaaacaaaaaaaaacaaaaaaaaaacaaaaaatgaaaattactcttgcctgtaatcccagcatttagggaggctcaggtgggaagattgcttgagcctaggagtttgagaccaacctgggcaatatggtgagactttgtctccaatatagatagatgatagacggatggatagaagatagacagattagacagagagagagagagaaaggagagagagagagagagagaaaagaggggaggggaggggaggggaggggaggggaggggaggggaggagaggagaggagaggagaggagaggagaggagaggagaggagaggagaggagaggagagagaaattaggcagaggagaggagagagaaattaggcagatgccttgggcagtgaagtccctggggatggtctactgttcccgcagcctgagcgcctttttcagacgtttttatctgtccactgctgcccctgcatggccacagcctgaactgcagcaccgaacgcagacccagtttcccttttggagaagaaattaatgctccttccagccccccacttgccactaggcctgtgcagggcgtggacagattctacagtggatccagccagagactgccccagagaaaattccaggggtgggatgagtgaggtatgctgggactggaatgtttgtaggataacatgatgagcagccggattcccaggaaattgcaaaccgtgtctgctctggtgagattctcagaggaggggatctataggcagttctgagtaggcactgggtaaaagcctggaaagaggaccctggcttggatggggctctgcctcactcgccatgagctccttggcgctatcagtcagcacagttcagctgcatgggtgtgaaggtgtcctggtgactggctacccccatgcctgcctcagtgcacgggaggtggaattatggatttggtggggctcgcacaggctaagggactgattttcagtctggagaatgggagggcaggatgagctgtggagggtcaggctggtggtttggagggtggcatgatgtaaatgtagctgttcactgttgtagtttgctgccaccagttcagtctggctaggttccaggtgggtcaataatctcaaatggggctgggctcagtggctcacacctgtaatcccagcacttcgggaggccgaggcgggtggatcacttgaggccaggagttcgagactagcctgcctaacatggtgaaacctcgtctataccaaaatataaaaaattagccaggtgtggtggcgggcgcctgtaagcccagctactcgggagactgaggcaggagaatgcttgaacccagggggtggaggttgcagtgagccaagatcgtgccactgcactccagcctgggcgacagagcgagattccaccaaaacaaacaaacaaacaaaatcccaaatcgggagaggtgaggtggggtctgtcatgccaa

SEQ ID NO: 34941 - DNA, 1300 bp, Artificial sequence
  DNA replication origin
tagaacaaaatggagtctcctatgtctactactatctacacagacacagtaacaatcttatctttcttttccccacatttcccccttttctattcgacaaaactgccatcgtcatcatggcccgttctcagtgagctgttgggtacacctcccagacggggtggaggccaggcggaggcgcccccccacctcccagacggggcggctggccaggcgggggctgccccccacctcccttcctcctggacagggcagctggctggtcgggggctgccccccacctccctcccggacggggcagctgccgggcggagaccctcctcacttcccagacggggcagctgccaggcagaggggctcctcactttcccagacagggcagctgctgggcggaggggctcctcacttctcagacggggtggccaggcagagacgctcgtcacctcccagacggggtggtgttcaggcagagacactcctcagttcccagacggggtcacggccgggtagaggcgctcctcacatcctagacagggcagtggggcagaggcgctccccacatctcagacgatgggcggcaaggcagagacgctcctcacttcctagatgggatggcgccgggaagaggcgctcctcacttcccagactgggcggcagggcagaggcgctcctcacatcccagaccatgggcggccaggcagagacactcctcacttcctagatgggatggtggccgggaagaggcgctcctcacttcccagactgggcagccgggcagaggggctcctcgcatcccagatgatgggcggccaggcagagacgctcctcacttcccagacggggtggcggccgggcagaggctgcaatctcggcactttgggaggccaaggcaggcggctgggaggtggaggttgtagcaagcccaggtcacgccactgcactccagcctgggcaagattgagcactgcgtgagcgagactccgtctgcaatcccggcacctcgggaggccaaggcgggcagatcactcgcggtcaggagctggagaccagcccagccaacacggcgaaaccccgtctccaccaaaaaatacaaaaaccagtcaggcgtggtggcgcacgcctgcaatcccaggcactcggcagtctgaggcaggagaatgaggcagggaggttgcagtgagccgagatggcggcagtacagtccagcctcggctcggcatcagagggagaccatggaaagtgggagacgagggagaggctcagcatcagagggagaccgtggaaagtgggagacgaggga

SEQ ID NO: 34942 - DNA, 1358 bp, Artificial sequence
  DNA replication origin
ggcacgctgcagggaggagggtgcgacgttcaaagagcccgcggagtcttctccacgcccctgcgctctgagtcctggctctggcgctgagagagagacgccctggaaggtctgtatcagcgtctgtcgcgctgggacccacactggcttttaaggaggacacccggacacctggaagctgggaaatggtgagtgtgcggggcccggcgtcccgaggcaaagaaggggcaggttggaaccggccggaaccgaccgtgaggggacccgggcctcgccctgggcgactccggggtctgcaaatcccagtgcccctggcgcagctctgcccttggtcccctgggccgcaagatggggctggggcggcagccgggaccccgggcgtcctgtcccgtccctgctcggccgctgcggccccggccccggcgccctctctgggcagctccgcgcccgcagctccgcgtctccccagattgtgcagttgtaaccggcacaggttcacggcccgagtcactgcaccgagacgccgaaggctgcagcagaaacagtttaatgggggagaggggaggacaccccagatccgcctccctgagaggtttggggatggggtgtttagaggtgtggacagggacggctggagtgtggggtcgctggttggtggagaagtgagaggtgactcctgggactggaggtgaagaaaccgcattctgctgagtgggttcccttgtggggtcttcagcctggttggcgccagcctttccgctgcaattcaggatccgagaaagaactgaggcgacccgtgagcaactctcaagagatcttatccccgggcacgatgaggaagccggcggtcagcgtctgctgtgacctgactctcagggaggcggccccgtgaggcagcggggctgagggcacctggttaatatctaactgcaatctcgcctccagcctggctcgcagttcctgtgaacccggtgaggacgctgcacggtgacaacggagggtcaccaggcagaatccagactcgtgtgtgtgggctttgtgctttggaagagaagctgtgatctgtgggttccccagtcccttctttcttcccaaaggtgaccggtttccctccgagtcttccaaagatgtgggcagcagggtctcaaatccaccaccctatcccctcatcctaactcctcctagggctggcagcaaatctcttggttttcagagccttccccaggctaactgtctctcatcaattcccagcaactttatgaactctttgtccctcaggcaatatttcaaacagaggcattattttaattgtcactttcttttcacatagcaatgtatggctctttttaaaagatgtg

SEQ ID NO: 34943 - DNA, 1589 bp, Artificial sequence
  DNA replication origin
ggtttcttcacctccagtcccaggagtcacctctcacttctccaccaaccagcgaccccacactccagccgtccctgtccacacctctaaacaccccatccccaaacctctcagggaggcggatctggggtgtcctcccctctcccccattaaactgtttctgctgcagccttcggcgtctcggtgcagtgactcgggccgtgaacctgtgccggttacaactgcacaatctggggagacgcggagctgcgggcgcggagctgcccagagagggcgccggggccggggccgcagcggccgagcagggacgggacaggacgcccggggtcccggctgccgccccagccccatcttgcggcccaggggaccaagggcagagctgcgccaggggcactgggatttgcagaccccggagtcgcccagggcgaggcccgggtcccctcacggtcggttccggccggttccaacctgccccttctttgcctcgggacgccgggccccgcacactcaccatttcccagcttccaggtgtccgggtgtcctccttaaaagccagtgtgggtcccagcgcgacagacgctgatacagaccttccagggcgtctctctctcagcgccagagccaggactcagagcgcaggggcgtggagaagactccgcgggctctttgaacgtcgcaccctcctccctgcagcgtgcctgattgacagttctcacaatccccgccccctcatccctgattggatagtgctccaggtcccgccccttggtggctgattgacagaagaagcgatctcacagtgctgagtggagccggatgaacaggttccaggcacgacccttggcaaggcgggcttcctcccaacggagtgacctgacccctcccgaagtgacgtttgcattttagaatttcctgattgtattcagtgggttcttcctgctttttcctcctggacagggactcacaagtgtgtgcagggaattccaggctccctgtccagtggagccattcccggacctcggagcaggaggggagcccggggcacacaggccaccctgcagcaggagggagggcctgatgtcctccagggatcaggaatttgggatgaggctgttggcgacgttgccaagcctttccctcaccttatctctcaatctactcattttcagcccagaagataaaaacaggacaacaaaataaaatagttgagtatgtggaaaaactggaattatatggcagcaatatttcataaagaatcaaaagagaagaaaagcaaaaacttgaacaagctcagagaagcagcctactgcactcacagttcacaagcagaccccctttcaggaggtcaaacatatccccaagctgggaagccaggcaatgattcctaaaatggagctccggggtggatcagaagctggtgataagggagggacaattaagaattttactctgaggtctcaaaatacctgtcccctctgcacagcgtggaaatgctccctccttatgccattaaatgttaatgaattaaacgctccaatcaaaagccaagacatcacactttgaatttgaaaacattagcctttctccat

SEQ ID NO: 34944 - DNA, 1253 bp, Artificial sequence
  DNA replication origin
ccaggttctgatccaccctagggctccatttcaggaattatcgtctggcctccaagctttggaatatgtttggcctcctgaaagtggttgacttgtgaactgtgtgtggatgcagcaggctgcttatctgagctagttcaagtttttgctttataaaatattgccgccatataattccagtttttccacacatttaacaattttatttatttcttttttcttttttctttttttttttttttgagacggagtctccctctgtctcgcccactctctcactgcagcctctgccttccaggttcaagtgattcctctgtctcagcctcctgagtagctgggactacaggcgtgcgccaccacatccggctaatctttgtattttagagacgggatttcaccatgttggccagactggtctcgaatttctgacctcaggtgatccacctgcctcagcctcccaaagtgctgggattacaggtgtgagccaccacgcccggctttgttggggtgtttttatattctgcactgaaaattagtagattgagacataaggtgggagaaaggcttggcctgtgcagccaacagcctcatccaaaactcctgattcctggaggacatcagcccctcccttctgctgcagtgtggcctgggctcccttcctgctctcaaatcaggggatagctccactggacagtgagtctggaatttcctgcacagacttgtgggtccctgtccaagaggaaaaaggaggaaggtcaggacatactgcctaaatgcaaatgtcccctgggagggggtcaggtcacagcgcagggaggaagctagtcctctcaaggcctgtctggaatctgtttatcaggttccactccgctgcccgagatcgcttcttccgttactcagtgcccgggggagggacctggcgcactatccaatcagggccgcggggcggggtcgtgagaactgtcaatcaggcgcactgaccggaggagggtgcaaggttcaaagagcccgccgagtcttctccacgcccctgcactgggctccgggttctgtcactgagagacgccctggaacgtctgtggcagcttctgtctcgctgggacccgcactgacagcgggaggcagagggaggaacctggacgccggaagccgggaaatggtgagtgtgtgaggtctggtgtcccgacgcgtgagaggagagactggttggaaccggccggaaccggctgtggtggcaccaggtcttccccgcc

SEQ ID NO: 34945 - DNA, 1366 bp, Artificial sequence
  DNA replication origin
actgtcaatcaggcgcactgaccggaggagggtgcaaggttcaaagagcccgccgagtcttctccacgcccctgcactgggctccgggttctgtcactgagagacgccctggaacgtctgtggcagcttctgtctcgctgggacccgcactgacagcgggaggcagagggaggaacctggacgccggaagccgggaaatggtgagtgtgtgaggtctggtgtcccgacgcgtgagaggagagactggttggaaccggccggaaccggctgtggtggcaccaggtcttccccgccggcgacaccctggcgcagctcggccctcggttccctcggccgcacgatggggctggggcggcagccgggaccccgggcgtcctgtcccgtccctgcgcggccactgcggccctggccctggaggcctgtctgggcagctccgcgcccgcagtcctgcgtctccccagattgtgcggctgtaaccggcacaggttcgcggcccgagtcactgcaccgagacgccgagggctgcagcagaaacagtttaatagggggagaggggaggacaccccagatccgccttcctgagaggtttggggatggggtgtttaggggtgtggacaggggcggctggggcgtggggtcgctggatggtggggaagtgaggggtgactcttgggactggaggtgaagaaaccgcattcttctgctgagtgggttcccttgtggggtcttcagcctggttggcgccagcctttccgctggaattcaggatctgagaaagaactcaggcgactcttgagcaactctcagagatctcatccccaagcacaatggcgaagccggcggtcagcatctgctgtggcctgactcttggggaggcggccccgcgaggcagcggggctgagggcacctggttaatatctaactgcaatctcgcctccagcctggctcgcagttctgtgaacccggtgaggaggctgcacggtgatgacaggtcaccaggcagactcgtgtgtggggtttgtgtgtgggaggagttgtggtctgtgtggtcccctgtcccttctttcttcccaagggtgacccgttcgccttcgagtcttccaaagatgtgggcagcagggtctcaagtccaccactgtgttctctcatcctaactcctcctagggccgacagaaaatcccttggcttccagagccttcctcaggctttctctcctcaattcacagcaactttatgaactccttgtcccccagtttatttttcaaacagaggctagtattttaattgtcattttgtttatacatagcaatatatggctctttgtaaaaggttttgtgtttgtgaacatttcacatgagaggaagca

SEQ ID NO: 34946 - DNA, 1272 bp, Artificial sequence
  DNA replication origin
ggctctgaataaacttctttattttacatagtttggctttttccgttgacaaaccacaacccaggacggggtgtttctcattcgtgaatcgctgtttgctcaaatgaactctttaattgttaacgtacctcagtttaatttttaacaggagaaagtggggactgggggccccacagaccactgctcctcccacgcacgaaccccacacccgagtcaggatgcctccatgaccctcccgttgcttccgcacaatctggggagacgcggggctgcgggagcggaactgcccagagagggctccggggcaggggccgcggccgcagtcgccgcgcagggacgggacaggacgcccgggtcctggctgctggcccagccccgtccagcggccaaggggaccgagggccgaactgctcaaggaggactcggtcccagaccccggagtcgcccacagggaggcccgggtcccgccacagccggttcccgcctgttccaggcagcccctcccccgtctcacgacatctggtcccgcacacgcaccatttcccggctttcagatgtaccggggtcctctctacagctcctgtgactacagcagggcatagcgcaggcgacagagcgacagaagcctgggtacaggcaccaggtccctctcgggctggtctgaccggttaccaaccgccgcccgcgcagcgaggaaggtgaggaaagcgaccccctccatttccggatgaactgtgggcagtgccacgccccagcacctctgattggatgaaatactaggtcccgccccccacatctgagtgacagctgaagccctgggtatcaggccccgcagagccagactgacggattctagccacagcttctctaagggcgagctgctttctgcactctggttattggatatttgcatttcagccaaacttgctattgatagaagagaacactagcgtcatcctcactcaagggacagtccccgctccttcgttctgcacggggtcacaggagtgtgcagggaatttcagactcagtgtccataggagccaactgctggcctcagagcagcaggggaaccgagaccaggccaggcacgactgcaccaggaggagaggcatatgtcctcgagcgggccggaattggggatgaggcgtggccaagccttgctcacacacccccatccccttgtgaaaatgcttcctcctttcagatcttcattttcaccagcaggaaactctcaccaggttttgtttctgacctaagtaaactgtcaac

SEQ ID NO: 34947 - DNA, 825 bp, Artificial sequence
  DNA replication origin
ccgagaggaacccgctgtggcggggcccgggcccccctgcagcgactctgggctccagacacagtccccctagcgcagctcggccctcggtcccctcggccgctgggtggagctgggccggcagccgggaccccgggcgtcctgtccggtccctgcgcggcgactgcggccccggccccggctccctctctgagcagctccgcgcccgcagccccgcgtctccccagattgtgcggtgaccatggaagggtcatgggggatcctgcctcgggtgtggggttcgtgtgggaggagctgtgggctgtggggtccccagttcctttttttttccagttaaaaattaaactgaggcactgttaaaaaatgagagtttattttagcaaacagcgattaatgaatgagaaactcccagtcctggcttgtggtttggtaacggaaaaacccaaatcgtgtagaataagtttattctgagccgaataggagagacctcggctgagggaaacacaaccccgcgaagtctggagtaagcaatcccgaggcagctcctgacagtttggttttattcatttcagggagacaggaattgcaggaaaatgatgaatcagtgccgggaaggtgtaagttcctttggccgaaaggcgggacacatggaagcggggttagaaggcacaggtggtggagggattctgtaggtggcagttggttgagagtgtgtaaagctttgtctaaaatttggaggctgtaggaaggagggctgttatctgccacgttattccatcccagtccccgcccccttccccaaaagacctgtttttattttaccag

SEQ ID NO: 34948 - DNA, 1070 bp, Artificial sequence
  DNA replication origin
cagagcggagtccccctggcgtagctcggccctcggtcccttcggccgcagggtggggttgggccggcagccgggaccccaggcgtcctgtcccgtctctgcgctgcgactgcgaccccggccctggccccggccccggagccctctctggggagctccgcgcccgtagtcccgcgtctccccagattgtgcggagaccacgggagggtcatggaggcaatcctgcctcgggtgtgtggttcgtgtgggaggagcggtgggctgcggggtccccagtccccccttttttcctgaaaaactaaattgaaggccaggcgcagtgggtcacgcctggcaggttgaggcggggggattgcttcagcccagaaattcgagaccagcctaggcaacataccgagaccctagtttctattaaaaataaatttttaaaaaatgagccgggcgtggtgccgcccacctgtaatcccagctactggggggctgaggtgggaggatcgcttgagggaggagattgggactgcagtgagccgagatcgcgccactgcactccagcctgggcgactgagcgagaccctgtctcaaacaaaacaaaacaaaaacaacagcaacaaactaaactgagtcctcttaaaaattaaagagttttgcttctcagaataggagtttgaaaaaaatgaatgagaaatgtttcctgaatgagaaacacccagtcatggcttgcagtttgataacggaaagagcaaaactctgcaaaataacttgaactatgttctacgccgaatatgagagaacgtgaccaagggaaacaaccgcatgtagcctcgagtaagtggtccccaggaggttcgatggcagtttggttttattcatttcagcgagacaggaattgcagggaaaagatcaatcaaggcatggaaggctgacagggcaggacacgtagaagcggggcttagaaggcacaggtggttgagggattctgtagttggcagttggctgagagtgtgaagttgtgtctaaaatttgaaaggggtaggaaggaatgtttaagtgaagggagtctgttacctgcc

SEQ ID NO: 34949 - DNA, 1281 bp, Artificial sequence
  DNA replication origin
ggatccgcaaacttaggaatttactgccagccccaggaagagatagtctggagacaggattatggatttgacaccctgctttccatacatttggaaacctcaagggaagatgggtgacctttatggagaaaggagggactgaggatcacacagaacactgctcctcccacgcacgaaccccacacacgagtcggaatcctccccatgaccctcccggggctcccgtgcaatctggggagacacgaggctgcggcgtgcagctgcccagagagggcgccgaggctgaggccggggccgcaggcgtcgcgcaggaacgggacaggatgcccggggtcccggatgccagcccagccccactctgcggccgagggcactgagggcccagctgcgccagagggacccgggtcccagaccccagagtcgccgaggggagccccgggtcccgccacagccggttccggccggttccaacctgtccctcctcaggtctcgggacaccggccccgcacactcaccattttccggcttccaggtgtctggccgtcctccctcatctcctgtatgcagcattggtcacaacgcgcgtagcgggagatattactacggtcaggtgatagtcgaggtgcccagcaaccgcgctgcgtaacgacgtacgacgcccacctcttttatgccgcattgccccacccaccttccacgtggcgcctctgattggacagttcacgaagccccgccctcttcacatggagtgacagagctgcgaaaggtcatgtcgccggggaaaccctgcttcagtccggggggaaaccagtcccagcgaggggcagttgagtagaagccgaacttgttcccagcctctcgatggactctggcatcctgtcgcagctgtttctgaacgcggggacaaaagtgtgcgcggcgaattccagcctcagttgccagatgtagtgaccctttaaggaacaaatccacagcaagagggtcacccaggcaagtccagattggaacaagagggtctgactcctccgggggccagggacttggcctgagtctagagggcactcgtggaactgtgagctccgttcacaaacacagacactttaaaagtgacttcgccgtgtgtaatgagtctagctccattctgacattgacggctaacggcattgagacctccacccattccttccccaatccccacacatttactttaaataaagaatcccttggcctccagagccttttacacacaatctctttgaaccccacatccctagcatggat

SEQ ID NO: 34950 - DNA, 1645 bp, Artificial sequence
  DNA replication origin
aggagggtgtgacgttccaggagctagtggcctcttcaccctggtgacctctgttccgtattctgtcactgagagacgccctgggacatctgtggtggcttttgtcgcgctgggacctaccctgactacgggagttgggaggacccgggacaccgcacagccgggaaatggtgagtgtgcggggcccggcgtcctgaggcagggcgaagggctggtcggaaccagtcggaaccggctgtggcgggacccgggcctcgccgcagcgtctttggggtctgggacctgagcgccccctgcgcacctcggtcctcggtccgtttggccgcagggtggggctgggccggcagccgggaccccgggcgtcctgtcccgtccctgagctgcgactgcggccccggccccggcgcccctctctgggcagctccgcgccctcagccccgcttctccccagattgtgcggcggaaccagtacaggttcgcagcccaagtcactgcacccggacgccgagggctgcagcagaaacggtttaataggagaggacaccctagatccgcctccgtgagaggtttgaggatggggtgtttaggggtctggacgggggtggttgggatgtggggtcgctggttggtggagaagtgaggggtgaatcttgggactggaggtgaagaaaccgcattctgctgctgagtgggcttccttgtggggtcttcagcctgcttggcgccagcctttccgctggaattcaagatctgagaaagaacttagacgactcttgagcaactctcagagatcttatccccaggccaatggggaagccggcggtcagcgtctgctgtgacctgactctcagggaggcggcttcctgtgaagcagcggggctgagggcacctggttaatatctaactgcaatctcgcctccagcctggctcgcagttcctgtgagcccggtgaggaggctgcacggtgacggtgggagggtcactaggcacaaaccagactcgtgtgtggggtttgtgtgtgggaggagctgtggtctctgtgctcttcagtcctttctttccaagggcgaccatttctcctccgaggctttcaaagatattggcatcagggtctttgagacctgtcccttcatcctaactcctcttggggctaacagtaaatcttttggtttccagagccttccatatgctaacttcactcctcaattcccagtaacgttatgaaccctttgtcagcaagacgatatttcaaatagacacagaattttgtcgtttgttttcagatagcaatgtatggctctttttaaacagatttattttgttttccttaacatttcacatgtgaggaagaagagaataaccacctgacactgctgtaaaaaaaaccaaacctttgtgcctcttttatctcccctaggcacagatgccttctcagtatgtcctttacagggtgatgtgacctcagcccaccctgtatcttttccaggccctgtgttatggaactttctggggctaccctaagatgctggaagctgccaatctcatggagggcctagtggatatcggcccttgggtcactcttcccagaggacagcctgaggtgttggagtggggcctcccaaaggatcaggtggatgcactgggg

SEQ ID NO: 34951 - DNA, 1054 bp, Artificial sequence
  DNA replication origin
acaacaacaatctgatttctctttcctttccccacacttcccccacttccactcgacaaaaccgccatcgtcatcatggcccactctcaatgagctgctgggtacacctcccagacggggtggcggccgggcagaggggccccccacctcccagacggggcggccgggcagaggcgccccccacctcccggagggggcggctgccaggcgggggctgccccccacctccctcccggacggggtggctggccgggcgggagctgtcccccacctcctggagggggcggctgccgggcggagacattcctcacttcccagacggggcggctgctgggcggaggggctcctcacttcacagacggggcggccgggcagagacgctccttacctcccagacggggtggcggtcgggcagagacactcctcagttcccagacggggtcgccgctgggcagaggcgctcctcacatcccagatggggcggcggggcagaggcgctccccacatctcagacgatgggcagctgggcagagatgctcctcacttcctagacgggatgacggccaggaagaggtgctcctcacttcccagactgggcggccaggcagaggggctcctcacatcccagatgatgggcagccaggcagagatgctcctcgcttcccagatggggtggcagccaggcagaggctgcaatctcggcactttgggaggccaaggcaggcggctgggaggtggaggttgtagcgagccgagatcacgccattgcactccagcctgggcaacattgagcactgagtgaacgagactccgtctgcaatccctgcacctcgggaggccgaggctggcagatcactcgcggttaggagctggagaccagcccggccaacacggtgaaaccccgtctccaccaaaaaaatatgaaaaccagtcaggcgtggtggcgtgctcctgcaatcccaggctctccgcaggctgaagcaggagaatccagcagggaggttgcagtgagccgagatggcggcactacagtccagcctccgctcggcatcag

SEQ ID NO: 34952 - DNA, 1533 bp, Artificial sequence
  DNA replication origin
actgccagtcaggcgcgctgccgggaggagggtggagctttctacacccctctgagctcccgctcctggctctgtagctgagagaagccctggcaggtcagtggcaggcactgtcacgctgagtcctatgctggcagcggggaaccttggggagaacacgggacaccgcggaagccgggaaatggtgagtgtgcggggcccggcgtcctggggcagggcgaaggactggttggaaccggccagaaccggctgtggcgggacccgggcgtccccgcggcgactgcggggtctgtggacccgagttcccctggcccagccggccttcagtcccctcggccgcggggtgggagctgggggctgggccggcagccgggaccccgggcgtcctgtcccgtttctgcgcagcaactgcggccccggctcccgcgccctctctggggcagctccatgcccacagctccgcgtcttcccagattgtgcggctgtaaccggcacaggttcgcggtccgagtcactgcaccgagactccaaggcctgcagcagaaacagtttaatagggggagaggagagaagaccccagttccgcctccatgagaggtttggggatgggggtgtttaggggtctggacaggggcggctgaagtgtggggtcgctggttggtggggaagtgacaggcgaatcctgggacgggaggtgaagaaaccgcattctcctgctgagtgggttccctcgtggggttttcaccctgcttggcgccagcctttccgttggaattcaagatctgagaaagaacttgggcaactcgagcagctctccgagatcttatccccaggcacaatgcagaagccggcggtcagtgtcttctgtgacctgactctcaggaaggcggcccccgcgaggcagtggggctcagggtacctggttaatatctaactgcaatcagaatccagattcttgcgtggggtttgtgcacgggaggagctgtggtctgcggggtccccagtcccttcttttcttcccagggtgactgattcctcttcgagtttttcagagatgggggtagcagggtctcaaatccactaccctgttccctcattctaactcctcctaggggtggtagtaactcccttggtttccagagccttacgcaggctaactttccctcctcagttcacagcaacatcatgaactcctccctcctccgccccacccgtgctaaatttcagagtcccagtattttaattttcattttgttttcagagagcaatggatggcttctttttttctttctttcttttttttttttttgagatggagttgtgctcttgttgcccaggctggagtgcaatggtgcgatgtcggctcaccgcaacctccgcctcccgggttcaagaaattctcctgtctcaccctcccgagtagctggaattacaggcacccaccaccacacccggctaattttttgtatttttagtagcgacggggtttcaccatgttggccaagctcatctcgaactcatgacctcaggtga

SEQ ID NO: 34953 - DNA, 1516 bp, Artificial sequence
  DNA replication origin
gccgtggggcgggttcgtgggaactgtcaatcaggcgcgcttcccagaggagtgtgtggttgaaaaagcccgcggcgtcttctccacccacctgcgctgggcgctcggtgctcggctctgtagctaagagacgacctggaagttccgtggcagcctgtgtcccgcgggaacccgcattggcagcgggagccgtccggaggacctgggacaccgcggaagtcgggaaatggtgcgtgtgctgggccggcgtcccgaggcgggggaggggctgggtggaacctgcagtaatcggctgtggctggacccgggcctccccaagggctactccgggatctacggacccgggttcccctggcgtaggtcggccctcggccgcagggtggggctgggcatgcagccgggaccccgggcgtcctgtcccgttcctgcgcggcgactgcggccccggcgccctctctgggcagctccgcgcccgcagcctcgcgtctcccgagattgtgcggctgtaagcaacacaggttcgcggcccgactcactgcaccgagacgctgagggctgcagcagaaacagtttaatagccagagaggggaggacaccccagatccgcctccctgagggatttggggtctggacgggggcggctgggtgtagggtcgttggttggtggggaagtgaggggtgaatcctgggacaggaggtgaagaaaccgcattctgctgaatgggctccctcgttgggacttcaacctgattggcgccagcctttgctgggattcaggatctgagaactccggcgactcttgagcagttctcagagatcttatccccaggcacaatggggaagccggcggtcagcgtctgctgtgacctgactctcagggaggcggccccttgaggcagcggggctgagggcacctggttaatatctaactgcaatctcgcctccagcctggctcgcagttcctgtgaacccggtgaggaggctgcacggtgacgacgagtcaccaggtggaatccagactcgtgtgtggggtttgtgtgtgggaggagctgtggtctccgtggtcctcagtcccttctttctttccaagggcgaccgtttcccctctgagtcttccaaagatgtggttagcagggtctcaaatccaccactgtgttctctcatcctgactcctcctagggctggcagcaaatctcttggtttccagagacttccccaggctaaccttctgtccttaattcacagcaacggtatgaactgtttggcccccaggcgatatttcactagtttgtcatcttgttttcagctagcaatgtatggctttttcttgaaagaattattttgggttcctgaacacggtgggtcattcctgtaattccagcaccttgggaggctaaggcagaggtattgcttaatcttagtagttccagaccagcctgggcaacatggcaagaccttgtctctagtataaatgataataataaaattagctgggcttggtagctggcacctgtag

SEQ ID NO: 34954 - DNA, 1360 bp, Artificial sequence
  DNA replication origin
tcaatcaggcactgcccagagaagtgtgtgtggttgaaaaagcccgcggcgtctgctccacccacctgcgctcggctctgggttctgtagctgagagacgacctggaagttctgaggcagcctttgtctggctggaacacgcattggcagcgggagctgtcggtaggacctgggacaccgcggaagtcgggaaatggtgcgtgtgctgggccggcgtcccgaggcgggggaggggttaggtggaaccggccgtaatcggctgtggctggacccgggcctccccaagggcgacttcgggatctacggacccgggtccccctggcgtaggtcggccctcggccgcagggtggggctgggcatgcagccgggaccccgggcgtcctgtcccgttcctgcgcggcgactgcggccccggcgccctctctgggcagctccgagcccgcagccccgggtctccccagattgtgcggctgtaaccaacacaggttcgcggcccgactcactgcaccgagacgccgagggctgcagcagaaacggtttaacaggaggagaggggaggacaccccagatccgcctccctgagggatttggggtctggacgggggcggctgggtgtagcgtccttggttggtggggaagtgaggggtgaatcctgggacaggaggtgaagaaaccgcattctgctgagagggctccctcgtggggtcttcaacctggttggcgccagcctttctgctgggattcaggatctgagaactccggcgactcttgagcagcactcggagatcttatccccaggcacaatggggaagccggcggtcagcgtctgctgtgacctgactctcagggaggcggccccttgaggcagcggggctgagggcacctgtttaatatctaactgcaatctcgcctccagcctggctcgcagttcctgtgaacccggtgaggaggctgcacggtgacgacgagtcaccaggtggaatccagactcgtgtgtggggtttgtgtgtgggaggagctgtggtttccgtggtcctcagtcctttcttcctttccaagggcgaccgtttcccctctgagtcttccaaagacgtgggcagcagggtctcaaatccaccactgtgttctctcatcctgactcttcctagggctggcagcaaatctcttggtttccagagacttccccaggctaaccttctgtccttaattcacagcaacagtatgaactgtttggccccaggcgatatttcactagtttgtcatcttgttttcagctagcaatgtatggctttttcttgaaagaattgttttgggttcctgaacacggtgggtcattcctgtaattccagcaccttgggag

SEQ ID NO: 34955 - DNA, 1334 bp, Artificial sequence
  DNA replication origin
attgtcattatggcccgttctcaatgagctattgggtacacctcccagacggggtggtggccgggcagaggggctcctcacttcccagaaggggcggccaggcagaggcgccccccacctcctggactgggcggctggccgggcgggggctgaccccccacctccctcccggacgggacggctggccgggcgggggctgaccccccacctccctcccggacggggcggctggccgtgcgggggctgacccccacctccctcccggacggggcggctggccgtgcgggggctgacccccacctccctcccggatggggtggctgccgggcggagatgctcctcacttcccagacagggtggctgccaggaggagggtctcctcacttctcagacggggttgcggccgggcagaggcactcctcacctcccagacggggtcgcggccgggcagaggcactcctcacatcccagacggggcggcggggcagaggcgctccccacctctcagacgatgggccgccgggcagagacgctcctcacttcctagatgtgatggcggccgggaagaggcgctcctcacttcccagactgggcagccaggcagaggggctcctcacatcccagacgatgggcggccaggcagagacgctcctcacttcccagacggggtggcagccgggcagaggctgcagtctcggcactttgggaggccaaggcaggcagctgggaggtggaggttgtagcgagccgagatcacgccactgcactccagcctgggcaccattgagcactgagtgaacgagactccgtctgcaatcacggcacctcgggaggccgaggctggcagatcactcatggttaggagctggagaccagcctggccaacacagcgaaaccccgtctccaccaaaaaaaatacgaaaaccagtcaggcgtggcggcgcgcgcgcctgcaatcgcaggcactcggcaggctgaggcaggagaatcaggcagggaggttgcagtgtgccgagatggcagcagtacagtccagcttcggctctgcatcagagggagaccgtggaaagagagggagagggagaccgtggggagagggagagggagagtatcgtatagcatttctctaagatgctgtgtatcctgtcattggagagcataagacttgaagtgatcatactaaaaatgtagaaataatttccaagtattcatggtggtgttaaatttatgaagaagtaagtgtggacgaagatttgagttctgatgacaaagttacaggataaatggagaaaattatatatgaacttttaatgaactgagtttatatccccagt

SEQ ID NO: 34956 - DNA, 868 bp, Artificial sequence
  DNA replication origin
ggcccatcgtctgagaggtggggagcgcctctgccccgccgccccgtctgggatgtgaggagtgcctctgcccggccgcgaccccgtctgggaggtgaggagtgcctctgcccggccgcaaccccgtctgagaagtgaggagaccctcctcctggcagccaccctgtctgggaagtgaggagcatctccgcccggcagccaccccatccgggagggaggtgggggtcagcccccgcacggccagccgccccgtccgggagggaggtgggggtcagcccccgcacggccagccgccccgtccgggagggaggtggggggtcagcccccgcccggccagccgtcccgtccgggagggaggtggggggtcagcccccgcccggccagccgcccagtccaggaggtggggggcgcctctgcctggccgccccttctgggaagtgaggagcccctctgcccggccaccaccccgtctgggaggtgtacccaatagctcattgagaacgggccataatgacaatggcggttttgtggaatagaaaagggggaaaggtggggaaaagattgagaaatcggatggttgctgtgtctgtgtagaaagaagtagacatgggagacttttcattttgttcagtactaagaaaaattcttctgccttgggatcctgttgatctatgaccttacccccaaccctgtgctctctgaaacatgtgctgtgtccactcagggttaaatggattaagggcggtgcaagatgtgctttggtaaacagatgcttgaaggcagcatgctcgttaagagtcatcaccactccctaatctcaagtacccagggacacaaacactgcggaaggccgcagggtcctctgcct

SEQ ID NO: 34957 - DNA, 1305 bp, Artificial sequence
  DNA replication origin
aacaaacaaacagcaaaggggattgaaggtcttttttcttacctaagtggatcagtgttggtgagaagcaagtgaataaactgcagtgggcaggagagcctgagaccagtctggagcctgcaaagagagggaaagggtgcttcttgggcagcctgcccgcccttgcaggtggcctccagctgctcaggagtgcagattctttttttaattttaattttattttttacttttattatttttttgaggcagagtctcactgttttggcacccaggctggagtgcagtggcgcagtctgggcttactgcaacctctgcctcccgggttcaagcggttctcctgcctcagcctcccgagtggctgggattacaggcacgcgccaccacgcccggctaatttttgtatttttactatagacgaggtttcaccatttggccaggctggtctcgaactcctgacctcaggtgatccgcccgcctgggcctctcaaagtgctggcgtgagccaccgcgcctggccaggaatgtggattctgagaagctgcagagctgtgaaaagcaggagacccatgtgcagatgtggttgggttgggggtggagggttctgtcttttctgaggttgtacctttggcgcctggggccatttcctggacagtgttttggttttagcattcatggggtcgctgagtcaggctgtaatttgtatacatgaagaaaatctgtgagggtcagactcagtgaaaaacttgtttgcattgtcccctggagaaaaggtttgggaacatgacaatttatttaggtcacgactttacattgactccgggtgagagtttcctgctggtacaaatgaaggttttgaaggaaagagtgtttccacactgtgaggagaggactggagggcaccttgagctcccaaagttgaattcttaagtgtccctgtctcatcaccaggttctgatccacactggggttccatttcagcagttagagtctgggtcccaagcttgggattattttattttatatttcatttcttcatttcattatttcatttcatttcatatttcattttttagtctcgctctgtcgcccaggctggagtgcaatggcgctatctcggctcactgcaacttccccctcccaggttcaagcgattctcgtacctcagcttcccgagttgctgggattacaggcacctgccaccacgcctggctaatttttgtatttttagtagagatggggtttcaccatgttggttaggctggtcttgaactcctgaccttaagcaattttctcaccttggccttc

SEQ ID NO: 34958 - DNA, 1657 bp, Artificial sequence
  DNA replication origin
cccctggactgtgtagaggcacagccctagctcatgcccctaaaccaccaactcacctccggccccgcccatttcactttagccccgccctctcaccgcccccaggctctgtcctgcctcacccagccccgcggcttcagccccgccgtaactcccaaagtctcaggtcacatcagttctgctccatcgggactcgaaccctaagcttgggaccgacccatctccccattggctcagtcctccctgtcacggccctggccgctcctctcggctgagccttgcccctctccggcgaaaccccgcccctacaacctagccctgcctcctgacctggctcggccccgcccttctccatccaggccccgcccctctccaactcagccccgccctctctcccgcagttctcagggctgcgcagggacctgccgccctcggtgcacctgctcacgctggccagctggggccccgaaatggtgctgctgcgcttggagcaccagtttgccgtaggagaggattccggacgtaacctgagcgcccccgttaccttgaacttgagggtgagaagggcaaaattgagaaggagatcggagagaggcaagagagagggagagaagagaaacctggctttgccccaactcatctgggcccatccccttccccgcaggacctgttctccaccttcaccatcacccgcctgcaggagaccacgctggtggccaaccagctccgcgaggcagcctccaggctcaagtggacaacaaacacaggtggggccctggtcaggggtagggaaggggtggagtcttacctggggccggcaggtgggggcaatgtgtgaggcatgggatgttggccaggacccaaaaaggtcatgagggtatggggcagagtccagacccaggttaggggcttaaaggatctgaaatgggtgcggcaaaccaggaatgggtcttgaggtttgtgggtgctgtttagtcccaagaacaagatttgaaaatccccatccatgtctagttctgggagggtgttcatcacccctggggtcagattgagggtacgaggacagtggccagattgagggtatgaggacattggacctgggggtggtattcggggccggggaagcaggttaagagtctgggattgaggccctggagacagattcggggatatgcagctgtgtctagacccaggggaggaagcatcgtggggtgagtcagaggaagtctgcacctcctcactcctccttccccctgcacctctccaggccccacaccccaccaaactccgtaccagctggacccggccaacatcacgctggaacccatggaaatccgcactttcctggcctcagttcaatggaaggaggtggatggttaggtctgctgggatgggccctccaagcccaagcctcctgctccgggggcagaccagactctgactctcctcttggggctgctgccattaaaacgctactactaagactcaggtcgctctgtgactgagtgtgggttttttttgtctgttatttgcttgttagagggggacagaatttatgacccagagccgggtgtggtggcttgctcctgtaatcctaacaactctggaggctgaggagagagaatcacttgagcccaggagatctagactagcctgg

SEQ ID NO: 34959 - DNA, 1025 bp, Artificial sequence
  DNA replication origin
attgcccccacctgccggccccaggtaagactccaccccttccctacccctgaccagggccccacctgtgtttgttgtccacttgagcctggaggctgcctcgcggagctggttggccaccagcgtggtctcctgcaggcgggtgatggtgaaggtggagaacaggtcctgcggggaaggggatgggcccagatgagttggggcaaagccaggtttctcttctctccctctctcttgcctctctccgatctccttctcaattttgcccttctcaccctcaagttcaaggtaacgggggcgctcaggttacgtccggaatcctctcctacggcaaactggtgctccaagcgcagcagcaccatttcggggccccagctggccagcgtgagcaggtgcaccgagggcggcaggtccctgcgcagccctgagaactgcgggagagagggcggggctgagttggagaggggcggggcctggatggagaagggcggggccgagccaggtcaggaggcagggctaggttgtaggggcggggtttcgccggagaggggcaaggctcagccgagaggagcggccagggccgtgacagggaggactgagccaatggggagatgggtcggtcccaagcttagggttcgagtcccgatggagcagaactgatgtgacctgagactttgggagttacggcggggctgaagccgcggggctgggtgaggcaggacagagcctgggggcggtgagagggcggggctaaagtgaaatgggcggggccggaggtgagttggtggtttaggggcatgagctagggctgtgcctctacacagtccaggggggttgggactgggctggcactgggcggggactgcccaggggatggggttggcccgagggtttggggctaattatggccaaatggatccccgctgagcctaggaaactccgcacccaaacccggctccctggtagacttcaatccggtcctctctgcctaccccgctgcccctcacctgcgtgcgcggaggagc

SEQ ID NO: 34960 - DNA, 1147 bp, Artificial sequence
  DNA replication origin
gagactttgggagttacggcggggctgaagccgcggggctgggtgaggcaggacagagcctgggggcggtgagagggcggggctaaagtgaaatgggcggggccggaggtgagttggtggtttaggggcatgagctagggctgtgcctctacacagtccaggggggttgggactgggctggcactgggcggggactgcccaggggatggggttggcccgagggtttggggctaattatggccaaatggatccccgctgagcctaggaaactccgcacccaaacccggctccctggtagacttcaatccggtcctctctgcctaccccgctgcccctcacctgcgtgcgcggaggagccccgagattgtaggcggcgccgccacccggggccagcaccacctgaggggccaggacctcctgctccgccaggagccggtgtccggcggctgcagcctgggctgtgtccagcagcaccaggtggcgccctcgcacccacgcccccgacccgttctccattagtggctccgatactccgcgtccatcgtccttcagcagccttcggtgcacctggggggagagtggccaggagggggtgagagtcgtgggtttgtgggtgtccttgggccagaaactgggtaagggcgtgtgggaatgtcaaaagaaattaaagggtgggaggaacggatgaggatgaaggtgagggtctggtagggcaaccccagcagaggcaggatccaagtaggcatgggaaccaggccggaaggaggtaaatgcctaacaggggggcctggatatggcacgccagagcgtggagggagcctgggcaggagatggagaaaaacggagaggaaaagccacacacagaaatggagtccttggccgggagcggtggttcacgcctgtaatcccagcactttgggaggccgaggtgagtggatcacctgaggtaaggagttcgagaccagcctggccaacatggtgaaaccccatctctactaaaaataccaaaattagccgggcgtgatggtgtgtgcctgtaagcccagctactcggaaggctgaggcaggacaatcacttgaacccaggaggcagaggttgcagtgagctgagatagtactattgcactccagcttggacaacaagagc

SEQ ID NO: 34961 - DNA, 877 bp, Artificial sequence
  DNA replication origin
cactttgggaggccgaggcgggctgatcacgaggtcaggagatcgagaccatccttgctaacacggtgaaaccccatctctactaaaaatacaaaaaattagccgggtgtggtggcgggtgcctgtagtcccagctactcgggaggctgaggcaggagaatggtgtgaacccgggaggcggagcttgcagtgagccgagatcgcgccactgcactcccgcctgggcaaaagagcgagactccgtctcaaaaaaaaaaaaaaaaaaagaattatgtggcggtgactgaaggttgaccttgatgtaggccttaatggggtttatggccagggttgggggacatttgtaggactcacctctgctcaggtacagactgacatccacctcacccgtgtgcccgcagacacccttggtgcaggaggtgcaccagaacttctcagcttggtgttcccaggtggttcgcctgtacccaggacagcggcacctggagctagagtggtcggtggggccgatacctgtggggtgagtggcacaggctgggagaggggtgtggaagcaagggcagaggggtttatccaaggctcacaaccttgccatcccattgggtacagcgacacctgggggaaggaggtcatcagccgttttgacacaccgctggagacaaagggacgcttctacacagacagcaatggccgggagatcctggagaggaggtggggggtgactgagagcactgagggggtggtctgtggtgtgttggggcccaggggtggtgagggaaatttgctgattacatgagtgtgggagacagaggacgaagggagagtgaagggcgggggagccaggcagggtgcagtggctcacgcctgtaatcccagc

SEQ ID NO: 34962 - DNA, 943 bp, Artificial sequence
  DNA replication origin
atgcctgttattctctccccacctggatctctcttccttcaaatagccacacggctccctccctcaggtcatatcttaaatgtcacctttatcgggaacaccttccctgaaacgtccctgccaaaattgcgaaccaccacctgccaccaactctgacatgtctgtcaagtgtcacccatgatcacactgggtcctcataacagtcccaggaaaggacactgaggctcagacaaaggtcacttgctcaaggacacacaatgaggggagttgtgacaggaggtcataagcctagggacctgctgacccagagtccacacagctcaccatgacacttcaaatttgtcacaggagcaggaaaggggattgaaatggggtctcacctcattttcgatggttaaagcaggggaccaggatcttctggggatgggctgtggtgcgcgggcctggggcttccagcgaggcacctgggctactgaataggtgctgaagcccagggcgggcagtgaggctgagaacagcagctccggagggtgcgcctggctgtctgagctgggaaatattaccacctcggataaaggaggagggaaactgagtcaagagtacccatggaaagctatacatgcatggagacaaaaaactcaaggaaggaaaagagtcctgagatggggaaaggaaatggaggtgtgtgtggtggggggacagtcagattccaaggaaatgattgcagagaagattcaccaggtggaaaaaaaaacccaccgggagggtggagagaccatggagtcgggggagtgaaggaggaagtaggggaagaaacccttgaggcaggttctcgggggaggaagaggtttgggggaggacgttttctggaatgaaggagatgtccataaacagcaataaattttcctggggaagcggggtattaaaatggaggaccagccag

SEQ ID NO: 34963 - DNA, 1512 bp, Artificial sequence
  DNA replication origin
cagtggtgcgatctcggctcactgcaagctccacctcccgtgttcacgccattctcctgactcagcctcccgagtagctgggactacaggcgcccaccaccacgcccggctaattttttgtatttttagtagagacggggtttcaccatgttagccaggatggtctcgatctgacctcgtgatccgcccgcctcggtctctcaaagtgctgggattacaggcgtgagccaccgcccccagccgtcctcgagttccttcttaaagcctctaagaatcctgcccgccagcaccggacctttcgcttccccttggggtctcagctgagtcccacagaacctcaccggactcattgtctatgagcagatgaggcgatggctgtgctccagcatcacgacgccgtcagcggcacctcccgccagcacgtggccaacgactacgcgcgccagcttgcggcaggctgggggccttgcgaggtgcgcggggcgagacttgggagacacgggggtggagacaggaaggggcggggccagggcctgggaaaggggacagagacaggtgtgaggcgtagccgagagccctgtggcggggctacaagggctcgtgggggcggggcttgtaggaggcggggaaagatacaggaacggggcggggctttggaggggggaaggaggcggggcgtgggcaagaggaggcggagacagctatggggtatagtcaagggcagcagggtggggctagaaggggttttggggcgactcttgagggaggcgggacagagaccggaacggggcggggcctgaggagaggggaggagtcaggcctggcgtcctgaacccaccggtccctttgcgctcttccgcaggttcttctgagcaacgcgctggcgcggctcagaggcttcaaagatcacttcaccttttgccaacagctaaacatcagcatctgcccgctcagccagacggcggcgcgcgtgagccgggacgggaggggtggatctagggcagatgggctttagagggggtagttggaaaatgtttttggaggactatacaggagtgaaattacgtgggctgcgaagctgggtcagcagagagaacaacgcatctcgagggggcttggccttaagtgccgtgaccacactaggaccagccaggggtgtttctgtgcaaagtgggtgggtttggagaaggcctgctgtgacccatgccctctctgacccccgcctccccagttccaggtcatcgtttataatcccctggggcggaaggtgaattggatggtacggctgccggtcagcgaaggcgttttcgttgtgaaggaccccaatggcaggacagtgcccagcgatgtgagcccaaacaacgaatattcccccgctgggactcctcccccagtgggcatttcctcatcgcccccatggatatcgcctgcttccatgaatacctcccactcatgcatatctcttcccccctcttgtatcttctccctctgccccttaatatcagtctcccc

SEQ ID NO: 34964 - DNA, 890 bp, Artificial sequence
  DNA replication origin
cactacaccggctaggaaaacccggcccccttaggaaaagcacttctgctcctaccggcattaagaggcattccgtcttggaattccggcattaagaggcattccgtcttcatagcccgtgagacgccagtgtcacctttagcccaaccagtgccctgagggtggcattttcctaccttcctgtaacgacccccgggattgcccagggctacagcctctctcccgtgagcctccagaccgcgccctggccccgccccccaccccgattggcccggccgggtctgggggcggggcgtttgcccggcctttccagggccggggaaccccaggaggaagctgctgagccatgggcgcctacgcgcgggcttcgggggtctgcgctcgcggctgcctggactcagcaggcccctggaccatgtcccgcgccctgcggccaccgctcccgcctctctgctttttccttttgttgctggcggctgccggtgctcgggccgggggatacgaggtgagtggggcctccgagctgaaacgtacaggaggcagagtgaaacccagaatacagtctagaggtgtgggtgggtctgtcctgtgggtgtctagtgaatggctgatgatatgacagtgtggtctgagtgcgtgctttgtgtcattgcgaggtctggctgtgcgcatctgagtataggactgtgtctgattgtacctgcctccgtgtctccgggatgcttgcctagactttgtctgcacttaactgtgggattggaggggcaggaggtggcagggggtgagcagtgtatgtgtggggggaggtgctggctgagagctgggactctggagtctgcctgaaattccagcctagctcttacacttcctgagtgtgtgacgttgggcaa

SEQ ID NO: 34965 - DNA, 1105 bp, Artificial sequence
  DNA replication origin
tctaggcaagcatcccggagacacggaggcaggtacaatcagacacagtcctatactcagatgcgcacagccagacctcgcaatgacacaaagcacgcactcagaccacactgtcatatcatcagccattcactagacacccacaggacagacccacccacacctctagactgtattctgggtttcactctgcctcctgtacgtttcagctcggaggccccactcacctcgtatcccccggcccgagcaccggcagccgccagcaacaaaaggaaaaagcagagaggcgggagcggtggccgcagggcgcgggacatggtccaggggcctgctgagtccaggcagccgcgagcgcagacccccgaagcccgcgcgtaggcgcccatggctcagcagcttcctcctggggttccccggccctggaaaggccgggcaaacgccccgcccccagacccggccgggccaatcggggtggggggcggggccagggcgcggtctggaggctcacgggagagaggctgtagccctgggcaatcccgggggtcgttacaggaaggtaggaaaatgccaccctcagggcactggttgggctaaaggtgacactggcgtctcacgggctatgaagacggaatgcctcttaatgccggaattccaagacggaatgcctcttaatgccggtaggagcagaagtgcttttcctaagggggccgggttttcctagccggtgtagtgtgtccatgggaatccagggtgtccgtcccatggaccttcagcgctagggtcctggaaggacctagcttgcctaagaggaggatctgatgaagagtcctatactgtggggattgggacgttgggtaaatacccctggagtaccagggatgggatccagcctggttgagaaggatccctgggtgttccggagagaaaagagggtctgacaagtggggaaggaccccgagtctttcatgcctttcccaattcctaccagttcattctctgataagaaaacaaagcccagggcaggcgcagtggctcaagcctgcaatcccagcactttgggagggccaggctggtgaatcacttgggcctgggagtttgagaccag

SEQ ID NO: 34966 - DNA, 1312 bp, Artificial sequence
  DNA replication origin
ctattgaagcccgctttcaggttcttttccccattttccctttgaaaggaagacttctggcttctcctaaatctccgttctctgggtaaggggagtccaagcctctgtcatgaggaacggaaatgcgagggcctcgggtgttactctaaaatccgccctcagcttgcacgccggaagctgcgattcctgcagcggaagaggcgtgatctggccttcgactcgctatgtccactaacaatatgtcggacccacggaggccgaacaaagtgctgaggtgaggaccccagcgtcgtgggcacgggttcgggttgtgggtgtggatcggggccctgggaagcgcctgtctatcccgggggcaggacctgagcgcccctgaccctcgagcctgtcgcaggtacaagcccccgccgagcgaatgtaacccggccttggacgacccgacgccggactacatgaacctgctgggcatgatcttcagcatgtgcggcctcatgcttaaggtgggcggggttgagcttctatgggtgtagttggacctgagaacgaggcccgggggcgggtttggaatgaagcggggtgtcttgtcattgctgatggggcgggacctgagatcggccgggagtggggctgcgatgacgctgggccgagaaagccccagtctttggtgaagtcaaggattcgagtcaggttggggatgtggcagattggtctgcgagtggggccaggctttgaagcaacttggagaggagttgtggaaaaagggcagggtcttaagcatgtgggatgtcagagtctctcttggtcctgagagacgcaggccagacagtaggactagaaaccacgtatctagagtatgccatgagcaggtgggactgaggaattccgggtggggcaaggtcccagctgcatcagatggaatcagtgggcatgatctggtgtctggaaaggtggcttcggggactcattgttgtgcctttcactaacctgcccacccacttacctttccctagctgaagtggtgtgcttgggtcgctgtctactgctccttcatcagctttgccaactctcggagctcggaggacacgaagcaaatgatgagtagcttcatgtgagacttgccctacagaacaagtgactcttgagtaaggggtggggggaccccagcctggccatcctagactgacacctctctcctgtctcaggctgtccatctctgccgtggtgatgtcctatctgcagaatcctcagcccatgacgcccccatggtgataccagcctagaagggtcacattttggaccctgtctatccact

SEQ ID NO: 34967 - DNA, 1133 bp, Artificial sequence
  DNA replication origin
gtgagctgagatcgcgccactgcactccagcctgggtgacagagcgagactccgtctcaaaaaaaaaaaaaaaaaaaaaaagaaagaaagggcctaaaggctcctcgcggcttccgtattacggaacacacgcacaaaaatggcggcgacctggtttacaggggctaaaaatggtcacgtgataaaccaacttccggtctttcgcccaaagcacgttccctacttcctgtgctcttgcggagacgcgcgcgtcggggtttaacgcgtttctgggccgccgtaagcccggcctaggggcagctttgactcgagagccggctataggcgcatggaaggttccctggaacgggaggcgccagcgggggcgctggccgccgtgctaaagcacagctcgacgttgccgcccgaaagcacccaggtccggggctacgacttcaaccgcggtgtgaattaccgcgcactgctggaggccttcggcaccaccggcttccaagcaaccaacttcgggcgcgctgtacagcaagtcaatgccatggtgaggaccgggcggaatttctagggacgcggaggggcgtggcttgtagaaccaacgcggtactagacgggggcagcgtttccagtggaggggatatgtcttttatttgagttgcccaatagttggaggaaggcgggacctattctgggcgggagtttctgtcctgggaaggggattttgcactctggtagttacatgctggtacggtaacctgaggaggcgaggactgattcttggtgtgggggcgggttctaggtacatttaaagctttctggaatgggcggagcctggggcaagacaaattaagggaggatatgggaggaggagcctaagtctgggcggttcttgaatttagatttgcttttcccagcggggaagggaccggatctgaaaggagatgctctctgattcctaaaagggtgggggctggctgggcgcggtggcgcatgcctataatcccagcattttgggaagccgaggcgggtggatcaagagaagaggagttcgagacaagcctggccaacatggtgaaaccctgtctctactaaaatgcaaaaaattagccgggcatggtgttgcgcgcctgtagtcccagcta

SEQ ID NO: 34968 - DNA, 910 bp, Artificial sequence
  DNA replication origin
catcaccatcggccgcttgggctacgtgtgcccccaggaggtggcacccatgctgcagcagttcatccggccttggtgtgtgtccacgtgtcaagcctgctgtgtggtgggcgggactggcccaaccccctccctcgcctgtgcatttccagccccatctgcctactgactccctgccctgccccacccccacagatgcatgtcccaggcccactcactgatccccagtgacccagccctccacagatgcatgcccagcctgccctctgacctccagctgctcaccttcccacaggtgcacgtccctcaggaacatcagggacaacgaggagaaggactcagccttccgcggcatctgcatgatgatcggtgtcaacccggggggcgttgtgcaggttggggcagctgggctctgagggcaggcgcgggcgctgggctcgggcggcccctcacctgggatccgtcacgtttcaggactttattttcttctgcgatgctgtagcctcctgggtgagcccgaaggatgaccttcgggacatgttttataaggtgaggctctgtctgggccctgatctagttccgggagcaggcaggggtgagaccatctggtaacaatggggcctggggatgggggaagaggcgcactccccttgttctgcccctgcctacccctcaccaccaccctccccacagattctccacggcttcaaagaccaagttggggaagataactggcagcagttctctgagcaattcccgccgctgctcaaggagaggctggcggctttctatggggtctaggtgatcatggagactgccaggtaaggagactgcagctggcaagtcagcactgtcttgggggccgaaaggtcccaggccatgaccttcctcctccccctgcaggtttctg

SEQ ID NO: 34969 - DNA, 1023 bp, Artificial sequence
  DNA replication origin
agtgattcacctgccacagcctcccaaagtgctggattataggcgtgagcacctggcctcacattttctattttcaatactgtttgctttaaaaaaaatttttttttttaattttagaactggggtttcactatgttgcccaggctggtctcaaactcctgggctcaagcaatcctgcctcggcctccaggattactctttaaaataattagaacagcaccttttccctgatttcctttgggcacaaccaggccctgactccccaccaggggcagcccacgcaggctgctgggtgtcatcactgtccagggtccccacccacctgcatgcactggaacagcaatgtcatgatgttgctgcgggccaccagctgctccacgtgaccacccaggccctcggccaggccgctgagcagatccagtgctacgatcatgaagtccttgtcgggagcctcatactgctcagggtgctgggtgtacatctagacacagatgccgacaggggcacgggtaagtggagcaggcccgaggcaggccaatgcagaagcacaggtgacgggcctagggttgctcaccatggcctgagccagtgtcttctgcaccagggtgacacagcgctggtagacgggctcacagtaaggcaggaagccactctgcagggcggtggccaccgatgacagacactggcagggaggaaggcaggtggggagaactcaggcagggtgggcaggatgggtttcgggtgaggggcaggagcccactcacctccagcagggggaagaggtccttgtcttcgtccttgagctcattccacttctggatcagtgggggcatcagcttctggatgtattcctggagagggagcacgaaatgggcgctccctgggtcggggtggcagactgtgactcaggtacctgttgcccgagtgatgaggcctgagcgcctcaccgtggctcatgggaccctgaaaggcctgccatctggccagacctcgaggccttcattcttctcacctgtccaagca

SEQ ID NO: 34970 - DNA, 995 bp, Artificial sequence
  DNA replication origin
gaggtggtggcctacagagtcggccagggtgccaatggcgtcatagaggatgagcaggttcttgtgctggtatttcccaaaggcaaagacaagggtgtccaggatgtagctgaggtagggcaccagctccgtgcaggcctcttcctccagggtggcaaaagcactggtgggagggaggatgaagcgggggctcagtggaccatggcaggtgacactgggccatgggcagttggggagggcaactcaggatcagccagtacgaatacgcgataaatcagttccacatcaacagtcacaggtgtcatcacttcccagagggtggccgggggagagtgggggctgtgggatcaggggtccagggtcacctgcaggccgcctcctgtaccctcttgttgccatccaggatgcgtttgagcagctctgtcatcaggggcttgaggtgcatgtcgggtggctggctgaccacccagtgggcatagcggctcagcgtccagcaggcgatggagcggaccaaggccttcttatccgacaggcactggatcaggtgcgggatcagctcaggcaggtagggcaccatgccctgcatgcagcctacaaggaaagggaaccaagagggggcagtttgattgggcccagccacacccaccgtatggagagaagagtcagccgcacacaacatatagggaaactgaggcttagagtttaaatcactggcccagactcatttcacagagccaggtaaaggcaggcacaggaggggaaacaacagaagcctctcatcccaaagccccgggttatctttatttttttttgaggcagagtctcgctctgtcgcccaggctggggcgcagtggtacgatcatggctcaccgcaaccttcacctcctggttcaaacaattctcctgcctcagcctcccaagtagctgggattacaggcctctgccacaatgcccggggaattttttatattttcagtagagacagggttttacca

SEQ ID NO: 34971 - DNA, 1454 bp, Artificial sequence
  DNA replication origin
gcatccactgagcttgaagggcaggaacaggggacaggagagatcaggacgatcgtcttgggagggcgcatctggggaagctcagaaattggactagggcaggaggcctctgggatctggcagaagttaagggcagagtgtcgggggaaggggactcttcagggactgtgcctgcatagaagagaccacgggggccggggcgctatcacggtctggggcggggcccctggatgtggaggcggctgggccctcgcccagccgctgcgagggaggtggaagccttcgggctcggagccggggtcagcggcatgggccaccctgggacgagggctcttcgctgggtcccatgaggatccgccgggccccgccgccgccgcctgtggcccgtttccacatcccccctcccgcgctcccgagcccgcgactgcgcggccgaggatggcgcagctggcggggaccccgcacttgggcgggcgtggatcggaggcctccgcctgtccgccgagggcgttcccgtcgtcatgcggccaccgcggcctcaggggctccacctgggtctcacacggagccccagagacccagcgctgaccccggcccctacctccgcagcttgccttgcgccatggactggcagccagacgagcagggcctgcagcaggtcctgcagctgctcaaagactcacagtcgcccaacacagccactcagcgcatcgtgcaggatgtatccttccttccttccggggctgggggagccgggtagatgcgtgcagtttccaaaggccagagagagaaagagagggactgactcccctagtccccagattttttctgctgtgcggaggatctgccctggacagagaaggattacaattcctgggtcccatttccagagctgcggggattgttatagaaaatgatgaaaattcctaatgttcatcgaacgctagcatctactccattaactattaaagtaggccctggcccaacggggtggctcatgcctgtaatcggagcactttggtaggccgaagcaggtagatcgcttgggcccaggagtttgagaccagcctgggcaacatagggagaccccatctctacaaaaaatacaaaaaatagctaggtgtggtggcatgcacatgtagtcccagctacttgggaggatgaggtgggaggatggctagagcccaggaggtagaggttgtggtgagctgagattgtgccactgtactccagccaccctgggcgacagagccagaccctgtctcaaagaaaagatatataggccaggcgcggtggttcacgcctgcaatcccagcactttgggaggccgaggcggacggatcacctgaggtcaggagttttgagaccagcctggccaacatggagaaaccctgtctctactaaaaatacaaaaattaagccaggtgtggtggcagaagcctgtaatctcagct

SEQ ID NO: 34972 - DNA, 1512 bp, Artificial sequence
  DNA replication origin
gctggctagagaggccaaagaaacggcaactctttggtcacgtgaccggaccttgtctcagcccgggtttcccaagtgccagggcacgtgtgaaggttgaaccttccgattggctcggcgggaccagtttgaacggagtacgggagccgcggcggctcacctacggccgcgtttttcttttttttttttctttctttcttttttttttttttttttttttttaattctctctctttggctccctccttccgcgcgagtctctggagaagccgcagcgcgagttgccgccgctgctgcccggggccgggtaagtgggcctcactcagagcccgaccctcttggccccggcttgcgtcgacccccgccgggcaccgagcctgcgccgcgcgcggcccgggcgtcggggccgcgcccgaccgggaaaggccgggaagccggttgggcccgatcctcctggcagctagaacgggccgggcgggggaggggggaaccgagcagagcttagggggtggggcctcggagccaggccatgtcggggctcctcaagaagagggccagtgggactgctggggtcgggctggaggggatctgattgggggaagcgtctggggactgcttggggcctgattgggggacgtcgcgaggatcgggtgtgtgtaggggcctgtttcggtggggcttggttgggtctgattgggggaggccgcactgaaaagttgagcggggtggggggaggggagctcgttgggtcctgacagggaggggcgtcagacttcggcctagagggttttcttggatctgacttcgaggcgttgctgggatccgttgaggggaatgccccggggggtgtttacccaggccgaactgggggaggctgcaaggatcggaccagggggttactgacacgaggtggtggggggctcggccgaacttgactgggagaggcaacagagatccgtcagcaggggttactgctgacagggtcggagggaatttcagggagaggcttggccagacctgattggggaaggcgactgggatcggtccagggggctcctatagtgggttggccgggcttggctggctctcattcgaagaggcagcagagacctacctggggactgctttgggcctgattaaggggaatccttagaatttggctaggccacagagggggatatctggcatccactgagcttgaagggcaggaacaggggacaggagagatcaggacgatcgtcttgggagggcgcatctggggaagctcagaaattggactagggcaggaggcctctgggatctggcagaagttaagggcagagtgtcgggggaaggggactcttcagggactgtgcctgcatagaagagaccacgggggccggggcgctatcacggtctggggcggggcccctggatgtggaggcggctgggccctcgcccagccgctgcgagggaggtggaagccttcgggctcggagccggggtcagcggcatgggccaccctgggacgag

SEQ ID NO: 34973 - DNA, 1221 bp, Artificial sequence
  DNA replication origin
gggcctgaccgctcttcccggcatgcattgttcgggacgaggcgagtcgggcgccaagcgcggggccggagcggccttcccggagtcctttgcgcggcacctggcgacaaaatggctgcccgagggagacgggcggagcctcagggccgggaggctccgggccccgcgggcggtggcggtggcgggagccgttgggctgagtcgggatcggggacgtcgcccgagagcggggacgaggaggtgtcgggcgcgggttcgagcccggtgtcgggcggcgtgaacttgttcgccaacgacggcagcttcctggagctgttcaagcggaagatggaggaggagcagcggcagcggcaggaggagccgcccccgggtccgcagcgacccgaccagtcggccgccgccgctggccccggggatccgaagaggaagggcggtccgggctccacacttagcttcgtaaggagccgtgggggtgggggcgggcgccacggcctgtcttggcagcgggagtcggggcccgtgaagggggatcgggaccgaagtccactttccgttctgaatgaggggcccgtccgggtcacccgctgagggtgtggaacttggattcccgacaactggggtctaggggcgggagtggggactccaggagcttgcccgtgggaactgggagctgaggaattgcctaggaatcagcactgtggagaatgaggaaacgtggatatcaggattcctgtttgagtggtacccggaccttgggtcatgggaccaccactaattgtgaggaaagggagtaaatttaagtctggactctgagctatatgtgttagactcagaccacgtactatgtaaggacaattacttatctaggacaattgcttgacttccttgtatcttattcgaccaacctccatttattgagcaatttacctcgtgctaggcattgtgctaggtgctggtatgcagtggtgagcttacagacaagatcgctgctttcctggagcctctgggtttgcctaccctcattttccctagttgcaaaaatagacatcatagcatctcttgatgtggtgagggttttatgaggtgatcctggaaaagtggttagcacagagcctgtcttccaggaagggctaaactggtggttctcaattggggcagttccctccacccccacatttggcaaagtctggagacatttttggttgtcagaactgcgggagg

SEQ ID NO: 34974 - DNA, 1273 bp, Artificial sequence
  DNA replication origin
gtggggatgcgggtgagctggggtagggaggatgaaaaggaggagcgggcttcagtgaatgcaaggacacttcctagggagtgagggctgctgatcgagaactgagctcatcagcaccgagcctgccaccgccttgccaggttccgcagctgacggcaccgccccagctgccccctcgcccccatttatgggctgtccggcagctggacagcgaaggcatgggtcacagggtgaccagcccaggcgggttcctaattactccgggcagggtgaacatctgccagtctgggaacacggcgtcccagcctgctgggcttggaacctcgggcggggctatgtagaatgcacgaggggctcctgagcactctaggatgcccatcccagggtttgacccctgaacttctgcccctcccacaccaatctgtgtgttaatgttcttcaggctgggcaatggagggggagtgggtactgtttgtaccaggctgggagtgtcccctttagaggtgtgtctgtgaagaatgaacatctgcccagaatccatgccaaatgcaggacaaggttttgtgtccccaagcttgtgtgttcatggcaatgctgagagtatctgagacctgtgggtgtgggtgtgggcctgccgccgggagggagcgttggaaagggggttgccttcacatattggtgtacaaatgctggtgaatttcaccagcggtgatagctaggggacccttgagggaggggtggctgttgtgtgtgtctttgcaagattggtgaacctcaggccccgctctgagcctgggattgtgtgccaccgcactgaggaaagggtttttgcatttggtgtgtgatcatggctgcatctttgcacagggaagatcgggagtaaaacctccttgcagtggagtatgactgtgtgtgtgaaggcattctgaggtctgggtggggtctggcacttggctggttgtgtgggtgtctttgttacatggcgtgatcatgacggaattcagaccgttgggagagccgtgtgtatgaaagaggagagcctagtatgtcagggtccacctgccttatatatgcgtgatggaggcaggaggggtcgaggtaggtgtgtcttgtgtgaccctggaaggttctgtgacagtgtgtactgctcctctgggtaaccatagttatgtgaggctgtctttttgttttttcaatagagatggggatctccctatgttgcccaggctggtctcgaactcctggctcaagtgatcctcccacctaagcctcc

SEQ ID NO: 34975 - DNA, 1642 bp, Artificial sequence
  DNA replication origin
atcatggctgcatctttgcacagggaagatcgggagtaaaacctccttgcagtggagtatgactgtgtgtgtgaaggcattctgaggtctgggtggggtctggcacttggctggttgtgtgggtgtctttgttacatggcgtgatcatgacggaattcagaccgttgggagagccgtgtgtatgaaagaggagagcctagtatgtcagggtccacctgccttatatatgcgtgatggaggcaggaggggtcgaggtaggtgtgtcttgtgtgaccctggaaggttctgtgacagtgtgtactgctcctctgggtaaccatagttatgtgaggctgtctttttgttttttcaatagagatggggatctccctatgttgcccaggctggtctcgaactcctggctcaagtgatcctcccacctaagcctcccaaagtgctaaaattacaagtgtgagccatcgtgcctggctgaggctgtcttaagagcagctagatttgcttctgggactatgatgtgtgtttctgcgtgcatctctgtgacactgtgtgattacaggtgactgtgaagtgacccagcctcactgagcagtgtgtgtgtttctgggactgggaaaaagaccatccctgcctcctcccccaacctctgggttccagatccctaggacctgccagtgagcgactgggaggggaacagggaggggcgagggaggacaaggcggatttctccccccgtaccaggtaacaaacttgtgggactccaaacaaaattctgaagctacagcctagccgagggaggaggaccaggaaagggaggcacgcccactccccagccccacccaacgccaaagccacccgcccattccatccctgtccctgtgggtccttgcaccggccaccttcaacacaggtgagatgagcccaggcttggggaaatagggggccctgagggaagagggaacctgcgggcaggaatgcatccggagtcctcccggggcggggagtggagggcttggaaggctggaggggaacggagagaggaaaggtcaaggcggatccgggaggaaaagggagtggggggagccagggcaattaagcagaaggtgcacaggctggggcaggggggctaggggacctggaggcttagggacagggcttcagagggagtgcagggagcagaatgggtcaagactgggagctggggaagtggagaagggggagccagaaataggggctgagggagagaatttgggagaggtggagccttgagaacctagaaactcaggtgctggggacttgcggaatggggcatgctacaggtggcctctgggtgaaggggatcgggcagagggtgactcgggagctgactgcagggactcaagggtcttggtggtgggggacggcagttaccagagcccacggccaggagtccagggaaggggacagcctgagatgaaggtcagggaggggcactgggggctggactagactgagtaaagctgggaggagaaggcaactcaggcaagggtcaggactgaaggggtggcgggccggaacatgggtggaatccctgtgctcagttatccccgcacctctccacccacacccgcagcccccacccgggccacccactctcccttggcca

SEQ ID NO: 34976 - DNA, 823 bp, Artificial sequence
  DNA replication origin
tgggcagactgttgcttgctgtgaaggcatagggacctaaaacaaggggagaggggcctggtttgtgggggtgtacatcagagacatctggtcaggcttgtcacagtagccacacccggcccctgagccaggaacttctgaaggggttggggacagggtctacatcagggagccttgggcaggctagggtcacttgtggtcactaggggtccaagacttgtcagagaaatgcccccaggctggaattgagaggatggagtcctatggggtccctggagggttaggggtttgtcccccctaataacacaacagacactggtgagaatccccagggtgaccaggaataagtcctgtgtgtgagatggagctctcctgggggcacctcagggggcactgtgaccccaggtgacaccccaggtctcagagtgtagagccacatctggcatcttcatgatatggatccaaaaatgggtgggcagtgctgtcggggttggatttgaggggggggatctcagaggggcaggaatgggggctcctcaaaaggcatgaatggatatgggtttctcagggacatgggaacgggggacttggggttggaccgcaccaagcacgaaggagacagggatgaggctggcatactggtcacaataaatcacaagcttctcgaagtagcgcttctgcccttcggtcagcacaaagctgcgggatagagatgaggggtcacaggtcacaagggtgactccatccccagcttcagatctctcttgctgtgcccctcaccctggcttcttttataatagctgcccccagccgggtgctatgg

SEQ ID NO: 34977 - DNA, 1348 bp, Artificial sequence
  DNA replication origin
acttaaccttttcaatcagatgtgccccgcagagccataagccctgccccaggcggccctgcccacccaactggctcacgtgatgtcaaaggtggagccctggaaggaaggctgccgcagctggaagacagtagccgctgtgtatggggcgcgagcctcggctgcatcccagtacaagtccttctccagcacagccaggtcatcatacatctcgtccactgccagcatggacacctacgggtgcaaacacacagggtaaagtgggggcagggcaacccgccgggaccacagggtggaccccttcgggtgggtggggaccacagagggaaggatggttggggtgagacctggcaagacttggcaggggtgggaccagaaccctgttgggcactccgggatggtcgccacctggaagtctcacctggaaactgagtctcacctggaagtttctatcgatcagaaagttggtctcaaagtcatcatcgtcctctccgaaggggttgatgagctgctcagctacctgagaggagagggagcagttaggtggaaacttgggaaccccatgcccgccccacccacgaaattccagcctggatcacccacctaccttgagccagccggcgtagaagaagaactgcaagagggtgaagatgggcacacacaggtctaggtcgtggtctttgtaaccctgagccgggtccaggaactggcgaccaatgaggcaagccaggaagtagctgtacagtgcgatggtcaccacctgggcagggcggggcagggctcaggggggtcattggggtccaaggctaggattaggcatcattatgatgggggtcttagctagttcttggtttccccttggaaaccaggcatcagggccactgacaccgaatataaaaagaggcatgatggggttacctgcgtgtacacgaggggtacgctaatccagtcatagtgaaagagcattccacatttgccccgaaaaacattcagctcctgggggtggatacaggtcatgaggaggcctgaatggtgagctcacacagggatattaagtgtaggtacgtgggatggaggtgggtggtcacctggtgggaattgggagtgtgctttgggggttccagggagggtatttggtggtgagtgtgcacctggatgaggtaccatgcacccaggagctgcccctcaagggcattggaatcagccccatggaggtaagagtgcacctggtgagggtgtttgaaatcggcctcgtgggggtgcttggagggccgccgttgacacagctccaggggtacaatttccctggtattctatatgaatgacctcctggttgggcccacctcga

SEQ ID NO: 34978 - DNA, 1298 bp, Artificial sequence
  DNA replication origin
gggggcaagactgaagatgtgagtgtcacccaccacctcccagcctggccctcccttgtgccccgaagtaaccctcctctctctcccatgctgcccgatgccccatacaggccattgtaagtaccatgggcccaggatggcaccccctaccctcaccctgggaaggaagaattagggcctctctggatcccccactcaccttgcctcttctctctcccagtccattttgctgaaaaggaagctggaggaacatttgtaagtcgcagaaagagggaactcctcgtgggggcatggatttgatattagtggggagtttcttaggcatgtgccaccatgcctggctgattttttatatttttagtagagacggggtttcactatgttggccaggctggtctcggactcctgaccccagatgatccacccgctttggcctcccaaagtgctgggattacaggcatgagccaccgcgcctggcctgctttcttttcttttacctgtctgctattgaagagatttgtattctagaaagatccctggctgctggatggagtgcttgagagtagaagaagctagcaagggaagatggtggctgaaccagcttgggagctgtgggatgggaagaagtggacagcaggggctgttccggggcatacctgctaagggtgcggagggttgtggctctgacagctgtggagccggtgggaccagggcacacagccccaggcatgaggggcaggcagagagggctctgtggccatgtaggggcatttctggctggcggggaggtctgtggctaccactgggacaaaagagaagccagcccggaggtcagcccactgctgctcatccccggcccacaggcagaagcttcatgaggcagatctggagttgcagaggaagcgggagtacattgaggagctggagccacccactgacagcagcagtaagtaggacctagtgaccagagggtggggagatcccagagcccagcagcgtggagctgatgggccacctcttccgccagcagcccggcggatcgaggagctgcagcataacttgcagaagaaggacgcggacttgcgggccatggaggagcgataccgccgctacgtggacaaggcccgcatggtgaggacgctgggtgttcccacaagttgcctgccctggcttcttactttttgtgcctcctattgagtcaaacctcctgcttgcacatctgtgcccccaactcatacctgtcataccccaccataagacagacttctgcatgattccccactgctactgattgtcac

SEQ ID NO: 34979 - DNA, 1045 bp, Artificial sequence
  DNA replication origin
ccacaattccaccccaggggatacctgattataaccctgggctaaccattgctgtaatgactctcaacagctccaggccctgattgacccctaaccctcaactttcatgaccccttcaccttgaacccaaaagcctcaggctgaacaacaccctgtgctccaagggccactccacatcccagctgacccctgatcagagctctcagccctcccccttccctcccactcccctaggcagtcttcggagcgtgctgggcagctggaggccacgctgaccagttgccggcgccgcttgggcgagctgagggagctgcggcggcaggtgcggcagctggaggaacgcaacgccggccacgccgagcgcacgcgacaactggaggatgagctacgccgagcgggctccctgcgcgcccagctggaggcgcagcggcggcaggtgcggcgggggcggggttagggccggggccccgcccctggcagcaagtctctcaccgttggccagccctccgcccacccctgatcccctcccttatttgtacgtaggccacgctctccgggcctcttccctccacccacgctgctcttctgtctgggttagtaagcccagcctttcccttcccttaagtaccgctcctctaaattctttgatgcccgccgcttcaccatgctgcttgatttccttggggctacctaaccatgtaacaaaactcgtggtaaattgaaaatatcctaaaatgcataaaggccaggcctggtatcccagcgctttgggaggctgagccgggaggatcacttgagcccaggatttcgaggttgtagtgagctgtggctgcatcactgcattccagcctgggtgacagggtgagaccctgactcaaacaaaagaaaaagaccgggtgcggtggctcgcgcctgtaatcccagcactttgggaggccaaggcgggcaccccataactccttctgtaaccccacatcacttgaggccaggagtttgagaccatcctggccaacatagcaaaaccctgtctctacttaaaaataga

SEQ ID NO: 34980 - DNA, 2163 bp, Artificial sequence
  DNA replication origin
taggatattttcaatttaccacgagttttgttacatggttaggtagccccaaggaaatcaagcagcatggtgaagcggcgggcatcaaagaatttagaggagcggtacttaagggaagggaaaggctgggcttactaacccagacagaagagcagcgtgggtggagggaagaggcccggagagcgtggcctacgtacaaataagggaggggatcaggggtgggcggagggctggccaacggtgagagacttgctgccaggggcggggccccggccctaaccccgcccccgccgcacctgccgccgctgcgcctccagctgggcgcgcagggagcccgctcggcgtagctcatcctccagttgtcgcgtgcgctcggcgtggccggcgttgcgttcctccagctgccgcacctgccgccgcagctccctcagctcgcccaagcggcgccggcaactggtcagcgtggcctccagctgcccagcacgctccgaagactgcctaggggagtgggagggaagggggagggctgagagctctgatcaggggtcagctgggatgtggagtggcccttggagcacagggtgttgttcagcctgaggcttttgggttcaaggtgaaggggtcatgaaagttgagggttaggggtcaatcagggcctggagctgttgagagtcattacagcaatggttagcccagggttataatcaggtatcccctggggtggaattgtggggacacagagggtggggttatagggggagtgatggggagcctagagaggtctgagcatctgccaaggataccttggagtcattgggggaggtatgggacaagaggactgcggggtccttagaagtgcaattggggggtgcactagtaccttcgcattacagagatgctataggggcccagtggagccctttgtggttacagaaggcacagtagagtcaaaagggggtgcaaagtaattgcattgtggagtcctagaaggtaccatgggatccaggggcattatgaagcccaaactgtgcagtgggatctgcagagcattgtaggggaggttcttgtgttttggggggccacagggatgctatggggtcttggaagcatactgtgggataaggggggggcagtgtggggtccaggggatatggtggaattcaggatagtgcaatgtggccttgggcgttctgtagggctcagggtggcactgtggagtccagggggcatattgggggttcactgggcacatgaaaattacagagctgctatggcatcagaggggaactctggaaacaggtttaccccccgccccccgtgatggggacccaggaacccaccactcaccgtagttcatccatctcatccttcagggcctgtgcctcctgggccaggctagtcagcgcctggttccggtgctgcagctccgcaacctccctctccagctcggcacagcgcaggcgctcatcctccctgccactctccagcctgggggtgttgggggaagagcacatgagggggctgccctcccccggtcccctggcttgcctggcccagtccccagctgaccacacctgaagttctcctcctgcaactgctccagctgggattgcagcagcagcagcttcttggcagtgagacctggggtaccctcgccttcaggccggcccatccgctcccgcagccctgcattctcttgcgccaggctctgcttctcctctgacaggagcatcagctgcgggcagggcagaaagatgagcttgggcttggagaggggctactcaagtgaccctgccccacctagggccctacctgccgctccagatccagacagcgctgctgtaattcgtccccctcctcagcctcctcacttaggaaatagtacctgcgggactgcagagatgagggggaagaggaactcagggattcaggagaaggacggggggagggaggctgagatctctagaggccaaatggagggggccaagaaaccctcaggattgaaaagagggctggcgccgggtgcagtggctcgcgcctataatcccagcactttgggaggctgaggcgggtgggttacctgagatcaggagttccagaccagcctgcccaacgtggcgaaccccttctctactaaaaacacaaaaattagccgggtgtggt

SEQ ID NO: 34981 - DNA, 1054 bp, Artificial sequence
  DNA replication origin
tgatcaaccatttgttcatccattcatctatggagtactcaccctgtgccaggcctgggcattcagcaaggaataacacagacaaaaacctgccccacacagccatcattctagtgacaagcaacacatacacaaccataaaaattaacttccaggctgggcgcagtggctcatgcctgtaatcccaacactttgagaggctaaagtgggtggatcacctggggccaggagttcaagaccagcctggccaacaagttgaaaccccatctctactaaaaatacaaaaattagctgggtggggtggtgtgcacctgtaatcccagttacttgggaggctgagacatgagaatcacttgaacctgggaggtggaggatgcagtgagctgagattgagccattgcactccagcctgggcaacagagcgagactcttgtctcaagaagaagaaaaaaagaaaaagaaaaagaaaaagaaaaaacttttgatgccagtagttctgtgaagacaacaaaaaagcagggctttgagagagagcaatgagggcataggtggctgattacatcagatgggttaatctccaagtgaaatttgggggaacggtgttccaggcatagggaatagcagatgtaaaggccgtgatttgggaataaacttggtgtgatggaggaatggcagagagggcagaacagagcaagagggcaagatttgtaggagatgaggtcatcaggggcctggcaggccatggtgggggtgtggattctatttttaagtgctgtggaaagtcaaggcagggttttagcagagcaaagatgcaacctggcttgggctttataaagctccccctggctgcatggagagaaataaaatgtaggcagcaaaagtggaagaggagaggcagctggtgcactaatccaggtgagaggtaaagatggatgggtagggctgaaggatggtggggcaggtggtgagaagtgacttggttctggagacatatgaaggaagatggtcaggcaggccgggcacagtggctcatgcctgtaatcccagcaatttt

SEQ ID NO: 34982 - DNA, 1626 bp, Artificial sequence
  DNA replication origin
actcgggaggctgaggcaggagaatggcgtgaaccccagggggcggagcctgcagtgagccgagattgcgccactgcactccagcctgggcgacagcgagactccgtctcaaaaaaaaaaaaaaaaaaaaaaagaatttacttaagttgcagggaaaagacgtgaatgcgcttgtgtaacagggtggagcacctccgtctcaaaaggatcttgaggacctcccaccccaaaaagggccagggcgaggatgggaggtgggaccaccctcggatgcacaaggctgggccaggctgacccctagcggcagggcgggcgcccgaacggtgcccggatccaagatggcggggctggaggcaagagcgggcgtagggaggagattacgttccgaggcggagcctgggcttgggggcggggcggggcctgcgcctaggggggcggggcggggcggcgctctaggccgagcgggaggtcggggctgcgggcgctcgctggtggcggacccggaggctgctgcggcgccggggctccgtggcctggattgaatccgatcgggagccatgagcgtggacaaagctgagctatgcgggtctctgctcacctgggtaggtcgtggggcggggctaggggaaggtgagcgcccgctcctcttgcccgggatccctggccctggttcggtcagtctcttggtgctggggctgggaggtgcggggtcgtcgacttgctggaccgttggactctggcccgagcacccgcccccgtcacgtggcaagtctgcgtggaaaggacaggtgaggccccgcccctctgtggttggttcacgtggggcgaggacacaggtgaattggcctggtcacgtggtgcctgtggggcccaggtgactcgcgataccaccctggcctggacgcgcagggtttgttgggcagaggtgaggtgaggccacgccccctccggtctcaggtgagcagaagccagtccctcgcagagctgctgtggcggagcagcgcccgccccaccatgtgaggttcgctgactggaaaagtctgcaaaaggggagcggttcggcgctcccaggccctaactctttccttgtcctttcctttacccctcagttacagacgttccacgttccgtctccctgtgccagccctcaggacctgagcagcggccttgccgtagcctatgtgctgaaccagatgtgagtggagctgaaggggaggatcccaaaagtgtcccccagtctgctcatcccaccttctcgcccccagagacccctcctggttcaacgaggcatggctccagggcatctcggaagatccaggtcccaactggaagctgaaggtgacaagtggactcctgattagaggacagactggtgaagagatgaccagggacgggccagctaggcacatgtcctgggtgatgggcaggaagagggacagatgtctggtgatcaaccatttgttcatccattcatctatggagtactcaccctgtgccaggcctgggcattcagcaaggaataacacagacaaaaacctgccccacacagccatcattctagtgacaagcaacacatacacaaccataaaaattaacttccaggctgggcgcagtggctcatgcctg

SEQ ID NO: 34983 - DNA, 1461 bp, Artificial sequence
  DNA replication origin
gcgggaagcgcattgtcagtagactaggcagctggaggaaaagcaggatggctgggcggggaaaggaaacacgcgcctggctacgcgggaagctctggttcccatggcaactggggggggggtctcagctccatgggaaaggtccctcccccaacagggactgccctcccgtcaggcgctggggaagcccccgggcgctcggtcgaggggccacaagtttcggatcgggcaggaaggggttaacggaggccccctcccgggtttcaccggcgccccaaggtcccggccggggcggggctggtcctgccctgcgcgcctccgctcgcccagcccccgccaccgcccacgcacgcgcgcacgcagccagtgcagagctcccgcccttccaccccccgcgcttgcacgcacgaccgcgtcgggttccacgcacgcagcgacccccgtcgtgtctcacgtcacgcacgacgcacgcgcccccgcaacgcggggagggcgcctcccggaggggaacggcggggcgggaggccctctgcgcacatcactgcgtccgcgcagcctgctgtcctctgtgactttgactcccacttcccgccccctacacacaaagtcacaaacaaactccccgacccacagtgtcacacggacgcaggatacacctgccacatcttggcaccaacccattctagtccagccagcctcgcagcgaacacggacacacgtggatggagacgcagacaatcacacaggcacgtcagtcacatagcgtttgtgatagggacgcaaacagagccatattcatacataggtaggtggcagatacatcctgataaagcaaccccatccagcaaaataggacgggcgcagtggctcaggcctgtaatctcagaattttgagaggccaaggccagaggatcgcttgaggccagtagttcaagaccagcctgggcaacatagcaagacccctgtctctacaaaaatattttttcttaatgagctgggcatggtggtgcatgcctatagtcgtgtctatagtcccaggtatgtgggggttgaggcgagaggatcacttgaggccaggaattcaaggctgcactgagcagcgattgtgccactgcactccagcctgggcgacacaggagaccccgtctcaaaagaaaaaaaaaaaacaggaacagggagggacacagttttgcacaccagggcttgttttgtcacacagccacacttcttccatggtgattgtggtggcacagagatacatacagacacataagatagtcatgccatcgcatgacccctgttaccacaaatagggggcacgaaatgggatacagtcacagagacaagaccacgtacagggacactcaaaacgtcaagtggacggccgggcgcgatggcttacgcctgtaatcccagcactttgggaggccaaggcgggcggatcaggaggtctggagatcg

SEQ ID NO: 34984 - DNA, 959 bp, Artificial sequence
  DNA replication origin
gtgacagtcattgctggatcatcttacccagctgtatgtctgaccctgtctgtgtgtccctggctggcagtctctctgtggccaaggtgacaggggtttgtgtgtctggactggctctctcggggtgactgtgtgtacattcctacagccccccgcccgccccctgtctggtcaccctgggccatgtttactctgcccccagtcaatgtctgccctgccccgggaggggctgaccctcctccgtctgtccagccagcagtccacaggatgttcccgagacacagtctccatccgacgtcccctccctcgggccacccgcgggtcaggacccaggcgtccagggcggcgggggtggggctgcagcgtgggggggccctctcagggcactggaatgagggtggggggcggggaggtgacgggcccaacaggttgtgcctcattcctgccccgcctctcacttcctgggtgcctgcctcgggcagggggtggacaagatgaaccccatggccttagagtgtctgggtggggcatggcctgcccggcaaggactcgcttctgctgggcaccctgacacccaggcctgagaaacaggaggagccctcttctggctcccgtgctcaaccctggatgcagagtttcccatctattattcacctaatccccacaacaacccaacaagctggacataatgatccctcattttcagatggggaaactgaggtccaggcagcaatgagggcagagacaggatttgaacccagctctatatgctacccaagacccccagccagctcaccaagcgccatcctcccctctctaaaaatggtacatgtggggtggagtatgcacccaggcccccaggaggccaggctcgaggggggcgccggcttgctctgagtcaaaatgggcccctggatgaaatgaataagaaaacggctttaaccgtttcatcgccgcga

SEQ ID NO: 34985 - DNA, 1256 bp, Artificial sequence
  DNA replication origin
atacgatctgtaatgtgcatttgtgtgtgtgtgaaaaagaggtctgtggctggtctgtatgtatgtgtgtatacgatctggtgtgtgtgtgtgtgtgtgaaaaagaggtctgtggctggtttgtgtttggtgtgtgtgtgtggtctctgtgtgtgaggtctgtggcttgtttccatgtgtgtgttctgtggctgatctgtatgttgcctgttactgatctccgtttgtatgtgtgcatgtgtgtgtgtgcaaacaggttttgtcatggtctttctgtgccgatgtgtttatgaatgtcccactgtggcctgtctgtgcctctctgcactgggtgtgactgtctggccagaccatgtctgtgaatgtgtcagtctgcccagatctacccaatctgttgccaggtcccacatgtgtgtgttcctggtgagatggtgtgtacctctaaggcttcggcttggtgtccctgggagcatctctgatgtgtgtgcaacagtggtgggccagggtgccagggactctctgccatactgtgaacacatcatctctgtccctaggtttgtctctcttgtcttgtctctatcttctgagttggagatctggggtgtgtgtgtgttgccttctcttgcgtgtcaggatctgatagtgcatgcctgtgtctgcatatctctcgtgtggctctcggggtgctggtgctgaaagtgactgtctctcctatcagcatgcacatgttgcctgcttgtctcacatatagttcactctgtgtctgtcttgcccctatgtttctagcctattgtgtttgtctccatgtgtgtcacacgccattgtgtctgccttgctgtgtgcctctcacctgaatgtcagtctctgtgtgtttgtgtctatcatgcttatgtgctgggttgatttatccccgccgcacacggcctgcctgcgtatttttgaccagtggatgcgttcatgtgtttgacggtgtgtgtctcttgcttgagggtctggtctgtcactgtgtccatgtgtgacagtcattgctggatcatcttacccagctgtatgtctgaccctgtctgtgtgtccctggctggcagtctctctgtggccaaggtgacaggggtttgtgtgtctggactggctctctcggggtgactgtgtgtacattcctacagccccccgcccgccccctgtctggtcaccctgggccatgtttactctgcccccagtcaatgtctgccctgccccgggaggggctgaccctcctc

SEQ ID NO: 34986 - DNA, 1292 bp, Artificial sequence
  DNA replication origin
gattgttggaagcagtcgatgacttattttatgttaaccacttagaagagtgcctagcccacagtaagagccatgtaagtgttggctattaaaataataattattatttctcagcctatctatcttaagtgtttctgagtctcactgtctgcgtgacactaaccttgaacccatttgtctctctgggcatctctccctgccctgcgcccctgcccccatacacccactgttccttgccctcctcctgggatggactctgtctgggatggcctcacctctctctaggactccctctggcatggccagcctcagccctggccagggctgaattactgtggcctcctggcttttgggacctgcaagttagcttcccaaggtgctgccctctggcctgccctgccctgcccaaccccccaacgctgcccgctgcgcccccgcggggcccagccagatgtcagctgcagttattagcctgggcgggagacacaggcctggcagtgtgcctgccagactcacaggcctccggaatctcccttgagcctggggagggggaggggagccattcaagcaaggggaagaagggagggggcatttaggggtcacagggaccctccaaggacgggacgcccccagcttctgctgggaccttcctccagcaaggccactgcactgctggacttccccctgcccccacatagctcagtttctttttcgcctctttcgttttccttctctttcccacacttggtgagatctaggctgccccggaatggctgtttaacccctatcccttagcctctttctaccctaaagaagagagaggctctcttcatcctccagaagacagaggcctgggaagctgagagagagagagagagacaaagagagagagagagagacagagacagagacagagacactaggcttctcacctcttggtctagtgggttcacacactaactgctcggaagtcccaccttaagtctaactggaagcctgaccgtctgcacctcgccgcagcccttcccgggaaggggctctgggttccctcatattctccccttagattttcaggtcttctctgactcggggagggaagctctcagatgacagagctactctagggaaggaggggggctccctctaggtattctggatgatagtaggatgggacctgcagactaaaacgagagtggggcccctgactcacatgagtgagtggggggtgttggggacggagctccagatctcctggcagaagggaagggcaccccacccgagggaggaggcag

SEQ ID NO: 34987 - DNA, 1488 bp, Artificial sequence
  DNA replication origin
tcgtggtagaagggctgttccattttagtgcacatccgggcggcccaggcggtctggggagggtccctgcggggccgctccgggcctcgctgcagcgagcggcgagctctccgctgcggtgaccggactgggtgcctggtcgcgcgttctcgggggctggcgcgggcgggtagcagccagccggcagctgtgcgcaaaagccctgtcaggcttcccgagcccccgtcgccctctctggcgcgatagctttcctggcgtcgtttcccccagctcccagctccctgctggctccgaggctggcctggccgctctcaaggtcccagccgctcagcctgagccacacgcctttataccgcgctagtcagccacggaagtgcgctccgattggccgtcgccggagccgggcccccgcgcccccctcctcgagcgtggggaaggggaggaggcggctcgcgtcactgtcaggaagcgcgtgtccttgtaaacagcggccacgggccgggtggctcggcggggctgcagggggaggggctcaaaggacctcggggtacgcatggaaggaggtgctggggggcccaggcacatgagtgaggggtttcagggaggaggatgatttccctggagtccactgggacaaataccaggacctggtacgcagcaagtggggtgagggtcccagtatgtgcgaagaaacccctgaggtacccagaatacgagaggggtaggaggactgacaatccattgggagaccccaaaaagcagaaatgagggttaagcactgtaaatcgggagggttaaggagacacctgacccaggaattgactgggggtcccgggctcagaaggatgcgggactggaattttcacaggacggaggaggggagagatcaaaaggggtgagtgggtggagctgcatgacccattaaattgcaagaaatgagtaggggtccaggagctcatgggagctgagtccagagtctgaggctctcccgtaagcgggaaggaggcattaggggaagtctagatatgcagaaagctagtaagcggcctggggtacactgaggcaggtaaaatatgccaggtagaagatggagacatgtctgccagaaattggggaccactggggtcatctgctagcccggatgaaggagagagttagaaggggccggacacatcttcggagcagagaagacaataagagggtactcagttgacatgtgaggagggggccttgagggtcccgcgcaccaggactgctggatcttccacgactgctgctccccctcgatggtaacctcttagtcatctgtattctctgtcccccatcctaaaaccctcccctattgaccctgggctttgcccaacaccgtgtcggctcctagagcctggacccagcccgacggctggggcgcggtcgcccaaccccactcccttccttagaaacaggctggggaaagagcgcagaggcaggaagtgtggcaacagcccc

SEQ ID NO: 34988 - DNA, 1114 bp, Artificial sequence
  DNA replication origin
ctgcccagtgacgcgaccgcggtctctgggcagattccgggaatcccctcccccgctctgccgggcagggccgcggcgccgggaagggggccgggattttcccgggcaggcggctgcccgggcacggaaagccccaggcctgggtccagagcgcccgcggtgggcgggcagcgctcctgggctccgggagccacccctgtgccaccttcaagacactggcgcctaggccccgccgcgcccacgccccctccgtctgacctgaccggggcggagggttgctgctgcctccgctgctttgccgacgccgtcccctctacccccaccccctccaggaagggcggcgcccgcctgccagtttcccctcacgggtgccaggccaggagcggggcgactgccaggtctggtcctgccggggcggctgctcgggccgctgggcgccgccaccgccctcgcgctgggctccctcccgcgcagctgggacacgtggaggtgggggtgggggtgctggtgctgctggcccgcctagagggagtctggccggcttcggggttggaagcccccagagcagtggagaaaaacaggtagagaaaccagacaggcagtagggtgagtggaacagacacttcatcaattcatttgtacaatacctagaacaactagaccctggagacacagcctggaccactccagacaagacaataaataaacaagcaaacatggttctttgggggtggtggtaagtgctagtaagaggaaaaaaacaaactaaaacaaacaaaaaaaaaaaacaaaaaaaaaaggtcaaggtggcaatgatggggcagggaggaaagatgctttgcagaatggagtgggaacatggacctttaatagggtgactttttcttttttatattttagagacgggtctttgtcctgttgctcaggttggagcgcagtggtgcaatcatagctaactgcagcctagaccttctgtgctcaagcaagccttccacttcaacttcccaactagctagagctacaggcatacaccactatgcctggctaattttgtttatttttgtagagatggggtctgctatgttgccctggctggtctggaactgctgggtca

SEQ ID NO: 34989 - DNA, 2443 bp, Artificial sequence
  DNA replication origin
ccgccgcccgcaggcgcatggacccggccgcacgctcccccgcacctgcgggcgcagtggacccgaccgctccgctcgtccgctccctcccccgcgccgtgcacgtcttggttcgggccgggcataaaaggcttcgcggcccagggctcacttggcgctgagaacgcgggtccacgcgtgtgatcgtccgtgcgtctagcctttgcccacgcaggtatgaacacccggagtgcacctggcgggaggacccccttcaggctgctttggcccgatcctgactttagtgctggccgcctttgctttccatccgctatagtggcctcctttgtccttgcgggggaaaccgaggccacagccttgcagcgcaggcctgatcgcccgacttcccgccccctgctcgtgcgggcctcactgtctccttctgggctgggggcttgcgacaccgccctccggccgactcgctcgtggggtgctggtggcagtggctgggtcactcgtgctctggtcaggagagcgggtctccggcagcctccgggcctcgtagaccgggtacccgggagggtgagggttagtgctgtcgcctccgccgtgctgactcagtcatagggcccagcacgcagcgcgaccttgggttgggaggacaaagtgtcttcccgggcgcactgaccgggcgggggtctcagctttcagtcatggcctccggtaacgcgcgcatcggaaagccagcccctgacttcaaggccacagcggtggttgatggcgccttcaaagaggtgaagctgtcggactacaaaggtgagcgccgcccggagggggcccaggtagaagcggggccgtgcatgagagaagctgggccctaactcctctgtgtccctcctccccagggaagtacgtggtcctctttttctaccctctggacttcacttttgtgtgccccaccgagatcatcgcgttcagcaaccgtgcagaggacttccgcaagctgggctgtgaagtgctgggcgtctcggtggactctcagttcacccacctggcttggtatgagcaggggccaaagagggaggttgcagctaagctcacaccctcaggtcctagcagtgtggcttcgtggccattgctcaacctctggaacctgcgtttccccatcgtgaaaataatggaaacattgccgcccaagtctttaaggatgatgacagtaattagcatttgacaactagttgcctggtatatagagttgcagatgcaactcagatgcaactctatctactctatgtacttagttcccaggagggaggctgtgctgccctatttcatgaagatggaaactccagttcaccgaagtgaagggctgtaccccatgacacagctagaggaggatggggactcttaacacaggctctctgctgggtgatgctgcaagttacaagtacatgtgaagccacttagctggagctgtgcctctcaaactcagtcttcccagccatggggatacagtccttgcacccaacccagggtggggtgggtgaggctcccagcggcctactctaaagccccttatctccggcctccagtgcttatcacattgggcccacagggtgaggaccctgctgtgccaggcatcctgaggccccaactctgtctcccctactcccaggatcaacaccccccggaaagagggaggcttgggccccctgaacatccccctgcttgctgacgtgaccagacgcttgtctgaggattacggcgtgctgaaaacagatgagggcattgcctacaggtactgtgggaccctcagcccggctcagggagcgccctgccccccattcctgtgatgctgggaccactcctgtacaatgtcttctctgcccccagccctgtggctagcagcgggtggttggtagtcccttccttgtctctggcagtgggagctatcagctcctcactgggaaccctgatgtcttcaggggcctctttatcatcgatggcaagggtgtccttcgccagatcactgttaatgatttgcctgtgggacgctccgtggatgaggctctgcggctggtccaggccttccagtacacagacgagcatggggaaggtgagcagatacacacatgacacatgggtacatactgagcgcctccgtcactcatgcaaacattcactgcctgtcctcttacctgtccagatgggtgttagggccccaaagaagattcagctcagggctttgtctgcaggatgtttctaatgtggtaggagacaaataacgcctgacattcaaccaaggtggacaaaggggccgggctcagtggctcacggttgtattgccagcactttgggaagctgtggcaggtggatcacctgaggtcaggagttcgagaccagcctgaccaacatggtgaaaccccgtctctacgaagaacacaaaaaattagctggccgtggt

SEQ ID NO: 34990 - DNA, 1331 bp, Artificial sequence
  DNA replication origin
actatagcggatggaaagcaaaggcggccagcactaaagtcaggatcgggccaaagcagcctgaagggggtcctcccgccaggtgcactccgggtgttcatacctgcgtgggcaaaggctagacgcacggacgatcacacgcgtggacccgcgttctcagcgccaagtgagccctgggccgcgaagccttttatgcccggcccgaaccaagacgtgcacggcgcgggggagggagcggacgagcggagcggtcgggtccactgcgcccgcaggtgcgggggagcgtgcggccgggtccatgcgcctgcgggcggcggggggagacgcgttgccttcggccgggaccactgcacctgcccgcgtgggtaatgcgcccgccgcagactccgcgcacgactccgcctgggagcgcgttgggggccgttggagtccagcatggcgcggaccccgggggcgctgctgctggcgcctctgctactcctgcagctggcgacccctgccctggtctaccaggactatcagtacttagggcagcagggcgaaggtgacagctgggagcagctgaggctgcagcatctaaagggtaacctcaggcggcggggatgacgatgcccaaaggctccccgttgccctacttctcctgctggctgcaaagggaccttcctcggcgggctgcaaatctccacccagctccgcactggaggcgtccccttgggctggttacttttctctaaggctcggtttactcttggatatattgaaatagatactgctttaaagcagctcccaggggaagagagggtgtgggcaggacactgaagctgtcactcggggataggtgccaggaagggcagagacagagaaagaagggggcgggcaagcttgggaaatcagagagggtccgattgcagaagacccgtgaccagtgcagcgagaacgacaagcgaaagtcccatatggaaagatttggggaaagaatgtccaaggaagagggaatagcaaatgccaaggtgaaaagtcctgaaggagaaatggaaagaggtcggtgaggtgtggcagagacatgggtgtgggagggtaggaggtgtcagaccttggtgagcggtgagttgggataagatcggagttgggataagatctgtctcataggggaaaggggcagattcagtaaagagccctttaaagtgatcacagtggccggcgcggtagctcacgcctataatcctagcactttgggaggctgaggtgggaggatcccttggtctcggagaccagaccagcctggcccacacagcaagactccatctctacaaaaaatattttaaaattag

SEQ ID NO: 34991 - DNA, 850 bp, Artificial sequence
  DNA replication origin
tgaggctgcagtgagctgtgactgcgccactgcactccagcctgggcgacagagcgagaccctgtctcaaaaaaaaaaaaaaaaaaaaaaaaaaagcttaaatgagataatctgtggcagggtgtctggcatagaagcagagtctagcgaatatgtgcttctcttattcgttagtatctttatctttctccctctctgggggaggggattgggagtaggccccctccacgtaggtcttcacctctgccctccttctctagaagtcgaggactcaatccttggcccgtggggaaagtggcggtgtctctgcgacctgggcaagcaggagcgcagccgcgaggtagtgggcacagcgccgggcccggttttcatggacccggagaagctgatccagttacggccctgccggcaacgggattgtccatcctgcaagcccttcgactgcgactggaggctctgagcccgggtgagagagcagggccggggcaagttgcggggcccagggtgggcgcggagggaggatgtgcggtgcggggcgggtatgaagcgagtttgaggaagggagaactggggctccaagtcttgagtgacttgaggctgatttggttagggggaagctgagtcaggagccgtgagccccgctgatatctagggagaaaaggagaaaagtggagggggcgccgggcgccggggctcacgcctgtaattccagcattttgggaggccgaggcaggcggatctcttgagtcctggagttcaagattagtctgggcaatatcgttgagatcacctctccataaaaatttttaaaattaggccgggcgcggtggctcacgcccgcaatcccagc

SEQ ID NO: 34992 - DNA, 933 bp, Artificial sequence
  DNA replication origin
agactgaggtgggaggatcgcgtcagcccaggaggtggaggttgcagtgagccaagatcgcgccactgcactccagcctggacaacagagagagaccctgtctaaaaaaaaaagaaggccgggtgcggtggctcacgcctgcaatcccaacactttgggaggccgaggcgggcggatcacaaggtcaggaaatcgagaccaacctggctaacacggtgaaaccccatctctactaaaaagtacaaaaaattagccgggtgtggtggcgggcgcctgtagtcccagctattcgggagactgaggcaggagaatggcgtgaacccgggacgcggagcttgcagtgagcggagatggcgccattgcactccagcctgggcgacaagagcgagactctgtctcaaaaaaaaaaaaaagaaaaaaaaaaagtgggtcgaggggtgggggtggggacattcattctaagttgggaggaatgagcttctatagggagcagagaccctgagcaggagtccaccgaggtctgtgatctccaacgggggtggggaaggcttggcctgaatgagacagaggttaggaagcacagatcttgcacggagtggaggtgggccgaagggagcaaccaagagagggagtttggggactccaaatccaaaagcctgggtttagtggaagcggggctacctggtccaggggacttagaatgtgtacagaagcagggaccgcaagtacagggcctgaatccaagtggcagttggggacccagtgatgcggtgacccgtgtcctgggagtggggtgatatttgactctctagttccccgttaggctgggtcttcgaagctacgtctcagtttccctcttatttccccctcttcccaccgggccacgcaggcggggccccagagaccgtgaagcagagcttgcaaagtgacccc

SEQ ID NO: 34993 - DNA, 1428 bp, Artificial sequence
  DNA replication origin
tctctagttccccgttaggctgggtcttcgaagctacgtctcagtttccctcttatttccccctcttcccaccgggccacgcaggcggggccccagagaccgtgaagcagagcttgcaaagtgaccccgtccaccgaattccccaagctgagtgttcggccatagcccttcgggactacaattcccaggagggcgcacggcagcgacgtcggcgtcggctgcgtaagcgtccacggcggcgggagcgccaggggcgtgttctgcccgcggattggccggaagcaggcgccgcttcgaggcccgcggaaaacgcgcgccgagacccgctcctgcagtattagttcttgcagctggtggtggcggctgaggcggcatggatctcagcgagctggagagagacaatacaggccgctgtcgcctgagttcgcctgtgcccgcggtgtgccgcaaggagccttgcgtcctgggcgtcgatgaggcgggcaggggccccgtgctgggtgcgcccctagggccagggaggggaggggcgtggtacggaggatgcgggaaacgggagtcgggattgcactgcaccaagggaggggatgtggtcgtggtgatggcacctaaagaagcagtgatgatagaacagggatgaatggcaactttcacgggctcagtgattggaccccggctgccagaaaactgacaccccttctccccaggccccatggtctacgccatctgttattgtcccctgcctcgcctggcagatctggaggcgctgaaagtggcaggtgagcccgaggtgtgcgtctggggaagggattcctgggtatgtgcaggggcaggtgagaactgaaaggggagggcaggaactgggagaaccagctgttccccttctcttccaaacctcctcccagactcaaagaccctattggagagcgagcgggaaaggctgtttgcgaaaatggaggacacggactttgtcggctgggcgctggatgtgctgtctccaaacctcatctctaccagcatgcttgggcggtgaggggtccccgggaggggcagccagcatgggctgaccaagctttgttcctagaatgagattaactgggctctgttccccaccacagggtcaaatacaacctgaactccctgtcacatgatacagccactgggcttatacagtatgcattggaccagggcgtgaacgtcacccaggtgagttaactgtaagttgtccccatttggtcatctcaggataaaatggggacaaaacaggagttcgagactgcagtgagccatgatcatgccacagcactccatcctgggtgacaaaggaagccccccaactcaaaaatggaggcagggcgcagtggctcacgcctataatcgcagcactttgggaagccgcggcgggtagatcaccggaggtcaagagtt

SEQ ID NO: 34994 - DNA, 1015 bp, Artificial sequence
  DNA replication origin
ctagggtctgaggattagacgtgagacatccgttactttctggcaattctccttccgacttatttccccaagaagcagccacactcgtcacgtgctctagctggcgactttattcaaaggggagagggaaaagtgagagagttgggtcatttctgggataacctggagaggggtgggtctctggagctccagggaggagggacagacatctcaaaactattacagaaggccgagaggacgaggggtggggttctgggtgtcctgaggggcggggctgggggaagggtcgctcccccaactcagggccacgcgtccgctaggggccgctgccgcttccactgccactcccgctgcccgcagcgtccaggatggaggtgcgagggctgcgggaacgccgggagggagcttcccggccccgtcgtcctggtctgggacgaggtaccgcggagatggagatgttgaagcagtgacgggctccaggagcagccaccggtagggcgtggcccagagccgagcgacaaaggtccgtcccgtctgcgaaggtctaggaaaaagtggagttaaggccctagtgggcggagtccagagacgtggggggcgtggcctcgggaagggaaaaatgtgtaaattccttagggattggggtcagagccggagcgtgcggcctgggagtctatgtgcggaacgtgagtgggggcaggtccttggggagggtgaatgttcttactgggccctagcgggatgaatcagggttggggcagttggggggcgcgcagagaggtctgtatcaaggctggggttttgtagagagtgactgggcttctgggtcctccagggtaaaatgtggatggacccagagcaggaatggtttcttgggaagggcaaatctggacttcgagagcttttggggtcaaagggcacaacccagtaggaggttgggctagggaagggtgggagcagggacctggggagtaccaatccggtctctggggtctagacacggtaagaaagaact

SEQ ID NO: 34995 - DNA, 1271 bp, Artificial sequence
  DNA replication origin
cctggatcgccgggcggcgcctgaggggcggggtccccagcgcggcgggacgcgcggccacagcgttccccgcggttagcgtcccgaacctatgggtgggggcgtcccggctgaccctagtgcaagttctcccgcctcctgcccagccccgccccagggcgccgaccccttcctctccacccggggcccaggcagccgcgtacctgcagcctccggcggcggatgaggcccgaatcgtccatggcggcagcggcggcgacttcggcccggggagggaggagggaggtagcggcggcgggaggagggaggagggagggagtgagaagccgcggggaccgcggcggcggcggcggcggcggctgaggggaggggtggcgggggcgggggcggagcgaagtggggcgggcccggcgccgtcactgcgtctgggcgcccgagcccgggctcagccaccgctgcccgcgctggcggggggaaggggcgggcgggggggcggagcctcctggtgcccccatgggagccaagctgccgagagaccactataaaaagagacaccccagaggagagatattctcaggggtagaaccctcagtcaagaaacaccccaaaggaagccttctccctgagatacattccctctacattcatcccccagagacccccttggtgagacacattcccagggggagatagtttccacagggacgccctgtccaatcaagaactcccccaaccctgaaaatcattcctaatagatatggtccctgagaggtgactttcctctcaaaagccatccccctccccacgaaagaggcattccccgaagagaaagatcccaggagtaacaattcccgtgtaaaggatacccccaatcagagacccctaaaagccatatcctctgtgggaaactgtccccacccacgagacctctacagccccaggagagatctcatgcttacagagaaacattttcactgaggagacccgtcttcacaggagacgcaacctcagaaaaacatgtgcatacatattatgcccccccacccacctgccccacaatcagagcctcctcagggaaccctgcagcccctctagcgacccctccctcacggtcaggattaaggagccaggccaggccgtctgtatttataggagcgattagctggtagttggagaggggggcagttaaagcgcttttcagctccctcgccgctcctccatgttcacacaggtgaggccaaacccaccatgcttcccaaagttggagagga

SEQ ID NO: 34996 - DNA, 1911 bp, Artificial sequence
  DNA replication origin
gctccgcccccgcccccgccacccctcccctcagccgccgccgccgccgccgccgcggtccccgcggcttctcactccctccctcctccctcctcccgccgccgctacctccctcctccctccccgggccgaagtcgccgccgctgccgccatggacgattcgggcctcatccgccgccggaggctgcaggtacgcggctgcctgggccccgggtggagaggaaggggtcggcgccctggggcggggctgggcaggaggcgggagaacttgcactagggtcagccgggacgcccccacccataggttcgggacgctaaccgcggggaacgctgtggccgcgcgtcccgccgcgctggggaccccgcccctcaggcgccgcccggcgatccagggagctgccggaggggtgcagcctagcgctccccctcgaggatcgcctgaggggcgcctggcccgccctagggggatggggctggggccgaagtcatcgccctggcgcctcgccaggctaggggtgagggggcgcagagcaaagttattgccctagggctcatgcccctcggggccatcggcgccgctggaggcgtaaacatgtttgtgcggcaacctcgcccctcaccaccccaggagccccctcccgaggcataggacgccctgcgtcccccacgcacctgcctggccatcaggattcttcctactgccctaattggacaggcacctagacagctttctcactcttcattccacctcctccactacaacatccgcccccccaccgcgatcctcaagtccagcccagcttgtgggtgggcgggagcgatttttagctccttgcagccttagaagatgctggtctcgaggctgcgcaggcgcaggagccgtgcgtccactgcacggagtgggacactgaggatcgctgtggagtgtggggaaggcggggacaaactcaggtgtcaggagctcctacctccaaggtggggagggattctgtagccgagaagcgtcctctgctcgtcttcagctgcgtttctgaggggttagtacggaagttcagggttaatacggaggtccggtcccaaacatcccagaggggaaggtgatgatatctgtgccccaaggccctgcctggggtctggcccttctgagcctccttggggctcagccccaggcttggtaatctggagtttagataaagccgagaatgggcccagactcaggctccatccccagcctgaatcttgggaaaagaggattcaaaccctcacctagggcttcgtccatttctagactcccctaatccatcattcccgaggttgaaggccaaggggagctgattggtcagtgcagcaggaaaaatggtgatcagactgcaggaaggaccttccaggcgtctgggtaacgccggagccagacatgagttggaaaactaatttgctttcagagcccagatggcccgatctccggagcctaggcctctctgaagtgctcccacattctctccgcctctcgggggtgggttaggagagtgggttccgagagaagggaggcagctgcggcaaagttagagcaagtactgcagcagccaggttgggtccgcgccgtcgggtttctgagaaaagggaggaaagaggcggggcctgcacggtgtgtccccgccctccaggccggcgtcaactctcattggctcagcgccacgcgggactttaaactcccgctcgagacaccgcccccaacgcggaatgcttccactcacccacccacccactcaaccccaggcttgctctgggtccggcgatccctgtcggagtcctgtccccaccgcttcccttctggcgggattaaccacttcgctgcctggatacacccacatacgttggtgcatcctcttaggaactgtcgcatcactgctg

SEQ ID NO: 34997 - DNA, 1678 bp, Artificial sequence
  DNA replication origin
ccaaccccggcgggaaggcgcagctggggcacctctggcgcagctggaccgggcgcagcatcccgggccccgccctgcagcagtacccggagcggcggcttttgcggggagggccgggacaatgtctaggggatcgggggtctacctcttggtgcggcggaacatactgccgccggggaaggagggcatcgagaaattagaaagcgcggtccagagagagtcagacatgacccggcggcggcgacatggtggcaggtgcggcagcagcggcggaggcggcggcggcggcggcgcggggagcaagcgcgcggggcggaggctgcagccgccgcagcgggcaggggagggcagggaaggggagggccctgcggctgcagccggccgggagggggcgctgctgcgtgccggcgagccaggccccgcccgcgcactcgcctggcgcccccaccccggcgggagaaggggcggccagcccccgccacgtctctccccaggctcacctgctgcttttccggggcaggggcaaatccttctggaaggcaaaggggcaaaacgatgaaggtcagcgtggacctgccgttgctgcccacaagcattatcaactccctggaggagcagaagcagggtaagacaggcccctcttcagcactgtcactttcacccttggccatgcactgcgggccaagtttcttgggggagaggatccctgggtgattcctctcctgaccctcagagaccaacagaggcccacgtacacaggcggggcgccatataaaggcaagtgagttggcatatcagcgtgtgtttgtgcaaatgaaataggaatcattatttgaaaaatatgtcttgagcacctactgtatgctgacccaatcctaggcactagggacacagtagtgaataaattacaagtccggtgtggtggtgtgcacctctagtcccagctacttgggaggttgaggcaggagaatcgcttgagtccaaggaaacaccagcgtgggcaacacagcaagactctctgtctcaaggagaaaaaaaaaaaagtttctggccttttgggactagtatttatagggtaaaggggacattaaacaagattagtgtagaagtgaacgaaatcattttagacaataattagtcttatgaataaattaaacagggtgatgtgatggacaatggctaggatggagacacattgtcagacagggctgctctgtggaggtgacttttaagctggttgctgaaagataagagccagccatgggaggatctgtggagagagcattccaggtggagggaactgcaagggcaaaggcctggaggcgggaataagcttagcgtactcaatgaatgaatgaaaggttgaatgaatgaaaggttgaaagaatgaatgactcatctacacctcagcagatctatctgactcccagctagagtcatagagttggggtagggggtggggggtaggtaagtagagtgactcacaactgagatttaaaatgggaaccacggaggctgaggtgggagaatctcttgagctcaggaggtcgaggttatagtgaactatgattgcaccactgctggagtaagacaccctctcaattaacaataaataaataaataataaaaagtttaaaaaataaaaaaataaaaatggaaattcaggtgatggccgcat

SEQ ID NO: 34998 - DNA, 714 bp, Artificial sequence
  DNA replication origin
ctgtgtacgtgggcctctgttggtctctgagggtcaggagaggaatcacccagggatcctctcccccaagaaacttggcccgcagtgcatggccaagggtgaaagtgacagtgctgaagaggggcctgtcttaccctgcttctgctcctccagggagttgataatgcttgtgggcagcaacggcaggtccacgctgaccttcatcgttttgcccctttgccttccagaaggatttgcccctgccccggaaaagcagcaggtgagcctggggagagacgtggcgggggctggccgccccttctcccgccggggtgggggcgccaggcgagtgcgcgggcggggcctggctcgccggcacgcagcagcgccccctcccggccggctgcagccgcagggccctccccttccctgccctcccctgcccgctgcggcggctgcagcctccgccccgcgcgcttgctccccgcgccgccgccgccgccgcctccgccgctgctgccgcacctgccaccatgtcgccgccgccgggtcatgtctgactctctctggaccgcgctttctaatttctcgatgccctccttccccggcggcagtatgttccgccgcaccaagaggtagacccccgatcccctagacattgtcccggccctccccgcaaaagccgccgctccgggtactgctgcagggcggggcccgggatgctgcgcccggtcc

SEQ ID NO: 34999 - DNA, 1138 bp, Artificial sequence
  DNA replication origin
ggcgccaggcgagtgcgcgggcggggcctggctcgccggcacgcagcagcgccccctcccggccggctgcagccgcagggccctccccttccctgccctcccctgcccgctgcggcggctgcagcctccgccccgcgcgcttgctccccgcgccgccgccgccgccgcctccgccgctgctgccgcacctgccaccatgtcgccgccgccgggtcatgtctgactctctctggaccgcgctttctaatttctcgatgccctccttccccggcggcagtatgttccgccgcaccaagaggtagacccccgatcccctagacattgtcccggccctccccgcaaaagccgccgctccgggtactgctgcagggcggggcccgggatgctgcgcccggtccagctgcgccagaggtgccccagctgcgccttcccgccggggttggggttgaatggggggtggtgtgggccgagtctggggggcttgcacgctggagaggacggccgcggggggagggggctgcgccactgggggtttgtggcgcctttgtctgctggcgctgcgggctccaacagcctggtgggggtagaggaagaaggggaggctggggggcttggcaccctcagaacaatagccgcagcctggcctccccccacccccatgccgcgtgctcctggacgcgctaatatgctcagtcactgcggctgtgggtgaggggacggacggaggggcttggggctccctcttcgggagctggatgctgaggggtagaaaaaagggggggtttatcataacacaacccccccccccgaacacagccttacactgaaaatagtgacacacagcgtcacacaggacatgatgtcacacacatacacacaacagccctagtggcccagatacactgggaggtgccacacatacctagccttgcagctgccacaggtcagaaccatgcacagacacacaggggcaccacgtcgtgtacacctagtaagatgtcacttacatggcgatccacacacacacagttatgtcatccaagatgcaaacatgtgtttcaatatcccatccatgcatccaagaatgtcacaacacacgatgtcatatctaggtatctcacatactatgtcacactga

SEQ ID NO: 35000 - DNA, 871 bp, Artificial sequence
  DNA replication origin
tgagacacgctcagtatcaccaatggtgtcacctagacacagtgactatcacaccatgacagacactgccctacacataatccatactgagagtttctcacacacatgtcatatgcacatcccctgccgtacacagtcctgccgaggcctgcaccacctttcttcgagaaaccctcccagggagcctccaaacacacatggatgggagataggcggggatctgagacaggaggtcagctggtggggctcaagaactcactgggctgcggcccggcccggcccccctgccttaccttccccgcagctgccgcaccagtaatcggaaaagcctcatcctgaccagcacttcacccacgctaccgagaccccactccccgctgccaggtcacctaggtgaggccagtggtagagacttggtgggtgcagactggcctacagtaggcggggcctcaggcgaggaagcgtggtcatgctacagaaggggcgcagtttgaatggaggcgaaccagtttggataaggggcggggccatgcttgtgtgggtgtggtcagtcgcagagggacggtcattggggggcggagactcaggtgggcggagactcaggtgggacggacagaaaggaggagtcgtacctgaggggcggggccatcccagatgaagccagaatcgtcttggaaggggccaggctgactcggcaacgaaaaaatttagagaggcggggccacaggcgaaggggcgtggtctccccataataggcgggactagactaaagacaggacatgctgctgtttgcacgccgctttagggaacgagagacctgacaggatttgccccctctttctctcataggcagcagtcccctggacagccc

SEQ ID NO: 35001 - DNA, 1890 bp, Artificial sequence
  DNA replication origin
cacccctgagtcctcagctccacgccagtgcctggaacgtggtaggagctccctgaatgtatgtggggtgaagaaaggggtgcattgggcacaatctggcggtgctgagcctgagatcagcccggcctccgcgtgcactcacgtcttgaaggagcttctccaggttctcctgcaattcatagaagtagaccgtggtgatgaggccgtcacgggacttggtcaggcagtcccgggccagctcgatgatctggtggtggatgaagctgagcacgccatcggccagaggcagaacgctgtcgggttcgtaggcgcgggtaaagtcgcgcagcttctcctccatctgcgcagtggcctgcgggagggacggaggaggggcgcggggctgtgcccgaaggctgcggccgccaggagcctgcgctgcgcaccgaggccgccagggggcgcgcggggataaggcgagcgagagtgcaggccgcctggtcaccccgtgaccgcctcgggtcccacctcaccttcgggaacctctccttgtagacgtgattcatcatcacgatctcgttgtcgtaggaggagggggagcgcccggggctgcggggagagaagcccattttgtcgagtcctctgcctccaagcccgcagagagcccccgccccaagatgtaacccttttattcgcggggacaggggtctctctaagcacaagtcctaagaccactagcttggtacgaaggaggagggatgcctgcccacctgaggctccgtgagcggggccgcacggctggggagcgacggccaccatcctcgtctgtgatgctctcggtgctcccgaagtgtttggagaggaagtggagctcgtccaccgtgggctggtagggcagctggtgaaggcgctcctgggaggagcaggaggactggggacaggggcagggccggggtcagagccaccatgggccccccaacagctcaggaccctgagctgggactcccaaagccgatggggtcactgggcaaggccaggatcaggacctgatttacgatccttggatcctaggatcttggctgggactcttggccacagacaggtggacagggacagacaggggtggagacagtgagtctgttaaagcttgggtcaagtcatgagcctcctctgttcagaacccttggtggctcccaccttactcagggtgaacacccaagtccttccccagttatacaaggtcctgcctcatcctgccctgggtccctgccgtggatttttctcactctcctgcttacttcctctgctccagctacagtggccttcttttttttttttttttttttttttgagatggagtttcgttcttgttgcctagtttggagtgtgatctcagctcactgcaacctccgcctcccgcgttcaagcgattctcctgactcagcctcctaagtagctgggattacaggtgcctgtcaccacgcctggctaattttttgtatttttagtagagacagtgttttaccatgttggccaggctggtcttgaactcctgacatcaggtgatccacctgcctctgcctcccaaagtgctgagattacaggcacaagccaccgcacccagcctagtggcctccttgatggtccttggacaagccaggcaagctccttcctcagggcctttgcattagctattctttctgcttggaacacatctactatggatccctccttctcatccttcaaatttttgcttcaatgtcacccctcgggaagacctcctctgaatacacacccattattccctatccctactctatcttgtttcctcttgctttattatcattattattttagagaagggtctccactgaatatggtgactcacacctgtaatctcagcactttggg

SEQ ID NO: 35002 - DNA, 774 bp, Artificial sequence
  DNA replication origin
gggcaggtaagtccgccatgcagaggagctgagggcccactgatagagagcaggcctccaaaaccccaggcccagcctgtgctgtggccccggggcggaagacatggggggcggggctgggctgctgggttggccatcagctgtggctggaatcccttccgtcccaggcggcgcttttgaggtgaagcagcacagtttctttcgagacctggactggacagggctgctgaggcagaaggccgagttcatcccccacctagagtcggaagatgacactagctactttgacagtgagctgggacaccaggcacgacctgggtcgaggggtgggatccgggaagagggaccctggggtaagtaaagcctgggatagggcctggctaagtaccaagatgtgatgcctaggtgcgaaggtggtattttggtgggggcggggccaagtggggcggggctgacatacaggcggggctcaggctgaaatgtaggtaagaacctgagattgggctaggtgtggggcctggcctgggtgagttgtgagtgtgggcctggaactgaactagagagaggtactagcgctcagaatggcctggggtgatgccagggtgcagagcactgtaggtggagcgtggcctctttggaggcggggctagacggtgccactgagaatggggcaaggaccttgcctgggagcggagcctaaattaaatacactaatgaggcaggggcgtggcctgacctgaagacttgtaaacccgtcttgaaccaggactgggc

SEQ ID NO: 35003 - DNA, 1392 bp, Artificial sequence
  DNA replication origin
cgaggggtgggatccgggaagagggaccctggggtaagtaaagcctgggatagggcctggctaagtaccaagatgtgatgcctaggtgcgaaggtggtattttggtgggggcggggccaagtggggcggggctgacatacaggcggggctcaggctgaaatgtaggtaagaacctgagattgggctaggtgtggggcctggcctgggtgagttgtgagtgtgggcctggaactgaactagagagaggtactagcgctcagaatggcctggggtgatgccagggtgcagagcactgtaggtggagcgtggcctctttggaggcggggctagacggtgccactgagaatggggcaaggaccttgcctgggagcggagcctaaattaaatacactaatgaggcaggggcgtggcctgacctgaagacttgtaaacccgtcttgaaccaggactgggctcctgtggggatgtgatatgaggaggaaccccgtaccctcagtcacagcccatacccgctccccagcccgctcagacaggtatcaccacgtgaactcctatgacgaggatgacacgacggaggaggagcccgtggaaatccgccagttctcttcctgctctccgcgcttcagcaaggtgggccaagtctgggtgtgggacagggcgagaccccaggagggatggggcttggagagacagtgagaaacaggttccctggtgcccaaggtctcaggagcgggaagttattgatggggcgggagtctggaaggtggtaaggccacgcaagaggcaggttcgggagtctatgggacgggcctttggcactgagtggaatctaacaggaatcaggacagttgtgcagattgaggccatggtggggcggggctaggtgtgggtggggcggggtcaggacgtgggaatgaggccagcagcgaaggcggagtaaagcccagcgaagtcttgcttttatttatttatttttattttttctaataacgggcagagaagccataggccttgctttgagaagcaacttgtagaggcgtgcagggcctagcctgggctaaggagacataaattaagggggttgctgggaagatggggctgtgtagagagcagattggtcagggcatcgtcggggcagagcctagaataaaacgcagtgcctaactttgtggtgtggggcctgaactgaagaattgtaggttgggggatcatgcacaattgggcggagccaggcctcggagggtggagtgcgttttgcgggggatccactgccaggaagctgattagctccggagtgaaagtggaacccgggctggacttgcctcccaccaccacctacaggtgtatagcagcatggagcagctgtcgcagcacgagcccaagaccccagta

SEQ ID NO: 35004 - DNA, 936 bp, Artificial sequence
  DNA replication origin
ggcggagcttgcagtgagccgacatcgcgccactgcactccagcctgggtgacagagcgagagactccgtctcaaaaaaaaaaaaaaaaaaaattagccggaggtagtggcgcatgcctataatcccagctacttgggaggctgagggaggagaatcgcttgaacctgggaggcgggtgttgttgcagtgagccaggattgcgccacagcactccagcctgggtgacagagtgagactccgtccaaaaaaaaaaaaaaaatgtggggggaggaataataactatttcacaaggtgttatgaggattctaatgcatgcagagctaagtgtcctgcatataagtttaggagctttccttgttaccaatcccactaaccctgtccctatggggtgctcttttcccagcatgtggaggaaggaggcccagcccaggaggcaggactctgtgctggggacctcatcacccacgtgaatggggagcctgtgcatggcatggtgcatcctgaggtcgtggagctgatccttaaggtgagtgcagggaaggaggcaccctgggcggagggtgggggaggcctgagcagcccctagcagagcattttcccgcattcttcccccagagtggcaacaaggtagcagtgaccacaacgcccttcgaaaatacctctatccgcattggtcccgcaaggcgcagcagctacaaggctaaaatggctcggaggaacaagcgaccctccgccaaggagggccaggagaggtgggcacagccgtaaacagcctggtctttgagcagtgggtggaacttaggcgggaggggcacagatgaggatggagaagggaagagcacgggaaaggtggcgggaacaaatgaccaacaagcaaagggaagaggacaattaagaggggctgcgggctgggcgcggtggctcacgcctgtaac

SEQ ID NO: 35005 - DNA, 1103 bp, Artificial sequence
  DNA replication origin
agattgtgccactgcactccaacctgggcaacagagtgagactccatctcaaacaaacaaacaaacaaacaaacaaaaaaagaggggctgggatgagtcacacctgtaatcacagcactttgggaggctgaggcagaaggatcacttgagcccaggagtcaagattaggggcaacatagagagaccccatctctacaaaaaacttaaaaaactagttgggtttggtggcacacacctgtggtctcagctactcggaggctgaagtgggaggattgcttgagcctgggaggtcgaggctgcagtgagctatgatctcaccactgcagtccagctgtgacaacagagctagactctttcaaaaaaaaaaaaaaaaaaaaaaaagaggggctgtaaaagtggaaggagccaagaatggaagctgtgccaaatttctaggatcagagaaaagcattgtaggagggtcttgcacatataggcaggcccaggagatgtgaactggaaagggagatgtccagagacggagggggtccaggagatggtcctatcctgttagatgtgtttagacagaactgggaaaggctagaataagaaatgtctatctggaatgagcatgccaggcaaggttcagccaactgaaatcctattttcccttatagataggaggagctaggtgggaggtgggtggggccagaagggtattctgtttgtttgtttgtttttagtattctgttttgatcagtgagtttggcccagacaagtacagggatttgggtgagaggagccagacggggttgagataagtacatttcttcccactcttataggtgggttgtagtggaagaggcgggactagaggcaggtgggaccaagttggttttgtttggatgtgtttctagcctggactgggagtggccaaaaggttgggcaggacctgaagtgggaggagggaggagccaagcagcactgagttaagggaagttctgtcttgataggtgggttgtagtgaaagacggagggactagaggggtgggcaggactagaagaggttgtttttggccgggcgaggtggttcacacctgtaatcccagcactttgggaggccg

SEQ ID NO: 35006 - DNA, 1457 bp, Artificial sequence
  DNA replication origin
ggccacagccctggccatcccgccagtgccatcctccgtctgcacgctctgatgccgcgtgcagccgacgtcccgctccagggtccggccaccgggggtcgtcgcgcggggtggggtgcacgcctcggcgccccccggggattccttctccttgctcgacactggtggcctggaggcaccctcgggcagcaacgggtccgcgcccaggctcaaaggtgactcctgtcggcccaggcggcggacggcgacctgccggggcgcgccaaggccctcgactgggggcgtctcaccgtcggactcggcaaggctatgcagcgccagctcgccatggaagtccttgcggaaatccgggtggcccacctcgaggctgtgtttgcgcagcgcgcccttcttgtccgcactcaaagaggctcccagcttctcggccgactgcacgcgcttgaggagcggcgagcgagggggctcggcactcttggggcgcgggcgcacgacgggaggcgatgagtgcagtttggccgggaagctctgagtagtgtgcgagctgcccaccgtgtggcccggcagtggcggcggtgacgcctgcgtgggggacggcgtgtgtgccagcggcgatagagggatgttgccggccgacttgcatcgcgcagagcggtactggcgatggagctttggcgacagtccgtgcagcgtgctgggccgaatgtggtgcgacgccgacgacgcaggcgagttgggcgtgctcgaggctggggagctgctctgggatgaggcgcctgcgggagacaggaggtgaagcgagtgagtacagcccaagcaccagccaggccaccccgcgctgctcggtccccgcgcaggtgcaggaggtaatacctaggtaggcggagtcaggcgtggagcggtagctgtgcgtgggcgagcgcgccggcagcccgtgcgtaggcgagcccgggagactatcgctggatgacagcgagcggttcagcgacgacagcgagcggctagtatgcagcaggttcgactgcttcgtgatcttccggaagagggagctgcgcttcttgctgcgggacagggagggggccaagcgtccttgacctggacgccagagctcagggctcctcccatttcacggcctcacaacggtaaccacccaccccttctggcccttccctctccagctacaacccacctatcaagataaagaacttcctttagctcagtgctgcttggctcctcccacttcagtccccacccaccccctttggccactcctagtccaagctagaaacaagcatccaaacaaaaccaacctgttctgccccgcccacctctctagctcctccctcttccactacaatccacctatcaagatagaacttcctttagctcctcctacttcaggccccgcccaactttaggccactcccaattctggctacaaacactcatccaaacaaaac

SEQ ID NO: 35007 - DNA, 1496 bp, Artificial sequence
  DNA replication origin
gaggagcaacggggtgggggcacactgtgtgcccagctgccagccctctggaaagccttccagccgctggtgaagaactaccagccctgtaatggcatggccaggaagcccagcagagcttataagatctaacccttatggccaggtgcagtggctcacgtatgtaatcccagcactttgggaagccaaggagggaggatcacttgaactcaggaattcgagaccagcctgggctacatagtgagaccacatctctactagaacttaaaaaaagttagccaggcacggtgataaatgcctgtagtcccagccactgaagccagaggatcgattgaaccagggagatcatggtcacagtgaactatgattacgccaacctgggtcacatagcaagactctgtttcaaaaaaaaagggggggcgggggacgggtgggtgcagtggctcacatctgtaaccccagcactttgggaggctgagatgggcagatcacttgaggtcaggagttcgagaccagcctggccaacatggtgaaaccccatatccattaaaaatatttaaaaattagccagacatggtggcacgcgtctgtggtcctagctcctcgggaggctgaggcaggagaatcgcttgaactcgggaggcagaggttgtcatgagctgagctaacaccacggcacttcagcctgggtgacagaatgagactctgtgtcaaaaaaataaaaaataaaaaatctaagggctcaggaaccagtttggacttgattttgaatcccagttcatccccttcctagctgtatgaccttgattgtgtgccttaaccgctctgtgacacagtctacctgtctgcaaaatgggaaacataatacctgccatcaggattgttgaggagtaaataaatggaaattggtggacgaggctgttaaccttctcttcaggtgggcgctgggacacaagagcatcgcagcttcaattctccccctaaaggtttgggggcagttggtgcagaggtgagaccagaagtgggaccacaggaggtgtctatccaaaattccctccactctccatggtaaccagaactggagtcccacctcccaaaaagcacctgggcatgggggtggggtcgtgtgatgtctcgccttgcctggagaggagtgagccccagaaaactcacgcagcacggacgcactttatttatatgtgtacatatgtatacggaggctgtacagcgcggggccgatgacccccttggctatggtcccgggggtgcgggactggacactccttttttggtcaggcctgctgggggcacagcttcagcagggcaccgggaggtcagccccacttgaggcttggtgcctgagcccaagagggatgcgggtgggactggggtcactgcactgctgggtgcactgcacttcgctggggctagggagggtgtctggggctccggggagagctttggggaggcgggcttggagcgaggaccgctcagcg

SEQ ID NO: 35008 - DNA, 1721 bp, Artificial sequence
  DNA replication origin
ccggggctggtggctgggcttttgggttcggaggatcactcgggttgggtgcgccctgccctgcgagcccgggctcccgacgccttcgtgggcccagccctggctccagccccggcccccgagcccaaggcgctggcgctgcaaccggtgtacccggggcccggcgccggctcctcgggtggctacttcccgcggaccgggctttcagtgcctgcggcgtcgggcgccccctacgggctactgtccgggtaccccgcgatgtacccggcgcctcagtaccaagggcacttccagctcttccgcgggctccagggacccgcgcccggtcccgccacgtccccctccttcctgagttgtttgggacccgggacggtgggcactggactcggggggactgcagaggatccaggtgtgatagccgagaccgcgccatccaagcgaggccgacgttcgtgggcgcgcaagaggcaggcagcgcacacgtgcgcgcacccgggttgcggcaagagctacaccaagagctcccacctgaaggcgcatctgcgcacgcacacaggtgagggggcggggccccggacatgagaaagggcgcggcgcccgctgtagttacaggggaagaagggttgcagagggcgggacttggacttggctggcctctgagagtgagtgcctccttaaattttgtgccctaggggcctcactttgttcatcctagtcccagcccaggctgagtaaaggggtgtggccagatgcaggggacccggggacatgactgggcagacagtggcgcttatggcttccttgtcccctaggggagaagccatacgcctgcacgtgggaaggctgcggctggagattcgcgcgctcggacgagctgacccgccactaccggaaacacacggggcagcgccccttccgctgccagctctgcccacgtgctttttcgcgctctgaccacctggccttgcacatgaagcgccacctttgagccctgccctggcacttggactctcctagtgactggggatgggacaagaagcctgtttggtggtctcttcacacggacgcgcgtgacacaatgctgggtggttttcccacgaatggaccctctcctggactcgcgttcccaaagatccacccaaatatcaaacacggacccatagacagccctgggggagcctcttacggaaaatccgacaagccttcagccacagggagccacacagagatgtccaaactgtcgtgcaaacccagtgagacagaccgccaaataaacggactcagtggacactcagaccagctcccagatggccctggacagcaggagagggtgtgggatgaggcttcccagagaccctgggtctagaaagcggctcctgaaggtcccttattgtggctgatattaactgtcaatggttatgggtcctataaaaatgcccctcccagataaagcttcagcgttggcctgaatttttgggttttggaggctggaagatggcaggaggctgtaaacctagaggtcatattagagggccttacacaccctcatctcctaaactacagtgacacccctcaactccaacaagcccccttgggcactggaggccttgctgtcctctcttttcccacccagttcaggctacactgtccttgtcttctgccttgaaccctgcggacattgacagcaaacatctccctggatttaagagttcacagcctat

SEQ ID NO: 35009 - DNA, 2751 bp, Artificial sequence
  DNA replication origin
gcccaccgtcccgggtcccaaacaactcaggaaggagggggacgtggcgggaccgggcgcgggtccctggagcccgcggaagagctggaagtgcccttggtactgaggcgccgggtacatcgcggggtacccggacagtagcccgtagggggcgcccgacgccgcaggcactgaaagcccggtccgcgggaagtagccacccgaggagccggcgccgggccccgggtacaccggttgcagcgccagcgccttgggctcgggggccggggctggagccagggctgggcccacgaaggcgtcgggagcccgggctcgcagggcagggcgcacccaacccgagtgatcctccgaacccaaaagcccagccaccagccccgggccgccagcatatgcgcccagagtctcgggcggcggcggatattgcgccccggaggcctcgctgggcgccagagcgcaggtctggggcgcgccaccgggctccgggcccgagaagttggtgaggaggagatccaggtcccaggtggcgtccgcgcccctctcatcgtcctcttcctccccgggctggtcctcagacttcacgtggaggggcggctccgtggggtcaggaggacccgggcccatgtcctgcgcctcttcggagcgccaccactgcgggagggagcaggcagctcgaggttcggtggacactggggtgccctgcccagggacatcgcgggctggacactctgacgcagaggctttggaaaggggtcttgtttgcctgtctgtctgtcccacttccccaacactgcccctctaaccgcccctctccccgctccccccccagctccagggacagaaaccgatcaggtctggctggagacaggagataagacttccactatctggaaccacactcggggatgggggaaggggtagcagagctgctggagatggaaaactggcaggggacgggggagaggatgccagccttgacttagttttcccccagaacatccctctccttccctgtctcccaaaacaagattaattccgaaattttggatgtcccccagacacactcatcatttcccgctgatatctggaagattgtctgtgagcctagatctcgttcctttttttttttttttttcttgagatagggtcttactcttttgcccaggctggagtgcagtggtgcagctcactgtatccttaatctcctgggctctaatgatcctcctgcatcagcctacggagtacctgggactacaggcacacgcccccatgcctggcctaatgtttttggtattttttgtagagatagggtttcaccatgttgcccaggctaccttcgttttctattaccgaaatagatcacacttagaacctcaaacccctagaccaccctcctcaccccctgccagactaagctgagatctcctctcctggactgagcgtacctcagtcctggttaagtctcttgatttcaggtcaagatgcaggtctggaccccaagatctgtgactgtggccctggattccagccagcccacctagaccccaccttctaggccccaccttgaggaagtcatcctgtgtgtccgggaaggggcccagggcggtcagtgtgctgatggagggcaaggcggtctcggctgtggccatggctggctggtgcccaccctgggcctcaagcctcctcttcctcggctgcctcgtgaactctgaggctgtgatagccccttcgagggctcctctctgtccttagctgattggctgcagcctctgataaggcaaagcaaggcaaggcggcgggggggcactgtttctggggcacaaacttcacgttggcctgtctggggctggggttaaagactaaccctgtgtccaaagccaagtcaaatatcaagggttggggggttcagggtttgagggtccaggtgctgggtaaaaacagacattgggtctccaaagaaggagagacttgggggtcttccctcagttaactttcctggaaaaggcagaaagggtattctgggaagaagctgtgggaccccctgtccccctgattgaggctccacagccctccccctccccagtaaacagcaacaaccgtgctgatggcgggacttggcacgagctccccgccaagcattatcagacaccccagacgttggaggctgctatcaggtgggggcccaggccagctagagctctgtcctccggtgaaggggagggctgggagttgggtcttcaaattagcctggcgttcaatttgcctgggttgggacctcccagggtctcagccctgcagcaggaggaagcccctgacaactggcccaccattgtctactggggacccttgggtggcactgcatgggactgcatggaggctggttcagtgccagctgctttagtgcgatgggggcagccaagggaaaagtgaccctctctcctcctgggtgggataggaccgttggatcaagccacaggcagtacctgacctgcaggagaccagtgccctggctctgggcctggctgctccttgattctgcccaacatgaggagaggatctgagtttctacaacaggaacctccactctggtgccctgggagcctgggaaggggacatggatacgtattacagacacataactcatagtcactcattggaagactgaggcaggaggatcacttgacaccaggatttcaagaccagcctgggcaacataaaacctatctctccaacaaaaagctgtgagtggtggtg

SEQ ID NO: 35010 - DNA, 884 bp, Artificial sequence
  DNA replication origin
gtagagacggggtttcatcatgttagccaggatggtctccatctcttgaccttttgatccacccccctcggcctcccaaagtgctaggattacaggcataagccaccattcctggctttttttttttttttttgagacagcgtttcggtctttttgcccaggctggagtgcaatggcgccatctcagctcactgcaacctccacctcctgggttcaagcgattctcctgcctcagcctcctgagtagctgggattacaggcatgtgccactatgcccagctaattttgtatttttagtagagacggggtttctccatgtttgtcaggctggtctcaaactcccgaccttaggtgatccacccgccttggcctcccaaagtgttgggattacaggtgtgaaccactgcacctggccaatattttttaataaattggcccgacattctggcccgcctctagtcccagccatttcggaggctgaggtgggaggatcacttgagtctgggaggtggaggttgcagtgagccgtgatcatgccactgcgtggtgacaaagcaagacgctgtgttaggagggaaaaaaaaagcagcagacactggcatagccttgtggaagaaaagggtgaatgagagggacccaggggcctgtgtagacccatagggctgggatcttcctcacctagctggccctccaccagcttcctcctcgcagttctcttcccaccgcggatgctccttgctctcccccaagggctgcggttcctggtctttgcatttcacatggggcacgtccacctgcaagcacagtcaggacggaggccaaggagggaggatgaggagtgaacagatcgccctcctgccgacccttcaaccctggtcacctcg

SEQ ID NO: 35011 - DNA, 1280 bp, Artificial sequence
  DNA replication origin
ctagtcccagccatttcggaggctgaggtgggaggatcacttgagtctgggaggtggaggttgcagtgagccgtgatcatgccactgcgtggtgacaaagcaagacgctgtgttaggagggaaaaaaaaagcagcagacactggcatagccttgtggaagaaaagggtgaatgagagggacccaggggcctgtgtagacccatagggctgggatcttcctcacctagctggccctccaccagcttcctcctcgcagttctcttcccaccgcggatgctccttgctctcccccaagggctgcggttcctggtctttgcatttcacatggggcacgtccacctgcaagcacagtcaggacggaggccaaggagggaggatgaggagtgaacagatcgccctcctgccgacccttcaaccctggtcacctcgatgtgctgctgcgggacggtggggacccgcaggaaagacgggcagggctggggcaggtgccatgagggcaggggcatggggtgaaaggacactctgtccctaggggacaccaggacaccagacctagaggggccgggtgagggcagggctgtgggaatgtaactggaggacctgggctcctaactggtatgtgtgttggctggagtccttcgagaaaggagaagaggtaggagaaaagagatgaggccgggcgcggtggctcacgcctgtaatcccagcactttgggaggcggaggcgggcggatcacgaggtcaggagtgcgagaacagcctgagcaatatggtgaaaccccgtctctactaaaaatacaaaaattagctgacgtggtggtgcgtgcctgtaatcccagctactcgggaggctgaggaaggagaatcacttgaacccgggaggcagaggttgcagtgagccgagatcacgccactgcactccagactgggcgacagagtgatacttcgtctcaaaaaaaaaaaaaaaaagaaatgaaagaaacgggtgcggtgcgtgggtgtttgtgcctttctctactccgttccggccacgcgccatgtgtggaaatcagacccgtcagtgcgtcagtcagggccgggttcagtcagtcaggaaatttgaggccaggcctgatgagagggagccccaatggcaaaggacaagcggccgggctcgggtccgctggagatggctgggatcgcagccgttccctgcctatctgtccgcccgccccacgcgcgagaaggaaacaagcgccgcgtactccctgtcgctccattccgtattttcccgccttcaa

SEQ ID NO: 35012 - DNA, 795 bp, Artificial sequence
  DNA replication origin
agccaagatcatgccactgcactctattctagtctagacaacagagtgtgactctgtctcccgtctctactaaaactacaaaaattagccaggcactgttgcgtgcgtctgtagtcctagtcctaggtactcaggaggctgaggtatgagaatcacttgaacctgggaggcggaggttgcagtgagctgagattacgccactgcactccaccctaggttacagagtgagactctgtttcaaaaaaacaaatgcactcagcaaaagaagacagaagtgtgtaccagggcagtaagtggtatagggagggctaaggcaactacgtggtcagtgaaggcatcatggaggaagaagtgccacctaagcaaaatctagaggtagataaagaggtaaaccatgagagtatctggggaagggtgtcccaggtagtggtcacagtcagttcaaaggcccagaggtgggaatgtgctttttgtattaggagaagagtgaggaggctggtgtggctgaaggcggagggtgagaggtgatagagcagttggcgcagggccctgtgggtcatggggagaacttgaacttttcctctgaagaagatgggagccatggaaatctgagcagaagggtgcacgtgctgacctcatgataaactctgttccctcccccacaagcccaacgatgatcaaatatggcatcaacaatatccgggagctggtgggccacaaggtgaacctgcagatggtgtatgacagtcccctgtgccgcctggatgccgagccgaggccccctcccacacagga

SEQ ID NO: 35013 - DNA, 1346 bp, Artificial sequence
  DNA replication origin
acacgctgagcacactggaaggagtcatggcggatggtcaggtggcggaactgctgctccggcggctggaggcgtctgatggcggcctggacagcgccgagttggcggctgagctgggcatggagcaccaggcggtggtgggcgccgtgaagagccttcaggcgctgggcgaggtgagccgggcccgtgatgccggaccgccttgcccttgcacctacagtccccttgccacgggcgctctacgtccaagccaaattccctcaggcctagtttggggtagctgtatatgtgtccactccgggatgtgcgggcgggaagtgggacgagtgagggcccagacgcacggatgttcctcatgcaataaacgtttattgaggcacggtcagcgtgggtagagggtacgatgatggacgaggaagtcgcggttgctgccctcacgcaggttgcgacgtaataggaaggtgcttcaagaaccagagtgatgggggaaaacaggggacccagctgtgacagctgacccagccttgggggtcagggagagcggcctggtgcaggtgacggctgagtctgttctctgttgaggaaagtgatagcactttagagatcagtggccgggatcttgggggatggcaggcggcaagggagaccagcatagctgtaattgcaaagcctcttaggtctttacctcatgagggaactgggaagcgatagcaggagctagagccggtcagatgagtgtgctatccacatcacctttgggaagaattggcatggacaggactggaggtgaagggatgaaagaagaagctggcacttccccaagctggagggcatgatgtctggctatgggaaggaagcttgggggaggtggggaaggcgtgggattcaggacaaggcagggggcgcacagatgaagtccagccttctgacttgggcaagtggacagtgacagagtcacaggcgtaggatgctgaggggcccgtgggccacccagaaggctagatccatggggccaggatctgggctgtttatccgtagagctcatgttctgtgccccactttggtctcagcttgtttgtccaatccattccataatcctggctgatggccatgttattcccattttgcagatgtgacaactgatggtcagtaacataatcagtgtgaatagaagaggccgatgagcccagatttgaaattaggcactcaggctgcagagcccatagtcctcaatgcagaggagagatggcagctgtgttgtgtggggtgacagtgccttgaccaatatgatctgacatttgtatacgtcacagagggttaaataatataaggaggtgaggttcaat

SEQ ID NO: 35014 - DNA, 1573 bp, Artificial sequence
  DNA replication origin
cgcgtgggggggacgcccactggtggggtgggggccgcgagcacctcaggccaggtcatgtgaccagacctgaacccaaccccgccctcgtccgcgcgcgtcgttgcccatctgggcgtttaaagaaaccgcgggagcgcagctgtctccacgcgggaccgggaccctgccctcagcttctctccctcccattccctctaggtggaggggctgggcaaggctttcttagccagctcttatcttgcatttgagaaccagcaccccactgctgctcccccacccctgcctgggatgggagagagctcacggattggggcccttggggcttcgctgcaccccggtgctacagtcacgcgggccggtgggaagaatgccagccctctcctccttctgcccctagagccctggcagcctatcggactgctgctgtgtgaccggggcaagtcacttaagctctctgaagtgacagacgttcctgagcagacagagggggcgaccctggccagatgctacccagcagaaatgcttttaacgtttttaaagctgtcctgggacaagaggggaggaaggcttaacgatgtgactgtgacttctggagtggggatagggttattacccagattgcagccgcccctttaccctcctctcaaccggtaaatgaagggggtcgctgtctgtggtctcccacaaacggcctggcttttgcaattaaacggctataggcaggcgagagggcagggggttccgtttggggagggaaaaaagacacagatggtagggacgataagatgctagggagatgggcaggacccaccccccgaccccagtctagagtcttcttcagaagccagaggcacgtgactggcaccagtaccctgcccccacgctgtagaaaggaggaaggagagctgggggttttccaaactctgggcaaataagccctggacctgggagcgcgggagtggactatggaaggagggaatgagggggatccaggaaagagggtggggagggggtgcttcctggctaatggttgtgactcagaaaagagaggaaggaaaaaatgaaaaggaaaataaagtggagtggggggaatgacttggcaagggtctctggttaaaaaaaaaaaaaagaaatggtggccgggcgcagtggctcacgcctgtaaacccagcacttggggaggccgaggcgggcagatcattttaggtcagttcgagaccagcctggccaacaaggtgaaaacccatctccactaaaaataaaaataaataaataaataaaaattagccaggcgtggtggcgggtgcctctaatcccagtactcgggaggctgaggtgggagaatcgcttgaacctgggagccagagattgcagtgagccaagatcacgccactccactccagcccaccagcccaggtgacagagcaagactccatctcgaaaaaaagacgggggagaatgaactgggaagttggggttctaccacttcctctaggtagtattcagtattgcctagtctggtcccccccatgaggatcccggggaccatcccaggcctcttgctgaccct

SEQ ID NO: 35015 - DNA, 891 bp, Artificial sequence
  DNA replication origin
gaccatcctggctaacagggtgaaatcccatctctactaaaaatacaaaaaattagtcaggcgtggtggcgggcgcctgtagtcccagctactcgggcgggggcaaaagaatcgcttgaacccgggaggcggaggttgcagtgagccgggattgcgccattgcactccagcctgggcgacagagcgagatttcctctcaaaaaaaaaaagaaaagaaagtgctttttagtcatctgcctcatggttgaaaagtggactgtgggactatgcagtggcagaggcccaggaagaggctaccagagagctggagtgcagggaggggctgagtgggaagagcagacaggacaaggggtagaccccagcagatccccagggcctggggctgaagcaaccccaagctaatccttgcagagatcggggaggactggggaggtctgttctaagtcttagacgtctagtctagggagcactttgatggagagttaattaagccagccatggagtgtggcattcagagaggcctgggctggctacatagatttgggggttcccatacagactgaaggccccaggacactatgagggagggctgagtgcagatgaagaacacgaccgaccaggaggagctggcaagggactgagaagtgagaggagaagggtcagacagcagggtcctgagccaagaccggtaggcacttcaccgagaacccagaggaacctacttgcacccagggggccactcccccactcttcctgtgaaccttcaagggcaagatggagcctcactgagcagagttgtcccagagccaactggggcacagctgtcctgggtgacgtcatgccaccttacagacatttacgcagcaccatctgtatgtgaagccagagccc

SEQ ID NO: 35016 - DNA, 1573 bp, Artificial sequence
  DNA replication origin
gaactgaggcagcagggacacccctcgccctgccctggcccacaccgggcctcgcgctcaggcaccgggcatggacagcccggcgggcctgtgaggaccccgcacagccaagatggcggcgtccgtgcgacaggcacgcagcctactaggtgtggcggcgaccctggccccgggttcccgtggctaccgggcgcggccgcccccgcgccgcaggccgggaccccggtggccagaccccgaggacctcctgaccccgcggtggcagctgggaccgcgctacgcggctaagcagttcgcgcgttacggcgccgcctccggggtggtccccggttcgttatggccgtcgccggagcagctgcgggagctggaggccgaagaacgcgaatggtacccgagcctggcgaccatgcaggagtcgctgcgggtgaagcagctggccgaagagcagaagcgtcgggagaggtgcgtgcgtgcaggcagacgcggggctgccctctgtgccccgtgggcgaactgggccccaaaccgtgcctaccccttcggggtcacgtcgcagcatctgcatgttgtagatttatgtatacgctcacctggccgcaaaacaaactcagaataacgtccatttagtcattcatcagcaagttttgtttgtttgtttgtttgttttttggagacaagagtctcgctctgttgcccaggctggagtgcagtcgcaagatcttggctcactgcaacctccgcctccccggttcaagcgattctcccgccttagcctccggtgtagctgggattacaggcgtgcaccaccacgcccggcaaatttttgtagttttagtagagacggggttccaccatgttggccaggctggtctcaaactccttacttcaagtgatccacctgcctcagcctcccaaagtgccgggattacaggtgtgagccatcacgtccggccatcaccaccaagtctttactgagcgcataccgtgtgcaagaccctgtcccaggccgggggcggtggctcgtgcctgtaatcccagttatttgggaggccgaggcaggccccaaaagggcccttaatatcagatggcgacagctgacaggcaagataataccaatggtgacagccgactagtaggaaggtaaaagagtgaagagtgtgtgcctgagggcagctttggtttgggaagcctcaggcctctctgaggaggtgatgtttaagcaaagacctgaataaccagacttagctatggggcgatctcttgggtagaaagtttctggtaaagggaacagctggggcaaatgccctgagatacgatatgccttaaagaacagccaggaagccagtgtggctggggaaaaggtgagggcaggaaggtgatgggtcctggaaccaagagggcagaggtcagatacagaggcaggtctgaaggaccaggggcatctttttgttgttgttgttgttgttgttttgaggcagagttttgctcttgttgcccaggctggagtgcaatctcagctcactgcaacctctgcctcccaggatcaagagattctcctgcttcagcctcccga

SEQ ID NO: 35017 - DNA, 888 bp, Artificial sequence
  DNA replication origin
gttccctccagagttctgtgccaaaccccaggcagtgtccgagtgggcagctcagccctggcaccatgggcaagcccccctctggtgggcatgaggcatttgccttccctccctctgctgtgcccacctcctgccagccaggggagccagctgggaaccttggtgccaggggagcccccagagtccctgtcccctcccgggcagtgccagccggcccctgccccgcccccccaggcccagtaatgggtgggtaatgagtgctgggggagcgggggaggggcaggggatgcaggtgccacaggcgctggcacgggggccgctaatcaggtttgccaacgccatctgtcaccgcacgagcatctggggctcaaggtgaccctgtcaccctcagttacaattatgagtttggcatctgtattaaagcccgccagccggccaggcgggggacggctggggtgggcacggggttgcacggtgaaccccatccctggggtacccttcccaggggctgcgtggctgccaggcgtggagcttcttaggggactatgtctgtgtgtgtatgtgtgtgtgtgtgcacacccatcccagtctccacaattcttaaagtgtgtccgggtgcagggctggaaatcataggtttgtgtgtgtctccatggtggctgtgtgtctaggagtttggtgggctggctgggggcggagctctgagattttgtgggtgcacagatgttcgtgcatctgcatgctgggacaagaacgtatggaggagggtgtctctttggatgatggtgtgtctttttcttttattagtagtattaattattattcttatttgagtcagggtctcgccctgtcacccaggctggagtgatcatggcccgatccctgcag

SEQ ID NO: 35018 - DNA, 896 bp, Artificial sequence
  DNA replication origin
aggtcaggggttcaagaccagcttggccaacatggtgaaaccccgtctctactaaaaatacaaaaattagatgggtgtggtggtgcatgcttgtaatcccagctacttgtgaggctgaggcaggagaatcacttgaacctggaaggtggaggttgcagtgagccaagatcacgccactgcactccagcctgggcaacagagcgagactgtgtctcaaaaaaaaaaaaaaaaaaaaaaaaaggaggccgggcgcggtgtctcatgactgtaatcccagcactttggcaggccaagacgggcggatcacgaggtcaggagatcgagaccatgctggctaacatggtgaaaccccgtctctactaaaaatacaaaaaaattagctgggcgtggtgaagggcacctgtagtcccagctactcgggaggctgaggcaggagaatggcgtgaacctgggaggtagagcttgcagtgagccgagatcacaccactgcactccagcctgggcaacagagcgagactccgtctcacaaaaaaaaaggtggggaaagagacagaagagagacaaagacagagacagagatagggaaagacatggggaatccaagagggagaaacaacgggagagacctggaaggtggagagaaacacaccaatgaggaaggacgggtggagggagaagaccacggagaggcagagcccgggagcaagatgggagaggaagggttggggtgagagacgggacaggaccagtcagccaatacccctggaccctccttgcctggtgtgctgtgcttagcaatgggaaaaatcaggggatggggggttgggtgcggtggctgacgcctgttatcccagcactttgggaggccgaggcgggtggatcatttgaggtcagga

SEQ ID NO: 35019 - DNA, 1562 bp, Artificial sequence
  DNA replication origin
acacaagcgcgcaaacatggacccacaaattcgcacacacatatacccactgactcatgcaaactcagacacacaaccatccccaaggagcaccgccgccttcttcccctttctcccttcctccttctgtctctttcacactccgatctagctttgcccatcgcccccgttttacagatggggaaactgaggcactaagcagctgaaggccccttgaagtggggaagaccgccccttctgactccgggcagaggctactgccgcgcgccccctgctggcctggcccctccctgcaagagcgcgcgggacggcggcgcgcgcgacgggcacgcgcctgacgtaaccatggcatcctcttggcacgcgcggcccgcgcgcagggagggcggggcgggcgcgttgccatggcgccggcggcccgcgtgaatggggcattgttcgccgcggcgcccgggccgggccgtcccggacccacccggacccacccgggccgacagagacggggagaccgggatggggagagacagagaaatggggagggaaaaagacaggagagacagggagagaccagagatgagagagaccagagatgagagagacggagatggggagagacagagaaatggggagagaaaaaagagagacagggagagaccagagatgggagacccagagatgcggagagagatgggaagagatagggagacctggtggggagagacagaaatggggagagatgaagacactgggagggccggagaaagctggagagattgagagacagaaggatggggaaagaaacagatgagaggccgagcgcagtgtaatcccagcactttaggaggccgaggcgggccgatcacgaggtcaggagatcgagactatccagcccaacatgatgaaatcctgtctctactaaaatacaaaaaattagccgggcatggtggtgcgcgcctgtagtcccagctattcgggaggctgaagcaggagaatcgcttgaacccgggaggcagaggttgcactgagccaagatctccccactacactccagcctggcgacagagtgagactccgtcagaaagaaagaaaggagagagagagagagagacagagaaagagaggaaagaaagcgagagagagagagagagagagagagagagagaaagaaaaagagaaagaaagaaagagatgagagagatggggagagagaagagatggggagacatggagatggagagacatggggactgggtatggagagacagagatggggagagacagagacacaggaaaagctggagagactgagagacagagaaatgaggggaaaaaagatgggagagacatgatgagagaagagatgcggagactgagagatggagagagacgggagactaggcagggagaggcagataaggagacactgggagagaaaaaaaacgggaagagacagagataaagggagagaggaggccgagcatgggggttcacacctgtaatcctagcactttgggaggccgaagtgggcggatcatttgaggtcaggagttcgagaccagcct

SEQ ID NO: 35020 - DNA, 1307 bp, Artificial sequence
  DNA replication origin
gtctctcttttttctctccccatttctctgtctctccccatctccgtctctctcatctctggtctctctcatctctggtctctccctgtctctcctgtctttttccctccccatttctctgtctctccccatcccggtctccccgtctctgtcggcccgggtgggtccgggtgggtccgggacggcccggcccgggcgccgcggcgaacaatgccccattcacgcgggccgccggcgccatggcaacgcgcccgccccgccctccctgcgcgcgggccgcgcgtgccaagaggatgccatggttacgtcaggcgcgtgcccgtcgcgcgcgccgccgtcccgcgcgctcttgcagggaggggccaggccagcagggggcgcgcggcagtagcctctgcccggagtcagaaggggcggtcttccccacttcaaggggccttcagctgcttagtgcctcagtttccccatctgtaaaacgggggcgatgggcaaagctagatcggagtgtgaaagagacagaaggaggaagggagaaaggggaagaaggcggcggtgctccttggggatggttgtgtgtctgagtttgcatgagtcagtgggtatatgtgtgtgcgaatttgtgggtccatgtttgcgcgcttgtgtgggtgttttatgagaagttgagaagtggttggttgtaatttgggggtgacttggggcccatgtgtttggaagtgtgtgtgtttgtatttgcacacttgtgtgtgatggtattagccggtatcatttgtgtgtgataatgtgtccgtgtgtttgtggtcctgtgattgtgcaccccatgtttgcctgtctggtgtgtggtgtgtatagtgggtgtctgtggtttgggtgtggttgtgggttcggggaactatgtgtcccatgtttgcatgtctggggtgtgtgtgtgtgtgtgtgtgtgtggtgggtgtctataatttgggtgtggttgtgagttcatgtaactgaaccccatgtctgaatgtctggtgtgtgtatgtgtatgatgggtgtctgtggtttgggtgtggtcgtatggttgtgagttcatgtgactgtgcaccatgtttgcatgtctggtgtgtgtgtgtgtgtgtgtggtgggtgtctatggtttggatgtggtgtgtgtggctgtgtttgcatgcctggtgagtgtgtgtatgggtgtatgtgtgtctgtgatggtggatggctgtgttgttgggtgtgattgtgagtttgtgtgaatgttgtttgcgtgtcacggggcctgtgttcacaaactcacgtgtgcttctgtgtgg

SEQ ID NO: 35021 - DNA, 828 bp, Artificial sequence
  DNA replication origin
gggtgtcggcgtgtgtctgtccctgtttccaagactcgggggcgggggtgtcctagggacaatcgtgggggcccagtcagcatgcctggctgcttgtgtggacggctaaggggctgtctcaatgttgtgacaggcactgggagagtgactgttgtgtgacaggttgtccttgtaatcgtggtgaggctgtcacccacggttgcattgtagctccttggtctggggactgtgggcgttgtgtggcagcgtgagtgagctgtgtacctgtcacctgcaacagggagactgtgagtgtgtgctattcgagtgactgtgaccagtggtctgtacctactggctgcctgctctgtgacacagtgacaacaagggtgtgttattgtgctattggaataactgggttggttcaaaccttgatcaagggacagctgcggtctgcaccctggggaggcagtggtcagagctgcttttcctccttgtgactgggtggggcggtgactccgtgtggccacgtggctagcacagctgcagggacatgcggactgagtatatcagtgtgcctctgctggccagtgtgacgttgatgtggtgtgagggtcagagtgtcggggttcctgggaggatgtgtgagaccgtgcagctgaggtgtgtgtcaccagaattgtcaagggtgtgaccgtagttcttcatgtgacagcgtggctgagggtgtgatggtgttgctgtgcaggtgacactgtggcagtgaatgcgtggatctttgtgtggttgaaggtgtgacagtgattgtgtttgatgatctgaaccaaagggctatgactgtcctaccct

SEQ ID NO: 35022 - DNA, 991 bp, Artificial sequence
  DNA replication origin
atggcctggctccctgcctatgctacatgccagatgtttgcccacctcacccaagagccctgctcagttgccaagcagccctggagcctcacgttgcccggccccacattctgtgccccagaatgtggctgccagagcccagatgtttcagccctcccctcacccacatccacactgcccgcagcatcctggccaggtagtgccatgggcctggctgccgcttcctgctcctcgtcctaccccaacacacctgcatggtaggaacgcacctgctgctagccacagccaggtgggcagcctggcagggaggaatgtgggggattccagctgtggcatgccagctgtgcccagccccctggcggcaccctcctcccgtgagatttctcgaaggccaggtgtatcctaatacttgggccccggggagggggagagagggaggggcagcgctgccctctctggcagtccctctgccttcccataaattcttcccattgcagttgtggaggggagcagagtgagggagtgtgtgtgtgtgtgtgtgtgtgtgtgtgtgtgtgtgtaggagggtgctgtcagtgtagaggaggggtgctgaatgtggggaaagaactttgaatgaggatgtgtgtgtgagtgtgagagtgagtgtcttgtctgtgtgagtgtggatgtggtgtgacagttgtgtttgaatacaaggaagtgtgtgcgtgtgtggcgtgtacatggggagggtgttatgggaggagtatgtgtatacaaatggaagtgtatgtgtgttgtgtgtgtttttgtgtgtgaatggagggatgagttgtgtgtgtgaatgaataataggtgttctggtgtgatactgagtgtcatagagtccgtgactgtgtgtgtgaaggatgtgtgtgtgtgcacctttggaagtctggtgtcctgtgtgtatgaatggaaggacaagtttgtgtttgtgaatgaaggatgagtgttgtgtgggtgtgaa

SEQ ID NO: 35023 - DNA, 1116 bp, Artificial sequence
  DNA replication origin
tgcacctttggaagtctggtgtcctgtgtgtatgaatggaaggacaagtttgtgtttgtgaatgaaggatgagtgttgtgtgggtgtgaatgaagggtgtgttatgtgtgtaaaaatgaaggagagatggccgggcgcagtggctcacgcctgtaatcccatcactttgggaggctgagacaggcggatcacaagatcaggagattgagaccatcctggctaacatggtgaaaccccctctctactaaaaatacaaaaacaaaattagctgggcgtggtggtgggcgcctgtagtcccagctgctcgggaggctgaggcaggagaatggtgtgaacccgggaggcggagcttacactgagccaagatcgcaccactgcactccagcccgggtgacaagtgagactccgtctcaaaaaaaaaaaaaagtaggagagatatgtgtgtggatgaaggctgggtgtcgtgtatatgtggatgaaggatgggtgttgtgtgtgtacataaggaaggctgggtgttgtgtgtgtggatgaaggctggggtgtgtgcgcgcgtgtatggaaggctgggtgttgtgtgtgtgcgtatggaaggctgggggtgtgtgtgtgcgtatggaaggctggggggtgtgtgtgtgcgtatggaaggctggggtgtgtgtgtgtgcgtatggaaggttgggtgttgtgtgtgtgcgtatggaaggctgggtgttgtgtgtgtgcgtatggaaggctggggggtgtgtgtgcgcgtatggaaggctgggtgttgtgtgtgtgcgtatggaaggctggttgttgtatgtgtgcaaatggaaggatgggtgttgtgtgtgtgcgtatggaaggctgggtgttgtatgtgtgcgtatggaaggatgggtgttgtgtgtgtgcgtatggaaggatgggtgttgtgtgtgtggatgaaggatgggcgttgtgtgtgtgcatgtgaaaggatgggcgtttgtgcatatggaaggctgggtgttttgtgtgtgcatatgaaaggctgggggtgtgtgtgtgcatatggaaggctgggtgttgtgtgtgtgcgtatggaaggctgggtgttgtgtgtgtgtgtatggaaggctgggggtg

SEQ ID NO: 35024 - DNA, 1118 bp, Artificial sequence
  DNA replication origin
caggccatgtcggtgtgtgtatacacacactggtgtatgcgtgtgtcagtgtcagggaggggtctctgtgtgtcctgatatgtgtgtctgtgtcaggccatgtctgtgtgtgactagctgtgtgtgtgtgagtgtatcagggatcgcgtccctgtgtgcctgagagtgtgtctgggtaggcgtgtatctgtcattcggtgcttgggggcctcggaaccccggctccctccagtctgggcctccccactgtgcctgaggccgccacgccaccgaggcaaggctgtggagcagggaatcgatatgtccttaaaaattcaagggtttctcgtaaacagaaacttttaacaccgtttaaagtttcaggagtgctgcggctgcctgcctccacaccaccgctgccccagaagagggagggggctccaaggggcggacgggggaggggttggaagcggagcgggggtgggggtgggggcgcagaggggaaggggcggggccccgtggggggctgggagcggtaaggggctggaggaagggccagaaagggatttggggatcaagggggttgggccgatgaatggatggttctggaaaggggtagaggacagaatgggggtccaggtgtagggaggggaggggagctggaaaaggcagaagggatgaacggaaaagcgtctgggggcttttgaggggccctagagaggctgggatgtctgggagaaggagttggggacatgcgggctttgagggagtgatgggggatggaggcagggcgggggctcagatggctgtggaaaggagcagaggcaatgtctgggggatctgggggtcctgggtgaagaggacagcagagcagtgtgggtctgtggggggactgagggggaagctgtgggaaagggcccggggaggtgtgagacccttcatggagctgggggcttggaggatcttgagagccaggcagaccctgcccacccccctgcaaatggctgtgagggggcacatggctcagaaaccccaactctggctgccctaccccacctgccagcctgtgctccagccgtgaccaccagcccccaggccccgggctcctgggctgatggtccctcatggccttcctggtc

SEQ ID NO: 35025 - DNA, 1210 bp, Artificial sequence
  DNA replication origin
ctataatcccagcacttcaggagtctgaaatgggcagattgcttgaggtcaggagttcaagaccagcttggcaacatgatgagattccatctctacaaaaaatacaaaaaaaaaaaaaaaaaaaaaaaagccaggcgtggtggtgcgtgcctgtggtctcagctactccaaaagctgaggtggaaggatggcttgagctcagggggcggaggttgcagtgagccatgatcgcgccactgcactccagcctggacaacagtgcagtgtcagtgtatatgggtctgtgtgtgtgtgtgtcttgaagtgtgatcacgtgagtgactgtgcaagggtcccagtgggtctgggacctgcttgcaagagcccaatgggcatagccagccctgtttgtgatcagggtctgtggggcagaaagtgtcaatgggtgtcactaggtgtgtgttttgctatgtggacctagggcggtgatgaggatctttgtgtaccagggtgtgtacacaggtgctcaggagtgtcagggatcagggctgtcaggacatgggggctctgtgtgacaaggatgtgagcctgtgtgtgtcaggccatgccagagagtgtgtgtagccatgcgtgtgtgcatgtttgtgtgtgtgagagagagcgagagcgaggccatgtcggtgtgtgtgtctgtgtatgagggaggaggtctctgtgtgtccagatacatgtgtctgtgtgtgtcaggtcgtgtgtgtgtgtctatgtgaggccatgttagtgtatgtgactaggtgtgtgtatgtgtgtgtgccagggaagggggagtccctgtgaacctgtatcagagatgtgagtctgtgtgtgtcaggccatgtcaatgtgtgtgtctgtgaggccatatcagtgtgtgtaactaggagtgtatgtgtgtgtgggtgggtgtgtgtgggtgggtgtgtgtgtgtcagggaggggggtcaatgtaaacctgtgtcagagatgtgagtctgtgtgtgtgtcaggccatgtcggtgtgtgtatacacacactggtgtatgcgtgtgtcagtgtcagggaggggtctctgtgtgtcctgatatgtgtgtctgtgtcaggccatgtctgtgtgtgactagctgtgtgtgtgtgagtgtatcagggatcgcgtccctgtgtgcctgagagtgtgtctgggtaggcgtgtatctgtcattcggtgcttgggggc

SEQ ID NO: 35026 - DNA, 1745 bp, Artificial sequence
  DNA replication origin
cggcctcccgcgcccgctcccctcccccggtcgcgcgggggcggcggccggtacctgggtgaggcagtacggggagtacatagctgggcgcccgggcgggagcgcggcggccggccgcggcgaggggaggcccggcaggcggcggccgcgctcgggctcgggctccggctcggctcctccggcctccgccgcgctgcgcccgcccggcccgcggccccgcgctcggcccggcgccgctccgcgctcgccgctcgcaagctcggccccgccggctccggggccgccgctgccgccgccgccgccgcgctcgccgctgcctctcgcgtccgccgccgccgccgctgccgccgcgcgtctactccatgccgccgccgctcggccggtcaccctcgcccgccgccgccgccgccgcagccgccgcgctgtgaaagtgaaagtttagacaaagtttggaagcggcgcactccggggagagggagcgggcgggcggcgcgggcgggaggaggggcgcggggaggggcgggcagggcgggggagcggcggccggcgcacacacacaagcacacacatgcacacacacacacgaacacacgcacacgcgcgcgcgggggcgcacaccgacgcggccgccctgacacgtgctggcccgcgttccagcgcagacacacgctgacacgcagcgggactcggaccccgccacacatgtcacgtccagaacgcctggccacacgttccgccttcgaacacaaagcacactcggacaccagtgcacacaaggcacagacacacaacccctacacacgggcacacacacacagcagtctgggaaaacacccacgacccacgctctgacatgcaccgtcccaccatggtatccaggcacacaacaaggaaccgcgtatagacatacaccaaagcaggcgtcacgtagacacacactgatatacacgaagacacaccagtgcatgacacatagagatgcacactgatgcacacacactgacgcatgttcctgcagaacacagacacatgcaagatcacacagccacacgctgacaccttccagacacacaattcctacacgcagacacatacacaacacacacacatcgcagtgccagaacacactggcagttgtggcagtacaccccgatgtacagaatgacactgatgattgagaggccgaggccagtggattgcttgagctcaggagttcaagaccagcctggacaacatggcaaaacccctctctaccaaaaatacaaaaattagctgggtgtggtggtggatgcctgtggtcccagctacttaggaggctgaagtggggggatcccttgagcccggggaggtcaagggtgcagtgagccatgatagtgccattgcactccaacctgggtgacagagcaagaccctgtctgaaaaaaaataactaaataaataagatgacactaatgaagggaagatacacaatgtcacataaacacacaccaaacacctggaagtgaatgcaaaggaccccaatacaaagagatacacagcgtcacagatacaaagcaacactggctgtcacaacacaacacacagacacacacacacacacacacactgggttgcccagatgtacccacaggccttggacacactgaccaactgatgcccaggcggctgacaacccccctgggagaatcatctagccatgcacacagggatcacacacatacacccatgtcccttacgtgcccccc

SEQ ID NO: 35027 - DNA, 1988 bp, Artificial sequence
  DNA replication origin
ggcggcggcccttgcgtgcggccggggtgcctggggtgggccgagcggcccgggcgtctccccaaagtctttgtttaggcctcacatgggagcggggctaagaaaatggcggggctcccaaatttcggaggggcaggggaggggagaggggggcgggcgcgctgccagcggtggccgcgcctctccgaccccggacgtcgcagcctctgcccccccacccccaaactttcctcggcgcaaactttctggccccagcgacccgggctgctgcggagtggacccggcaggcctggggaatcccgtcccgtcgcctggaggcgggaggggcgggaggcagccgtggacacagccgacagtgctgcggccacaccgtcgggtcagcctcgggcacaacagcgccgaccttggcgcgttgctagagcgcgtcccgcctgcagcgaagttccctgcgcggcgcacggctgcggcaaaagcttcgaggatgcctgtcgggccacccaactctccctgggctgtggcctgaggctctaagagggcacagaagctgcccagagtcccacagtggccctgacagcgttgcctgcagggccaagccacagctggtaacagtctccgaagaggggacatctaggggctgcttagccctgctgccagccaggcctgcatgtgggggttctctaggccaggccctaattgtcccctctgcccagcctgatccttgtcagccatgtgccaagtgtgtccacagcttacagtggcagtccacatgggtatggctcctactttgtctgggtcctaccgggagtgtgcagtggtgtcaaggggcgaggggtttgtcggggtgtgtgtcagctgtggctacaccacactcctgtatgcacaggtgagagtgtatgcaagtgtgaatcaatctagagtctgtgtgtagcccctgtgggccggccatgggcaggcctgcgtggcatggccgtgtgtgtggcccagggagcgggttttcctgtagaaagcaggcccaagtacgtgttggcgagggcgcaccggcatgcatacatgttgcagtgtgcatgcaggtgtgagcaggcaccctgagcaccatggcagtgtggggaacccccacatctgcacctccagttccacggccactccatgttgggcgcccctcacaacaactgcctacccagcggtgtctgagctgggcctctttggtgctacacttggctgggctgtgtggccgatgtttggggcctagtggaaccaagaccccacgctcaagcagccccttgcccaccaggctgccagcccggcctcccatgccaagcacgccagacatctgagcctgctcccccatggcttgggtgagacaccagcccctcagatttcacagcaccctgggagagaaaatgcctgtggatacgccggtgacatggctaggaaggggctggggcggctgcgagacccagggcgatggccggtgcttggctctgtgtgattgtaggcccaggttacgacagttccagtgtgccaggatggctggagaggggagtgggcatggtgtctccaggctgccagcccttcatggtgggcagggaaacccttcagctctgggcaggtggctgctgtcggctggtcagtggggtctggcctgcccctccctaacaatcacatctctgtttttacaaatctttctgcttccatggtttgccccgctggtctctgtttttatgacaacctctttcctttgctgtctttttctcggtctgtttttatcggtctctggtgtattctgcccttttccatctctctttctccatctctgtccttttgtatgtctctgactgtctctgtctctgattccagttttggccccatctctgctcccccctccactggcgtctcggactctctctctctctgtctctctggcctgcctctctctctttccctctctctctctcccttttctttttttcaaaccagaattggcttcg

SEQ ID NO: 35028 - DNA, 815 bp, Artificial sequence
  DNA replication origin
tgggaggccgaggcaggtggatcacgaggtcagaagttcaagaccagccgggccaagatggtgaaaccccatcttcactaaaaaatacagaaattacccgggcgtggtggcgggcacctgtaatcccagctactcgggaagctgaggcagagaattgcttgaacccgggaggcagaggttacagtgagccgagatcacgccactgcactccaacctgggcgacagagcaaggctccgtctcaaaaaaaaaaaaaatagaaaaagaaaagttatttgtgtacacacctgagcgagccaactgcattatgtctctgtgtaaagatgtgtatccatccatccgcctgtccgtccttgggtccatgtgagcatgtgtgggggtgaacacacatttgtgtctacctgtatccaagcatgtgctcagggctccatgagtctgggaggtgtcgtggtctccatgtgccttcgtcgctatctgtatcatctcgaggggtttgtgagtgtttatgtgtgcgctgggggtggttgtgaacacaagtccacagtttcctgtgtccatacgtgcgtcaaagaggtactgctgtgtcgctaagcctacaccaatatacgtgtcccatttcaagaggtgcgtgtgtgttaatgggtgtgtgtgacagtgtgaacacaagtcgtcggtttcctgtgtccgtaggtctgtaggctcgtcgatggtcgtgggtctggacatcggtgtgaacaggacacttacatccccatcttggcggtgatggtggtgtacgtgagttcacatcctggttgtgtctctgtttcttggcagg

SEQ ID NO: 35029 - DNA, 1253 bp, Artificial sequence
  DNA replication origin
ggatggctggggcttccctgatgcccccttcccccagctttctctctgggtcactctggccacccctctgtccctgcgaagctatagctctctgtccctgctccggcctggtgccctgttttcatggcacttggcattttctctccggctctggccctgcctgattcatgcccactgctggggtgggaggtgtgcccaggtgtgggccgggatggggtagctcatgagatgagctggggctccgtgagatgttttgatgctgggccgagctcagagccgagggctctgccgggaacagggtgctccagtctctctagggcctggaatgtcttgtgtagcctcaagagctcccagacggaggctgcgggagcggagtcaagggctaggctttgccgtcagacagaaatgggttcgagctccagctctacatgttctaatcttgcgacctgaagcacaggattttcctggcctgtaaaatgggcaaaaaccagtgtctatctcttgggctgtacttaggttcaatgtggtgcctggcacatagtgtgtgctccataaatggtaattgttgccaattgttggttgtcaacctcccagaccctcccagctgagagagggatgcctctgaggggtagaagacaggatcgagcacctcccaaccatagatatccaagtggactgcctggaggaggaggaggcaagaggagagtttggaaggatgagagtttgcacatggcccagctcttttacctttggatgggggcctgtaggccaagcagagggtggcacaacttcaagataggggagagatggtgggggagagtggggggcaggaggggagagacgaggcctccactgttccatgaggaccagataccctggttgggggccctgagtcctggtataagagtatgtgtgcacgcattcatccaaatgtatgtgggacaaagagacccggtgcatctagatgatgacttcagggacgtccccaagctccagaactttctgtgtctgcacctgggcgttgtcacctggacccgccatggagacaggacatatgtgcaggaccctatggtgggcacttggctggatcagggcacattgcgggtgggagcaatgctgggtgtttggccgtggcgccgtggctgtgggcaaaatgcccccgtggttggtgtgttgactgccgtcctccccatctaacccacagggagcctggccttttaaatctgctgagatattgtctcccccacccccat

SEQ ID NO: 35030 - DNA, 1155 bp, Artificial sequence
  DNA replication origin
agccaagacgcgtttggcaggaggagagagagagggagagagggagcgggaggaggggaggaggggaggagagagggaggaaagagagagagagaaagggggaaagaaggggggacctcagtttccaaatccgcgccctcagagcctcggagggatggcgggtggcccaggggtgtggggcccagggcctgcctggctgtgggggcagcggggatagtgggctcaggcccacggagacagccggacacccagctggccaggctagaacggacacaggcagaagccaagatcaatgtgcgccgggcagacagagggaggcctgtgggcggcccgaacacacgcccgcacctcgctgccgcacaacgggcttctgtccacgccaggccaggggcacgggcggggcccccagcaaggccactgcggccgctcaacctcatgggaagggactgagcagccagcccgctcccagccgcttgcccggccgccatagcaggcatctcacatggtgctcggaggccaagggaatgcccaggagaggcgcccgtggggtgagacccacagtgattgtcacggggacaagctcaggaggcacagtgatatgagggtgatgacactggagacacgtgcgttgacacgtatgtggacacaagttgacacggacaggccaacacgtgtgtgagacacacggatacactctttgccgtgacgcacagacacccagaaaaacactgctgtagatgtgacgcatgtcgctgggacactgtcaccccagatacaaagcgcagatacaaagatggtgaccggtacaccaatacccgttgacgtgcgcagcgccaccgtgacacagagactacatccggcacactgacacgcatggtggcacgctccccgacccccactaccaaatacacaagagacagggcgtgcgatgatccgtggagtcacatgcaggtagcacccagtgatggacgctgggagacatggagaggcatggagagggacccgggcagacacacgctgccacacagacatcctcgggaaaatggtggctctgaggcctgacatgccgattaacatgcacaccgatctgggagaacccagatagtggctcacagctgtcctcctggcccacttgcccccacatccagggctttg

SEQ ID NO: 35031 - DNA, 1116 bp, Artificial sequence
  DNA replication origin
aaatgattccaggttgggcatggtggctcatggctcccagcaccttgggaggccgaggcgggaggatcacctgagcccaggaattcaaaaccagcctgggcaacaaagccagacttcatctttactaaaaatttaaaaattagctgggtatggtggtgctcggctgtagtcccagctacttgggagggtgaagcgggagaactgcttgagcccaggaattcaagaccagcctgggcaacataaccagactctgtctctacaaaaaaatttaaaaattagccaggtgtggtggcatgcacctgtattccctgctactcaggaggctgagatgggtagatcgtttgagcttgggaggtcagggctgcagtgagccgagatcgcaccactgtgctccagcctgggctacagatgacagtctgtctctaaaaaaaaaaaatgtttccagacatttcccaatgggtgaaatcactcctggtgggtgacactgggttagggagtgtgtggggtgttttgtgtgtctgagagcgtgttattgcatgcatgtgcatgtacctgtgtgcttggtggcatgtgcgggtgtatcggtgctcatgtgtgtgttttgggcactgacattatgactgagtgtgtgtgctgtgtgtttctagctgtgcctgtggggctgcatttgacggtggcagagcctgtgtctgtgctgtgtgcttcatggcatgtgatcgtgtgactgcgcgtgtcccgtgtgtctgcacccacatgcacgtccctgagtgtgtaatgccgcatcgatgtgttcgggtgtggccgggtgcctcaaggtgtctgtgagtgagggcaagattctttgtatggggacgcctgtgtctgtttgattgagggaggtgcagcatgccagtgtgtgtcagcgtgattctttgtgcccgcatgtgccagtgagagtgtgtgactttgtgtgagatggacccggaataaacccccccccaactccccaagatgattcgaccgaagccgatatttggacggaaccacctggataatttggaacccatccctagctcctgcctgccttggactaaaaggcccaggggggtcgggtgcacctccatgctgtcctttcct

SEQ ID NO: 35032 - DNA, 844 bp, Artificial sequence
  DNA replication origin
gcatgagaattgcttgagcctgggaggccaaggttgcagtgagctgagattgcaccactacactctagcctgggcaacagagtgagactgtttaaaaaaaaaaaaaaaaagaacctagctttgtccccatcccttctctcggtggctgccaggagcaaggaggtgagggtggagccctcgaccacggagtctagaagactgcgagtgtcctgggcagggatgggcatgtggtttttccaggctttgtctcaccccaggcttctacaaaccagggcagggatttggggctcccaattctatcctgagaagctggggtggctgtagctgctgcgcaaagacagctggttgtggctgacaagcagaggggaggtgccaccagggcaggtctcagctctcaggcaccatttccaaccactgccaggtgtggcccaggtgcgaatatgtgtgggggtgtggctctcgtccctgtgtgctggggtaacactggactgtgtacatggcacgccgactgtgcctgggtttggcaggggaaatggggtatatatgcgacaatgcctgggtcctagtgagggagagtgtgtgtgtgtgacactgtcagctggcgtcttgtttgggtgtgactgtgtatgtgggtgcatgtgtaatgagtgtcaagggttagctgtgcctgtgtgtgttactgtgtatctggggatgcatggcagggtttccaaccttggcactactgacatttggggctggatcattctttgtggtcggcgagggttgaggggttccattgtaggggactgagcagcatcctgggtctccactcactaaatagcaccccctccacaagtgtgac

SEQ ID NO: 35033 - DNA, 1127 bp, Artificial sequence
  DNA replication origin
gatctgaggagttggttcacagcacacgctttaaaactgtgcttgatgtgaaaacctgctttgattttatggatgaaaaaccaagactcagtagaggtatccagtgctagggtcaagggcggggagctctttcttcaagatcgtcaccaccctaaatcctgccgatgggacaaaattgcagcttgttctctggcctttcccaaatttcaaaatgggtctgcacacccccacgcccccatttgaaacgtgccctagtggttggcccttgaacctttcttaccactctgacctttggatcttcttccatccaaggctcagaataaaggtggatggtggtctcaccccctctgcacccctgctggccaggcttgccctcacccccgcaggtccaaacatcctctcccacaccttgctgggcacccagccggagctcaaatgctgggggtgcagccgggagcctgtgcattccttcgacaaatatttaccaagcacctcctgggtgccaggctctgttttaggccccgggggctcggcagggagcaaaatctgcaaagatgccagccccggtgggagggcagactgtgaatctgataaacaagggagtgtccagtccttgagatggcgctaggtgctgtgggaagaacagagctggccgggccctcgggagtgctgggcagctgtggttttagcagaggtgggcacggagacctcatggtgagatgatgattttgaacgctgccttgctatagctcaagtgcagcccaccaggcccctttctctctccagggggcagactggaggtcaagggtgtgtggctcagcatggcatgcccatcatttgcccagaccatgttgcctgtcatttcttcaatctgagctcatctattatccatatttgtggatatgccatacggtgcccgcccaaaatctggggacaagatggccgaggcctttcctttacagaaactggggcttgatgggcactgggtattcgcaaccctgctgctctgagctgggggatggggcaggggcagctggtggcccagagtggcacttccacctgggcccctcaatttagctcccccggggcgggctgggtttatttttaccccagcctgtcaccctggc

SEQ ID NO: 35034 - DNA, 1284 bp, Artificial sequence
  DNA replication origin
agtgctactgtacttgtagttgcccctctgatagccctcactgcccatcggtttttcagtgcccatcagtaccccacttggagccaagtagcatttggtggggagggcgtggccctgttttcccagccaggggcagacagtttgaacacccttaagcggggaatcaggaagcctcttcctcctgtttcttgctctgggcttcttagaactggggaataggaagggaattcccatgggaaggccagaaggaggagcctcaggtggccagaagggggatgaaaagctggagtgaacctgtttaagtcttgctcactcctgggaatctggctgggtaatccccaccaccctgcttctagccccatgaccttggcacttgaccttgcggcctctgtttcctcatctgtaaaacaggttactcatacctgcctcgtgttgggagggtcacaggaggtcacatatgcccgccttccccccacccacccgctgcccaggcataattgctctggagtcggtagctgttatttttattgtgaggaatctatggctgtgacaagctgtgacgcttggtgtgatcgcgtgaggctggctgtgtgtgcgactgtgccgctgtgtgtgtgtgtgcgtgtgtgacaggttgtgtgtgagactgtgcgtggacgacagattgtgccggtgtgcggcggtgcttgtgacaggctgtcactgcgcgacagactgcgggtggcggggtgttgcgggcgttgactgtgagtggggatgaggcagtgtgtgggactgggactgggagacccccgcaaatctacctcggtgaggacctggctacagcgaggatggggaggctctctggaactgcaggaggaactcactccggtttcctcttgggccttggcttttccatcggattcagtggggctccacctgtttgcaaaccttggaggtgatgggtctcagaggaccctgtgacagagcctctccttcacctactgtgtcagctcaagtacccagcctccagcttcttgctggggtttggaggggggccaaaggagggtcatcagggggctcagagcatggaggactgcaggcctggctggcttcagtgagggatgcgtaccctatgcctgtttcccacgttttccctgagctccaggcctgggcagggccagcggagacctggagaaagaagaagagggatgtggggaaagatcaagaaaagctaggagagaaagagaggaacaaagtgagaaaatcacagagacgggaagattggagcaagcgagtaacgtc

SEQ ID NO: 35035 - DNA, 797 bp, Artificial sequence
  DNA replication origin
tcccgactgggggcgccgggcaagggcatgctgcggacccaggtgggagcaactatacgagagcgtgcttatgtgcgtgcgcacgtccgagttgccgggctggggtgtcagacagggacgtgcatgagcgcgcctaggtccccttcggggccgcagggccagggggtgtgcgagtgcttgcgcacgccttgggagtaaccacgtgcgcgagggccgccgtccggacccagctgagcccggatctggcccctgagcgggccatggggcagggccggccgcccgcccggcaggccaaggcgggatgtcgttggagccctgttggttttggccgaggcaactccaatgggggaagccccaggagcaggcgggggaggaacaaagaaggggaaagcaagggaaaagcgggttgcagaggaggaagcgccctggacctcggagggcccctggggcggtggaggcggggcctgcctgggccagggggctcctggaggcccccccgggcccaaggtgggccactccacctgtgtggacagggttaggctgttggtttgaagtcctgagacttctctgcctttgaagacccccggccccgttctaccaccaaatcccccaaaggaccacaagctgccaccactgcggaccaactccagccgtccacatggccactcacacatcagacactcaagcctagtgctactgtacttgtagttgcccctctgatagccctcactgcccatcggtttttcagtgcccatcagtaccccacttggagccaagtagcatttggtggggagggc

SEQ ID NO: 35036 - DNA, 1161 bp, Artificial sequence
  DNA replication origin
gcctgggccctggggagacctccccaccacctctacctccatgagccccctccccccagtcttgagtcagttgcagcgggtccaggaaatgccaggcgccttgagaacctccagggaggctacaatgaaaggagcctgtgggcgacgggcacctgtcgaggggcgcacttggcggaggggcggtctcaggtagggtacgtacaggcacgcgacctaatgcacagaggcactggggagggagtgttcgtgccaacatggggtgcagcccagcttctctcttccggggacccggaggagacgctggagtaccatctaactttctccagccgggctgggatatcaaagagctatgattgggcagtggagcgtctggggagtcccggcacacccccctgcctctgctcccacccctccaaaacccacccaccctcactcctgaagtccatgatgcgcgcagggaactcgcctccaccgcccgggcgcacctggagcgaaggcctggagggcgggtagcgtgcggcccgagctggactcgggggcaagtggaaatttctcccgaggtggggtggtggggggcattaaatggcctctttgtggcgaattgcaagccgtcactcagggttaatttaagcggtaacagcaaacacacaccaaaaagcaacgtctcgccgccagcacccacccccgcgattgtgtttctggggctgcgggattcggagctgcagtccggcccttgggggagggggggtccccggtctttaagaacgtgggatgtccgtccgcagtggagagggggagggctgctcccgcctccccctacatccctgcctggcgaaatggtttttgcaggtttgggtcgaagcctagtgggggtggtaaaatccaagtacaaacgtggagcgggaagaggggggagcggttcttacatataaaaagtatatataaaggtacaaatttcaaatataaatatagcacatgcaggggcgccactgggcagcggcagttctgggatgtcccacctgtgccccagggacatatggggaggcgggtgttccgagagggatgggggaggtggaattaggcctcccttccctgccggctcccgcaacaacctgaatgccgctttgaagccagatgccctgagcggcctggcaggtgtgt

SEQ ID NO: 35037 - DNA, 1043 bp, Artificial sequence
  DNA replication origin
tacttggattttaccacccccactaggcttcgacccaaacctgcaaaaaccatttcgccaggcagggatgtagggggaggcgggagcagccctccccctctccactgcggacggacatcccacgttcttaaagaccggggaccccccctcccccaagggccggactgcagctccgaatcccgcagccccagaaacacaatcgcgggggtgggtgctggcggcgagacgttgctttttggtgtgtgtttgctgttaccgcttaaattaaccctgagtgacggcttgcaattcgccacaaagaggccatttaatgccccccaccaccccacctcgggagaaatttccacttgcccccgagtccagctcgggccgcacgctacccgccctccaggccttcgctccaggtgcgcccgggcggtggaggcgagttccctgcgcgcatcatggacttcaggagtgagggtgggtgggttttggaggggtgggagcagaggcaggggggtgtgccgggactccccagacgctccactgcccaatcatagctctttgatatcccagcccggctggagaaagttagatggtactccagcgtctcctccgggtccccggaagagagaagctgggctgcaccccatgttggcacgaacactccctccccagtgcctctgtgcattaggtcgcgtgcctgtacgtaccctacctgagaccgcccctccgccaagtgcgcccctcgacaggtgcccgtcgcccacaggctcctttcattgtagcctccctggaggttctcaaggcgcctggcatttcctggacccgctgcaactgactcaagactggggggagggggctcatggaggtagaggtggtggggaggtctccccagggcccaggcaggaggagggaaggtcgtgtgctttccatgtcgcgggcaaaatgggtgctgacggtcactgtcacttgcatcgcacactgaggggtgggagaggacagcacatgcctggaccgtgcaggaggcccagaaccggggcgcgaaggggccgcgggac

SEQ ID NO: 35038 - DNA, 1430 bp, Artificial sequence
  DNA replication origin
ggagaggacagcacatgcctggaccgtgcaggaggcccagaaccggggcgcgaaggggccgcgggacacgagcgggccgtgcgcaaagcctggcgcgcgcgtgcgcagcgacgaaaaggcgggaagcggcgcttcgaggccccggatgtcagacgcgacctgtgtggcatgtaccaggctggctccgacgacggaaccgccatgggtgctgagtggagagtggggaccgcggaccccgggggcaggtgaggggaaactgggagcataggtctggctttcgaccgtttgtgccgccagagtcttctcaatgatccctcccaggcaccgtaggccctctagtgggtctgggtggcgtcctcccggcccctcgctgctcaagcgcggctccctcttgccggggcgcggcctgcccctcacagtgacccccccgacccaccccccaaaaagtgaccccgcgctggtgggcatggaggactgtcccagttcaccatttgctgcgtcaaaggccgccgccaaaaggggctccgatgtcggcatttttgccttaaggctagtttgtcccccaggcgcgcgggggttgggggttcagggccgcctgtgcctcagtttctctcctcctgcgcccatcctgacatccgacggaggataatgcgcgttggagggctttggccgtgaatgcgatgttgatgattgctgtgattctttgggtgcttgggagagtttggggtttaactgcccccaaatccgaggacagcttgggggcgtcccttcggagaggatctctccgcgtcgcatagtgagcgtcgtcatctctagactaccccggtttccgaggagcctcaccttcaatccccgagccttctcttttgggggagtaaaggcggggaaatttaccaggggagatttttgtttccagggttggctgggtttgggggattttgtcctccagcgagcgcggggaagaaatgtgactaagtggcagaaaatgcgctttccctttctctctcttctgccttcgggccgcggggagttgcgcagactctaaaaaaaaaacctttaaaaacccaaaacctcccctccaagtccctttcgatctacgccaccttccctctcagggctgatttcttgaatttggggcgtcgaggcctccccacccgttgctaccagcccttttgcagcacttcctgggcaggccaggggagaggacggaaaagtgaaaaaagaacgtgtgcgcccagcggacccgacttaacctgttggtggaggaggaagctggcgtcgggctgaagtcccccgagccacccctggagccagagcagcccccgagcattcagagaaagccgcccgtccccagtcccctcggaagccggtcataaacccgacttctcatcacccgaattacttaaatgagctttgatggtgttaggtcc

SEQ ID NO: 35039 - DNA, 946 bp, Artificial sequence
  DNA replication origin
ccgtcgccagctgaggactgagcctcgctgagggagagggcggctgtagggatggggttctgagtggaattggatccctttctccctgtctgcagccacatccttcttcctctgcttttccttttatgtcatatctatttccttcttactgtgtttcgaaggcctcaagcatggctgctccatagctctaactggagagaccccctcagaagtgggactcccctacccagtgctcaccctttctgcttgctgtgaggaaggtccccaagtggaggaccagagcaggggctccccggtgggtcacttctctgtgacttgatttcccccaggtggcctgtttttgatagagccctttgctgttttttgttgtgtcctttcttagctcttttcttttcatttgggtttctcattttatacttttgcactttgcactgctagggtttgggctctttagtctaaattgatttgggagacaggtaagaaaactaatctcaggtcaactggagagggcagatctggagaattaaatgcctgtgcagtggtgaggggcgttggtcagattccttgcctctgctcagaggtagtgtccatctttttgcctttgtcacttctccccgggtctggctgttgtttgtggctgcgtgtagagcttgtcaggcggagtgctgtgacaggaggctattttaataaactgttgcagtttctcgagccgagctgtgttgcgttggcatccctcgtcaccgctaatggagtgtgcgtggctgggtgtgggccgaaggaggaggctgagcttgctgggggctgggggagaagggagggacgtgtggggtgctggcctcccccttgtctgagagtgctccttcagcagccagacctgggggcatcacaaggtggcagtaccctgggcaccagatccctgccctggaagtactgctggcatggacac

SEQ ID NO: 35040 - DNA, 911 bp, Artificial sequence
  DNA replication origin
acaagcaaacaaccaaaaaaaaaaaaaaaaaccaaacaaaaccgagagagcccatccttctgtcacctgactgagtgggaaaaagggtgaaggggttgtgggaggctggggaaggggtcgcaagaagacccatgtagcttttaaccctaatgtggccgagacaagcaccttatttgtgctaacaagaagtgttttgttcattattactgtgattaacattagtattggtgtcgataacaaagctgaaatcacatatttaggatttaggtctgattaaaaaatgttggggtggatgttccaactggatcaggagaaaagaaaatgaaaacagcctggggagagggaagcctgatctgtttcctcactcgcttgctcgtggatgtcattttctgtcttcttgggggcggccaaaaatcgaccggtgtcggggaccagaggcggccccgcacgcccccgcgtgtgcgtccacgggcgtctgtgcagacggacactgtgccggggcgagctgacaggagttcacggctgcgatagaacatggagatgtcatgggcgcgacagagcctggcggggataccagcagcgtgtgtgtgtggacggcaacgttgtctgtgcgcgtgtgtgtgagtgagtgagggagagagagagagaataggtgtgtgtagaggctcccggtgcctctgtctggctgctgaggctgagatgggagcaagtggctggcgaagctggtggtggcttcaaaccacactttcgtagaacaatcgcaagagaaaattgttggggggagggaggaggaggagaaggcggttttccttgtgcccccccttctaacgctgcttttctccttctctctttccccctcatcccgtcttcccctcctcccgtcctccctcgccccgcatgctcccggcttg

SEQ ID NO: 35041 - DNA, 948 bp, Artificial sequence
  DNA replication origin
acctgggtactaggtggaaatgcagattcacgagccctgcccagacctacccacttggacaagccccaggatctgcattttaacaagcccccagaggtgcaagggcaggcagctgcatatcaacccgggcaccacctggatgcctgagggcgtttggtcccaaatcctgcaagcagagtggacagcaaaggaaagacagaagggaaatggggcacagaggagtgggtaatcggcaggagggaggtctgcaaaggaagtggagaaacctggagagcatgaagccggagcggagaaggcgggcgctgtgaggaggaggcggcgcctaagaagtgccttcccgcagccgcccggctgctcccgggagccgccccgccccctccaggcacctgctaaggcggcagcggcgggttgtgtttctttaacccctggggcctgttgacacagattagtatcgctggtcaggggtcaatagggaaggctcttgaggtcaagacctgaacaactggagttgtaatgagccacgtggggaagaggcccagggagaggagagggccaagaagggaggaggaggagggctgggcttctccgaggaagggcctctagagctcactcgcctgagaggctgtctcctccccgaacctgcctgacttgaggcttggaaaaaaatctggctcactggcctgggtacgggggagatgtcactggctgactagagctggaatcccagctagagaaggacaggggagaaccagcgagaagaaaagcagcaaagagccaccttgcaggacggctgacttgtgcaatgctgtcaggtcagacagcattcccctcctcttcccttccatccctagtaccctgagtgagctctgggtagtggccagacacacccctcttcctccttgagtctttggcagcaccgtgatgtgcccacctgaggcatccccctac

SEQ ID NO: 35042 - DNA, 974 bp, Artificial sequence
  DNA replication origin
aaagagacccccgcccccttcttcctcagctaggcccggggcgagcagatgggctctcaggaggcagacccccccctcccccagccctgaggctgctccaagtggagggtggtcttggctgagggaggaggagagccgaggccccgtgaggggcggctcctcactccacagacacatgtggttggacttaaaaagctattagggagcaaggcactggcgggagtgcggccggccctcgcaccagaggcagggggagggcagatgccgaggcggtgagctcagcactgccctccctggcggggcccccggatgcaagaaggactcgggggaccctcaccctgcgggagagtggggcaggccctcggggaagggcaggcaggctgctgggcctgggtccaggcacagattctgggaagcttagcaatctgaagactctaggcctgtgggggccaacctctaagtgggagggaggagtggggagggggggagggttgtgcctggcgcttggatggggcccaggagggcacagacaggtcctcggctttcctccagctttcttggggtgacagccggcgggaggtctcctaaagggtgtgtgtgtttggtgaggctggaaaggggggattattaggagagcgggggagagagagaaggaagggaaaagtgggccccacccatcacgaggccagaaagaaccgacggaaagttctctagagccgccagcttgtaaaaagctccttttctttccaaattatgaacattttttaacaagagggggggaaaaccccccaaagcagtgatctaggacttcattaggactgtgtgtgtctctgtgtgtgactgtggctggtgactgaagggtgtgcatctgctgacattcgaaagtgttctccaaaagctgggccatccctccttggtccccctacccccgccctcctcaggtctgctattttcagggctctaggcaccaacca

SEQ ID NO: 35043 - DNA, 943 bp, Artificial sequence
  DNA replication origin
ggaaaatatatatatatatattaaaaacatgcatccgggcacggtggctcacgcctgtaatcccagcactttgggaggctgagacgggcggatcaccaggtcaggagatcgagaccatcctggctaacactgtgaaaccctgtctcttctaaaaatacaaaaaattagctggtcctggtgacaggtgcctgtagttcccagtactcgggaggctgaggcaggagaatggcgtgaacccaggaggtggggcttgcagtgagccgagatcgcaccactgcactccagcctgggtgacagagcaagactccatctcaaaaaaaaaacaaaaacaaaaacaaaaaacaaaaacatgctgtcagttggagtttatgtgcaatcccaggctcctcctggctgctggagcttcccctccagagctctactgaagaggcagtgtcctcttggaaacacgcacaagcacacgtgcctgcaaacagcagaaggaagaggggggtgctgaagaggtgagggggaggcaaaggaaggacagagggaggggagccaagggagacagggaagtaagatcagaaatggggatccaaggggaaaggcagctgaataaaagaagtaaggtggggacttgttccaggggctgagaaggggagctggtgtgggtgtgagaagggcaattttgcaggagaactttgtggctgttccagaggttactgaggggcccccaaggaagagaggggcccagagtggccacttggctcagcctggctctggtctgggcactgccagaggcctccagcccacaagctgttgttgctgtggaatgaccagtggtgtgcagatgaatacagagtggccccagaacctggagccaaatcccgtttcaaaggcttcttcagcagagcccacttgggcccatgcggagggagtccagtcttattgcctgctcctt

SEQ ID NO: 35044 - DNA, 972 bp, Artificial sequence
  DNA replication origin
gggcgaggggaagcagcagcacccactctatcccatctccaaccagtatctccagggagcgctgggagccacagtccctgaagagactgggagggtggttgggtggccctgaacttgggggtgcacagttagtgtccccactggctggcaagcaggctggaaagaagcctgaggccagaaaggcttccaggggacatggccccagaagactggggaatcagagagacagtcctcgggggtgtcggccgatgacagaggataaaagatgaaagatggagcccggcacctgcccgcgttgtgccagccaacactgtccctgcccctccactggcccataggccaccagctggcccattgtccccagtgagagagcagacactggagggggctcccttgtgggcaggggctcactcatgtacgcctgcctggcagggactgccagggcagagccaccccgggctcaggggcgaggaggaaagaagtgggggtggccaagagacagagcgtggagactgagtgggaggcccggccagagtccgggaggctgccctccaccttcagagtggagaacagagccctgctgtgctgcagtcaggtcccctcctgtggtgttggcagtgggcagtgtgcggggcctgcgaacaggagataaagaattcaggcagagtgttttttctcactaaccgtggatttgtgtatttgttcagctggtggctctgataagccccattctgccagataaaagcagagcagccacgaggcagggcctggggaggggcatcctaaaggggccttcctcctttctgtcccaaatcccagggttatcccctcccccggggaagcccagacagggaaggcagtcacgacatggagatgctctgcagctcctgtcacctgtccagagcaggtgtagacctcaaggcaaggctccccaaagagcctgccaggtaagaaagctggcccacgttgtgc

SEQ ID NO: 35045 - DNA, 896 bp, Artificial sequence
  DNA replication origin
tctggtggggaccatcctgtgcactgtggggtatctgagcagcatccctggcctccacccactagatgacagtagcaccccagttgtgacaacccaaactgtcccaagacattgtccactgtgcccttaagggcaaagtcaccctcaggtaagaagcaccggccaagagtcaggagcaaagaggggtcccaagagagaagtcagagaccatctctctccacagcggggacagacccaagggtcccccatcccccacccagctccagctcccagaggagcatccccttccctaacttggttaattgaagccattcctgtctgcctgcgcctcccccacctcacctttatgctcagaggcagtgcctggcaacccagaggggggaggtctgccctgacgctgtcgcccgctctgtgccagcctgtctgggctgtctcatgccccggtgccacagctgctcagagggagccccgagacaagggctcattgtgcagtgggagctcacagagggctgggggcagggtggagtgtgtgtgtgaatattttgctgagcttgggaaagccccccaccctggtccccctggtcctcaaagctttgtgtgccaggggcacaacggggacctccagaatgcctgcctgggcatgacagctggcgagagggtggtggaggggggccaggcaggttgtggggcaggaggaagccaggcatttggtgaagaatcagctgctcacagggggaccacatgggggtggcatctgaaaaacgtgccttggtattggccagggctttgcccgactttaaagagcattcctgcctcctgggtctcgccaccaccctgattcaacctgctggcccccaccataaaggaggttcacaaaaggtgacatcagccctagg

SEQ ID NO: 35046 - DNA, 1114 bp, Artificial sequence
  DNA replication origin
ctgggagagaggagccggcaggaaggcagagcagaaggctgtgccttcccgctcacagctggcaggacaaaaggagaactgggccagagttggggaggactcgggacaggcttgtgttgtatgtagcacccatgcacgtgaggagtgagaagtgggaggttgctcaggagccaggtgggcagcccaggggcccggcctggtcctcgatgaggtgctacgtgaagcaggggccggctcccatgcccacccgctgctgcaccttggcccacttggagagcgtggggctgtcactcggggtcagctctggccccttcacctggccagctgcccctagatactcagccacctccccaactgcccccctccggggccccccatttctcacctggtctgactccagcaagcacaggcagcgggtggtgggtgaaagccatgcgcggggagctgccctgagaggagagggcactgcagaagtccagctttcctgacttctttagagaagccgggcctggggggaggaagcagcaacacagggcaggtttagctgggctggggtgggtgcggggaaggcgggaagccagcagctcgctccttctctcctcagcccctccccactgccccttcctccactgtgctccctcctgctgctccttgcccagtcccaggccttgttctaggcctggttccgaggccctgtgtgtaggccagccaaggggtgcttctaaccagagaggaaaacgaggcccctgggtaatgtggggtggtgtgtgccaggcagggggtgagcaagggccccagcctatgccctggcaagcaggtaatgaagtgaaagggtgggatgcaggaccaacattgggaaaggagtgcaggaggaaccccagggcgccagcttgagagccgggaaggggtaagtttgggagggacaggctggggtctatgccatggtgcccggggccatgggaggttctggtgggaagaagccagggccccgtttagggaagggagcacacagccatgagccctcaggagggacacaatgcccagcgagagagcagggacagaggccagaggacctggagagtccttgggctgctcaggcctagccgggctgtgc

SEQ ID NO: 35047 - DNA, 1526 bp, Artificial sequence
  DNA replication origin
gccttgaatgcccaactgaggagattggacttcatgttgggtatagctggggccgtggaaggtttcagaggactggagaaacctgagctgatgtggatttgggggagaggattgatgagcctggtggaaagaatcctagcatccctggagtagtcaggcagacatggctgtgaattccaggtctggccagttgcagctgggtgacttaggataaaccatttaatggcccagagcctcagtttcctcagttgtgaaataaagagaatagagcttcctttgtggcaaggcttcccagggcaggcctgttaatgcttggactgatgatcctttgttgttggggctgtcctgtgcaccgcaggatgtcgaggagcatcctggcctccacccagcccctccagcctctttgttgtgacaactgaaagtgtctccagacattgccagtgtctccttgagggggacagaattacccctgggtgagaactgatgctttctggggtgggtcaggggttacacaacagaactaaagcacctggtccagggctggacactgagggtcctgagctgataagcacagtctcagcacaggggagccccatacaccagctcattgtcatcgtccagctgaaatctgtgaggacagaacgaggcactggctggagacatcaaggggatgggctcctcagggcttgctcaccgataggaggaggagcacacagcatcctctctgggtctcgcatccgggtgcccggaagggcggaactctatcccacaggagaggtgctggtttaggatgaagagcgcaggccaggccttcctgagcccacgctgcagtggtcatcagggtcctgttcagagcagcaggaggtgtgtgcccaaacctccagggaggtctctccaaggaacctgcctgggagaggcaggggcgcctctgtctgtcctttggcacctgtgtgtcctgaagccagaaggccaacccacgcaaggccatgcacagggcctggaggagaaaatccagttagaagcaaatgagggcataaaggacaaggaatgcatcctggcagccgagcatccatggcgtctgagggcgttgtacagggaagtcctcctgaagaacctcacgggcactagagctggcagcgatggattttcttccctggccattcttgagagaacaggtcagcaccctaccacccacaggcagtgaggacccaggctgctggagccgaggacgagctccccaacttctggtggcctcctgaggacatgttgtggggtgggtgctggcaggcctgccgtccttggttaggtgaaccagctcagcccgacagccctcagagggaggcaggcatgtgctttggggagccgggggagcagggtgagcgcgctcatctttcctgctgtaggagatggtcttcaggagtgtgagagttctaggtacagctgcacgtatttgctaggtggcacattttggtacctaaaacattttccctaagaagtaacaaaccacccgtcgaacaccccctccc

SEQ ID NO: 35048 - DNA, 908 bp, Artificial sequence
  DNA replication origin
gagagagatgaagtaagccaaagcccacagccctccctcgtccttggaacatctaacctgggaaaggaattgcggagaagggacgggagagggatggaagggggggaaaaaaaaagaggaacaacgagaaaccaaatgtgagactgagggggaaggggtcgggctggcctgctgcgtctttgaggcccaagggcccagggatggaggtgaggggcaaggcaaaaaggggatggtggtggcgtcgccttgtggttacatttgattttcttggtgtggggggaacaacgaaacaacaaaaaaattaaaaaacaaaaacaaaaaacaaaaaaaaaaaaacagcaatcaggcatgaagatggcatggctgtgcctccccgccccctcccacccccgccagcacccctggcctgcgcgccccagctgtgctctccctcccgccccccagaggggcctgggccaggggccccggctgggagcagcgggcagggggctcgtggggtgctggctggtgcgactgaggcccgggagggaggctgtggttggggggctcggctctgctcttgtccatggtgctctgggttggggggctttggtggtggggagggggaaggcttttctttttgcagtggagactgtttggacgggccggggacgctgggcgttgtggtttcggtttcatcgtccacttacaaggtgatggaggagtcaaggcggcgccgtctggggcagtgctggtggatttggaatcaggcataggaaggggcacaggtctggccactggaggcggcggcggtagcaaaaatgaccccgggactttgccctggccgctaccgttgggctgcgaacaacataaatagagtgacgcatgaaggcacatcacacacagacacacgctcccctgcgcggccg

SEQ ID NO: 35049 - DNA, 1741 bp, Artificial sequence
  DNA replication origin
gagagggagagactgagttagaccatgctgcccgagtttaggctggcagtgggaaggatgggccagaggggcatctgagctgaaggccaggctccgagcctgccccccactacagagggacaccctcatcctctcactgaccaggaacacacactacacccccgacacacacccactcagaagccacagtctcagccaggcatcctttttcacagctgggatgagggagaggccctggaggctgagacaagtctcctggacccagttccacccgctagtgaggcactgggcagggctggggatagccctggtccccaggtaccctcagtggataaccctgctttcccactggcccctctcaggtactgaagagagggggccaggggagggtggaggctttggcagtccggccccaccctgcttcgggaaggccttcccagccaggctacctctccaacctgggtggcctagctagatgctacacctcttaccactctgggcaggcccaaggaccaggcaggcaggcttggggaacccaaagggtgcccaatggaggtctgagccaggtagggcagggtcagagaagggcctaggagctggctgcctggcttgggcccagggggtggcaaggctcaggcctatggcattctcctcctctgactgatgcaccaggtccaacaggcctgtggttccaggaccaaggcaatagaggaggaggaggctggagagcctggcagagccctagggctcagatgcctgggagcagccatcctggggcccaaagacaaaatgatctcaacagccctgagttcctctcaggttgtccagatggagccctgctggagggaacaggccctgcacccccagaagggaagatgcccccagaggaggcaaggagtgtcacaggttacctggaaggcccgccgctgccctgcaccagacacacccagggactccatgctcaccagattctgcccacctctctccagaagtggcccccgaaccctgtagcccagctcccatcccccaccctgcccacctccaatgactgtgacttcatgtcttatggtggatgcagatgggaagatggcatgaagaggatggagaggggaaaagaactcaaaccacgagaaaggaggagagacaaagcgagcggagagcagtgtgagatgggccacccctcccaccgccaccgaactgccctggcctgtggcctgcccacccccagagctgcccaccctggcccacagacagcacccgccccatcctcctgtccttcacgccgggtctacctgggacctctcgaatgatttttcttcttttccctttgacaaaatttgtcattggtttaagaggaaaaaaaaagaaaagaaaagaaaagaaagagagacagagagagagatgaagtaagccaaagcccacagccctccctcgtccttggaacatctaacctgggaaaggaattgcggagaagggacgggagagggatggaagggggggaaaaaaaaagaggaacaacgagaaaccaaatgtgagactgagggggaaggggtcgggctggcctgctgcgtctttgaggcccaagggcccagggatggaggtgaggggcaaggcaaaaaggggatggtggtggcgtcgccttgtggttacatttgattttcttggtgtggggggaacaacgaaacaacaaaaaaattaaaaaacaaaaacaaaaaacaaaaaaaaaaaaacagcaatcagg

SEQ ID NO: 35050 - DNA, 1706 bp, Artificial sequence
  DNA replication origin
ctccagcccctgctcggagccattgtttttcttctcagcacccccaagttcaagttcatctgggtgttacatcatgtctggttgctcctggaaaccagacgggtcagacgtgactctggggaaagggggtgggaagctggagggggttgaagttctcttcccctcccctccttgccactagggagctctgaagtttgaagtttgacaaagttttttggcttttttttttttttttttttgagggaaggaaaggaaaagaaaaaaaaaaaaacaatctcaaaccacacacacaacttccatccaccaactttctctggactcaggccccagaacagaggcagagcaggagatgagaggtggccccaggggctcttgagagaggtggatttccccgggctgaggacacctccaaggtggtgtttttgtaaaatgtgcaaaagaaagatctttgcatgttctttttcaaaaccctgggtggtaaaagcctcaggccccctaaagctgcctctgtcctcctcctgagatgggtcttccctgtgcccccaagggcactgggctctgtgggcactggcctctggggtctccacctggagggctaagagtagtcttatgccctgcttgtgacggggatctgtctcctggtgagaactaagggtggtgtcagcaggggataggagcaaggatgaggtctccagcatgctggccttctccctaacaggactcctggagacttgggtgaggggcctctagggtggcggcctgccctgccctgccctcagtgccagttctgggcacgcagcccaccaggccctctgtccctcctccacccgtcacccagcccacccaacgccaggggaaaggggagggctaggggccggggcttccagtcggggcaggtgaaagcagtgaggcagactctattctcctcccgatgggcctcaggcttccatctttgcttctaccaggcctggcccagagggcctctagacttgggtccttggccgccttccccagggccagggctgtcagagctaattatccaattagctgattagccagggagcctgggggctgcctggggagacaggctcagctgggcgtgcaaaagcctgggccctccagccccacctcagacctctctctccctgttagccccaaggactccaggctcttccctaacaccaagatgccccccaaccctgactactcccctggtccctgcatccaggtggtgggcagggtctcctacctgagactgctgtgggatgttcagaaagttgccgtcccggggtccgatgctgacaaaccggttggcagaggaggcgcctgtcgttgcgaatgctgtggggagcaggggagagagggagagaccctgtcaggccttggggcccacctgggcactgcccctcggggctgctgagagagggagagactgagttagaccatgctgcccgagtttaggctggcagtgggaaggatgggccagaggggcatctgagctgaaggccaggctccgagcctgccccccactacagagggacaccctcatcctctcactgaccaggaacacacactacacccccgacacacacccactcagaagccacagtctcagccaggcatcctttttcacagctgggatgagggagaggccctggaggctgagacaagtctcctggacccagttccacccgctagtgaggcac

SEQ ID NO: 35051 - DNA, 1315 bp, Artificial sequence
  DNA replication origin
ggcacagggaagacccatctcaggaggaggacagaggcagctttagggggcctgaggcttttaccacccagggttttgaaaaagaacatgcaaagatctttcttttgcacattttacaaaaacaccaccttggaggtgtcctcagcccggggaaatccacctctctcaagagcccctggggccacctctcatctcctgctctgcctctgttctggggcctgagtccagagaaagttggtggatggaagttgtgtgtgtggtttgagattgtttttttttttttcttttcctttccttccctcaaaaaaaaaaaaaaaaaaaagccaaaaaactttgtcaaacttcaaacttcagagctccctagtggcaaggaggggaggggaagagaacttcaaccccctccagcttcccaccccctttccccagagtcacgtctgacccgtctggtttccaggagcaaccagacatgatgtaacacccagatgaacttgaacttgggggtgctgagaagaaaaacaatggctccgagcaggggctggagccagccccctctgctctgtgccagggaggccgagagagccctgctggcagaggcgggagggggtgcgagaggaagggacagcaggcgggcctcccctcccagctctgggctggcaccaggcttcagggttccatcgctccctccctcctgctgcctgcctgggctgctcacagctctgcggtcgtgcgctccgaggaccactgccacgagccgtccctgctaaccctgtttccgctgcctcctttactttctttgctcactttgcttggacgtttgggggccaagtcagagtttagggaaagtttgtctccccccatgttccctgtgtcttaggctccaggaggtaggaggaaggagtcccagcgggggtccagggcccctgagcaggcaggtgtgtctgggagtggttgggggagcggaagctggacaagcggagctggagccctcgggcctgggggcaggcaggcggctgcaacgggcgggcgcagggggtacagccgggggtggtttccacagtaaccagtgactttagctgatctctggagcaccagatggagagagaacaatagaatgagggaagaaaagagaattttagcaattttgtcattccctgggcagcgctttttacttagttttaatcaattttggacctggctcaggaagtagggaggggtgagcagagaaagccactctgtgcttggcagcagatcccccatttctgggacctgtggggaggtgccggggagcccccttggggcagcctttgtccctaac

SEQ ID NO: 35052 - DNA, 1188 bp, Artificial sequence
  DNA replication origin
cagggcagtctgcatgaggggcaggggcaggaactgatggggcggagcgagggcacctgcatgcagggctgggggcgggggcgacctggggcccgactcccctccctcgtggcaggaaggaggccctcctggcctgcagagagaggggaaagggggcctgtcccaggctgggacgaggccgtcgagagcattccgactttttcctacggactgtacagaggggtccagggccccaggactgctcttgcggctcagggtggggtgtcagaacaccctccattctgggacacgcaactagctccaggggtcaccccctgcccgcctgggggcttttagcccaagggtggggtggggtaagtggaggctgctctccccctcctggtcgggagcagctgggggaagaagctggagccttggcagagagggagggagggagggagggagggaagggcggagtctggaggggagagcctgagggatctaaaccccatcatctttacaagctggccctccaggctccctagggcagctccggctgtgtggagggtggggttcccctaggaaggggtgagggtggaggccaggccccttcagaattgtgctggttgctttgtttggggactttgttccttccccagaaggccggggcggggtcagggggaggaaggcagttctgcatcctttcttgctttctgtcctctacttgacagagtccatgtcgcgtgtttctttctgcttggctgctggtgcacagctccaccgagaccccttccaagggctctctgagaactgggctgcttctggggcccgcgggggtccccgggctggaggagagaagggctgagtggctgacgacgtgtaatttttgcttttcggtggggctgggctgggctgggggatttttccattctcaaaatttcttctcccccctttcgaggaacctcttcttctcattttgttgtttcttttgtcgatcttatcagaggaaccaggactgaaacaggatgaaaaagaggcgatactgagaacagctggggcaggtcccatctcactcctacctggcccagtgacctggcccctcaagggtccagctcccaaagagccagggtgccgggcagccaccacccaccttgttcccatggagaagaaagggcatccccattctctccctccctcctgcgagaaccc

SEQ ID NO: 35053 - DNA, 1266 bp, Artificial sequence
  DNA replication origin
tctgccaaggctccagcttcttcccccagctgctcccgaccaggagggggagagcagcctccacttaccccaccccacccttgggctaaaagcccccaggcgggcagggggtgacccctggagctagttgcgtgtcccagaatggagggtgttctgacaccccaccctgagccgcaagagcagtcctggggccctggacccctctgtacagtccgtaggaaaaagtcggaatgctctcgacggcctcgtcccagcctgggacaggccccctttcccctctctctgcaggccaggagggcctccttcctgccacgagggaggggagtcgggccccaggtcgcccccgcccccagccctgcatgcaggtgccctcgctccgccccatcagttcctgcccctgcccctcatgcagactgccctgctggggccgggccggagggtggagcagaaaggggaccccggagccgagcgaggaggaccaggcagccgccgctgccgcgctaagccaccacctgcgcttaggtaggcgtcctgctcgccgactttcagttccttgggagggtgttgggtgtcgtccttttcaaaagtgttttggagctttctgtgccccccgactttcccccgcctccccgccccccacgtggccacttttctctggattttagctgtaatgtctttactctttatttaggggtggggcattcattgtttgggtcttttgctgttggaatgggaactcctcctccatttgagcaacttgggaacaatttggtaacacaccacaggaagtagctctcccccccagccccctcctccctcaagggagggttggggggcctgtccagagggtcttcagaagcccccctgggagggaggggaggatgagcacgcccagctcccctccagggtgtgacttggcccctctggcttgtctttctgtgccttactcctcctcctgcgtctcccgttcctggccccttcttgagtccttgtgcctctctctttctctctctttcttaattgtatgaaaacacaaagcacaggtcaggatcctctgagagaaaatcaacattgcaccacgtaggggtgggctatgggctgtatttattgtgaatctagtttgtgaggctgtggccccgagctggcggagggagggaagaggagggagtgacgggaggggaggaggtcagcgacctggggccgtagcggcaggcgaacggtgcctgctacccagctggaagccacaaggtggctggctccaggggc

SEQ ID NO: 35054 - DNA, 790 bp, Artificial sequence
  DNA replication origin
aaagtgcaatgatttttcagttcggttggctaaacagggtcagagctgagagcgaagcagaaggggctccctgtccggcccacgtgccctttccctcgacgacagtcgagggctcgggctctgtgggactgtgggagctagggtctgcggggcgcctgcccgggcgaggtcggaagctgcaggccagctgggcccgggccggagcgtgcccggcggggctgcccgggcgggcagggggtgggggctgctcctttcccaagtggtgttgtgaggggcaatgagggcaacaggagatgtggggacgtgttaggagagaaaaaaaaaaaaacaaaaatatatatgggggaaattaacttttttttttcattgaaccaagtgcaatgcatcagagagttttcctatctttgtatgttaagagattaagaaaaaaaaattctatttttgttgtaatgtcctcgcggctctggggacgctaaaagaaccgggcctgccccgccctgcgcggggataacgaaagctgagtgtttttcccttttttttgttcgtttttagtttttttttttttaagtcgttttcctgcgttgacgaggatgatctggggtttttatttgtttcgtcgttcgttctgtttcggtgggagggctgaaggaaacgttcacattttagagtttaaaaaaaacacctcgacatttaaaaaatcaaccaacacaagatcaaaaaggaaaaggacgagagaaaaattatttttaagataattaaacataaaaccctggtgcttcttacattataa

SEQ ID NO: 35055 - DNA, 912 bp, Artificial sequence
  DNA replication origin
tcttatgtatctcagtgcagagacgggggtggagggcagagaagagggggagaccaggctgaaggaggaggagcagagggagggggacgctaagggggaagcacaccaaatccattagtactatatatagagatactcgtatatactgcgtttcttagcctaagaagaaacttgtttgacgggacgggcggcctttgcggtccgcgatgctggtgctggtcgggcgcacggatctcccgggaggggccgaagcggggctggcccaggctggcttgcggggggaggggggcgccccgagggtgggtggggtgggggggagcagaggcggggctggggtgcccctcgggctctcgattgggggacgaaagttctcgtgactttattgctcctttattttctctcgtgtgggggggtctgttcagcacggtcagggtgggggagtggtgggtcgtctgagccacccggcccctctgggacccagagcgcggcgtccgctccgccagcacgggggtgagaacaaggcactaggtcggccggccagcgcgggggcgggtgtataaggcagtcgacagggctggttgcggggtggggcggggctgtgtgcggggccgtgtgcgtgcgtgcgtgcgggcgcgggcctgggcaaatcgacctgtcagcgtggctggtcctgtcctggagcgtcgagccttcccggtgttccccggagggggtcggggataggatgagagatgttgaatgggggcgggaggggcgccgggaaaggggggaggaaactaccaacttgctgagcgcgctcctgataatgctggtgagggtcaagttggcgtctggctcaaagaagggcgctcggggcggagagggagggagggaggggacgtttgttcgttggcattgacctctgcgggggag

SEQ ID NO: 35056 - DNA, 1314 bp, Artificial sequence
  DNA replication origin
cacagggcaccagccccagaaggtggcccggcgcgtgttcaccaacagccgggagcgctggcggcagcagaacgttaacggcgccttcgccgagctgaggaagctgctgccgacgcacccgcccgaccggaagctgagcaagaacgaggtgctccgcctagccatgaagtacatcggcttcctggtgcggctgctgcgcgaccaagccgcagctctggccgcaggccccacccctcccgggcctcgcaaacggccggtgcaccgggtcccagacgacggcgcccgccggggatccggacgcagggccgaggcggcagcgcgctcgcagcccgcgcccccggccgaccccgacggcagccccggtggagcggcccggcccatcaagatggagcaaaccgctttgagcccagaggtgcggtgaccgcacgcggcagcacctctgagccggagggcaccagggactcggcccagggccgtcaaggaaagggcagtggacgtgctgcgcatgttcgggagcgaactcccccgaagaaggaccagtgaagacgtcaggggcaaggtctcgggggtccggaagggtgatcatcgacccccaagggacccgcagacccttaaaaaaatcacccacaaccctctggaagtggccttgcccggtccccttcccaggggcgaggtcggcaaagcaacatggcagagcagtcataggacccaagtggtgcctcattttttccgggctggggtcgcggggggaggccaggaggggctggggaggcttcgcttttctcaccgtcggcccctccgggagacccaggggcagacgctcgtcgacggcgtctgctgcgctcccggcgcttggacagaggcgcagaatccaagtcggggacgcaccctaccgaccccgacccagtcccgcacggtcgcgttagcgaagggtcaggcgctctcgcgtttgtttttctttatttctttatttcacatacacattagccattcaatggagaagccggagagagtcaggcaaagatggtataacagaagcgcagtgacgggggcggggcggggcggggcggagagggaacagacgggctggctgcctacttgcattccgctaggacactgaaaacccagaaaacaaaacagacagtaaactacccttgtttcttatgtatctcagtgcagagacgggggtggagggcagagaagagggggagaccaggctgaaggaggaggagcagagggagggggacgctaagggggaagcacaccaaatccattagtactatatatagagatactcgtatatactgcgtttct

SEQ ID NO: 35057 - DNA, 1222 bp, Artificial sequence
  DNA replication origin
gagcacctcgttcttgctcagcttccggtcgggcgggtgcgtcggcagcagcttcctcagctcggcgaaggcgccgttaacgttctgctgccgccagcgctcccggctgttggtgaacacgcgccgggccaccttctggggctggtgccctgtggacaaggagggccgggttggtgccatggcccaaagggcggcccctcctgccctcccgctagacacgcagcaccctcgtgggaacttaaacccaggccatgggctggggctttctccacccaaggggtccacgggcagctctccccacccctcccaagagccatccagacaagaatcatcacaggcccggcctacggacaagggcctgctgtatctgtgactatgggcacctttatgtcaatgactgagattccctaaagaaagatttccttgtgtttgtttggtctgggaagctgtccgtggggccctcattctgattgtgcccaagtacggctggctgggtgtactcatgggtctgagaggtcctctcattatgactgtctgtgtcctgtgtcttgtatgactgtgtgagactcttgttatgtctcatggctgtggttatgtgtgatgttgccatgtggctgtttcacgagtggctgtggttgtgtggctgactcttgtgtggccgtggtcctaagtggctgtggtcctgtggctgtcttgtgtgtggttgtggtcctgtggctgtctcttgcatggctgtggtcttgtggctgtcttgcgtggctgcacattccagtggagctgtcattttgtggctcccatgccctggtgtggcatgctctgttttgccgtgactgcggctacatggcttggcctgttgggtggcggtggttgtgtggggctggctatgggactgcgattttgcacatgggtagaacctatgtgggctgttctctgtgtgtgctggaagcacgtctccccgaggtggagtagaggacagacatgagccccacacagagacggccaggccttctgtgcacccacaagtgcacatacaggcatacaaacccacaaggcacacaaacccacactcaccctcagccaggtccagctcacagtggcttggtctccgcttcaaccggctgctagggaagatgctaaaaggtcctgctggcccaatgtagacactgtaaggggtcgtgggtcactaatgccttgtgggcaaggaccctggcccccaatcccc

SEQ ID NO: 35058 - DNA, 1272 bp, Artificial sequence
  DNA replication origin
gcctgcattcctttgttcattccttcattcattcattcaccagcagggacccactagtgaggggccaggcctgcttccccagggcctagctgaggaagacagggcagaggggccaacagtctcacaccttgctgggacatcctggactctggaaccaagagcaaacagggatgtcaaaacagtatgcaaaactgtggatgatcgcggggcattgtggtgcatgcctgtaatcccagcactttgggaggctgaggcaggaggatcacttgagcccaggagttccagaccaccctggacaacagagtgagaacctgcctctacaaaaaaaatttttttttttaaattagccgggcatggtggcacatgcctgtactctcagctactcaggaggctgagacaggaggatggctcgagcccaggaatttgaggctgcagtgcactatgattgcaccactgcactccagcctggacaacagagggagaccctgtctctaaaaaaataaacaaattttaaaaagcgtggatgctgatgaggatgggggcttccaagccagagggagggttggggcatgactggactggactgggcagtggggtcagtgtttgggggtctagggtcagcatttgaggtcatagtgtcagtagtggggtcacagggttgctatgggggatgtttgcagtgggagtgggggtcactcaagcaattatggagcactttcagggacagcaatgggaagaaccgcagggtcattcttgaggtgcagagggtcagcctgggtgggggctgggggccttccgtgaagggtcagagtccatcttggagggattccaagctcacatggcatcaatgagttaatgaggagtctctgggttggatctttagatctgaggataacagggttaatcttggggtttctggggatcccaggatcagttaggggctccctgtcttgttccctctccaggctgcagaggtgagggaattctggaagaaggaatatttgctcagaggctgggcaacagcgcccctcctgggtcacaaagagctcagggacagtgcgctgcctagcacctggggggcgcctcctactctaacgtaggacccccctcccgtgtcctggaagtttctgggcctgcccccgccatctgcctttgcctactgaaacttctctcctcctcctttccccctccccctccctccttcccatttgaggggtttcttgagctaagcaggtgggagcggggcacctagtcctcctccccactggctgc

SEQ ID NO: 35059 - DNA, 1199 bp, Artificial sequence
  DNA replication origin
gcgatatcagagttagcgcttaatttttttttttttttttttttttttgaggcaaggtctaggtgtgtggcccaggctggagtgcagtggcgcaatattggctcactgcagcctccacctcccaggctcacgccatcctcccacctcagcctccagagtagcagggactacaggcacgcaccaccacaaccagctaatttttgtattttttgtagagatggggttttgccatgtttcccaggctggtctcaaactcatgagcccaagcaatccgccagcctcagcctcccaaagtgctgggatgacaggcatgagccaccaagcccggcctttactgcataaaactttagttcctgcttctttggaggaaagcaatggaggtgttgatcgtggggtcctgggctccaccccattcctgggcgggggggggggggggttggtagtcctgctgctgggtgcctgcctgcctgggggctcttgcagttgcccagatacacagacgggccaaagcatgagtatcacaagtgggtggcagtctggtagctgctgctgcctggctgtgcccagagcctctccctgtgggaggctccagtagggtcttgaggtttaccaccaagccaggataactgccccccatgaaggggccgggtgctgtggggtgagggccatggaccaccaagttggagttatgtgatcctgtagccaagaggcctatagttgtggggacctgttgggcatctactggaaggtcacaccagccccagcaccctaggaaatccaacttccccaccccacccctgacagccatggctcttcctctcaccctcctgggcttggaaatgtgtggatactgtgctgagggcttgggacacctgcccaggctggacacccaaggccagactgttagaactgttcccctttgggtgccccactcccgggtaggggtggtggagaggagggaagggcctctgtaaaaagaggaaccaggctgggtgaggagaggaggtgggggcccagggtcacgcggccccaacgggccggaaagggctctccctcacccccatcagcacagacattcgggcagggagtgtgcaaagccaaagggcagactcggacataagaggaggcagcttccctgcctcagtttaccccctgcgtgcatccaggcacctccctccccggctgccctggggcccggg

SEQ ID NO: 35060 - DNA, 1117 bp, Artificial sequence
  DNA replication origin
tgaaccaataaagagatgtcacgtcaccttctcccgattgcctgtggtttgtgtattggtccatacagctgcatgactgggatctgttcctctggggatcgttcgcccctgcctggctggagtgttgagtctgtatgggaggtaggagctgaccatctgcacagtggtcggcccctctgcagcgagggtcactgagccaccccagagccggagccagcgattcccgaagcggccacggggcggcagctgtgcgctcgctcccgcgggggttctgcccctcttccccctcccaccttcagcgctctccaggccacgggcttgcgcatagtggggcgctcctgcccggtagcccccacgtgtcttcgcgccgctgcctcctcgccgcctggtttctttggcccagctctccaggggccacagtggcggaagctggaccggaaccaggcgccctgtgcatccgctccagaccaggtgcttcctgccctgaggcccggggcgaggggggcgtgcacacaaagagggacctcgcaggctgctgcccagacacccagtgagggggagctgtacccctccctgccctccagagtggggtttagtaacgttaacgaagagtcctggggcaggatcccctctctggctcctgctcccttcatccccatctgtaatgaggctaatcttaggaccctccttgtagcgatatcagagttagcgcttaatttttttttttttttttttttttttgaggcaaggtctaggtgtgtggcccaggctggagtgcagtggcgcaatattggctcactgcagcctccacctcccaggctcacgccatcctcccacctcagcctccagagtagcagggactacaggcacgcaccaccacaaccagctaatttttgtattttttgtagagatggggttttgccatgtttcccaggctggtctcaaactcatgagcccaagcaatccgccagcctcagcctcccaaagtgctgggatgacaggcatgagccaccaagcccggcctttactgcataaaactttagttcctgcttctttggaggaaagcaatggaggtgttgatcgtggggtcctgggctccaccccattcctgggcggg

SEQ ID NO: 35061 - DNA, 1500 bp, Artificial sequence
  DNA replication origin
aaaaaaaaaaaaaattaagcgctaactctgatatcgctacaaggagggtcctaagattagcctcattacagatggggatgaagggagcaggagccagagaggggatcctgccccaggactcttcgttaacgttactaaaccccactctggagggcagggaggggtacagctccccctcactgggtgtctgggcagcagcctgcgaggtccctctttgtgtgcacgcccccctcgccccgggcctcagggcaggaagcacctggtctggagcggatgcacagggcgcctggttccggtccagcttccgccactgtggcccctggagagctgggccaaagaaaccaggcggcgaggaggcagcggcgcgaagacacgtgggggctaccgggcaggagcgccccactatgcgcaagcccgtggcctggagagcgctgaaggtgggagggggaagaggggcagaacccccgcgggagcgagcgcacagctgccgccccgtggccgcttcgggaatcgctggctccggctctggggtggctcagtgaccctcgctgcagaggggccgaccactgtgcagatggtcagctcctacctcccatacagactcaacactccagccaggcaggggcgaacgatccccagaggaacagatcccagtcatgcagctgtatggaccaatacacaaaccacaggcaatcgggagaaggtgacgtgacatctctttattggttcagtctatgcctggcccagcggcagccccaggtccagggggggtctggttggaggtctctggacagtcaggggcagcatcagcagaaaccctgggtgtcggggggctgtgggagtagcagcactggtccccgcgttgacaggtgccctggtgggaagatggtgggtgtgaacccctgcccggagctcagcagcccctgatgggatcctttcctgggatgggaagcccactcccaaacacttgcctggccccagctcccccaattctctccctgttgcccaaaggggagactcatgtgtcctgcagtggaggaaagggaggagggacctcacctccttaaacctcttgcaaggaaatgtcttgagccgggcagcccgctgggccacatcttccggcggctccttccgcttgttctgaagcagcctgcgtctctcctccatagcttcgtcggccgccttgcccctgtgcgaggggaggagtaggtgggaccccatctgccctttaccccttctttccctggctgagccccacccccaccttaccaccactcaccctggccgggcacgaggccggggaccccagttggcctccgggttagcctggaagcgcttgagtcctcgctgtcgggagctggggttggcatcttcccggatggtgaagttggcctgcagcctagggaagcaggggtggggcgttggggctgggggaagctgccacacgagtgtgtccccactccccacagggcctgtccgcctccacaacacagcacgagg

SEQ ID NO: 35062 - DNA, 1210 bp, Artificial sequence
  DNA replication origin
cctgtaatcccagctacttgggaagctgaggcaggagaatcgcttgaacccaggaggtggaagttgcagtgcgccgagaacccaccactgcactccagcctgggtgacacagcgagactctgtctccaaagaaaggaaaaaaaaaatgtgttaatacatctataaactgcttgaaatggtgtcaggcagatacgtcttatatcagtattgttgttgttttagatgtgtggactgagttccacatggtgcttttcctaagtaggaaaattgtgcagtttaataaatgaccaaggccagtgcagtggctcacacttgtaatctcagcactttgggaggccgaggtggatggatcacttgaggtcaggagtttgagaccagcctggccaacatgttgaaaccccatctctactaaaaatacaaaaattagctgggcgtggtggcacatgtctgtagtcccagctactctactcgggaggctgaggcgcgagaattgcttgaactggggaagcggaggttgcagggagccgagatcacaacactgcactccagctggctgacagagcaagactccgactcaaaaataaaataaataaataaataaatgactgagccaggacttgaacttgggaatctggccccggagttcagacccaaaccactgtgctgtacgagttaatatgtgtaggggacagagaaggtacctggcgtgggaggctgaggacctggccctctttgcacccaggatgctgatgtaccagcaccagagggtgtcggagaggtttgacgtcatcgatctggacccctatggcagcccagccaccttcctggatgcagctgtgcaggctgtgagtgaaggaggtgaggtggggatggcactggggtgggagcagggcttggggtgttggagggttctcactgcccagcccctctctgcagggttgctgtgtgtgacctgcacagacatggcggtgttggcggggaacagcggggagacgtgctacagcaagtacggggccatggccctcaagagccgggcctgccacgagatggtgaggggccctctgccagccagccagggagaccgggggacaggtggttgtctgagtcccttcccaatacactttccccctcctcagacctgctcagcttcctccaggctgatggccagatgcatcccaggctgttaacgacaggcgtgtcttcaacccac

SEQ ID NO: 35063 - DNA, 1452 bp, Artificial sequence
  DNA replication origin
gcgcgccccgggcccaggcccggccccagccgccgctgcggagcccgccgggaccccccggagcgcggccacggcgcaggtgaggcggcccgcctcaggcccggttccggcctcctccagccggggcggcccgagggctgagtggggagggcctgggtgctttctcggaccgaggaggagccgggcccgcagcctgcactgtgcccgggcaggcgagtgtgtggaggcccagctaccgcgggcggccttgagcgtccagcccgagcttcagggcttgggggcggcaggatcgtacctggaccgctcccccgtctcccagcgagggagggggccaggtcgggccggggcaggtaccggggatccggggaagttggagggtccgaggcggaaaagtgaggaggttctcgtggatgccggagggggagggggagggggaggaggagtcgggctccggccaggccgagtgggggaggagaggagagcggcgcggccggaggggggcggggaggggccgggcctgcaggtaccgcctgggcgctggaggaggtgggtgggtcaagttacaggcctgggggcggctgaggagaagcccaggaagtggggcacggcgggtgtgggcggagttacttcgtgtgggggcggataggagatcccagagatgttttccgggggtcacatgaggtcaggactcagatgtggggagggggaggctagatgtgggggcgatcaggtaaggtgagggactgctgtaggagttttgggagtcgagagagcagagccttttgggctaggctaggggggatgtgggggcaggtcaggaaaagctggtgtgaccagaaggtatatactaagatgcgccccccaccgcccccaactcaagtgttaaggggttccgtctttctcacacctcatccctgaagcctctagagtcctgaccctaccccttgggcaagcctctgccaactgttcaaaggcactggccagtgggtgtttgtgtgggcagctggagacagtctggaacacctagcttaggcatcttgtttatcacaaggtggcccttgcccacccccaccttatatatctacagggaggcagcccagcagacgttacctgggtattttaggatcctgcattctttctctaccttttgtggccagaagctggtggttcaagcctagtggatgggacctcacagcaaccatcgtatatattagtaccatggcctcccaggcaccaactccttgagcctgagttctgtgtgccatctccctgggggtgaagaattagagggaatgagcatgtaaaactctgttgatggtggtttggaggctcccgacggggtgaaggcagggcacagagaagagttaaggggatcaaatcaggcactcacaccctggcccagggatctacctctgggacactcgtcctgggccaggccctgtgccgagctcg

SEQ ID NO: 35064 - DNA, 2055 bp, Artificial sequence
  DNA replication origin
ttgtggtaggagccagggctgtcgctggtgtaggcgcttgaggtgcctgggctggtccgctccgacgtgctgggcccactcaccacaccccctgctgctgccaccccaccggctggctgccctgctcccgcagccacggcgggctgggctgctgccaccaccggagcctgttggggtggcgggggctggtgaggccggttggcagccaggtccggcgtggagaacttggccatcttgcggctgccattgccgccgcccccagcctccttctggccactgtcccacagccgcttggccacgggcatgcactgcacggagtccgactcctgctgctccgtcttcacccgcgacacgaggggcagcggggtgctacaggctggccagcccgatgtctgcgccacggggctctggggctccgacgatggggcctcctccgcatgcaggccctgggagtcgcagctcggggagctcaccttgaggaagaactcggtgcccttctccatgatctcctggatctgcaggaagccagccgtgtacatgagcaggaactggtcgcccacgttcatgctcagccggcccgtgtagcagaagctgaggatctgctggaaagactggggctgcacagccgccggcagctccaccacggcgctgcggctgttgttgaacaggtcccggaagtaggagctgctggcagcaagcacggcccggtgggccttgaaggcatggcccttgaccaccactgacacgtcacagtacaggccctgcagccgctgttcattgaggcactccaggatgctgttgccgaagttcgggatctccatctgcagtgtctgggccatggcagcggctgcacgaggggcagggaggaatggagagacagagacggagggacggggtcaggcggcaaatgtgggtgctggcctagccctggccccaaagacctcccctgctggagggacatccgcacgatggaatctaccatggtgctaaaccacacagagccctctaccctatctgtcctggtacagactcacttttacaatatgtggtcaaatctgctaagctagctgcagaccagggtggccacacgctatcccttgcaaagaggagggggcaaaggcatacttattcatatgtacttgaagagtaactgaatatgcttaagtgctcggaagagtggctaggacacagtgtgctacctctgagtgccagctattgcaagcaccaggtacatatatggtatctcttcagggtactggcatggaaatgccagaaaggcagggtcatctgactgtgcagcagagtctgcagtgctgggcacatgcccttcaatcactgtttgtataatgactaaatgaccactcaagaaattacatgaggtcaggcgcagtggctcactcatgtaatctcagcactttgggaggctgaggcaggcggatcacttgaggccaggagttcgagaccagcttggccaacgtggcaaaaccctgtctaccaaaaatacaaaaattagccaggtaaggtggtgtgggtatgtagtcccagctactagggaggctgaagccagataattacttgaacccaggagacagaggttgcagtgagccgagattgtggcactgcacttcagcctggggcatagagtaagactgtctcaaaaaaaaaaaaggaaaaagaaattgcatgaggctgggtgcagtggctcatgcctgtaatcccagcactttgggagggcaaggcgtgtggatcacttgagcctaggagattgagaccagcctgggcagcatggtgaaaccctgcctcttacgaaaaatacaaaaattaccccggcatggtggagcacacctgtggtcccagctactagggagggtgtggtggggggtggatctgttgttgagcccaggtcaaggctgcagtgagctgtgattgcgccactatactccagcctgggatacagacagagacactgtctcaaaaataaataaataaataaataacttacatgaaaacatctctagtcatcagggaaattagaagaaaacatcatcagggaaa

SEQ ID NO: 35065 - DNA, 2063 bp, Artificial sequence
  DNA replication origin
cctcagcttctgctacacgggccggctgagcatgaacgtgggcgaccagttcctgctcatgtacacggctggcttcctgcagatccaggagatcatggagaagggcaccgagttcttcctcaaggtgagctccccgagctgcgactcccagggcctgcatgcggaggaggccccatcgtcggagccccagagccccgtggcgcagacatcgggctggccagcctgtagcaccccgctgcccctcgtgtcgcgggtgaagacggagcagcaggagtcggactccgtgcagtgcatgcccgtggccaagcggctgtgggacagtggccagaaggaggctgggggcggcggcaatggcagccgcaagatggccaagttctccacgccggacctggctgccaaccggcctcaccagcccccgccaccccaacaggctccggtggtggcagcagcccagcccgccgtggctgcgggagcagggcagccagccggtggggtggcagcagcagggggtgtggtgagtgggcccagcacgtcggagcggaccagcccaggcacctcaagcgcctacaccagcgacagccctggctcctaccacaatgaggaggacgaggaggaggatggtggcgaggagggcatggatgagcagtaccggcagatctgcaacatgtacaccatgtacagcatgatgaacgtcggccagacaggtgaggtgccgtcctgtcccccatcccaccagccacccctgctcctcctgccactcgcgtgccactctctccctgcagccgagaaggtggaggccctcccggagcaggtagcccccgagtcccgaaatcgcatccgggttcggcaagacctggcgtctctcccggctgaacttatcaaccagattgggaaccgctgccaccccaagctctacgacgagggcgacccctctgagaagctggagctggtgacaggtgggccggtctcgccccagatctctcccctccgcagctttggagccggctggcctgggctgggctgggcagctggttaggagcccccagcacctcagtttccctatctgtgctgtagtgttggtaacagccaccctaagggtgggggcgttggtgagatggaggagctgatacagcaaggcctggcctctaggtttctggcttaaggggtcggggcgagcattggctattattgtttggccgcatgggtagattagctacttcccgggctcctgtgaaggccagctactacctaggttaggaatttggacagtcacaggggcgaatgcctgtagtcctagctactcaggaggctgaggtgggaggatcccttgagcccaggaggtcaaggctgcagtgagctgtggtggccactgcactccagcctgggtgacagagtgagacttcatctcttaaaaaaagaagaagaagactgtgtttggtccttgggtcagagtgcctaggtgtgagcctccactccctgttggtcctgctgagcttgggctcatctctagctggtgacagccagcgtgcccacctcacacaggcttgcggcacgactggccacacagcaggcaccccgaggatggtgaagcaaccctttctgtcctttcctgagcactgatgaggttgggggagccccaaggagcctcccctgactgcccttggtgggtagagatgtaggggagaaggtccctgggtgagttttcttgggacccagagcccagcagggagggcctggggtgttctgagatgaggcctggtatcatgggggctgtggcggtttgggggcaccccaggccatcctccggcttcctctcaccaggcaccaacgtgtacatcacaagggcgcagctgatgaactgccacgtcagcgcaggcacgcggcacaaggtcctactgcggcggctcctggcctccttctttgaccggtaaggcccttgccagagccccagggaggggggtggggtttccccatgtcccccccaccaccaacttgagcgctgactccctccatgtcccctgcccccaggaacacgctggccaacagctgcggcaccggcatcc

SEQ ID NO: 35066 - DNA, 1597 bp, Artificial sequence
  DNA replication origin
cttcatttgtttgaaagcaaaacttctgcacacacacacgcacacactctgccagccctggaaacctctcattctatcctccgagaccctcggtctgcccccaggagaccccccctcctttaggacctgcctctctgaggccccagaggaccaaagggagcaacagaggcggaagaggagaaagggcaccaggcacgccactgccggccacctgaggtcggttgtgcaatttctcggagcctgtttccccagctataaaatgggtagtccccacggcctcgcctaccccagcccccaggcgcagggatagacgagggtgacaggaaggcgcttttggagacgtggaagcactgggaggtggtgggaggggtcctgagaacccctggggcccccctcaagtcccaaggggctgcagtgaggggcggaggctgaaggcttccgcgaggtggcctagggcctggggaggggccttcccaagacccccaggccagccccctcccctggtgggcctggtgagtgtggagatgacggctaggggttaggttggggagccagaactcccccactgcacgagtgtgtgttaaagaaggcaacacggacctcacgccacctgccctgcggtcctctcccggcccagctctcggtggggaaagggggtaggacaggaggggcagagggccgggaacatgcagcacccaccgcgggtcctggggagggacagacagtagctcatgaccaagatggcaggtgtgtgtgtgtgttgggaggggaagtgtgtggccccgcgggaggctgggcgggttactgcagggcttcagccgagggacccgcctcgccctcgtggctggcggtctcgaagccatgctccacacccatcatgtccggctcgatcttgcccgtttcactgatgaaggtggtgtaggcgtcatcctcagccttgagcaccttgaccttgggcatccagctcttgcgcacgacgcggcgggcgttggtgcacatgtcggccgcgatggcattcatctcgctctccttgaagttgggggcgaagttctggcagtagtctgtggggcagggtgggtgcggccttggcacgggggccaggtgactcccacaaggcctactcaccagctcccctacagcatctgcgactccctctcaaaggggaaacgagtgaggccacgcggccaggacaccacactacgtgcacccaaccctacaccggactgagttcagccatgtgtggggatgtgttggttttgatgggatggccccgtgttcttgaaaaattcggatcatttgccagaatttagtaacggggagtggtcacttgaaaatctagatgccccccatgacgagtggctagcactgtctggctgcctcatccctcccagactgccctgagttcgagaccctcctgcctgacacaggctccctggcttcccttcggcacgtgcatcccccaaacacgaagaaatctctaagcaatcacagccggtttcccagcaaggctagaatgagccccagaatgcttctcaacactgaactctagccctctctgagagccaaggctgggaaaaaacgtcaacctgcgtgcccc

SEQ ID NO: 35067 - DNA, 1057 bp, Artificial sequence
  DNA replication origin
ggccgcccaggggtaggggtggagggtgaatggcagggcaaggggggtacaggggtggctcctggggtaaggcacaaccctgtctttggctctcctggtgaggagtttcctcccctgcaccccctgcccgacccttctccccacccccccaccccccggacccacacacagtcctgggagccagggggcacctcctggggtccctgaaacaagtgggctctgccacccaagccaatgccacaggggctcgaggagggacacccgaggaaaaggcagagaggggcaggcaggggcctacccaggacaagggggtgggggtgagaagaccccaggcccaggagctggcccccccaccccaactaaggcctggaagtgggggagcaccttcctttcaggggtctggctggagccccggtctgcccctcggcctccgtcaggcccagccgcttgccaagtgaccagggcattgtgctttggggtaaacgctggggtggggtggcaggccaggaggcggggggagaggaggggtgactaaggtgcttgtgctttagctgggggtgtcaatatcccccactcaggccggctgggggctaaggtttcaggccccggccaggaagacagtgccaagaccccagccagaccctggcactcatgactgacccccgcaacaagcagatgttaagagggacccccagtgggccggcggggctgctggtcccatcggggggatggtctccaaatcagattacaagggtccagtaggggctggcccccaccccatctcctaaaatccccctgcccctggagagacccctgggagcagtgggtaggtgggggttggggaggcagatgagaggcagggaggacgagggccagaaacacaaacaaggatgtggatgtggatggtgaaatgacaccctgcatagggggatggggagttaaaaaagaaaaaaaactgccttcacatgaaaatctaaaacaacaacaaaaaaccacccactctgggcgagaacaaaaagagaggaatggtaaaagagaaaattctgcaaacaactgc

SEQ ID NO: 35068 - DNA, 871 bp, Artificial sequence
  DNA replication origin
agccgggcatggtggtgggtgcctgcaatccccactatttgggggggctaaggcagaatggcttgaacccaggaagcagaggttgcagtgagccgagatcgcgccactctagcctgggcgacagagtgaaattccatctcaaaaaaaaaaaaagaaaaaaaaattgtgtgtgtgtgtgtgtgtgtaggaccagctcatatgttgcgttatctgtatctgttggggtaacttgcatgcgtgttagaatcggaggctgtcagtttgcagtcagcaacctgggtctgctgggcacaatgcaggtgtgtgttcctccctgggcccccaagtaacgagcatgcggcaaggctgttacaaaggcgtttagtttattctcatcagtatcactgatattctcatggttcacatttgccaacgccgctcctctccttacagtagttaaatgtgcaatctcacttgggggcccagggaggggtgggggctcggcccagggtggggagggcgttggcacttcacgtggacagggtgggcagcctgtcctgcgtgaaagaggtgtgggttgagtgggcggccagggaaggggagttggcaggggagggccccacagtcttttttctctggtggttggtgattctccattcagattccttcctggctgcccagggtgggggaaccatgcagctcagggcaggggaggaagagaaggaaaaagcagcaggccgcccaggggtaggggtggagggtgaatggcagggcaaggggggtacaggggtggctcctggggtaaggcacaaccctgtctttggctctcctggtgaggagtttcctcccctgcaccccctgcccgacccttctccccacccccccacccccc

SEQ ID NO: 35069 - DNA, 894 bp, Artificial sequence
  DNA replication origin
gtgtccgcacgtcgggcctccgaggcttctctttctcccctggcggtccggctctcgatggtggcgtgacgggggcgggggtggcggcgcgttctcctcggttgggagggaaccagcccgcgaacccaggccgggaggggggttcggcctgggggggaagggactgacatgtctctcgaagaccccttttttgtagtccgagggtgagtgacaacgacgggggagggcggagggtgctctgtacccaagccagccagtgcccgggtgccggccccagcgtgcccggcgggctgggcaaggccgtcggggtgcagagtgggaggcgcacgcaggggtatataggggtctccggagtcccccatgcgtttgggtttgcagtcgggggcagaggcaggcgggaggaccgcctgcccccagccgcgcccgccgtgcccctgcccgcagcgaggtgcagaaggcggtgaacacggcccgcgggctgtaccagcgctggtgcgagctcctgcaggaaagcgcggcggtcggacgcgaggagctggactggacgaccaatgagctgcggaatggcctgcgcagcatcgagtgggacctcgaggacctggaagagaccatcgatatcctggggctttgtggcagagggtggcatgggagagcccattgcggtggcagcccaccttcgggtagggctggacccctagggacggggatgatatctggctccggccttgacccttgactctcagcccacgtatagtggaagccaacccaggcaagttcaagctcccagccggggacctgcaggagagaaaggtgttcgtggagcggatgcgagaggcagtccaggtcaggaaaggtcctgcaggcggggagtgggggaaggtttgagtgtgtttt

SEQ ID NO: 35070 - DNA, 1278 bp, Artificial sequence
  DNA replication origin
gccatcttggttgtgggcagaggcagcttccggtgcacatgcccccgccccttagccctctcgtgccgcaccgtagggggcggtgtcggagttctgtctgggcctattcgggtccgagttcggaatttcggttcaaggcccagttcctcggattgttcctgcgcaacttcagtttcccttccaggcacgggcaatgtaaataatgatagcctccctcatctctggcggctgggtattatggctggggaaggggctcattcgattcgttgaagcttttcatggactccctgagctggcacctgggagatcgtcccatcccagggtcccgagtgtcaggtttggctagggtctgggggagaggtggtcctcccttctccctgcgggggcgcggtgaggagcgggcctgctcctccggggagttctgccgcattctcccaatctctttcctgagaagtggcggagttgggggcacttcgaggtcgccttggggcgaggtggtcgtgagggggtcccagatatgccagcagcggggggaggtcacctttgagaaagtgcgtggaggtgggtttcttcagaagcgcggagtctttctgggtgcgagcctgggggtagcgggtggtggctttgaggatggtctccaggggggccctctgtgtgtggggtctccgtctgggtaggggccaggaatatcagcggagggactcagggtcgtccctatgtgtgacagtggcgctgtgtgttggggagcttcgggaaagcactttttttgagtgatagggggcctggtctcccctggagggtgggcgggttatctgagggagtcctcggagggtcgcccccttgcgcgtcagagttgctgcgtggggtctcagagatagcgcctgggctggggaaatcattgtggggtctccgtggtaaggttagcggggtggggacggcctgcgtcttcggcaggtcgtcgcagtctggcaccatcgttgaatggggacgagtttgggaagggtattttaggggggaataacttttgagttcccagcgtgcgggggaagggcgggacgggagggtgtcccaaggcctgagaagatcagtgtggggcaggggtcaggaataacctgggagggggccttgtatgggggaaataattgggaagaggagagatgggatgaagggggcctcagcgggtcgtctcctgtgtatgcagggtcgttctgcagcgtctctgggagatggcgtccctgggagccctcaggtcgcccctacccgctgcggggtgctttc

SEQ ID NO: 35071 - DNA, 949 bp, Artificial sequence
  DNA replication origin
gcgccccccccccggaagccccgccgccggccgctaaggcgatcacgggccctgtcctaatatgggcaaccggaagcggcccgcgcgactgccctacgtcactccgtccaaatttagttgtggaagtcagcgggcgctggtggcgggaaggcgccgcgagccagtgcgggcggaaagggggcggggggcgcaccaccccttaaagggcccgcaccaggaatgaatggagccattcgaacaattctgcatcctatttttggaggaagtggaattagtatttcttggagagacggcgcgtagcggagggtagggcggagattttctatctgctctgtctctgcattgctgggtttccagctcccaacctaaccccgcctccccgaacgcggagacggaactcggcccccttgtttggggggcggcagccacgtgttcacggggactgtcgtgcgcgccgggttcgcagccgtgcgagctctgaacccacccgtggagctcctgtcgcgggaaactgcgggggaatggcttggtacgaatcacgggaacccgtagcccggggcgggtcaccgcctacaagcaagggctggcgtacgctagagaccgaagagctggaggccccagtggccccctttcacagcagtagcaaatattgtttgtttagtaaatattggcctagtgactctgccttggtttccccacttgaaggaagcagatagaacagtatcctccgaggagtggaggctggggatcggtgaattattgataaaaggagagctcttaacctagcctggcacgttgtaagcgctgttagcatgattattggtgcagaaaacactcattagacacacctggtaaatgctaagaacagtggccacaggggatgttcaggctggaaccagggtcttcccctgtgtgaagggaaacttgctgcccacgacccactggggcc

SEQ ID NO: 35072 - DNA, 844 bp, Artificial sequence
  DNA replication origin
ggctgcagttcaggaggccggagaagcgcctctgcaggacgcgggccaggttgggaaaggcgccctccgcttgcgccggagggggctgcaggcgatcggcgacttcggatgacgctccctcctcttcttccttttcttccagacgggctttcttgctcgggaccagtccagcgtccccgccgtcgctcaggctgctgctgcgtcgtttgcggctgactttggcggggcgcggggcacagcaggcggaggtctcctcggctgtcggcgcctcctgcgtgtccattggctccggaaacgggtgctcaccgtcgggggtcgctgtctcggccgtggactcggcttctcggggcgggtgcaggcgagggtcagaggggagggcggccggcaacgacacctcgggctcgagggcctccaccttggccgagaggtagagctcccgggcgctgcgcatgaccagcgacagctgcagactccggtgcagccgcaggccaccgcgctgcatgcgggagtgatacatcttccacaccgacagggtcatgatgcgctgtgcctctttctgcacttccatggcgactcgacggcgacagcggcgggggctcccgggagggacagaacaggcagcaggtgcactccggacaacgggctcgctcacgcctctctacacaaaccaacccacgcagtgacactgctaggacgctctgcccaggcgcccgccacccaggcccttttatacccccagtgacgtcactgagacaccccgcccaaccgaaggacgcatccgggctttccaactcgtcgcggccaaacactccttaaagagacagaatgcgatttacccagcagg

SEQ ID NO: 35073 - DNA, 1267 bp, Artificial sequence
  DNA replication origin
gaagaaaaggaagaagaggagggagcgtcatccgaagtcgccgatcgcctgcagccccctccggcgcaagcggagggcgcctttcccaacctggcccgcgtcctgcagaggcgcttctccggcctcctgaactgcagccccgcggcccctccgacggcgccgcccgcgtgcgaggcaaagcccgcttgccgcccggcggacagcatgctcaacgtgctcgtgcgggccgtggtggccttctgaggaccccgagcggcgctgccggagcccagagcgcgcgtcgaaccgtcggcccgagggcgcagacctgaggcgaggccacccccctccatcctgggggaagcgcccgcgaaaaccgtggagagaagccgccgcccgggctgctgagaggcccggagagggactctgtccccggggagccatcgccttcagtgtgcagggacggcaccgaggagtctgagccgggggcgcgggcgccttccgcagagacctgcgcccacaggtgctgtcttagtggactgggacgtgaacctttcgctctccttctggactgggagaagggaggcttgggtgttgtgttttttgttttgtttgtttgtttgtttttaaagatctcctcagggtcggacttcattttgtactgtgggctgtgctggccctttcaaggtttttcaagagttggttttgcgtttccaacctcggagaattccaggcactccccttccccctccgctgacatacttgtataagcggtcatcgttgcgtcatggggcaggcgtggggagcttcctgtcgccttgcgtgggtgtggggcctgggaggaggtcctggggcgtgcacccgccctgggcagtggggaggagagtggcctgagttacttcacccccgcgtgctgctggttaatgtcccgcgtctctgcaccttcgggtgggagcggggactgatctactttcacattctcaagtttttctcatctgcattagaggtgcccagtaggttcccaggttccagcgtgcccctccctcagacacacggacacaatcagccgagaagttcctggtctgaatcacgagaatgtggaggggtggggggtgtcagtggaaaggcataaggctgagctgagaccagttgctggtgaaactgggccaatctggggaggggaacatccttgccagggagtttctgagggtctgctttgtttacctttcgtgcggtggattctttttaactccgtctacctggcgttttgttagaaatgtcagatagg

SEQ ID NO: 35074 - DNA, 1086 bp, Artificial sequence
  DNA replication origin
tggctctgccgccgcaggcttcccatgaccccaggggaactgaccccgtggccacagggtagaaggaggggcaagccggcctcagaacgtctgctggtggaatctgggagctttggctcccctcccgcccaacccacaccccctttcctctcctgtgtggattgtgaaggagagcttctcaccgttctccagccaagctcgcccccacggctgcctgattccttcctgggaacacgtggggggacttttaaaaggcgccacctactccgagtcctgacccacccaactctcccaggggacgtgggggcactggagccccacaccgcaggcggtagctcaatgcacccgcgtcggagttcctcccccgcgagcgtggcaaggctcagggaagtcccgggcccctggggagggggccttgccgcgcatcctgtcgcaggaaccgccgggcccttccttccgcgggaagcggcttggccgacccccgcccccgcccgggcctcttgggggtttccggtgcccggccaccgtggggctggggactgaaagtgatgggactgaagatggggctggaacaaacacactacagacacatccccttaagacacacccatccccaagaccccactggacccatcagaaaaggcagcattgaaccttgtcacagcaaataacattggtgaggcctggactaattgattggacaatggctgtgaaaactaaaaaggtcacccatcctgtgaccagcaggttccagcagggaaccccaagcctgctgcaggagactccagaaaggtgtttgctgctggcttgtactaaattggcacaaactgcaaacagcacagcctacatgcccatcctcccagatgggtcctccccagaggataaaaggccggagccagacagaactacacacacaggccacacagataattcggtaccagaaacatgatgctgagtgacaaaggccagctgcagaagtcaggtaagaagcacatattctgggccgggcatggtggctcatgcctgtaatcccagcactttggaaggctgaggtgggcagctcacctgaggtcaggagttcgagac

SEQ ID NO: 35075 - DNA, 1221 bp, Artificial sequence
  DNA replication origin
ctgacgcatcttgggcggggggcaatttccgaggaggggcgctccaccttgcccgcctggtgtatgcgggagggggtcagccctccctgcagtccccatctggaagctacaagcctttgatttggggttcttaagtaaaactggatcctctgcctccctccagccatgcccccgctccaccccaagcatccctgggtccgaaagtttaacatcccacccctcctccatctgatttcagatcactcctccaggtcctaactgtcagctttttctgattaactgtgctgggtggggtggcctggattgggggtgggggggttgcaggaaggaggagaactgttggcaattccctgggagcccgagggggcgggctggctgagggtgagcagctggcaaccagacaggccgaggccctgggtggacaggccgaggaggaaattaattggtgccagtcgggtggccagccggctgggatgacggcactcccgggggcccggccagccgccgaggtgcgggagagctgggggatgggggacagtgaatgctgggattatgtcttaactaagactcaacagtgtactgggggaggggccaattgggccaggaggctcgaagacagtgcagggaagggcagcagggctagggcccctgagggtttcttctgagaaagggattcaccaaagggccaggcggggagcacgatatggggaggcctcagctcctgagctcagctcacttggacatgtttggggagacacaagctccccttaacacagacctgggtgggatgaccccctaggctgagcctcaggaaacaggaaaggtcctggtcagagcgcttctggacagaggtgggctttcctggacaaacgtcggggctctgaactcatctggacacaggtagagaagatctgggctcccccaaacacaggtgtgtggatctgagcgctactagacacggctgtgagggttgtgggctcccctagacactaaaaaaccggggaaggtgtaggctttccagaacacggcgggttctgagctcccctggacagaggtgtgaggttcggggctccctgaatacacgtggaggcttcagcaacccccaacccaaagagagtagtgtgagcctcaaactcgcaagtctcattactctttcattctctcggccctttttccctgattgggagccgaacccccaagggcggtgcagaagccacgact

SEQ ID NO: 35076 - DNA, 1484 bp, Artificial sequence
  DNA replication origin
cttgagcccaggagttaaagaccatcctgggcaacatagcaagacccctaaaaaaaaaaagagtgaagtgcctactttttatcctgacccaggcttgtggtgaggattaaacaaatgcacggaagtgaccaagtacagcataccttcagggcctggggctgccataagcatcagtaagtctctctcttgactatgggagaggttatcttacccgtaaaaaaccagaagcctccagggcagaagcaaagtctctggggcctttggaggctctcggaatcttccgagggcatttctcagactctctgtgtaaacagaggggacttggcttgaagcctcaattaacacagcagttaattcccccaacatgacttctcagggctcccaggagaaacaaaccgtttccaaggctcccagcccactcctgccccttagggagctcctagactgccgtgtcctcttggtaggcccctgaaagaacttctacaagccaagggaaactgagacccaggctgccaagggaactgactcagggatcgtggcccctaggtaagcccagcaaggcagctagaacagtggtttgcagacatggctgttccttggattcacctaggatgcctgggttccccgaccccatccctgtccatgccctggagatcctggtgtaacctatctggggaaaagccttgaacgtctctgagctcagtgcacaggcttctcccaggctagccctgccccgtccctgactgcacagccctcagcaatagaggagaaagccctgtaactccatcaagtgagaaaaggtgtgattcacctcacccctcctaagtacactcacaaaagcctcaattaacacaacagttaattcccgcaacaagatttcccctcaggctgcctctgccccttcccacaaggcgggacctgggaggtgctccctgcagctgcaccccgaggaaagggttaacaggaagtgcctggcgtcctgcagccacagaagccccattgttcttcagcctgtcccctccccctcgtccaggaagaccctctggggagccccttccaaggggccgtggagtctctccaggctgaaggccagcccatcgggagagtgtgcacaggaaaaggaaaccggctgggtgcgggctgaggaggcacagctgtcactgacgcatcttgggcggggggcaatttccgaggaggggcgctccaccttgcccgcctggtgtatgcgggagggggtcagccctccctgcagtccccatctggaagctacaagcctttgatttggggttcttaagtaaaactggatcctctgcctccctccagccatgcccccgctccaccccaagcatccctgggtccgaaagtttaacatcccacccctcctccatctgatttcagatcactcctccaggtcctaactgtcagctttttctgattaactgtgctgggtggggtggcctggattgggggtgggggggttgcag

SEQ ID NO: 35077 - DNA, 857 bp, Artificial sequence
  DNA replication origin
agtgagctttcctttttttttttgggacacagtctcgctctgtcatccaggctggagtgcagtggtgtgatctcggctcaatccagcctctgcttctcgggttcaagagattctcctgcctcagcctcctgagcagctgggattacaggcccctaccaccatgcctggctcatttttgtatttttagtagagatggggtttcaccatgctggccaggctggtctcaaactcctgacctcaggtgatctgcccgcctcggcctcccaaagtgctgggattacagatgtgagccaccacgcctggcctctttttggtttgttgatgtaggctgggctgattgatcctcccccatctgatggtgagcccttgagggctggaacaggatccttcttcctcagcactgtgcactcccagctcccaggcctgtgcttgatcctcagctgatgctcaaaatacagttgaaggaacggcagaaaattccaaatgggtgggcaaaggatgcagtccgctgctggggaggatagatgggctgaggcaggagatgaatgcctcgtggctctgggtgggtgtagggagctcttgggctgcaggtggggttgggtgcatgagccgagatctcagggggctggctgagtaggggctgcagacactgagagagaagaagaagggtctttggaggcagagaagtgggcacagagagatgggctccccaggcagaagtgtagccatgtggccaggagaaggtgggacggagggacgggaggtgtggaggctccatggtcacattcttggccgtcctgcatgtgcgttcaaagcctgggaagggcccggtgcggtggctcatgcctgtaatccca

SEQ ID NO: 35078 - DNA, 1770 bp, Artificial sequence
  DNA replication origin
acatacgtgtgtatacgcatacatacgtgtgtatatgcatacatacgtgtgtatacgtatacgtatatatatatcagccaggttcggtggctcatgcctgtaatcccagcactgcgggaggctgacgtggctggatcacctgaggtcaggagtttgagaccagcctggccaacatagcaaaaccccggtctctactaaaaataaaaaaattagccaggcatggtggcggacgcttgtaatcccagctacttgggaggctgaggcaggagaatcacttgaacccgggagacggaggttgcagtgagccgagatcacgccattgcccgccagcctgggcaacaagagcaaaactccatctcagaaaaaaaaaaaatttttttttctttgagacagtcttgctctgttgcccaggctggagtgcagtgacacaatcttggctctctacaacctctgcttcctgggttcaagtgattctcatgccacagcctccatagtagttgggatcacaggcacgtgccaccatgcctggctgatttttgtatttttagtagagatggggtttcaccatgttggccaggctggtctcgaactcctgaccgccaatgattcgcctgctttgtcctcccaaagtgctggtgtgtccggagttggtgggttcttggtctcactgacttctagtatgaagccgcggacccccgcagtgagtgttacagcccttaagggggcaaatctgaagtttgttccttctgacgtttggatgtgttcggagtttcttccttctggtgggttcgtgatctcgctggctcaggagtgaagctgcagacctttgcagtgagtgtcacagctcttgaggcggcgcatctggagttgtttgttcctcccggtgggctggtggtctccctggcttcaggagtgaagctgcagacctttgcggtgagtgttacagctcataaaagcagtgtggactcaaagagtggtcagtagcaatatttattgcaaagagcaaaataacaaagcttccacagtgtggaaacggactggaacgcgttgccactgccagctgggacagcctgcctttattctctcatctggtcccacccacatcctgccgattggtagcgcccagtggtctgttttgacagggcgctgattggtgcgtttacaatccctgagccagacacaaaggttctccacgtccccaccagattagctagatacagagtgtccattggggcattaacaaagcccgagctagacacagggtgctgattggtgtgtttacaaatcttgagctagatacagagtgctgattggtgtattcacaatccctgagctagacataaaggttctccaaggccccatcagagtagctacatacagagtgtcgattggtggattcacaaaccctgagctagacacagggtgctgattggtgtgtttacaaaccttgagctagatacagagtgccgattggtgtatttacaatccctgagctagacataaaggttctccaaggccccaccagactcaggagcctagctgccttcacccagtgtatcctgcaccggggctgcaggtggagctgcctgccagtcccgcgccgtgtgcctgcactcctcagcccttgggtggtcggatgggactgggcgccgtggagcagggggtggcgctcgtcgaggaggctcgggcggtacaggagcccacggagggggtgggaggctcaggcatggcgggctgcaggtcccgagccctgccccacggaaaggcagc

SEQ ID NO: 35079 - DNA, 1018 bp, Artificial sequence
  DNA replication origin
ggatggagaggcgggtcccaggcccggcccggagcgagtcccccagggcctgtcgacacggcggggcccggtggccggcatctggcccgcacgtgtccgaggggcccccgggtccccggcaccatggctactaccggggctccgactacgacgaggccgatggcccgggcagcgggggcggcgaggaggccatggccggggcctacgacgcgccaccccccgtacgacacgcgtcctcgggcgccaccgggcgctcgcccaggactccccgggcctcgggcccggcctgcgcctcgccttctcggcacggccggcgactccccaacggctactacccggcgcacggactggccaggccccgcgggccgggctccaggaagggcctgcacgaaccctacagcgagagtgacgatgattggtgctaagcccgggcgaggtggcgcccgcccggccccccacgcaccccacgcacacaccccacccgaggagccgcgcagaggccgcgggggcccagcacagagggcccgggagagggccagccgggagaccccagactctggagaggccagggctgggccacaagggtgtcccgcagagaccctcggccaaaagagaccctcctgggcagccacggcgccccccaaccagccccgatccccccacccacgacaggggctctcgggtgggaggcagggagcagacaaaccacacagccaagggatttgaattaactcagccatttttggagaactttggggaacatgaaaaaaaaaaaaaaaaaaaaaaaaaaaaacatttttaaaagaaaaaacggggagaaaaaaatagcttctattgatgagttttatcatctcaattgaatctttcctttccctgatgaagacagctggtggccgagtgcggcaaagaagccagaaggaaccagaatcccagtgccctacacccaccaccagacacactcacacccacacacgttctcagacacacacaagagtgcttgccggttataccaaaccct

SEQ ID NO: 35080 - DNA, 1245 bp, Artificial sequence
  DNA replication origin
gcgtgtcgtacggggggtggcgcgtcgtaggccccggccatggcctcctcgccgcccccgctgcccgggccatcggcctcgtcgtagtcggagccccggtagtagccatggtgccggggacccgggggcccctcggacacgtgcgggccagatgccggccaccgggccccgccgtgtcgacaggccctgggggactcgctccgggccgggcctgggacccgcctctccatcctgggcgagcggccgctgctgtggccccccgtgggcggccgatctccggccagaggctcggccgtggggcctgggtacctccgagggccgctggtggccgcccggcccggcctggccaccgcctgctgctgctgctgctgctgctgctgctgctgctgctgcgggggccccgagccgccggccttacggatcacaggggaataggacacgtgtggccggggggtggagggggtctgggggagctggcggcggccccgccgcggagtgctggtaccagatgttgagggggctgggcttccacttacggaactactgccctacacgaaaattgaaacaaaggaaatcaaaaaaaaagatacaacaaaatcaaaggagacacgggattgggaggaagagaggggagcgaagggagaggggccgggaggagagggaggagggggagggggaggaggaggaggaggaggagaggggggacacaggacattgaatggaaaaaagcaacagccacagggaggagggaggggaggagggggagtgagacagggaggggaggagtcgaaaaccaacacaacaaagtgaaaagagaaatgagaaatggagttttgtaagtttcggggttaaaaatagcagaagtttcaaaaattactcacaggcgtccagaggacagaaatcataattgaaacaaaaacagaagccgggttaaaggaaagtgaaaggtcgggcggcacggcccagaactcaaatatgatccacaaccgaggagcaagcagctgcgggcggcggggagggggcggcgggtgggcaagggggctggggggacagcataggcagctggtgtggtggggatccgtgtccgctccggccgccgggcaccccggtggcttgggggcaggatgggaggtggtcacagccgggatccggggacctttgcctagagtggctgttggatggggtatccccttctctcctccccgcctcccggccgagcccagcctggggtcacttgcagccgca

SEQ ID NO: 35081 - DNA, 1425 bp, Artificial sequence
  DNA replication origin
tttcaaaaattactcacaggcgtccagaggacagaaatcataattgaaacaaaaacagaagccgggttaaaggaaagtgaaaggtcgggcggcacggcccagaactcaaatatgatccacaaccgaggagcaagcagctgcgggcggcggggagggggcggcgggtgggcaagggggctggggggacagcataggcagctggtgtggtggggatccgtgtccgctccggccgccgggcaccccggtggcttgggggcaggatgggaggtggtcacagccgggatccggggacctttgcctagagtggctgttggatggggtatccccttctctcctccccgcctcccggccgagcccagcctggggtcacttgcagccgcacccacctgccggtgcgccatgtgctctcggccctcgctgggcgagcgggaccagcgctggtcccgagcccgtgcccggccgtggtccggccgttcctgggcatagcggtccttgtcggggggcgggggatggtggtggtggtggtggtggtggtggtgctgtcgatgcttccgatccttgggccggccccgctcctggtcccgctccttcgacggcaggtccccggattgggtggtcatgctcaggtctgtccccaagcctgggccgggtgagggtcagacagacacacaggtggtcgtgagggagaggtggggcagatgcacacacaggaggccacctggaaggtgtgggggccctagagatcccctgaaccgaggcaggtcagtgggttggggggagggggtagtacccaggttcctgcagctgctgcctggccccctctgtcccctctccatggaggcctctccctttcttcttccttagtgtctcctccgccctgccttctcctcccctctcctctcctctgttctgcttgtccctgagcaccacagggctgcccacctgtgtccacatcggtgtagcggcccagggagcgctcagaggcgcggtggctgcggtcgcggcgccgctggtggtgccgctggttctcctcgggcgggacccgctccagcgagtaatcgtccaggcgtcgggccttggggcccagcacggaggctgaacgcttcatggggctggtgtctgagatggtctgggggaggggacaggccggtgggctggggtcagcagctagcaccaagtggtcccggtccttcctgccccattgtggcagcctggtggtggccttcggtgactgcggtgtgaccatcctggggcaggggccaggggatgccatggggccttggctccccctgatcaatcagggctctgggtgtggccaggcctctgagggtggagcctgaggattcctctgtccctcagagacaggactgctccttttgagcccatcctgggttctgaccagaaagatctgatcctcactctcca

SEQ ID NO: 35082 - DNA, 1734 bp, Artificial sequence
  DNA replication origin
gcgagtaatcgtccaggcgtcgggccttggggcccagcacggaggctgaacgcttcatggggctggtgtctgagatggtctgggggaggggacaggccggtgggctggggtcagcagctagcaccaagtggtcccggtccttcctgccccattgtggcagcctggtggtggccttcggtgactgcggtgtgaccatcctggggcaggggccaggggatgccatggggccttggctccccctgatcaatcagggctctgggtgtggccaggcctctgagggtggagcctgaggattcctctgtccctcagagacaggactgctccttttgagcccatcctgggttctgaccagaaagatctgatcctcactctccagtcctgggggcccagccacagttgggcaggctcaggctggccagagggaagccctctccacatccagggtgcaaacctgggagccctggactgccgcactcatccctgccccagcttgctctcctgggagggtgagaagcctccgactgtggctggctgacctatgggctcaggaccaggtgcccggcatggcagctttgggtcctcccggctaacggggctgtgctcgctgcccccacaagtctgagtccttctggtgaggcccaagctagggagctctgggtgggggtgggggatacccaggcactggaggctctgggggcccactcttttccctggtgcttcatccctgggtcaagccctgacacacaggtttctctgcagcaggcagaggagggaaggagggagatggggcagacgcccgcctcccagggtccagcccagctgagcgctggtggccctgctccaggtaggagctgcaggaccaggggttggtggtggtgtcaggagaagaagccccccagaaagaggtgcagagtgggccaggctcttggagagccagtgtcctccggcgtggggggccctgaagaaaagggggtaggggtgaggatggggatggccccgcccaccagggcttatgggtgaggggcacacacaggacaccacacacaaggattgggctccatggaggggagagggtgcgattgccaaagaaagggtggggtccggggacggtgagagatgacgggactccctggagggggggtggggaggaagagggggccggagccctgctgggcgctgggcaggcgcggtacatacactgaggttattcccacgtggccggccccttctcctctgtcacagccccatgggatggtgcacacagaaaaaacagaaagaagaaaataaatataaaaggcaagagggagagtgaggaggtggtgcatggagaagaagccaaggaggggagtggcactggcatcaagagaaatcggagggagaaggcagggaggaaaagaaaagttaaagtcctggcgggtgggtgtcccaggcccccggggctgggcgtcctctattcccatgggtacagaggagacagacaggagatgcagacagacaaatggcagaggcatgggaccgaaagacaggacggcgcagcctcgagcccctggccctgggctctgcctcatgcgatgcacaccccaacccctggctccggccgatgctcaaagcttccatgtggtggccgtcagctgggcttgtcccaaccctctcctggggcccagcagctcggtcctgagggagcagcagcatgcacgctgggtgctccccaacccacgttcccagcagccagag

SEQ ID NO: 35083 - DNA, 970 bp, Artificial sequence
  DNA replication origin
cagctgctccaccaacacttattgagtattactgtgtgcagggcgctgttctcagtcctcggggatgcacccatggggaaaataggccagaatccctgccctcagggagcagacattccaagtggggaaatgccaatggtagcaaatgactgaatcgtgcaacatccagcaaagagaaagaaagtgtcgtgggggaaagtggagaagaatccagaagataggagtatccaggggaggaggggatgcggtgggaaatgggtagttggggagcctccctgagaaagtgacatgtgagcaaaggcttgaaggaaaaggggagagggagtgagctaagcaatacctggaagggtgttccaggcagaggaaacagccagtgcaaaggctctgaggctggaccgtgcctgggttgtttgggtaacagcaaagaggccagtgtggtggaaaagagcagggaggagacaagggcaaggaggtgacagggcagatccttcagggccatgggagctgcaggaaggactctggctttttccccaagcaagtgggagccatggagggttctaagcaaaggagggataggacctgactcaagtgctcatgggcgccctctggtggctcttgtggaacagtggggttgaaggtaggagcgggagacctgggagaaggtgcctgcagtgagagatgaggacgtgggaccaggctggggctatgacttgggtggaggagtgagaagtggtccagttctgcgtggaattggaagggtctagatggatgagacctgagagagtgtgtgtgtgtgtgtgtgtgtatactggggatgtcgcaatgccttctgggtaccaccgtcccaccaccccacccttgtccacacactgctctctgccccattccccaggaccggacacccctcatgttccagcgcatggagcccccgtccccaacgcaggaagggggacctggccagaacgccctc

SEQ ID NO: 35084 - DNA, 813 bp, Artificial sequence
  DNA replication origin
tgggccactgtgcacagttgtgcaggttgtacaccgcacaaagggctcccatcttggaaatgatagatttatgtacttatttattaattaaaatattttttctttttgtagagatggggtctcgctatgttgcccaggctagtctcgaactgggctcaagtgatcctcccgtctcagcctcccaaagcactaggattacaggcatgagccaccacgcccagcccccgatttgtatattaaatataacagcttcccaggtgatagaaaaaaagtgtcttgttctcaccacattggtagattgcaacaattttccaacaggcatgttctgtggaaagggtgcctttttcaaatttgcacaaagttgtcttatggacccatggtggtcctgcacaaagaccaggagaggaagggctcgccctccctctcttgcacatgcgcacacattcatctaagcagagactgagagaagcgacttgaggaaaaccgggggggggggggggggcggcagggaggggcacagagcgacaggtgccaggagaggctcattgtctgagatgctggtgggacaaccttgtccccggctttgattgagaaggaggggagacatataggttaggtgaggaggggtgcacagaggaaggaaaggaatgaggtggcaacacggggcaggtacaaatagcattgatggatagggacgcagggaagatcaaggtggatgggagaataggatgatggggtaatactttttgggtggggagaatctttaaaggtcatccctgaacttcttgtggatgaatggagggaacagagcat

SEQ ID NO: 35085 - DNA, 1048 bp, Artificial sequence
  DNA replication origin
acaaccttgtccccggctttgattgagaaggaggggagacatataggttaggtgaggaggggtgcacagaggaaggaaaggaatgaggtggcaacacggggcaggtacaaatagcattgatggatagggacgcagggaagatcaaggtggatgggagaataggatgatggggtaatactttttgggtggggagaatctttaaaggtcatccctgaacttcttgtggatgaatggagggaacagagcatctgtccttgggcaccaagggagattccaggacagggatctggaggggtggcccgggccagccgcttggcggcaggacgctcgctctctcagccagcatgcaccaccccccgtcggccatggtgcctgcccgccccaggccccgccaaggcagcgtgcatggcctgcatcagtgtgccaccgtccaggggtccagctgcggccgcctgcccactctggaacaatggagaggcatgttggggtgtcttggggggattagggacgggggctggggacgaaactccaggggaaggaagggaggggaagagaggttcttggtgctccttggaaggtctcgaatccccaaggccctaggtcagagatcagcttcaggtgtgcgtggcaggggcggggacccgggacctcgcctgctttcgggggctaaagcccctctctgcaaggcgcctgccccagcctgggcatgggggccgctctgggtgggcagaagtgggaagcatgggttttgactccctgaagaagcgtgtttgtttccaatttggtacctgggagaccaggtgcaaggggacctgggcgctcccctccccctccccccggcatgtcggccataatggagtctcaaaacacgaagacactcatcagaaaggacggacacagtgtgctgcttagaatcaagggatggtcatgatcagttgactcgagaaaagaaaaaaaagaatcaaaaacaaaaaagaagagaaacgttggaaaaagagagtcggccgggtgtttctggtcagcactaaaaaaaaagaagaagaagaag

SEQ ID NO: 35086 - DNA, 878 bp, Artificial sequence
  DNA replication origin
gtgtgtgtggatagtgactgtgtgtgcagtgtctgtgtgcagtgactgtgtgtgcatagtgactgtgtgcagtgactgcagtgactgcgtgcagcgtctgtgtgcagtgactgtgtgcacagtgtgtgcgcagtgactgagtgtgtgcacagtgactgtgtgtgcagtgtctgtgtgcagtgactgtgtgactgcgtgtgcacgtacagttcaaggctccaggagagggcctcagtgggccagccccacatgaagctaccagatccaagtctggcacttctgagttcctctgcctgagagtctttgccggcacactgcctggccttcaggtctcctttatcagacttggagagtcaagtctctgctggtcaaggccaaagatcttgtgggcttgagatggaggattggggacagcaggatggagagagctggaggggcgaggagacagttggcagctttcctggggcctggggtccatggagctgaatgggggacaggagtggtgagaggtggctgggagtggatttgcctctattgtctctgagtgtaggggatgtgtgtgcgggatggggcaagagagaggtgctgcgctgggaaaacccatccctttctctgcaaaagacgcaaaccaccccaaacagaaaacccccattcagaacccgataaaaacagagagacagagtctacaggaagtgggaggcacaggggctgggggcgggaggacagacagacagaggagagcggagggttgaggagagcgtcaggcatcccacgttggagaggcagggtgtggcatgcaatgccgacgcgaggagatgcgttcacagttaatgtaaggcatttagacttcagaaagaagtaagaccaaccggattcta

SEQ ID NO: 35087 - DNA, 1050 bp, Artificial sequence
  DNA replication origin
caagagccgggcggccgagcccaccgtggaccagcgcctcggccagcagcgcgccgaggacttcctcaggaaacaggcccgctaccacgatcgggcccgggaccccagcggctcggcgggcctggacgcacggaggccctgggcgggaagccaggaggccgagctgagccgggagggaccctacggccgcgagtcggaccaccacgcccgggagggcagcctggagcaacccgggttctgggagggcgaggccgagcgaggcaaggccggggacccccaccggaggcacgtgcaccggcaggggggcagcagggagagccgcagcgggtccccgcgcacgggcgcggacggggagcatcgacgtcatcgcgcgcaccgcaggcccggggaggagggtccggaggacaaggcggagcggagggcgcggcaccgcgagggcagccggccggcccggggcggcgagggcgagggcgagggccccgacgggggcgagcgcaggagaaggcaccggcatggcgctccagccacgtacgagggggacgcgcggagggaggacaaggagcggaggcatcggaggaggaagtaagtggaggtgacctcgaatccgcagaatgacggtaacattaataatgacaacagccaaagtagcacgtgctgtgtatttgtttataaaaatatattataaaatgctgtatttggccaggcgcagtggctcacgcctgtaatcccagcactttgggaggccgaggcggatggatcacgaggtcaggagttcaagaccagcctggccaagatggtgaaaccccacctctaataaaaatacaaaaattagccgggcacggtggcaggcgcctgtagccccagctactcaggaggctgaggcaggagaatcgcctgaaaacagggggcggaggttgcaatgagccgagatcacaccaccgcactccagcctgggcgacagagtgagactctgtctcaaaaaaaaaaaaaaagtgctgtatttggccaggagcagtggctcatgcctgtaatcccagcactttgagaggc

SEQ ID NO: 35088 - DNA, 1177 bp, Artificial sequence
  DNA replication origin
aaataagtaaattatatattgtgttagaaggcgatggaactacagagaaagtaggggagggaaatagcaaatgctgggagtgaagagagttgtgattttaaacgaagttgtcagggaaggcatcacctagaataggggtccccagtcccggggctgtggactggtaccaggccgaggcctattaggaacggggctgcacagcaggaggtgaacagtgagcaagcaagcattaccgcctgagctccacctgccgtcagatcagcaggcagcattagattctcataggaacacaaacactattgtgaacggtgcatctgagggatctaggttgcgtgctccttttaagaatcgaatgcctgatgatctcaggtgaaacagtttcatcccaaaaccaccccccacacctaggtctgtggaaaaactgtcttccacaaaactggcccctggtgccaaaaaggttggggactgctcacctagaaggttacatggcctgaaggaggtgagggaggagccactggggggcctggggaagggcatcccaggcagagggaacagcataggcaatggccctgaggcaggaacatgcctgatgtgaaggaggcctgtgtgactagaatcgaatagtaagtgtgaggaggtgaaggcaaggaggtgacaagcagattacacagggccttctgggtcaggggggaggacttgggcttttgcccctagccaggtgggagccatggagggttcttgagcagaggaggctgggacctgactcagatgctcacagactcctagcattcagtggggagtagagggtggagagcaggagtgggaggctgagatgtgggttggttcgcctgggtcatccatccaagctacagtgcctagcaatgctctaagtcctgtgaccatgccactgcaggaaagagcaacagaagaatcaaaagccagccaagtccgtgtgggagcagcggaccagtgagatgcgaaagcagaacttgctggccagccgggaggccctgtataacgaaatggacccggacgagcgctggaaggctgcctacacgcggcacctgcggccagacatgaagacgcacttggaccggccgctggtggtggacccgcaggagaaccgcaacaacaacaccaacaagagccgggcggccgagcccaccgtggaccagcg

SEQ ID NO: 35089 - DNA, 847 bp, Artificial sequence
  DNA replication origin
tcagatcctgacgggcgaagactggaacgaggtcatgtacgacgggatcaagtctcaggggggcgtgcagggcggcatggtgttctccatctatttcattgtactgacgctctttgggaactgtatccttcatggagagagagaaggggacaggcctggacctctggcagaggagaggttgcaggggctcaagggagggtactgagagacccagatacccagggcccaagtggtgtcccaccagtggttgcttttcctgactcagacatttgcagacaccctcctgaatgtgttcttggccatcgctgtggacaatctggccaacgcccaggagctcaccaaggtggaggcggtgggagaatgtttctctggcaaagttaccacctgcccatggcagatcaggacgggggtgggggtgggggtgggggtgggggtgggggcatgggaacagggttagaacttttgccggggatgcaccatgcaaagagaaggcgcctctccccccactcccagaaacagactgtccctcatcaagcaaattctacagccaagagggtgggaagggggaaggcagtgaggtcgctgcaggaaacggatggcaaactcaaccaaaaggccgtttacagggagtaagcagggtttccaaggaatggtgtagcccccaggctagtggatgggagagggagtgctgttatggggacccagtcagagctggggccaaggaaaaagggctgccaccagccctgggaccttagagaacccagaaccatggcaaggcacagatggagtggccaataaatgtccccaccttctctcttcctctggcttcccgctggagcctcccctt

SEQ ID NO: 35090 - DNA, 1975 bp, Artificial sequence
  DNA replication origin
atggatgagactggaggacattatgctccacgaaacaaaccagtcacaaaaagacaaatactgtatgattctactcacaggggggacccaaagtagccaaattcacagagatagaaactagaacggcgggtgccaggggctgggggagtggggagtgtggagtagggtggggggagtggggaggggggaagggggagtcggggagaggggaagggggagcggggagtgagagtttcctgggggcagagcttcagttttgcaagatgcaaaagttctggagatggatggcggtcctggttgcacaacaatatgaatgtacttaacgccgctcaactaaacacttaaaaaatggtacattttatgttatgcatatgttaccacaatgaaatatatatatatattttttgagacagagtttcgctcttgtggcccaggctggattgcaatggcatgatctcagctcactgcaacctccacctcccgggttcaagcgattctcctgcctcagcctctcgagtagctaggactacaggcgtgcaatgccacgcccagctaatttttgtatttttagtagagacagggtttcatcatgttggccaggctggtctcaaactcctgaactcaggtatctgcccgcctcggcctccccaagtgctgggattacaggcgtgagccaccattagaacaatgagacaagcaggtcaggaggagatagcacatggacagggggtgaggatgttaccacctagtcatggcaggggcttgatgcccctggaagattttactggcacaattcatattacaaattatttagtgaatacttactatgtgccaggctgtgttctaggctctgggggaatagcagtgaacaaaacagacagaagtccctgccctcatggagctggcattctagtgggggcaggggattggcaataaccaataaacaagtaaatatagcttggcagatgctcttcaggggtgtagagggaaattaagcctagaggcggggagtggggtggcacagtgcaggtgaggcagttacatgttagaaggacacttgagcaaagacccaaaggaagtgaggggggagccaagcagatatctgggggaagagtgttccaggcagagggaacagcctgtgcaaaggccctgaggctggggagtgcttggtgtgtaagggacagcagggaacttgtgtagctgaagccgagtgagtggagaggagagtgggaatagagggggatgggggatcacaggggcagagtttgtgggtccctgtgaggagaatttgggctttttctccaagtgaggttgtgagcaaagaggagccaggtcctgactcagtggctcacaggtgccctctggctgctgtgtggggaacagtcctgggggtggggcaaggactgaagttaagagaccagattggggtggaggggcaactggtttagtccaggccagcaaagatgggggctggaccggggtggggctgtgaaggtggtgagaggtgggtggtggattctgggtagattctgaaggtagagccaataagatgtgctaacagattggatgcagggggtggagaaaaagaggcatagaggcatagaggaagatctggaggtctgaggccagagcactgcagggggttaaagccgcctttacctaaacagaaaatagggcaggaggagcaggtttgggtgacggtggtcttttggaggagctgtaatccctctaacacctcagagtcagctgcacacccatgttcatgacagcactcttcacaatagccaagatgcaggtacaacccaaatgtccatcagtaaaggaatggatgaagaaaatatggcgtgtatatgtacacaatgaagtactattcagtctttaaaaaggagcaaattccatcttttgcgacaacgtgcatgaacctggaggacattatactaagatgaaacaagccagacacagaaacgcaaatagt

SEQ ID NO: 35091 - DNA, 1035 bp, Artificial sequence
  DNA replication origin
acactgagaagccagcactggccgaagtgagtaccccagggtgggccgctgttcctatctggagaggatagtgatgggctggggggcgcttatgtttccctcatgtgtgcaggtcccattgcctttaaccgctgattggggaacctcatcatctttgggggtgtcgagaaagagatcccacttgctttatctgggcccctggcctgggaagacctgatctggacactttcagtaagaaagacagggcaacagcaaatgaggtggtgggtccattttagagcaccatgtccagcttttcctaccccgagtagccgagagggaacaccaggagaatcagcacccatgtggacatcttaggtaggtaaatgccttttaaatttttttttttttaatcaaagatccagaggaaaaaggtgaagcccacattttcttctgtggagatgctatcaaaatgcagatcttctgtgtttctttaaatccctgcctgcttgaaataaaccttgaggagggcttaacatctatcgagatgtaggcaggcaagggtgggtaattagtcgggctttctagcagttatctaagcatgacccagattccaggaggggggacacaccctgctgcccaggctggctggccactgtgccatgcccagatgtgccgcttctccgcacagttccaaccagctgccctctgtgtaaaaatgaacgggctggatgggtccctggggctcagcgatgagtcccctatcccttttgtatgtggttttgcagttatagactaaacggggctgggccctgtgtggtctccgggggttgctgtttgaggagcatggcgggtggtagagggactcacttcaggggggttcaaaatcgagcctggcgcttggatcctgggtgctgggattgcaacagagggcactgaggttttggagtgtgtgagtggtctactttgagggtggggaaaattaagaagttcagcagaggtgcttttgaggggagcatacctctaactacgatgccatctccgttggtgcccaaa

SEQ ID NO: 35092 - DNA, 1298 bp, Artificial sequence
  DNA replication origin
gtaacccggagccctttgctctttgcagaatggcccgcttcggagacgagatgccggcccgctacgggggaggaggctccggggcagccgccggggtggtcgtgggcagcggaggcgggcgaggagccgggggcagccggcagggcgggcagcccggggcgcaaaggatgtacaagcagtcaatggcgcagagagcgcggaccatggcactctacaaccccatccccgtccgacagaactgcctcacggttaaccggtctctcttcctcttcagcgaagacaacgtggtgagaaaatacgccaaaaagatcaccgaatggccatatccttttgcccgaaccccagcagcagctgcgcctccccctcctccctccgcctcccctcttccaggctgggagagagacccgggggttgatgggaggtggggaggaggggggtcttccaggggctgggagagggggcaccgggaggagtgtgaaagaatctctccaccccgagctgggttgagctaccctggaggcttgggaatgggtttgtggggggctggggggtgggcagcggagagtggatccttcccaaggaccgactctagaatgagatctggggcctggggtcgtgcaggagccttggtgggggctttcgagccaagtccggagggtttggagttctacggagtgagcttggagcgggctcgggcctgggcgcttctggccagggcaggggaactatgggggccttggttgggttttcttggccgtcgctcactggagtccacgcaggggaagctggacagcctctccactactgctttccccaaggtggggggccgccgcacttttagggcagggcgcttgggggctcccagggctaagagcaagagggagtccatgtggccttcacactgagaagccagcactggccgaagtgagtaccccagggtgggccgctgttcctatctggagaggatagtgatgggctggggggcgcttatgtttccctcatgtgtgcaggtcccattgcctttaaccgctgattggggaacctcatcatctttgggggtgtcgagaaagagatcccacttgctttatctgggcccctggcctgggaagacctgatctggacactttcagtaagaaagacagggcaacagcaaatgaggtggtgggtccattttagagcaccatgtccagcttttcctaccccgagtagccgagagggaacaccaggagaatcagcacccatgtggacatcttaggtaggtaaatgccttttaaatttttttttttttaatcaaagat

SEQ ID NO: 35093 - DNA, 757 bp, Artificial sequence
  DNA replication origin
ggacggggatggggttgtagagtgccatggtccgcgctctctgcgccattgactgcttgtacatcctttgcgccccgggctgcccgccctgccggctgcccccggctcctcgcccgcctccgctgcccacgaccaccccggcggctgccccggagcctcctcccccgtagcgggccggcatctcgtctccgaagcgggccattctgcaaagagcaaagggctccgggttacgctgcggcgaacgatgcggaagacgccgccgccgccgccgccgccgctgatgctgaggctgccggggctgggagcgcggcggctggagctacgactgcggagacgctccacggcccagcccatcgggcggcggcggctcggcgcctcgggtcgggggctcagaaggcggctgcccgggccgagccggggatagcagctcgggacatcttcctggctgaccccggagaaggaggggcgggaggagggtgcgggggcggggcgcgggggcccggggaggaggggggaggggagagagaagcgaggcaaaaaataaccgaggaaggaatccaggcaatccccagtccacccactccggaaaaaaaaaaaaagagacagttaaaaaaaaaaaatccacccaacgcacaccccctttaagacgcgaacggtttgcaaaggacgccccccccgggacgcagtggaagcttcaaattcctccgaggtccgggtcaggctggcatcttgcaaaaggagtgcgctcggcccatta

SEQ ID NO: 35094 - DNA, 1285 bp, Artificial sequence
  DNA replication origin
tttctagccctagacttgatttcatgagtgttcatttcagaccaatttcttaactccgtacctttatgttttatgcatttttctttgtgcttattgaatttcaccacacaaaaagcagaatgggaagtaatcaaagtggttctggagagacgtgagtatcaagcaaactataccacccagaacccctatccagccaactaggacctggttaattatttcctcctgggagttcagacttgtcacctctggggtctccaaggtagaataaacctttaattccaacttgcaggagtccttgtgatttgaaacgttcacagaagtaaccccaaaccactctctccactttcaaaaatggtcttttgctaaacagagcaaatttgtttagagactgacgaatcgcacctctagacacaaatccccttctcttttctgtcttttaagtttttttcctgcctccatcctgccttctccttgcaagatgctggggagcgtccggctgtctgcaaccgaaatggaacggggtggaaaacaggctttcctcccaggggaggaggaagcaccccaattcccccctccctgcctcccaaccatgcgacgctcccctctctcccccacaaactccgctgagcccggtacccccgcgcctccacgagcctccacgattggtcgcgggccctcatgtgtcgacactctgggtgggtccttctactgttaaactcatcaattgctccccttttccgtttgctggccagtggttcagacctttgcgcccatttttttttcctctttaccttcttctacccgcaaccctccacaccagtcttattttagcaaaacctagagaaggaggaggtggagggatttggagggtggagaggcattgccgcatccaggggcagctattgagtggctaagcggagggcgcatacctctctctctctctcttttccccctgttgggaattttcaggatttcactgctgcaatttaaccccaagatgaggcaccattgagcgaaacgctgtgcgcacatacacactcacacttcctccgggagcagaagaggcagccgttggtgattcaggaagaaaaaaaatttttttttttttttttaaacctggaccctgcggtgtgaagactccttaggaaccctctggagcgtcttactccccttccctcctctttcccttccctttcatcttctttgtttttattttattttatttttggagctacagatctttcagcatttttaaggtctaggaactccagcaaaacagaagggc

SEQ ID NO: 35095 - DNA, 922 bp, Artificial sequence
  DNA replication origin
tctggtcatgcagatggagcagcaagaacgggggtgggcaaaagggggcgatgagagaaagcatgtgtgagagagaaaggcgggggcaggagggagagagagacagggggacagacagagacccaaagagagagacagagagagacacaaagacagagagacccaaagccatatggagagatacagagagagaatggctgggtgcagtggctcatgtaatccctgcattttgggaggccgaggcgggcagatcacttgaggtcaggagttcgagaccagcctggccaacatgacgaaaccccgtctctactaaaaattcaaaaattatccaggcgtggtggcgcatgcctataatcccagctactcgggaggctgaggcaggagaattgcttgaacccgggaggcagaggttgcagtgagcagagatcatgccactgcactccagcctggctgacaaagcaagaccctgtctcaaaaaaaaaaaaaaaaaaaaaaagaaagaaagaaagaaaaagaaaagaaaaaagaaagatacagagagagacccaaagagagacagacagagagacccagagacagagagagacagagaaaataagagaaagagacagagagatccagagacagagaaagagcaacacacacacacacacacagacacacacacacacacacacacacactggtgcagggaggctgttggaggaagagagaacaaaagagagagagggtgatgcaaagacagagatagagatccaaagggagagagagaaaggggcagaaataaaaagacagagacccaaagaaagagaaagaaagaaagaaagaaagagacccaaagagaaagacagagagaccgagggaaaacagaattcagatagagagaaacagagacagatgagagaggaataggaagcccctt

SEQ ID NO: 35096 - DNA, 1436 bp, Artificial sequence
  DNA replication origin
gatcacatgagcccaggggttcaaggcttcgctgagctatgattgcccccactggactccagcctgggtaacagaggaagatcctgtctctaaataataataacaataacaataataataataggagacattctacaggatgatttatctggtttattctcagagtcaatagggtagaaaataggggatcagaaagagactgctgtagactaagtaagacatagaagacatgactaccagaaaattaaatatagaattatcatatgatccagcaaccctgcttctaggaatatatctccaagaatggaaagcagggtctccaagagttatttgtacacctatgttcatagtagcattattctcaatagcccgaaaatagaagcaacccaagtgttcatggatggatggatggatggatggatggatggatggatggatggatggatgggtgggtggatggatgggtgagttggtggatggatggatgggtgggtggatggatggatggatgggtgggtggatggatgggtggacgggtggatggatggatggatggatggatggatggatggatggatgggtgagtaggtggatggatatgtgggtggatggctggatggatggatgggtggatgggtggatggatgggtggatgggtggatggatgggtgagtgggtggatggatatgtgggtgggtggatggatatgtgggtgggtggatggatgggtggatggatggatggatggatggacggatggatggatggatggatagatggatagatgggtggatggatggatggatggatggatggatggatggatggatggatagatggacggacaaaatgtggtctattcatacaatggaatattattcagctttaaaaactaagaaaattctgacacatgctacaacatggataaacctggaggacattatgcttagtgaaataagctagacacaagaggacaaatgctgtatgtttctacttatatgaggtccccagagtcatcagattcatgagacagaaagtggaatgatgggtgccaggggctggggagtgagtgtttcatggagacagagtttcagtttggagtgatgaaaaagttctggagatcagccgggcatggtggctcatgcctgtaatcttggcactttgggagctgagcggggctgaccacttgaggtcaggagttcgataccagcctgtccaacatggccaaatcccatctctactaaaaatacaaaaattagctgggcgtggtagcaggcgcctataatcccagctactcgggaggctgaggcaggagaatcccttgaatccgtgagatggaggttgcagtgagccaagatcatgccactgcactccagcctggaagacagagcgagactctgtctcaaaacaaacaaaacgttctggagatggatggt

SEQ ID NO: 35097 - DNA, 964 bp, Artificial sequence
  DNA replication origin
gggtcgcttgagcccacgagttcgagaccaacctgagcaacatagcaagatcccatctttaccaaaaaaaattgtttttaattagctgggcatggtgtcatgcacctgtagtcccagctacttgcaaggctgaggtgggaggatcgtttgaacccaggaggcagaggttgcagtgagccgtgatagggccactgcactccagcctgggtgacagagcaagaccctgcctccaaaattaattaattaattaaaatttgtaaaaatgaaaataaattaaagaaacttttatgggttctagaaaccaaggcagacgttaaagggaataggtgcttttcctggttatttatggaatgatggatgggtggatggacagattggtatataagatgataggtgggtggatggacggaagaatgaatggaagaatggatggaagaatggatggatgaatgggtgaatggaagaatgggtgagtgggtgggtgggttgggtggatggatagatgtgtggacaggtgggtgaatgggaagttggttggatggctggaaaatggatggatgggagaaagaacagggaggtggatgaatggattgatgggtagaaagatggatgggtgatggacggatggatggatggatgcatgcacaattagaagtttaaatgggtgggtggtgggtgggtgagtggacagatgagtggatggaggggaggttaagaggaacccagttttgtggcaggtggtggggaagtcacaacatgccttcctaaatgatgctcaaacacgccagtagatgtcagactaacctcaggaaaccacctcggggccaagcttgcaccaccctggccccatcctgaagttctttgattcaaaatgagcaaaggctcattttaataaaacagtttgcattgcaccctgtatttacacactccctcaccagcaccctcccaactcaaatggcattta

SEQ ID NO: 35098 - DNA, 999 bp, Artificial sequence
  DNA replication origin
ggttcacttgagccctggaggttgaggctgcagtgagctatgatcaagccattgcattccagcctgggtgacagagccagacaaagaaagacagagacagagagagagagagagagagagagagaaggaaggagggaagaagaaagaaagatggaagaaagagagagaaggaggagggaaggatgaaagaaagaaataaaaagaaaggaaagaaggaaggaaggaaggaaaggagggagggaggaaggagaagggagggagggaaggaagggagggagggagggagggacggaaggaaggaaggaaggaaggaaggaaggaaggaaagaaggaaggaaggaaggtaggaaggtaggaaggaaaggagggagggaggaaggagaagggagggaggaaggagaagggagggagggagggaagggagggagggaaggaagggagggagggagggacggaagaaaggaaggaaggaaggaaggaaggaaggaaggaagggaaggaagggaaggaagggaaggaaggaaggaagaaggtggatcaattattcctcttgtccaagcaaggcaaaaccagtggcatcaggtcaatactgaaactgaaccaaatacctggacacttagcaccatgtgtcatcccctgtccaccttctctctctctctctctctctctctctctgtctctctcacaaacttgcttgacttcatcagcattggagaactaaaaggaaacagtacagagtaccaggaaaaaaataaaactcctcccacagggactgtatttctctaatgtttctcccacaaactaaaccatgcatctgttctcttaagtcattcttgggcaggagtgggtgggtaatgttgcttttattctatctccttgaatttttttcctgattaggtattcttgactcctcaatattgagcaactggtaggtgtttcaccatgtccctcatttatcctgcctctttggccagacagtgtctgtgtgtgtcatcaaca

SEQ ID NO: 35099 - DNA, 982 bp, Artificial sequence
  DNA replication origin
ctgcactccagcctggccaacagaatgaaaccctgtctcgaaatgaggttttttacctgggaggcagaggttgcagtgagccgagattgcaccactgcactccacccagacaacagagcaagactccgtctcaaaaaataaaataaaataaaaggaaaagaaaaaagaaatttcaggcagacgaggtcgcggcgccggaggccccagaagggtcgaaggcgccgcgggctggggtcggtggcttagggagcccgtccggccatggtggccgtggctggtggttggcgcggctgcgctgcggcccggggcagtgcggagccgggacagtcgcggcgctgacgcccgcgggccccagctgcagatatgaagcggagccgctgccgcgaccgaccgcagccgccaccgcccgaccgccgggaggatggatttcagcgggcagcggagctgtctcagtctttgccgccgcgccggcgagcgccgcccgggaggcagcggctggaggagcggacgggccccgcggggcctgagggcaaggagcagccgcctgccttggcctcccaaagtgccgagattgcagcctctgcccggctgccaccccgtctgggaagtgaggagtgtctctgcctggccgcccatcgtctgggatgtgaggagcccctctgcctggctgcccagtctggaaagtgaggagcgtctcctcccggccgccatcccatctaggaagtgaggagcgcctcttcccagccgcgatcacatctaggaagtgaggagcgtctctgcccggccgcccatcgtctgagatgtggggagcgcctctgccccgccgccccatctgggatgtgaggagcgcctctgcccggccgagaccccgtctgggaggtgaggagcgtctctgcccggccgccccgtctgagaagtgaggagaccctctgcctggcaaccaccccgtctgagaagtgaggagcccctccgcccggcagct

SEQ ID NO: 35100 - DNA, 909 bp, Artificial sequence
  DNA replication origin
ccgtccgggaggtgaggggcgcctctgcccggccgcccctactgggaagtgaggagcccctcagcccggccagccaccccgtccgggagggagatgggggggtcagcccccccacccggccagccgccccgtccgggagggaggtaggggggtcagccccccacctggccagccgccccgtccgggagggaggtgggggggtcagccccccgcccggccagccgccctgtccgggagggaggtgggggggggtcagccctccgcccggccagccgccccgtctgggaggtgaggggtgcctctgcccggccgcccctactgggaagtgaggagcccctctgcctggccagccgccccgtccgggagggaggtgggggggtcggcccccctgcccggccagccgccccgtccgggaggtgaggggcgcctctgcccggccgcccctactgggaagtgaggagcccctctgcccggccaccgcccggtctgggaggtgtgcccaacagctcattgagaacgggccaggatgacaatggcggctttgcggaatagaaaggcgggaaaggtggggaaaagattgagaaatcggatggttgccgtgtctgtgtagaaagaaatagacatgggagacttttcattttgttctgcactaagaaaaattcctctgccttgggatcctgttgatctgtgaccttacccccaaccctgtgctctctgaaacatgtgctgtgtccactcagggttaaatggattaagggcggtgcaagatgtgctttgttaaacagatgcttgaaggcagcatgctcgttaagagtcatcaccaatccctaatctcaagtaatcagggacacaaacactgcggaaggccgcagggtcctctgcctaggaaaaccagagacctttgttcac

SEQ ID NO: 35101 - DNA, 1465 bp, Artificial sequence
  DNA replication origin
gtctgcttcatcactgagaaaagagtgtgttctttcctctctgaatccccaggaccagacatatagcaggtgtccaatgaacagctcagctgttgaatgaacaaatagattctgttaggccctacaaggcataaaagtaaattcagtctgggcacagtggctcatgcctgtaatcccagcactttgggaggccaaggcgggcagatcatctgaggtcaggagtttgagaccagcctggccaacatggtgaaaccccatctctactaaaaatacaaatattagccaggcatggtggcgggcacctgtagtcccagctacctgggaggctgaagcaggagactcacttgaacctgggaggcagagggtgtagtgagctgagaccacaccactgcactccagcctgagtgacagtgagactccgactcaaaaaaaaaaaagtaaattcaaaagccattcacctgtgcagaaggcagggccaggctaatctgaaggctctaagagaagtatccacccacttcttctgtaaaaggccagatggtaaatattttagattctttgggctctctcttcctctgtggcaaccactgaattcaaccctgttgcagacatagacaatagataaatgaatgggcccggctgtttgtaggtaggtgaaaaatggcttcccttcacctttataggttctttggctgggctacgaattaaattgacatgtaaacagacagggcaaaagccatatttaattatgtacctatgcaggggagtcccacaaaatacaagactccaaaaaggatcagagaggctgggcccagtggctcatgcctgtaatccaggcactttggaaggccaaggcaggcagatcacctgaggttgggacttccagaccagtctggccaacatggtgaaaccccatctctactaaaaatacaaaaaatagccgggcgtggtggaaggtgcctgtaatcccagctactcgggaggctgaggcaagagaatcacttgaacctgggaggtggagagcgcagtgagctgagatcacgccattgaactccagcctggaccacagagcaagactccctctcaaaaaaaaaaaagtatcaaagaaaagaataggggtttggggcttctgggaggatggtggtaacacaagttatgggagggtaaggggagaaattgtatgatggagaaagtctgtcttgttaagcaaataaaaaagtcttgcaggtaataaaagttgtctcagagcagccctcagaaggatacatgattgggaatggtttcactcttccctagttaataagatcgtaggaaagcattcctctttctgtctttaggcagataagagaaattcagagaaaacctctccttccctgcatttgctgttcccccaagtgcccttattttgaagcaatcagcagacaaaagcgcatatccctgtgttccaatgaaattttatttacgtacg

SEQ ID NO: 35102 - DNA, 1131 bp, Artificial sequence
  DNA replication origin
ctgaggcaggtggatcacttgaggtcaggagttcaagaccggcctggccaacatggtgaaaccctgtctctactaaaaatacaaaaattggccaggcctggtggcgtacgcctgtaatcccagctactggagaggctgaggcaggagaatcgcttgaatctgggaggcggaggttgcagtgaaccgagatcacgccactgcactccatccaaggtgacaagagtgagattctgtctccaacaaaaagaaagaaagaagctgatggaagagcttctgatggagtgggagtggtgtagtgaggtggtgaggcagtggtgcaaagtcccggatataaactgttctaccctcaccttagtcttgtatcctccaactataaagtgtgtcctttagattggattattccaaggtcccttccaacctaaaaatacttttgccaacaaaatagctaagtgccccttgaggcgttaggggacacggctccctgggcttgaatcccagctccactcctcatcagctgggtgaccttggtcagtgactgcgcttccctgggcttgtatttcgtcaccggtaaagggcgaatgacgacgacaagactgactttctggggatgctgtgaatcaactaacccacgggaagagcctgcaaagagcaaatactccgtttacaggagctcgagggtgtgtgtgtgtcttaagatggttttgttaccccagtaaatggcagacggggctatcgggtgggcgtgtagatatctccggtccttggtgcaaaagtaattaccgaccctgtttgtcctgggcttacggcttgggctcggagctccaccctgctgcttcctatctgcttgacttggggcaaattgttttctctctctaagcctcattttccttatgtgtaaaaatggctggttaaggcattcagggcagcgcctgacgccgagttaaacgtttggcagtttagtcatttctgctgctcacggttttacaagaatcatttttataaaatctggtgagatagggacttattggtcccattttcccgatgcaaaaacccaggacccttcaggcataatatggatccgggctaggatgggaccgggtcccgggcacttgggtcagaggtctcagctgg

SEQ ID NO: 35103 - DNA, 1127 bp, Artificial sequence
  DNA replication origin
ggatgcggcatctgagctctcccagggctggtgggcgagccgggggtctgcagtctgtgaggggcctcctgggtgtgtccgggcctctagagcgggtccagtctccaggatggggatcgctcactcactctccgagtcggagtagtccgccacgagggaggagccgagactgcaggggtgccgcgtgtcgggggtgtcagctgcctcctgggaggagcctgctggcgacaggggcttgtcctgacggctcccttcctgccccctcgggctgctgcacttgggggtctcagttgtttccggaggacagtctccgggggacatgggccggtcctgggcagcctcctctggtacccgcggttccccagacttgggggtgtcggccgcatgctgggggctctccgggacgtcccgagacctccgccgcacgatgcccaggtccccgacggtgatgggggaggtggcaagcgcggttctgcggctctgtgccagcttcttcaggacgccgctgaccttgctgctggaggcggatccgggggcagaggggaaccaggagcggctgatgatctcggtccgcttgagtttctgcttgtcctcgtaggctagaggagaggagaggacatttcaggggcggcaggggagggggtccagaactgccctctggtagaccagagtccactcatggctgaggaccccccatctccaggcaactctgagcctccctgtccccttttccccctggcctcctacgcacagtccagggtgtggaacttcagcagagccgccagcttgcggtcatcttccgtctcgggcaccagcgggatggtcaggctcgccttggcctgcaaggcctggtctctctcctcctcctcctggatggcttttttcttttcctgtgttgagggccaagaacaccagagatagggggtgtcaaagccctgtctcttctgtgtactagggggcactgctccaactctcggggtctcatttactctttttgagacagtttcattctgtcgcccagactggagtgcagtggcacaatcatagctcactgcagcctcgaactcctgggctcaagcgattctctcatgtcagcctcccaagtatccagtactacagatgtgcac

SEQ ID NO: 35104 - DNA, 1321 bp, Artificial sequence
  DNA replication origin
ccaggccttgcaggccaaggcgagcctgaccatcccgctggtgcccgagacggaagatgaccgcaagctggcggctctgctgaagttccacaccctggactgtgcgtaggaggccagggggaaaaggggacagggaggctcagagttgcctggagatggggggtcctcagccatgagtggactctggtctaccagagggcagttctggaccccctcccctgccgcccctgaaatgtcctctcctctcctctagcctacgaggacaagcagaaactcaagcggaccgagatcatcagccgctcctggttcccctctgcccccggatccgcctccagcagcaaggtcagcggcgtcctgaagaagctggcacagagccgcagaaccgcgcttgccacctcccccatcaccgtcggggacctgggcatcgtgcggcggaggtctcgggacgtcccggagagcccccagcatgcggccgacacccccaagtctggggaaccgcgggtaccagaggaggctgcccaggaccggcccatgtcccccggagactgtcctccggaaacaactgagacccccaagtgcagcagcccgagggggcaggaagggagccgtcaggacaagcccctgtcgccagcaggctcctcccaggaggcagctgacacccccgacacgcggcacccctgcagtctcggctcctccctcgtggcggactactccgactcggagagtgagtgagcgatccccatcctggagactggacccgctctagaggcccggacacacccaggaggcccctcacagactgcagacccccggctcgcccaccagccctgggagagctcagatgccgcatcctccccagaccgcgccttcctgcaaccgtggagttatttatttggtcctggtgagggtgtttgtgccttgtgagactccgtacattaaagacctgtctcttcttccctgtcttgggttgttagatggaccctggggctgcccccccacccccccaccttgaccaagcttggtaggcctctcatcagcaaatgctggtatagggtcatagctgtgaccacagacatggtccccttccagagtaacaagagtctcaaggtggtggtcccggttggccaggaatcaggacagacttcctggaggaggaggcatgggccaagtgtgaagggtgaaaagggggccaggaaccacacacacaaggccagggacaaggcacacggggtacccaggatgtgtgccagatgcagcaggggctggagcacacaggtgtgagctttttattatacccagcccaggggtggcccatggaaaa

SEQ ID NO: 35105 - DNA, 1386 bp, Artificial sequence
  DNA replication origin
tatagtgggtcactgtacttaaaaagagtcaatataattcctgctcagcgccgtgcctggtaccagatccccgtacctctcccggaccgcctcttccgtagcgccctcccgttcggcctcccgggctgcaacatcagccaggtcgcgggcggcgcgggccatgttgacagcggtgggccgggcggtgacgaggaagctcagcttgtcgcgcacgaaggccacgagcgcggcgagtcccggtcccccggcgcccgcctgcagctccacggcgaggctgagacagcccaccagggctatggccggggcgccccgcacctgcggggcagggatttgggcgtcggaagctgcaggcgcgggcgcactcccacctccaacccggccgccccgccgccccgccgccccgccgccccgccgccccgccgccccgccgccccgccgccccgccgccccgccgccccgctgcaccttcatggcgcggatggcctcccaggcctggtgcaccgagcccaccgcctcgtagcggctctgcttgggcagcagcagctggtctaggatctgcagggagccccgcgagtagcggatcgcctccagggtcatggtgcagcagccaagcccagcgcaactcagagggagctaggggtccgcgcgcacttgggagcggggcggggccgtgggcggagcctcccccggaaaaagagacacgcacatgcgcatccaacccgattccacgggttcccaggaggcggattccacgggttcccaggaggcggattccacgggttcccaggaggcggattccacgggttcccaggaggcggattccacgggttcccaggaggcggattccacgggttcccaggacgcggattccacgggttcccaggacgcggattccacgtggccgaacccactccacgactcctgccaagcccgaacggagtgagccgcctcctcggaaccacaaaagtggcagcatttatgggacgcctagtggataccaggccccgtgtttaacaacctgctgtctagagttagggatgtatccccagtggcaaggtaacatcaagtgttcaaaccaaagaatttgttaaatgatcttccaaggttgagggggaggtagtggggggtcgtgtgccccttgatggatgcaaggctgtttctgggccattttctgctcggtttcattcaaaagtaacatgcaggacaggcgctgtggctcacgcctggaatcccagcattttgggaggccgagtcgggcagatcacttgaggtcaggagttcgagaccagcctggccaacatggtgaaacccagtctctactaaaaatacaaaaaattagctgggcgtggtggcgcacacccgtagtcccagctgctcgggaggctg

SEQ ID NO: 35106 - DNA, 1515 bp, Artificial sequence
  DNA replication origin
acagctacctaatctttctctgctcactcccttctccccagttcctcctggagtccacgtcctgccctggctctaggcatatggctcaggcggggcccatcgaatgactgctctgggatgggcaggtgccctagtggaccccctgagatacaaggagacttttctagtataggaggctcttttcctcatgatttggaccctaacagccgcctgccagcccatggaacctgaagatgaaggagggcagagctgaagcacagagatagataggtcctgatgctactggttgagccccttgatcttgccatacctgaagccaactgtataagtgtttccgtactagaactagtaccttcccattttttttgtggataaagtggtttgggtttgggattctttctcttgtatctaaaaaagttcctagaaggccctcccctaccccctgaggaggccctctcacctagggctgtaccatagccagcggtggccagagcaccagtgttacagtgggtcagcacagtcaccttgccaccgctgggggccacccgctccaggaggtggcgggctcctaggtccccaatgcttcggttgtctctgaggtctttctccagcatgtcctcggtgcagcagatcactctggggtgacaaggagttttcagcaccagccaccaggacccggggcccaggccaacgcctcctctctgcctaacgctgctgtcctggagccctcctgctcaaagcctctcattgctgtggggcctggacccttcggccagggccaccgaagtgtcactccgttcattcatgcaaagacatgtttaccaagcagttccggtatgacccagcagtaaacaagacaaaaatctctgctcctgtggagttgacactggggtgagtgagccagctgatgaagagataataaaatgaaggaaaagccggcagaatcaggcaacagagagcagcgggtgagctggatcatatagaatggtggaggagggcgctatggatacctggcccgcaccaatggcacgtgcaaaggctgtaaggcaggctcgagcttggtggggtaaagtgacattgcagggagggctggagcagaaaggaagtggggggaaaaagatggcaggaaggggaccaggacaggaaaaaaagttcctcaaaagcagaaaccaagagaacacggagatactaaaaagggcctccaagggcggataaggggctgcgtgtattcaggggaggcacgattaaggagttaggtttcagggccaggctgcccaggctagactctgggccccatctgtggggccctggacaagggacttaaggtcgccgtgcctcagtctccccatctgtggggccctggacaagggacttaaggtcgccgtgcctcagtttccccatctgtatagtgggtcactgtacttaaaaagagtcaatataattcctgctcagcgccgtgcctggtaccagatccccgtacctctcccggaccgcctcttccgtagcgccctcccg

SEQ ID NO: 35107 - DNA, 1140 bp, Artificial sequence
  DNA replication origin
gtgtaaagatcataaaacgttgtaagttttctaaaacacataagctctcaataaacgttagcttatcattgtcaccgttttgttcgtaatgtttgaaaactccaactgtgatccactacactacccttgtgggatgctgtctctttaactctgtgccacgttgtatcccgtgagttcttgcgtttttccgccccgctgtatcccatggttccctgtgccttccggctacgactgctcacagtcccgcctcttccgctgcgtgccggaccatggcgcaggggcagcgcaagtttcaggcgcacaaacccgcaaagagtaagacggcagcggcagcctctgaaaagaatcggggcccaagaaaaggcggtaaggagcggcccggggacttgggggcgaggtggacccccggcttcccggcctcacgtgagcacatctttccccaggtcgtgttatcgctcccaagaaggcgcgcgtcgtgcagcagcaaaagctcaagaaggtgtgcgggggcgagagatggagcccggagggcggcgagtagcgaggggtggaacccggaggacggcgaggggggatgggtggagcccggggatcagtgaggggagagggtggatcctggggacgagctaggagcgaggggatagagccaggggccgcgttaggagcgaaggatggagcccggggcgcagagaggggtaagaggtggaagctggcgagggataggggctgggggacgtgctagggacgagagatgaaatctggaggccggcgagggaaggagcacagggatcggcaaagggcaagggatgaggcctggaggactcccagctctgtgggcctcccttttcttccttgtgcaaggggtgcaggaacaccacttaccacttcaaaagggcctcgtagaagcaagacctgcggcccaaaaagggttccaataacgtcagcctcttgctgttactgttttctttaattgaactcaggaagacagcgaggtgacatgggaagggaattgaaagcccagctttgtaaacctagaacagcagagggctcaaagaagtgtgagggtgcgttggttatcgtcatttttttttgagtcagggtctcactgttgcccaggctggagtgcagtggccccattat

SEQ ID NO: 35108 - DNA, 1307 bp, Artificial sequence
  DNA replication origin
ggcaaagcatgtgttggttggtacattcaacaagttctaggttaagcgcctaccttccaggtgctgccggtacagtaaagcacagatgggacaaactcctgcctcctgaggctcacagtggagagggagagattgaaattaagcaactaccaaaggtggatcacttgaggtcaggagttcaagaccagcctggccaacatggcaaaactccgtctctaccaaaaatacaaaaattagccgggcgtggtggtgggcgcctataatttcagctattcgggaggctgaggcaggagaatcacttgaccccgggaggcgcaggttgcagtgagccgagatcgcaccactgcaccccagcctggacgacaagagtgaaactccgtaaaaaaaaaaaaaaaaaaaaaaaaaaaaaccgccgaaacagataaataaatggtaatggtgagaagtatgaggaaggaaaaatgcagggtcctctgaggacattggcaaggagccgggacgggaacgggtgatggaagccatggccagcttccaggccagagacggtggcctacacaagctgagtcagaaaaaatgctcagaggtgctggggtttgattaagtgttagggtgaacctcatggaattgccattttaacaggccaaaaatggtaaaaaaaaattagcaatttcatatgacccaagatagtatctagggcatggaaaggaggggcggggtactatactagttttgaggctcaagggatgacctatgaaccccctaaccgagctttgtttctggagagggggtccgcggcccgcatgagctccctcagtgagcctgcgacccctccgcccccacaagaaccaaaacttgacccggtgcccagagaggttgagtgagtttctcgggtcgcacagctgggagggacgaggggctgagccactgccaagggatcccgctgctctgtctcgctcaccggccgggctatgttgattgtcccctcgcggcgcccggaagcgaccctcagtaaacaaagccgtgtgtgggcgcagccccagaagcctggggcgcgcagtccagcccaagagaggcgggggaggaatgttgtgaatgaaccccgggcccgccccgaaactccgcataaggcctgggccgcgggggtcctcccactctgattggcctctggcgccccgtgattgacagcgcccctcgctgtgcgctctggttgggtaaacaagaaaagactggcatcgcagtcatcgagtgagcagcgaggcttggacacgggtctggcggcgcagccaatggcgggggagggccgagga

SEQ ID NO: 35109 - DNA, 1318 bp, Artificial sequence
  DNA replication origin
tcggagatggttttcagattgttctgtgtgtctcacatgcaatgaaggggccctccttagcccctactccacctgggtttctaggggaagtgggagaggcaatgaccagcccaggcctcagggacagttggcaaatgactaaggagggattttccagtccatgaatcagagcctgcccatccacacttggcccaaacccatccgtccaggccgacttcctaactccagagaggccgggcaggaaagaacgccccctgaagctggacagaggatagagcccgtgtgtgcttcctgttcaagtctgggccatgtctccagttccttgggggcccacactgaagctgaaaaaggggacttaaagggccccagctctgggacatcctgtcagtgccaccagaagccacagaagagagcttctaggtgcacctgtccagggaccaccacccaggctccgcccctgctgttttcctatgggaagagataggataggtcagggggatgaggtggggaggaggagggaccctggcatttcagtaatccctgcggcaagccaggagaagacgggcagccccgaaagaggaatctggaggagtagagaggggtccccaaggaacaggtggaatctggaggctcgagggcaggaatgaatggggaaaaaaggggtgtcttgagctggaatctggagagatgggggagttatttacttggggtgtacggtagggatctggagagcaggaatggggtagtgtgagtctctagaggctacgatggagggagacagggtgtccccaagcggggggccgaagagaggattgaagactgaatggggtgccctgattggcgaataaagatgcggtaggaaaagaggggtaccgttgggggataaggtgggaaaagaggggtaccgttgggggataaggtgggaaaagaggggtaccgttgggggataaggcgggaaaagaggggtgcccagggttgtaggcgggccatgggggccagatctcagagatctggggttggtaggagaagaaggaagtgtcctgatttgggatctggggcgctgaggggcagagatggcagagaagggatgggggtgggttactgggtttgaaggacagaaacaggaggatgagggggtgtttccaggcagggttaagggtcctgggggtggaatctcagggggtgtctctgattgggttagctctggagtctggggattgtgggggaggagaagacaggtggggaaggtgctgggggtgcgtccctgcccccgcccccttcccccgcggtcacctgctcgaaggcccagctctcggct

SEQ ID NO: 35110 - DNA, 925 bp, Artificial sequence
  DNA replication origin
gattgtacaagattttttttttttttttttttgagacggagtctcgctctttggcccaggccggagtgcagtggcgcgatctcggctcactgcaagctccgcctcctgggttcacgccattctgcctcagcctcccgagtagctgggattacaggcgcccgccaccgcgcccagctaattttttgtatttctttttttttttttttttttttttttttttttttttttttgagacggagtctcgctttttcgcccaggccggagtgcagtggcgcgatctcggctcactgcaagctccgcctcccgggttcacgccattctcctgcctcagcctcccaagtagccgggactacaggcgcccgccaccaagcccggctaattttttgtatttttagtagagacggggtttcaccatgttagccaggatggtctcgatctcctgacctcgtgatccacccgcctcggcctcccaaagtgctgggattacaggcgtgagccaccgctcccggccccattttttgtattttgtatttttagtagagatggggttttactgtgttagccgggatggtctcgatctcctgacctcgtgatccccccacctcggcctcccaaagtgctgggattacaggcatgagccaccacacccagcctgtacacgatgttttgagcaaaagctcaaggatcaccctagaacccaggcagcagggtttagacaaggggttgggggagaggatggtgaaccagaaacaggggaggagagatcccagaacttacacatcagagcccatgtaaaggaggggtgaggccagatgtggtggttcacacctgtgatctcaacactttgggaggccaaggcaggaagatcacttgaggccaagagttcaagaccagcctgggcaacacaatgagaccttgtcttcac

SEQ ID NO: 35111 - DNA, 1253 bp, Artificial sequence
  DNA replication origin
caggcgtgagccaccgctcccggccccattttttgtattttgtatttttagtagagatggggttttactgtgttagccgggatggtctcgatctcctgacctcgtgatccccccacctcggcctcccaaagtgctgggattacaggcatgagccaccacacccagcctgtacacgatgttttgagcaaaagctcaaggatcaccctagaacccaggcagcagggtttagacaaggggttgggggagaggatggtgaaccagaaacaggggaggagagatcccagaacttacacatcagagcccatgtaaaggaggggtgaggccagatgtggtggttcacacctgtgatctcaacactttgggaggccaaggcaggaagatcacttgaggccaagagttcaagaccagcctgggcaacacaatgagaccttgtcttcacaaaaaaatcaaaaaatgagctgggcatggtggcgggtgcctgtggtcccaggtacatgggaggccaaggcaggaggatcgcttttgcccgagaggtcgagcctgcagtaagctatgattgcaccaccgtactccagcctgggttacagagcgagatgctatctcaaagagaaaaaagaaaaaaaaaaaggaagagaggtgagggccactctagggacaagggtagaggttgagacatggtggtgaaggtgccagacctcaggcttcaggtccagatggggttgggttcgggattatgagctgaaggtggaaagtgctcctagagccctagacctcaggctgctgagctggggaatggggaatgaagtagtgagacggagagaagagcaggtcccagctgaggatcagagaagcagctgtcagccagcagtgagaggaggctccagacctcgggctgagggacccagtgatgctttgggccaggggtttagagccagaggtaagaatgatcctagacctcaggcagtggggcccacgtgggagttggacacaaagatttagagccacaggtgagagtcttagacctcaggcagagaggctgggatttcaaaggcttagagctattgttgagcaatggtcttagacctaaggcaacagggctgaggtgggaatgtagagtagaagtttagaattcttttttttttttttttccgagatggagtcttgctctgttgcccaggctggagtgcagtggcacgatctcagctcactgcaacctccacctcccaggttcaaggaatacccctgcctcggcc

SEQ ID NO: 35112 - DNA, 1243 bp, Artificial sequence
  DNA replication origin
tcagctttgatcgctgcaagatcacgtccgtgagctgcggctgtgacaaccgcgacctcttctactgtgcccacgtggtggccctgtccctgtaccgcattcggcacgcccaccaggtggagctgcggctgcccatctccgagacgctctcccagatgaaccgggaccagctgcagaagttcgtgcagtacctcatcagcgcccatcacactgaggtgctgcccactgctcagcgcttggctgatgagatcctcctgctgggctccgagatcaacttggtgaatggtaagggcaccccgggggtccggtggggagaggatgcccaagcgcacagccacgccacttgctgtgtgcccagtgctggtcacttactgacagaaagttgtgggggcggggggcggaaaacgcgccatggcctgcatcatctgaggtcacccacctggtgagtggcagatcccagatatctggacacaggacagatgagtagttgcaaatcagcctacgggcagagggcgagggcaggaggggagatcctgcgttagagggcaagtgggaggtctggccccagggctgggtatgtcaatagatggagcatcctgggtatgggaggagaagagggggcgtgaagggaatgtgggacgtttgtgggtgtcagaggtgttatgggtgaggggatacaccaggaggcgtggtgagggctgggagggtttggggggctccgaggggcttgggttgcctagctaggatggggaaggtgagtagtaggtggaggcatggatggatgatggagggaggtgctgggtgggtacagaaagtgttcgtgattggctgggcgcaggggctcacacctgtaatcccagcactttgggaggccgaggtgggcggatcagttgaggtcaggagttcaagaccagcctggacaacatggcaaaaccccatctctaccaaaatataaaaattagccgggcgtggtggtgggtgcctgtagtcccagccactcaggaagctgaggtgggagaatgggttgaacccgggaggcagaggttgcagtgagctgacatcgcgccattgcactccagcctgggagacaaagtgagaccctgactccaaaaaaaaaaaaagcgttcatgatcagtcactgagggcaactgatggtgtggaaaaacgaatgggtgggtgggggatatttttttttttgagatggagtcttcctctgtcacccaagctggagtgcagtggtgca

SEQ ID NO: 35113 - DNA, 2627 bp, Artificial sequence
  DNA replication origin
ggcgtggtggtgggtgcctgtagtcccagccactcaggaagctgaggtgggagaatgggttgaacccgggaggcagaggttgcagtgagctgacatcgcgccattgcactccagcctgggagacaaagtgagaccctgactccaaaaaaaaaaaaagcgttcatgatcagtcactgagggcaactgatggtgtggaaaaacgaatgggtgggtgggggatatttttttttttgagatggagtcttcctctgtcacccaagctggagtgcagtggtgcaatctcagctcactgcaacctctgcctcctgggttcaagcaattctcctgtctcagcctcctgagtagctgggattacagatgcacaccatcatgcccggctaatttttgtatttttgtagagacaggggtttccccatgttggccaggctggtcttgaacttctgacctcaggtgatccacctgcctcagcctcccaaagtcctgggattacaggtgtgagccaccacacccagcctggacgggatattaacaatgccgttaggtgaatgggaattggaagctgagtgtggtggctcatacctataatcccagcatttgggaggctgaggaaggaggatcactcgagaccagcagttcaagaccggcctgggcaaaatagggagacctcctctctacaaaaaataaacaaaagtagttgggcatgatggcacacacacgcctgtagatacttgggaagctgagatgggaggatcatgagcgtgggaggtaaaggctgcagtcagctatgatcgtgctactacactccaacctgatgacagactgagaccctgactcaaaaaacaaaaaaaaaaaaagaagggaaggacagaactggtggtgattggaggtgaggatgagtggttgggtggggagggctttgactagtggagttaaggtagactgacagtggtggacagatgaagttagtgaaagaatgaaagatccaatgggtacatgcattgggagtgagttgatgggtgaatggaaggaaggttcacatatgtggatcaacatcgtgggtgggcagagtgggtgggcgctttgtgtagggtggatggatggacgaatggggtagtgggtgttttgagaggtacatatgaatggatggtttgataatgaatgggtggtttaatggaagcatagagagttaggattagttattgggtgataactaatagttatcacctagataactagggttagttattggatgatagttactgggtggggtggatagtgtacttgtgtgggtcaatggacaaatgggcgggtgggtattttgagtggttagttcacgtggattggaaagataaaaggggtgagtgggcagatagatcaataagatgagtatatagatgggtggatgggtgggaattatgggtagggtggatgatggacccatgatggggtaggtggttgtttaaagggtatggacatgtggatgaagtgaaatgggggatatggccaggtagatagaggctggcatgacttgggtgggggtggataagtgggttgtgtttcaggtgagacagatgagtaaacagatgggtcggtggtgttttgagtgggatgggtaaatggatgagtggatgggtagatggatagatgtgtagtgtttcaggagagatagatgaatggattggatgggtaagtaaatggatgaatgaacaaatggatgaatgagctcctggtgttttgggcaagatggatggatggatggatggatggatggatggatggatggatggatgaatattactacaggggagatagatggattggatggatgactcagtggataaatgagcaaatggatgagctggtggcgttttggacaagatggatggatgcatggatggatggacagatggatgcatggatggatgcatggatggatggatggatggatggatggatggatggatgggtgtatgggtgtatgggtgtgttgtgtttcaggtaagatagatgaatggattggatgggtgatgtattactctgttctcacactgctataaagacatacctgaaacaggttaatttaaaggaaacaggtttaatcggctcatagttctgcaagctacacaggcttctgcatttggggaggcctcaggaaacttacaatcatggcggaaggtgaaggagaagcaaacacatcttcacatggctgtcaggagagagagagcgaagggggagacactacacactttcaaacaaccagatctcatgagaactctatcatgagacaacactaagggaatggtgctacaccattagaaaccatccccatgatccagtcacctccctccatgccccacttccaactctggggatcataattcaacatgagatttgggtggagacacagagccaaaccatatcagatgactaagtggatgaatgagaaaatggatgcatgagctagtcatgtttaggacaagatagatggattgatggagggatggatggatggataaacatgaatagatggtcgggtgggatggacaagcagatgggtgggtggggtttaggtgggatggatggaactttagactgggttgggtgacttggaagaatggatggatggg

SEQ ID NO: 35114 - DNA, 1456 bp, Artificial sequence
  DNA replication origin
tcccaggttcaagcaattctccggcctcagcctcctgagtagcttgggactacaggcacccaccaccacacccagttaatttttgtgtttttagtagagatggggtttcactatgttggccaggctcttctcgaactcctgaccttttgatccacccacctcagcctcccaaagtgctgggattacaggtgtaagccaccgtgcctggcctactgaaaatatttttaaaattagccaggcgtggtggcgcacacctgtatttccagctactagggaggctgcggcatgagaattgctttaatctgggaggcagaggttggttgcagtgagccaagattacaccactgcactctagactgggtgacagagcgagactccgtctcaaaaaattaaaaaaaaaaaaagagagagagaggagagcgaggagagagagaagaggaaagaaagaggtggggagggagggacagagagagatggggggagagagaggggaaggaaggaagggagggagggaaggaggctgtatgagccccaaaaaccacattgtgtactagatatgggggtgggggacaggagggaggccaccagttgagagagctagtcgatggggttgatggatcagctatcaggaaattgaacgaagaaaagtgtgtcgtggaggaaacatgggggccctgggacccgagcagagctctgaccaggcttggcagcatcagtgaaaggcccctagattttaaaaattagccaggtggctaattagctgagtatttaaggatgtgcatggccaggcacagtggctcacacctgtaatcccaacactttgggaggtggaggcaggtggagtgcctgaggtcaggagttcaaaaccagcctggccaacatagtgaaaccccatctctactaaaaatccaaaacaaattagccaggtgtggtggcacgtacctgtattcccagctactcaggacactgaggcaggagaatcccttgaaccgggaggtacctggaggttgtggtgagctgagatcacgccattgcactctagtctgggcaacaagagcaaaactccatctcagaaaaaatttaaaaaaagaaaaaggatgtgcaggagttacccaggagaaggggatggaggaagtgctcagaatagaaggaacaccatgagcagcagccaggagggaagagagtacgtggcttggaggacgaggctggaggattggcctccagatgaggcaggtcaccagtatatggaaaaacttcatactggtccttgggggccctaaaggctgttggggctttatcttcagagaggtggagagggaataagggcaatgaggaggggaatgacacttcgggtgttttagaaagcgtccagtggccaggcatggtggcccatgcctgtaatccctttgggaggccgaagcaggaggatcgcttgagctccagaggctgcagtgag

SEQ ID NO: 35115 - DNA, 1331 bp, Artificial sequence
  DNA replication origin
tgatccacccacctcagcctcccaaagtgctgggattacaggtgtgagccactgcgcccggcccctaggtggctttctgtaacaggaaagggccagagaggagataattggcaagggctaggggcactgaggtctgaatcttcacagaaccatggcccagtacacatccctccacactcacacatgtgcccctgggtggaaggatctgtgtgaacaggtcgggtggtggtcagaggctggtgctgaggtgtatccgatggtgtcctctgtcccgcccttcacccaggagaccccaagtggctgcacacggtactgggctccatccagcagaacatccactctccggccctgctctttaagctggcgcaggacgcctgcaagacagccaccccggtcagcgccccaccagacaccacgctgctgggcatcgcactggagctggggctgcaggtgagggctgccaggtggatgcgggagggcgatggtggctcggggccaggactgactgtgagctgcgcctcccggggcatgggctgagtgtgagccacttcgctgggggcccggcatttgcgtgagctattcctctgtggctggggactgagcgagaaccactcttggggcggggactgtgagtgagacacacctctgggggcgtggcctgagtgtgggccacttccttgggggcgtggcatgagtgagccactcccctgggaatggggactggatgaatcgtgtctctggggatggggtcttcacttgggccacacctctgcaggtggggcctgagtgtgaacctcacctttaggggcggggccacagaaggccaaggtctgtaagtcatgggagtgtgggaatggggttcccagtagggatgaagcctatgaattattaatagaatccgtctatggaggagactgaggtctaggggagagttgtcactggagcggagaggcagggcctgcaagccagcagatggatcgcaagcggagcctgggggtggggcctgggagtgatgtgctattggttaaggatcatgggtgggtgagtttgaagctgagggtgaggcagagcctagcaataaagagcttccttgggggcagggcctgaagaggattgccgcctaaggagagggattcaccactgaagggctggcctggcggaaggtcttgaagatgagatgccaactctaggggtggggtctgtggttgaaagccctgtatgagcccgggtgtggtggctcacatctgtaatcccacactttgggaggccgaggggggcagatcacgaggccaggagttcgagaccagcctggccaacatgatgaaactccg

SEQ ID NO: 35116 - DNA, 950 bp, Artificial sequence
  DNA replication origin
tgcaagccagcagatggatcgcaagcggagcctgggggtggggcctgggagtgatgtgctattggttaaggatcatgggtgggtgagtttgaagctgagggtgaggcagagcctagcaataaagagcttccttgggggcagggcctgaagaggattgccgcctaaggagagggattcaccactgaagggctggcctggcggaaggtcttgaagatgagatgccaactctaggggtggggtctgtggttgaaagccctgtatgagcccgggtgtggtggctcacatctgtaatcccacactttgggaggccgaggggggcagatcacgaggccaggagttcgagaccagcctggccaacatgatgaaactccgtctctactaaaaatacaaaaattagccaagcgtggtggcacgcgcctgtaatcccagctactcgggaggttgaggcaagagaatcgcttgaacccaggagggagaggttgcagtgagccgaaatcacaccactgcattccagcctgaaggacggagcaagactccgtcttggggaagaaaaaaaaaagtcctgtatgcagggcctgcaactgagtgtctgggtcatccccaggggctgaacaaagggtggtcctgcaaggccaaatcttgggtgcagcttgctggaaaggtgtcattggtagggtgtgagtgccatgggacctggaggagggtggggtctgcaggatagacaggtaaggggcggggcctcaaagggtggcagaagttcactaagaagataaggaatagggccgggcacagtgcctcacacctgtaattccagcattttgggaggccaaggtgggaggattgcttggggccaggagtttgagattggcctggacaacatagtgagacccccatctctacaaaaaactttaaaaattagccaggtgtgatggtgcacccctgtagtccca

SEQ ID NO: 35117 - DNA, 976 bp, Artificial sequence
  DNA replication origin
gtgaggcgcgagtggctggtggtgatgtaggcggtgactgccgcgtccaggagctggcagagcggcgcccggtcggcacccagtggcttggcggcccggcgtgcccctaaggggcccagaccgggcgccgagagagtccagcggcgcagaatatcggacagcattggggcacagtggatgctgcgaatgatgagggggacgatggcagagagctcgtgccggcccagggagtggctgagagagcaggcccaaagcacgtcgttgacggcagggtggctgtcctggttgaaggcgatgctgagctgcgccagggccagcgtcgccagcttgtaggcccggagcggcagcccgcggtgctccatatagcgggccacagtgaagaggtgggcgtggcccaggccgccggccgccgcgtccagcacgatctggtaggccgcctcgaaggccgagtggttcttctcgcacagggtcagggcaggcaaggcgcagttctgagggtccttcatcgcgcactgcaaggccagggtgcgggcgcaggcccagagctcctccctccgcgatgtgtccagctgcagtcgcagcagagtggcgtgtgtggtgcccgtcactgccacgatggtagccgcctccactggtgtgaataaggaataccagttctgcatgatattcatcagggcttgcgggcctggtgggaggtgagggagggaaatccgtcaggagcgggggcagacacacgtacatgtatgcgtgggttaaccatgacactgccacctccacttccacctccacaccatgctgaacagaaacttcctttccaaatcatcagggcgcacctggactaggtgggaatcacgtgtgtagaaggctaagctttggagcctctttctgcaaccccctcaaccccctgcagccacattagcctggccagcctctaggcctttgtccagctccatgctggccagccattccctcccgg

SEQ ID NO: 35118 - DNA, 1511 bp, Artificial sequence
  DNA replication origin
ccgggaggtggaggttggagtgagcccagatcgcgctactgcactccagcctgggcaacagagaaagaccaaaaaaaaaaaaagggaaatatttacataattaccatggaatgaagccagcagtcgctcccatcccacccctcgcttggcgctgcacccagaaataaggccagacattttttttttttttttttttttttgcggaggaaacgaggttgagggtgtgagtggctctggagatgcaccccagtctcaaaataaaattaaaaagaaaaatttctgttcaatctttgaaaaaaaaaaaggaaaaggacatgtaatacaccgttcaataaatagaaaaaaagttacaaaatgatgtggtattttgtccttaatatacaagaagggaaaagatgtgggggtgacttgggggggtgatgttctcccttctcctccctgggtcaaggtgggggaaaggaaggatggccaaagagagagggcggcagggacttaggtgcagagagaaaggcaggtaagtgccgggaaaaatggaaacagagtaagatgaaggggcgaagcagaaagacaggaggcgaaagggtgaaaaagccagaaaaacaccaagatacaggtctctttcctttccagatcgggggtgggggtctccggctctctcgcgtctgtgtcccccaaccccaggttggaaggggcagtgtgagcctcgctcagttcctgagttgtacgtccagtgactagcaggtgagaagagagggcagcgaggacttccccaaccctgagcccaccctgggaccctagtgcccaaggaaatgggggtcctggccggataggataagggggtgaggtatgaggctgaggcctgaggcctcttcaattccttcagtgggggtgagccaatggtcctggctgggcagccactttggaggtggcataatggggggccctgagcagtagggggtgggggaggacccttggccacccagggtggggttgggggaaaatgtgctacattgacttagagggtcgatttctggaaagtcctgcctcccagcctccctcctggagcccaagccagtctgggtaaggggagtttgcctattgcttttggggtgcccaaagtggggtcataccagcagcccaagcacacaccccttccaggcttctgggtggcagtatggcttctgcttctggagtcttgcacacttgctcacagactcccaggcacacacgtggcaggatgctgctccccctgcccccatctccagccgggctccttccctgacttaataatactgaaatgccacgtgggcctaattggagagcaagggtgggggacgcaggggcgagggggatccccactcccacgcaccccactgtccctcaaccaaaacgctcccgcaccaaaagcatgagtttcttcttgcccttgtaggtctgtttgaggttctccaagaactgtgagaactggaggtgcccgtcgggcgccagcaggaaggtctcccgggccttgc

SEQ ID NO: 35119 - DNA, 874 bp, Artificial sequence
  DNA replication origin
tctcccaatgcgccggaattacaggtggctcaggtgtgagccaccgtgcctggcttttctccactatcttgaaatcagatgggaggaggcttttttctgggtgggactgaggaggcacactgaagtcccccaggtcatcggggctgggccattgcctttttccccaccctgggtagtcgtggacagaagcttgggatgggatggagaggagagatcgtgctgtgtgtcatgtctgttgttcaagtaaataaaagttgccctgacttcattcctgaaggtctggtctgtgattcactcctgcctcccatcgctggagtttcagcttttgattggcctgaatttaccatcctggcactccgggctcctgcctgcccatccctgccccacctgctctgtgcagcagggtatcctgtgcttggaaaggtgaccttgggggtgtcctggatcgtggggtgaccatgagggaaaccctagagtggaaagattttcacatcgctgatcaagggaggatggaagctgatctgaagtggtggtggtggggtgaccctgagggaaacgctgagcctgaggggtgacatgtggcgataaccaggatctgagggtcttgagctagtgacatttgggggcaacttggacctacgggattactcaggcctcaggggaagatttggggtgcctggtatctgagaatgctggaggggaacttgggtttgagggatgtgacatgaaggaaaccccagttcttaaggggggacatttggatgtggctgggacctgcgtgacgccccaggaacatgggaacattcgtgggtgacacctgaggggcacagtaaagggtcccccaggtccgaaggcggcagggaccacaaggggt

SEQ ID NO: 35120 - DNA, 968 bp, Artificial sequence
  DNA replication origin
tccttcctgtaacctctgttttccacgttggatgtgttttaggccacagtcaggcctggcttttttttttttttttttttaagacttattccatgaccttaagccccagtctgaatctctgagccttaattattctatctataaatgggaagcatttggaaatgggacggagagaagtgtacactttgcccctggccgccttcttccctcctggtgtcctgggtggacacggaggtgtgtctggggaaggtgtgtcctttagggccggtcgcctgggaaggatgttgagcggagggcagtgggtgtgggtgagaatccctgggcagagaagggcgccgccatgctgggcacggctgagtcacgctccagcgacgccttgccccagggtgctggagctggcgccaccctgggtgtggtcactgagctgtggccctgggcagagcagggctgggtggtctaggatgtggggcctcggtgcctggggaactgacttcgaagatgccaagccccctggcctcccgcctggcctaggttctggggtcaccctccaggactgtggtggcccacaccctgagaatgccttggagagcctagaggccctgagccttgggcctgggaatcggtgcgttgagggaggtggatagggcgcagacaccagtgactgcattcaaggccaggggacccccacagccaggccctcactgcaaaatgtacctatgtggggagaaggcaggggtggacctgatgacggggtgtaccactctactaagggttcccaacatgaaggtgagggggcccctgggaattctgtgattggtctgggaaagattaaagtctaagtgggggttagagtgtggactggcgggacgcaatgggggctgggatgtcactttcatggttcccctatttataacaagtgattcagccctcacttactcaccccttcctgagcctccccccaccccagc

SEQ ID NO: 35121 - DNA, 2048 bp, Artificial sequence
  DNA replication origin
ttcggccccgcggctggccggccagtgagtggggtggagcgcggccggcggccgcccccggccggtctcgggcccgcagcccgcccgcctgagcctcggccggcccggcccggggcggcggccggagcccggagtgcgcgcccggctcccctccccccgcgggtaagtggaagtcaggagggacccaggagggaggccgggagcgatcggcgcctcggcggcagcggcgccggcaacttttccgcgcctggctcgtgggcggagtggggctgcgcccggcgggtccccaagagcgttgcgagaaggcgagggcgccgccccgcgcgccttgagcgccccgccgcccggggtgggtcggggatcggggacagtgcgtctgacggtggcgacggcggccgcggagtcccggggcgccccctacggagcgggggaagggcggcccggcctctgttcccttcccagtggcccctccaccccgaccccccaggggacgcatgggaatgcggtggggagggcgggtccccgcgcgacttgggcaggtcaaggtgggcagagagttgtcagggtgggagggcttgtgtccggctcggacatggggcttgggttgaggggcttggatatgcatatgcctaccccactcctagccccccgacctggcctttggacgggaggaatgggttgggggggtctctcagagttctttgggtgggggcgggggtggataccggtccaagttcttgacgtgtcgcccgctgggtagggggaaggtctcttgttgggcaggggctggtgggagctggggggatgtctcctttcccttcggagaaaagcgctcattcaaggttgcataggaaggaaagccaggttggggaccagccctgtgcagcttggggtccccgtgccttttggctgaaggaggaggttaaaagggcccagactgaaccccgacccctctgtcttagccccagactgttttctgattttagcactagatttggctgcccctaaagcccttagccctaactgaccttcctgcccagcccagcccagcccagcccagccaggccccagacccagtggcttcttgaatgttttggctgtgcagctggctccttgtcacctgcccccttcccaaccttccccagctggcagcctctgactcctggtctatgagggtgaggctgggggctgggggacccctggcataaggggtgtcctctggcagtcctgccccagctggagggctgtacccaacaggtgcccaggcttagaggcgaggtgatgttggacacaccctgtccgctcgcccacatgccctgcccgggccagcctgggtacatgtgttcacatgccgatgtcctgggaaggcacaggccctggggctggtgctagctttgttctctgatcccgtgaggcacccatggccctctgcccttgcagcacgtcctctgggagctccttcaagaccccaacaggcaggccttgcctgtggatctagagggggccctaaaataggtgccggcctggcctggggctggcacgcggagcacatgcgtgacagggcgtgtccagagggtcgggcctgtctgtgctggcctggccactgagcctccgccgacccttgctcgctggagaaagacagcagaggcggatgctttaggagggacccccgtgtcgtgcccaccctctaacaatgcaagtggacgccagatgttccatgcagaccgcagctgcggggcaggcccccatctatctgcaatcccagggtaattagcccggtgggtacactggggtgacccgctcgcccgatctaggtggtgctttgatacctcttaaagcattttttggagtttgcccttcaccttggaaagctgggtgggggattctgtcctccatgaataacggcgccaggaaccttgggcgatcttgagaaaactccttcctgtaacctctgttttccacgttggatgtgttttaggccacagtcaggcctggcttttttttttttttttttttaagacttattccatgaccttaagccccagtct

SEQ ID NO: 35122 - DNA, 2710 bp, Artificial sequence
  DNA replication origin
tatataatttttaaacatatagacacataattttaaaatatatatagatatataatttttaaatatatagatatgtaatttttaaaaatatatatagatatataatttttttttgagacagggtttccctgtgtcgctcaggctggagtccagtggagcaatcttggctcactacaacctccgcctcctggttcaaatgattctcctgcctcagcctcccgagtagctgggtacaggcgtgcgccaccatgcccggctaattgttgtatttttagtagagacggggtttcaccatgttggccaggcttgtctcgaactcccgacctcaagtgatcaggctgcctcagcctcccaaagtgctgggaagacaggcatgagccaccgctcctggccacattatatatctttatacctatctatctgcttatcatgtttgtttctcccatagatgctggtcccaaaagtacagggatttttttttctgttttgttctcttctgtgtccccaaatgcccggaacagagcctgacatacatacagcaggcactcaatgtttgtagaatgaacaaaagggtgtgtggtgtgtgtgtgtgtgtgtgtgtgtgtgtgtgtgtgtgccatgccatttgaccacttgacctggtctcaccttcgccctgtcccttcatcactccctcacctgctgtcccctgggtaaaccggcaggctcaggaccggggcctgtggaagtaaatgtcaagggacccagagggagaggtgggggttctgggaggaccctccaagcctgggctgagggatactagtgagccggggtgtggtccaagccacaggcaacagaacagcgaaaattagataaaaaaaaaatctgggggaagaggtatccccagaggccagcatggaggaggtgttctccctgaatgtgaattggactgatgacgggacaggcaatgtctggatggaaggccttattatggggtgaagggaattctggaggggcaatatggatggggatgcggtagagatccgagttttgtttgtcattgtaatttggtcactttctacttttgcaatgacaagtttgtctgtgtgcgtgtgtcccttacagggagacccccacccccaccccaggcccgccctggaaatgccattcttgtgtgtagctgctcagaaggccatgtggtaagttgctcccaccttctgcgccccaccctgagttggggaattctgtgccaccccaaatcttcccctggggccccactaggcggctctgccccctcctgccccaacctgtcagatcctgcatcctgggccagcctgccccttgggccccacagggaagaaaaggccctggagtccccagggctgggccccacgggatggtagctgggtgtggctcctaactccctctccccagttccaccaggtagcaaggtgagagccagctgagctgatgaaatgggggaccctggaggaattctggggtgcaaggtgacacagaagcatccaactagtccctccagtcccttggagggcctggcctgctgctgggtacccccgcgcccccacccccagagttactcaaaaggggaggctgctatcttaccacccaggacgtggatgaagaattggatccctagccccaaggatgacacttcaaaaatattgggggctgagtggaaaacatcatcccccaaagcaatgcccacccaggtctgggaagggtcctgcgggttccagacccccactgtgacacgatggtggtcgtgggtggtggataggggtccatcggcctttgtcgagtcctggagagggcagatggcagcgggacatgcccaaggagactggcatggttgcagagggcaccccgcccctcgatctcagagttttgttcctggccacccacctgggcactgggccaggccccgaggcagggcctcctcctgaggaacaatgcagccgcgttcctcccggtggaggctggaggatggagcgggaaagacaggcacaccgggaaagagggagggatccagggagggccttgctcccagagctactccgggagcccggggagtttcccagaggtcccagcgggtgggggagggtgccgggaagcctagggggaggggacccagacccaggggctgcatggcctgggaccagaaagtcttttctatggcagcaggagagggttaggtaggataagaggaggaacttcctaaggctggagaaggcgctgtggaactggagcaagtgggggttcctgtttggtggcatcccagggcaatacccagacccaggcccccctccccgggaggggtctgcagtgcccagtgtgccctgggtctgggaccgagcccacccgccaaaccgcccctcaccaatctctattcccaggggctcacggcctcctgggttgcctctccctgggcaggcgcaggccttagaccaacaggggttccagaggtgggatagggggttagaccctttgctcccaccctacccccgcagacagagccttgggcttaaaactcgggactgggactcaagttcagggtccagagggggaagttgggctgggtatggggcccaggctgatttcgggacaaggagggagaaagttggccttgagttgggggacgggacagagttgggggacaggacagagaaactgggggcgggccggctcgggggcacatgacggcgacgcctgc

SEQ ID NO: 35123 - DNA, 1009 bp, Artificial sequence
  DNA replication origin
tgggtgtcccaaacttgctgccccgcagtgtcactgcgtgatcatctcagctgctttaaatgccagtggtgggttactgcaccctccagtgtcgcttcttttactgacgggtaaactgaggcaaggagccttgaagtcacagatcaagagtcaagagtaagaggcagggctgggattcgaaccgagtccgagagcccgggacctgctccgccgcttccccacgggcctccggcgcccacttgggggctaaggcgcccccgccgccgggcccctccggacgccgaggccagccgagatcgggccgccggccaggctgctgggcgccgcgcccgtccgcatcacgccgcggtgagtcaccgcgcgccggccccggccccgccccccgcgccaacaaacagcgcgttgctcggcaaccgccaccgccctccagcgcggacctgggttcgagcctcaggccggggtgcgcgctaagagggattttgggactccgtagtcttccctagattaggggttcagatcaggcctgtaatcctggtgggcacggaggtgatggtgaaggagacagctgtggtccaatgaaggtggggagggctgagggtggctctctccaatccagacccaccggggctccccagaagtgggcggtcaggtcaggagatggcggctgggccagagttgcagctgagaggtcgaggccattttcctaagggatttggggagctggcctggcgggagctgtcaggagcgctgtgatgagggcttttttgcatcctccccacccctgccgacctcccaaactagctaacacttaatgagcacgttctatgttctaagcctgttctatgcatgtgtgggcctatgtgtattaactcatgtaatgttcaccatgaagtcgggcgcggcggctcacgcctataatcccagcactttaggaagccgaagcccgtggatcacttgatgtcaggagttcaagaccagcctgggcaaaatggtgaaaccccgtctgtac

SEQ ID NO: 35124 - DNA, 1086 bp, Artificial sequence
  DNA replication origin
aggtgggggagactgtttcggggcaggcaaggaggggaggcctaggcaggaggtgtggtgaaacccaccatatgtgccctcaagcaccctctttctctgccagaggccacaggcttggaagaaccatgtctcttcccaggtttccttctcagcctgactcgaagcgtcctggcctgcccgccccaccagacagtctgactcaatttgcccgctgtgtgcgtgggccctgcgcgtgtgaccctccaccattccagtgactcaggcagcctggaagccccctccccgggggacacccagcttcctatggtgacttttcacagacatggctgaaactggctggcgcctcccagacccaggccgggctcctgggggcagcccagcagggcctcggccccacagcccacccctagagagggcctagggggtgggagtagggggtggggaactcttctcaaagggcctttgtgggagcagctgggggggctaacgggggaccccgccctgtgtgactcaagcctcattgctgggcggtgactcacccccaggccccccttctgcctgcccgcagcaggtgctgtgagccagcttcgggataggggcctctgcagccatggtcatgccaccctgccctggacctgtgacttgccacccacttctaggggttccagtcttgccctcacctccttgccctcctgagctcggaccacagagaaaacctcctacatcccgtccctccgtggggcagcagacatggtactgaaatgtgccacgcattgtctcactatgaattcacgggattctcaaaccacccgagaggcagggtgtttgttcttgctactgccctgtaacagatgcggaaattgattctccgtgaggttgcagagtttaacacaggagattcacgtgcagaatctgggtgtcccaaacttgctgccccgcagtgtcactgcgtgatcatctcagctgctttaaatgccagtggtgggttactgcaccctccagtgtcgcttcttttactgacgggtaaactgaggcaaggagccttgaagtcacagatcaagagtcaagagtaagaggcagggctgg

SEQ ID NO: 35125 - DNA, 1334 bp, Artificial sequence
  DNA replication origin
ttgcacttcagcctgggcgacagcgagactccatctcaaaaaaaaaaaaaaaaaaaaaaaaaggtgacagggttgtgagaaataaatagaggagaaagcaaggtgggtgcaattttgaaataggggagtcggccgggctccatctgtaattccagcactttgggaggctgaggtgggcggattgcctgagctcaggagtttgagaccagcctgggtaacatggtgaaaccctgtctctactaaaaatacaaaaaaaattagctgggtgtcgtggtggttgcctgtaatcccagctgaggaggtctggaatggggtgaatgagggagggagtggagagggtgaggcagagaggagacaggagactgtgcaaagccttctgggtcctggggaggactttggcttttgctctgaataaggtgggagccattgagggttctgagcagaggagggactggacctgacttgggtgctcacaggcgccccgccccggctgctgtggtggggaggggattagggggatggggacagactgtcgggggctgcaaggtgtgcagagaggtggcaactggagcaattctggggagagatgatggaagccggaccagggtgggccttggagaagtcaggattctggatgcattagaagggacagtaactagcctgggagcagtggctcatgcctgtaatcccagcactttaagaggccaagacgggtggattgcttgagtctaggagttcgagaccagcctgggcaacatagcaagacctatctctactaaaaatacaaaaaaatcagccaggcgtggtggcaggtgcctgttgccccaactatttgggaggctgaaagaaatgggaggatggcttgaatccgggaggcggaggatacagtgagcagagatcgtgccactgtactccagcctgggcgatagagccagaccctgtttcagaagaaaaaaaaaaaaaggacagtaagcaaaattgttaatgggttgcatctgttaataaaagtttttgtctgagcagctgggaggatggagctgccatttccggagaccgggaagatggcgggagaccgtttgcagttgaggaaatgagctctgagcccagggcttcgttctggccctgaagtgtccctgcccagactctggtggggtgcggaggaaagcacccacatggcctaggctttgcctcctcggggctttctctcggtcgatgcctgagtgtgcaaactacacccacatctgagtatacaggggcacctccgaagacccccacggcctgacacatccacccagtgtccaatggccacagccttgggggacttcgggggctgg

SEQ ID NO: 35126 - DNA, 1684 bp, Artificial sequence
  DNA replication origin
cgccgccgcatttccccctcttctttccaaaacccgcccggaaaagccccccgggcccgaggcgcctgcacgggaaattgcatttcggcggctccggggcagggcgggggctccctaggccgtgggcggggggggggagggggccgcggggctccggcgccggctcgaacccgtggccgccgccgcccgcccgcctgtctgtctcggtgacgtgcccgcgctccccgctgccgccgccccctccctcctccccgcgccgcgccgggcggtgggtccagccgcggccgtgcgcgtcccgaggcctcctgccaggcgcaccgggacgcactcgggggatgcccgtgggtctccaaaacgcagctcccggggcccgcgcgggggaatcagggacacgggggcgcgggcgggcacacgcagggacccagacgcacgcagacctcaaaggcgccggggggagcacacgcgcacaaaggcacgcgggccacagacatagggaacggtgtgcagggggctgcgagacacacacccaagggagggggtggcgggacgtgcgggcgtgccgggccgcacgagggtggtcataaaacccagctacacacagagggacacccgggggcaccagacacatgcaaggtacacagacacaccacattcaggacaggagggaaggtccttagaaccgaaatatgcagaaacgcggctgaaccccgggcacgcacagctcacacaagacacacggacacgcaggagatcacagacgcactggggtatccacagacctgagatataccccccaacatacacacacagtaccccaggtacacagccacaggagcaccgtgacacacacaaaataacctaatacatggatatagacatagaaccagaacacacccatggagacacagatccacaaagttcacagacacacacatatatgcacagccactcgggtcaaatggaccagtcgcagaggcagagaaacacagccaacagccacatgcacaagacccccagcaggtcccagagccacaggggtccacatggacacacgcaattcaggggcacgtggggatgtgtacctgggaccatgaggcacaagcatatatacaggccaggtgcacagaccacatgcaagctgtacaaaggatggggctccccggatctcccaaagatccttgcacagacggtactcctccccagacatcccccctccccctgcccaggtataagagcatgcacaaggctggaatgatcgtaccctggctgaggctccacacactgcccctgcccgcagtggccaccgcggctggtagaggaaggtcacatcagggcaaaccatggcgccaggcagcctcccattggcccgggctgagctgacagatttctcattctgtttatttatcccccaccccagtctgagagggggatggagaaacctttgactggcccccttccaagcccagaccttaacccttatggggccatggcccttccccacctgatcgcgcacccctcacttcctttcagcctcctccaccacagtcctgcctcagtttctccttgacaggttcaccctcccacatcgtccagctgccttcaggtctcagcccagaaagtctggttccaggtccaggagagtggatgtctccaggaccactcccccgacccccaaccccaccaa

SEQ ID NO: 35127 - DNA, 1264 bp, Artificial sequence
  DNA replication origin
cgaggtgggtggatagctagagctcaacgagtttgagacgagcctgggcaaccggcaaaactccatctctacaaaaaatacaaaaattacccaggtgtggtggtgcgcacctgttctcccagctactcgggaagctgaggtgggaggattgcttgagcccaggagatgggcctagattgcagtgagcctagattgcagtgagcctagatcgtgccactgcactccagcctaggcagcagagtgagaccctgtctcaaaaaaataaaaaggaaactgtggccgggtgcggcggttcacacctgtaatcccagcactttgggaggctgaagccagcggatcccctgaggtcaggagttcaagaccagcctggccaacatggtgaaaccccatctctactaaaaatacaaaaattagcctggtgtggtggcacgcgcctgtaatcccagctactcaggaggctgaggcaagagaattgcttgaatccgggagatcgtgccacggcattccaacctgggcagccaagagagactccatctcaaaataaataagtaaataaaaataaaaaagattatgtgtgacctgctgtcagatgtgtttctgcaggccttgtaccgtctgtgtgtgtgtgtatgtgtgtgtgtgtggtgggggtgactgtgggtgactgtgagtgtgcaggtgtgaacttggttgggaggacacatggatgtctgtgtgtgtcccaggtattgtgaacgatggagtcggagtctgtgtgtgcctgactgatgggctttagggatctgcgtttgtcattgctaccctgagtgacatgctgtgggtgaacacccacttctgtgtgtcagtgttatgcgaaaggctgtgtctatgttgtagctgccttcgttggtggctccatttctgtgtgacagcctttcaatgggcactatccctggatgtccgagcccttgtgggtgacgtgtctacacacgtggcagtgttattgtggggactgtatgtgtgtgtcagcatcactttcgactgcgtattaatcggggtgctgtatgtctgtgtatagcgtgtaattttgggggtctccatcagggccttgggaatatctaatcgtggctggcttaatgcatctgtgagcagtccaggggtgtggaatgggtagggaaagagatggggggaggggaaccgaagtgtgggaccgtgggggggacgtctcagtccctatcagccaatgaggtgtcttttccacccccccacccccagcctgccctcc

SEQ ID NO: 35128 - DNA, 812 bp, Artificial sequence
  DNA replication origin
tcctcctgcctcccaactagctgggactacagacaagaaccaagcttttgaggaatcttgagagttctggactaacagagccacttaccttcccagtccacaaaatgggtatatcctgctcacagcgtgatgaatgtagcgttatcatcagtaatgtaattattaacacctgtgctcccaactcactctccttcccaagtcctaggcgttctcctccttagaatgatgatccacaaggcaggggaccggccacctccctcggaagggcctggacacctggggtggaggtggcggataaagagaagccgatcaggcccccccactccacagcctgaatgggaggatctgctggacgtggcggatgagctgcgagagagggcgccccactccagctccagacagaggggtgggaacgtgaccccgacccggggcgggtgagagggcgggctctggggaaagggctctagaaggtgccgggaggcgggaggggggcttcgggagggcgagttagccgggatcgggcttgaggggccctacgaaattcggtttgggggcgtgcccggtcggggcggaccttagtggggggttgggcttcgtgggggcaggacgcagtcccggggcgtctatagagcaggcttttgtggagggctctaagggggcgggccctaagggagctgggctctttgaggactggcttaggggtttggcggtgggctccgtgggagtctatatgggcgggttttagagggagtgtgttctggggaacaggtcaaaagcgacggggctctaaggggcagggcctgggctggggc

SEQ ID NO: 35129 - DNA, 887 bp, Artificial sequence
  DNA replication origin
ggggtgggaacgtgaccccgacccggggcgggtgagagggcgggctctggggaaagggctctagaaggtgccgggaggcgggaggggggcttcgggagggcgagttagccgggatcgggcttgaggggccctacgaaattcggtttgggggcgtgcccggtcggggcggaccttagtggggggttgggcttcgtgggggcaggacgcagtcccggggcgtctatagagcaggcttttgtggagggctctaagggggcgggccctaagggagctgggctctttgaggactggcttaggggtttggcggtgggctccgtgggagtctatatgggcgggttttagagggagtgtgttctggggaacaggtcaaaagcgacggggctctaaggggcagggcctgggctggggccttggctggtggctccagactgtgggtggggctctcgggggcggggctctcgggggcgcgtcctcgggggctcggccgggttccgttgccaccaccgtgaggggtgtggtgggggggtggttcacgcagctcggcacacttgggggtccctcatctaccttggggttatgccaggcggttattttgggcctcagtattcccctcggtgaaatgccaggggccaggaaattacttatttttttgcgacgacggggtctcgtcctgtgacccaggctggaatacagtggcgcgatcacggctcactgcagcctcgagcctcgaactcttggggtccaagcgatcctcccatctcagcctcctaagtagctaagactacaggctcactacaccacacccagctaatttttttgtagggacaggtatctcgctatgttgctcaggttggtctccatctcctgggctcaaaagatcctcccgc

SEQ ID NO: 35130 - DNA, 1164 bp, Artificial sequence
  DNA replication origin
tctcccaggctcgcatgattctcccacttcagccccctaagtagctgggattacaggtacccgccaccacacccggctaattttgtatatttttttttagagatgggattttgccgtgttgcccaggctggtctcaaactcctggattcaagtaatccacctgcctcagcctcacaaagtggtgggattacaggcatgagccatcgtgcctggcgggatattttttagatagagtcttgctctgttgcccaggctggtgtacaggatcatagcttactgtagcctccatctcccaggctcaactgatcctcccacttcatcctcctgagtagctgggactacaggcgcgcaccactatgcctggctaattttgtattatttgtagagatgggggtctcactacattgccgaggctggtcttgaattcctgggttcaagccatcctcccaccttgacctcccaaaccttccaaggatatgaatgccatctgggctggcctttctagcactgccctgggtgctggggaggcagtgtgggacaaaacacagagttgaatgctactgggggattcggggtgtggggacatgagagacagcagattagatagtcagatggcagagtgttggggaaaaaaaggcagcggagaaggggttaaaatgtaaggaggaatcagggaagccaccaccaggaggagacatttgggaaagaacattccagaatcctgagaggtgctcaaggaatggccaggagtctagtgtggctagagccgaggggaggggagaagcgggggatgaggggagggcacggggcaggcaggtggtgcacagctgcgggaggagagggcttgcctctgagctaggtttccaagttcacagcccccagtgcctgtgggggacaagccacaggggcaggagatagggaggcggtggcagcagcgtcctgagagggcagggcaggtaggggagaagcggttgggttctgggcctgctgggcagtggagccagctgggttggccatcagggttctgtcgtgaacagaggaggacaggctggacacctggaaaagatggcgcgaggccctgcggaagcccctcccactggagagctctggtagtccagtgaggtcgggccactctcaatttccttccctgctggccaggacctt

SEQ ID NO: 35131 - DNA, 982 bp, Artificial sequence
  DNA replication origin
ggtggggcccttccctgagcgagtgacgggggtggggagggatccccaggtcgggccgtggggcgcaaactcacctggcgggcggccgcggcgcctctgcccgggggtcccgggggtcctttcctcttgtgcatcttcaaggctggatgcccggaccacctgcccccaagcccggccttgccctgcctccttccccgggctctgtcgccgcgcactcgcccttcctgagtcctgcactcctcgtcggcgccccgcggccgtcgatcccgagccctcgcttccctgcttggccgtcccacttccgcctcgggcctcgggcgccgccgcaccggagcgcggccactgggctcgccgggtctgccgagccgaaactacaactcccggcaggtagtgcgtgggcgcgcaggcgcctggctggggcggtgctgactgtcgcgggctgcgagggcggtgtttgcgtcgctcatgcgcggggcgggacctcgcggggcgcgggaaagaggcagagcgcgcgcaggtgtgaggggcggcgacatctgtggggttcagagcgtctgtcagtcaccgacgggctccggcttcacgtgggctctcggcctgtggagtcctcacttctcggtggtcggcgtagtgtcagtgtggggcttgtcaccgggagcggggtctacagcgcccaccctcaggcctttccatctttcacctccggactcgaggcctccagcgttctgtgagggccaatttggccatttattttttccaaaaagagtaacgcggataattcaagcgacttattcccaactgatccaggcagagctcgtttctgataaggacagagggtcctcaacgacttctgtggcccaggtccgttctggtttgcctcgcccccaaggctgggagaaaccggcctatggcagctctttcccctccaaggacccagctgtcccctttaaagtggcacgatcttggctcattgcaacctctg

SEQ ID NO: 35132 - DNA, 1613 bp, Artificial sequence
  DNA replication origin
tgaaagatggaaaggcctgagggtgggcgctgtagaccccgctcccggtgacaagccccacactgacactacgccgaccaccgagaagtgaggactccacaggccgagagcccacgtgaagccggagcccgtcggtgactgacagacgctctgaaccccacagatgtcgccgcccctcacacctgcgcgcgctctgcctctttcccgcgccccgcgaggtcccgccccgcgcatgagcgacgcaaacaccgccctcgcagcccgcgacagtcagcaccgccccagccaggcgcctgcgcgcccacgcactacctgccgggagttgtagtttcggctcggcagacccggcgagcccagtggccgcgctccggtgcggcggcgcccgaggcccgaggcggaagtgggacggccaagcagggaagcgagggctcgggatcgacggccgcggggcgccgacgaggagtgcaggactcaggaagggcgagtgcgcggcgacagagcccggggaaggaggcagggcaaggccgggcttgggggcaggtggtccgggcatccagccttgaagatgcacaagaggaaaggacccccgggacccccgggcagaggcgccgcggccgcccgccaggtgagtttgcgccccacggcccgacctggggatccctccccacccccgtcactcgctcagggaagggccccaccccccagggaagcccgatctccgccccacaggtaagccccggtccccgcctccccccaggtgaggctccaacaccacccaagtgtggcctactggccttggctccccagctcctggggccctgccccgggttcggggccacctgttgccacagctgctccagtcgaggaggggcagtcctcggacttgacacatcaaacccttgcatcagtcgggccatgtcagactctttttattccattgtacagatgaggactttgagactcagagacgtgaagacatctgcccaaggtcatagggattaacagcttggccagggctaagcacaaatccagggctgcagccataagcttatggcactgtggctggaccccttctcactctcccgacttctttgccccaggcaccagatagtttgatttttctcagttttgatggaaggagcccaggacatagcttggtgttcagatattagagtctggctgacctgaagttccctcctggcctctgtacatcggacacttgactttacagctctgagcctcagctttctcatctgtaaaatggagatctctataatcccagcacttcaggagatggaggcggaggcagaggtgggagagtcatttgaggccagagtttgagaccagcctgggcaaaagcaagacccccgtctcgacaaaaaaagactaactgggcatggtggcatgtgcctgtagtactactacttgggaggctaagaagggaggattgcttgagcccaggagttcaagaccgcagtgagctatgattgcgctacttctgctccagcctgggtgacagaacaagactctttctctaaaataaagataaaaaattaaaaatggaagtccggggtggtgtctcacacctgtaatcccagcactttgggaggcca

SEQ ID NO: 35133 - DNA, 1019 bp, Artificial sequence
  DNA replication origin
ggggcctactggggcgaggcctacaggggcaaggcctacctgggggcacgggcaattcagcgacatccacggctcggccagccttgtgggctcggatggcatcttggtattgctgcgagggccacaggtgttagggctgcctgtgggagggctcccgggctgcccactcgccccacctcccccggaacccccagggcaccttgacgatgcgctcgtgcattcgagctttccgctggtcccccttgctcttggcctgggctgcggccacctggtaccgctccatccgctgctccagcgcctccagcagggtcctcgggggtgggggcacctctgggccggacagggggacaaggttaagagtcaacggatgggtagacagtctggctccagcctgcccccaaccccagagggtcccagaacctacctgttgtggagggcgccgtagcgggggtcggaggctgcgacggtggtgacggtgggtctgggggcagctggtctggggacagagaggtccaggccaatgaggggcttgttagctgcacccccgacaagctggtctggcctgagggtggtctctgggcctgaccaacaggggtggcagcatcaaggagaacttagtgtatgcctgaaaccatcccagagagtgggcatggcagggttctcaccgggtggagggggcaggcaggagaggtccacgggctcaccccggctcagggcctccaagacagcatcaaagctctgggagaaggaagaggagattagaagaagaggtgcagttgggggcttggaccctgtggggagcctccgggcccttccatgccaccgaggacttctagctccctcccttccatttgtgccatcttgcttaatcctcttccaacacacgtgcccatttcacagagggggtaaactgaggctccaagacttacagcaaactattgctagggagtgaccaagctaggatgcaaatttgggtgctttgccaccaggccacgtgggaagcatcctgccccatccct

SEQ ID NO: 35134 - DNA, 1095 bp, Artificial sequence
  DNA replication origin
gcaggcccaggcaggatcctcacaggaccctctgtatcctctagatcctggccctcaggcaggcgcggcggccggtgcccccagaagtggcccagcagtaccaggacatcatgcaacgcagccagtggcagagggcacagctggagcaggggggtgtgggcatccgacggggtaggggtttggagatgggcatctggtgggggaggagctccaggataggcatggggggggaggtgctcagggatgcatatctggtgggggaggggctcggggatgggcatctggagagggaggggctcggggatgggcacctggagggggaggggctcggggatgggcacctggagggggaggggctcggggatgggcatctggagagggaggggctcggggatgggcacctggagggggaggggctcggggatgggcacctggagggggaggggctcggggatgggcacctggagggggaggggctcggggatgggcacctggcgggggacgggcttggggatgggcacagtccaggagggttgtgggcagtgaggccccaccctaagcctccattcccccgccatccattctcagaatacgcagcccagctggagcggcagctgcagttctacacggaggctgcccggcgcctgggcaacgatggcagcagggtgagctggtcgcgggccgggtgggcactgggcagcgggcagggtggggcctgcagggactacctgctgaatgcccatcccccacaggatgctgcaaaggaggcgctctataggcggaatctggtagagagtgaggtaagcagcttaggagatggggtggttgggggatcactgtggtcgtagcccacctccatgaccccagtggcctcctctcccccagctgcagcggctccgcaggtgaggagcccatggggcgggcagcccccagaaagcgggcagcaggccccgataccgggaagagccgacacagccacgaaccagacaagcagacaatcagcggacaatcggttctggactcacccctcatccgggcccccagccccgccagagcctccgtggctgcgggtgttgggaaccatgcctgccagcc

SEQ ID NO: 35135 - DNA, 1412 bp, Artificial sequence
  DNA replication origin
cccctgcccagatgctggacctcagccacaatgagctgtcctttgtgcccccggacctgcctgaggccctagaggagctgcacctcgagggcaaccgcatcggccacgtgggccccgaggccttcctcagcacaccccgcctgcgtgccctcttcctcaggtgccccgagggtgaccggaggggtggaggtgggcaggggagggcctgggagggtcatgaccgcctctctgtgcagggccaacaggcttcacatgacgagcatcgcggctgaggccttcctggggctcccaaacctgcgtgtggtggacacggcagggaatccggagcaggtcctgatccggctgcctcccaccaccccacgtgggccacgggcagggggcccctgatcctagagaggcccagcagagcagctcagactcctgggactccgctgggccgtggactgaggagacaacgcccaccaggggcccttggtctggctctcctgggcctccagggctgggcctgctctgcctgccactggccgagacacagaggcacacagctggcatactccaggctcacagaccacgccggcctggcgggacacaccctaccccaaactcccaacacagatggaggcagcaacaataaagccaaacccttccagcactcagcacggaccaggcaccctttgggggctctgtccacggactcctccccacaaccagtccagctggggaaactgaggctctgggatgctaagtgggtcaggactgaattttgaggtcttgaggcacacactggggtcaccaaacagcaccctgtgcgacctagccacgtgtgattgcagggacgcccaaggccacccactgaaaaaacactgggtgacagatatagggaccctcacatgtatccccccccacagcaagcatgggaatgaaatgcatccttcaagctgggtgtgtggtggtgcccttctgtaatccgttaggaggctgaggcaggaggatcatgtgagcccaggagtcggaggctgcaatgagctgattgtgccactgcgctgcagcctgggtgacagagggaaacccggtctctaaaaaaaaaaaaaaaaagcacctttcacaagcacactgtccctccccaaaactgcttccctaacaggcgcctccccatccacttccaggggaaccggggggtgggtgggaagacctagcctggccaccgagggtctgagcaagaaacagacaggacagagctgggctgagtgtggccctggctattttattccatgtgctggccctggggacccagctgggccaggtcgacgcccctggggagacagtgtggctcggccagcctcagtggcttctttggggtgcaggagggctttggggttaaggctggggaggaacaggaagtaaagtgcttg

SEQ ID NO: 35136 - DNA, 1315 bp, Artificial sequence
  DNA replication origin
gttggtccaggccggccagaggctcgggctcgagcatccgcagctggttgcgttgcagctgcagggtgcgcaggccagtgggcaggcccatgggcagccgggttagctgattccctgccaggtcgaggctgcgcagggcacgcaaccggcggaaggcccggtggtgcacacgggcgctggccaggcggttataggccaggttaagctccgtcaggcccggtgtggcgaccaggtcacgggcacccagcgcggccacgtggttgtggggcagcaccagggcacgcaggcggcggggcagggctggaggcacgcggtccagcccattgccatagaggtgcagcgtgtgcaggccccgcagcggccgcagagccccggcgggcagccctgagctccccagctggttgtgctgcagcaacaaatagcgcagaccacgcgccccgtgcagccgagccgcctccacctgccggatgcggttgcggcccaggtgcaggatagccagggtccggggcaggccggcgggcactgtggtcagctggttgtgggagagatccaggtattcaaggctatgcagcttgctggaaggagagagggtcggtgttaggtggggcacttggagtggggtgcctgacagattttggcggggaggctggggagtggtcctgagacagatttaagctggagattttgacttgggagtgatgcgtggagagagctgggtgggaggtaaacttggggtgcccagggcagattccagcctgagagttagctatgggggtgaccagggtagagccgagatggaaaggcatgtgagacttacgatgtcagtgcagggctgtggggaacagggacacctacccagtgctctgccgagcccagtgagcagcaggcactcagtaaatgaggccgtggcttaggagccagtcagggaagggggactgaaggttgggacccccgactgtaaattctcagcccctgctgccccccaaccagcctgtacctgaaggtggtggcatccaggccactgtctgtcagctggttgtgctggaggtagagctcacggagttgagtctggcggctcagggctcctcggggcaccttggagatgagattgttctggagaaggaagaagagaatgagacttgagtctgggatgagggcagcgggaagccacagacggctcttgagtaagggagtgacgaggagcttgccttgagctcaaagcgatttccaataaagtgattcaaagaaggataactctgaccactggcattctgaggggcaattgagaagaatggaaagctaggaactggagggg

SEQ ID NO: 35137 - DNA, 1183 bp, Artificial sequence
  DNA replication origin
gagtaagggagtgacgaggagcttgccttgagctcaaagcgatttccaataaagtgattcaaagaaggataactctgaccactggcattctgaggggcaattgagaagaatggaaagctaggaactggaggggtccccctggaaagaggtgaagagagtctggcccggggtgggacctacagcagggctacctgcaggtggagccgctcgagtgagggcggcaggctgggcggcaggtagctgagctggttgttggagaggctgagggtggcgatggcctcggagccgcggaaggcgtcggggggcaggccagcgttgctcagctggttgttgtggaggtacacggacctgaggagagccaggctccggccaccagcctgcccctcgcctcctaccaccccactcccgcaccacaccctgctcagggtcgccttcagtgtgtgtgtgtgtgtgtgtgtgtgtgtgcgcgcgcatgtgtggagtctgtgtgggaatgtaattgtgtatgtgtgcatgtgactgtgcgtaggtgtgcaggtgagtgtgcatgtgtgttgtatgaatagacgtgtgtgcatgtgtgagcagtgtgcatgtgtaagtgtaatgagtgcatatgtggagtgtgtgtgcacgtgtgtatgtgattgtaagagtgtgtgggcgtgcatgtgtgtatgtatatgcaagtgtgtgctatgtgcctgtgcataagtgtgcatgggtgagtgtgtgcatgtgattgtaagtgtgggtgtgcatgtgtgcatgcctgtgcataagtgtgcatgtgattgtgtgtgtgcagccgagtgtgcaactgtgtgtatgcatgtatgtccatgtgtgcatgtgatcatgtgcaaaagtgtgagcattgtgtacatatgtgcatgtgtgtgcttgtgtgtgcatgtgattgcgtgtgcatgcatgagtgtgtgcctgtgtgcatgtggttggaagtgtgtgcaggtgtgtatgtgagtctgtgtgtgtgcttgtgtgtgcatgtgattgtgtgtgcatgagcatgtgttcatgtggttgtgtgtgcaggtgtgtatgtgagtctgtgtaagtgtgtgtgtgtgtgtgtccctgcacatactgtctccacctcagtctggagttctgacacagcatacagggccctgtctccccgctcactctcctcccaggg

SEQ ID NO: 35138 - DNA, 2203 bp, Artificial sequence
  DNA replication origin
ccaggaggtgaccgcctggtttccattaggaagtcctggtcagcagcttgggcgagatggcagagtcagggctggccatggtaaggtggggcacgggagggtctgagggtggggcctgcctgcccccccacccctgctctgccaactggccactgcctccccaccaagaccctccccgaggaggggatgctccagtcaccatggcgaccctgcgcccagcctggagacacgctgaccctccctcccccgcagtggccgagcctgctgctgctcctgctgttgccggggcccccgcccgtcgccggcttggaagacgctgccttcccccacctgggggagagcttgcagcccctgccccgggcctgtcccctgcgctgctcctgcccccgagtcgacactgtggactgtgatggcttggaccttcgagtgttcccggacaacatcaccagagccgctcagcacctctccctgcaggtggggcccacggaggggagtgggggcatgcagggctgagacccagtggtgaggggagctggaggggtgccccagagctgaggagcgtggtggggtataggaacacacttgcaggagggcggtgcagagcaggctgtgatggagctttgccttggcagattggctctgcatgcccaagatgagaggggtgagcgtggacatgctggaagttgtcggggactgaggattagtggtgttagggtcaacatcttggcggttatagtgttgtttggagttagtgtgatggggagtttggggttatggggatgttgtggcgtgtggggttgatggtgggggtgatggcacatttggggtcgattgtgggggtgatggcgcatttggggtcaattgtgggggtgatgtcgcattgtggtcgattgtgggggtgatggcgcatttggggtcgattgcgggggtgatggcgcatttggggtcgattgcgggggtgttggggcatgtggggttgattgcgggggtgatggcacatttggggtcgattgcgggggtgttggggcatgtggggttgattgcgggggtgatggcacatttggggtcgattgcgggggtgttggggcatgtggggttgattgcgggggtgatggcacatttggggtcgattgcgggggtgttgtggcatgtggggttgattgcgggggtgatggcgcatttggggtcgattgtgggggtgttgtggcatgtggggttgattgcgggggtgatggcgcatttggggtcgattgtgggggtgttgtggcatgtggggttgattgcgggggtgatggcgcatttggggtcgattgtgggggtgttgtggcatgtggggttgattgcgggggtgatggcgcatttggggtcgattgtgggggtgttggggcatttggggtcgattgtgggggtgatggtgcatttgggggtgattgtgggggtgatggcacatttggggttgattgtgggggtgttgaggaatttggggtcgattgtgggggtgatggtgcatttggggtcggttgtgggggtgatggcacatttgggttgattgtgggggtgttgggggaattggggtcgattgtgggggtgatggcacatttggggtcgattgtgggggtttggggtttgacatcttggcagttataagactgggtcagagtgatggggtgtttgggattaactgtgggggtgatgatggtatggggctggtttgggctgatgggaagttgagaatcagtgcttggggtcacttggtcacggggtcacgggtgtgaacaccccaactctcaccctgcagaacaaccagctccaggaactcccctacaatgagctgtcccgcctcagtggcctgcgaaccctcaacctccacaacaacctcatctcctccgaaggtgagggggcagagggaggcggcctctctggggctgtaggactgaccgaggtctcagctgccatccccctcccccgccccatctgcgggcagctctgtggcagttcccagaactgccctttgctgagcaggatggaaactcaggagctggggtgggggttgggggctgtggcttttgagtagggatggggaggaggggatctgagggcctggggagcctctgccagttccccggccgagagtcctggggcagctgggagcccagactccccctccacccaagacaggcctggggtcccttcactgcccccc

SEQ ID NO: 35139 - DNA, 794 bp, Artificial sequence
  DNA replication origin
ggtcgaggctgcagtgaaccgtgatcacgccactgcactccagcctgggtgacaaagtgagactctgtctaaaaaaataaaataaatgaggtaatgtatacgaatatgatgcacggagcggaccttcaacaattatttttattgctatgatctgcataattggcacaacagggccctgccacatcgaactgtttaagctcagaaccgtgtctgtcacatgtggagcgatccatgattgatgctatcattatcaccaccatcatcccaccaacccgcccatcggaaacaagctttcatcgaatcccatcgttttttccttttttgtaaatctctttcctcggcctggctctgccgcccaagtatgctcgtcaggcctttgcccacctggaccgggcgcgggcagcccggggctgaggattctcgagccttggtggaccacaggctcccgtcgccccgcccaagggcctggaccgcctgtggtctccatggaaacccgccagccacagggggcgtgacgccgttgagacagacagagatattcacctatcagatcaaagttatctgggcagggcgaacaaacgggacctccgagtggtacgtccttaaggcggggcgggaatacggcaacgggccgcgggggctgttactgtcgctaccaatcaagagtcgagatggctttgatggacaggcatagcgcgagtgcgggctttcgcccaaccggcgggccgctgtcccgaaaaaggaccaatgaggaggcggcaggggtggggcgaaggggccggttgctccggaag

SEQ ID NO: 35140 - DNA, 1264 bp, Artificial sequence
  DNA replication origin
gcccaagggcctggaccgcctgtggtctccatggaaacccgccagccacagggggcgtgacgccgttgagacagacagagatattcacctatcagatcaaagttatctgggcagggcgaacaaacgggacctccgagtggtacgtccttaaggcggggcgggaatacggcaacgggccgcgggggctgttactgtcgctaccaatcaagagtcgagatggctttgatggacaggcatagcgcgagtgcgggctttcgcccaaccggcgggccgctgtcccgaaaaaggaccaatgaggaggcggcaggggtggggcgaaggggccggttgctccggaagtggagggagggggtgaaaatggcgcccagctcgaaatcggagcggaacagcggggctgggagcggcggcggcggccccgggggagccggagggaagcgggcagcagggcggcggcgggagcacgtcctcaagcagctggagcgggtcaaggtgaggcctggagccggagtggggagcgcgccggagggtggggagtagggacgagggaggcggagggaggagggcgttcgcggggtgaggggttgggggcggggccccaggggagggggctcggatgcagggcctgggcggggcccgggggagatggcttggatggagggggctcagttgggggcctggatgcaggtggttgtgtcgggtgaccggcaaaggggctgggatggagggggttgggggcggggccccagggagggggctcggagggaggcgaccccagaggccgcagggagaatcaggaggaagggggcgatccaggcttttcaaagctctgctcccatggttgctccataatggaaccttcccgccccctttgcagagcccctgccgctggctttgggcttcctccgcctgatgttcctctccctgcccaagccccgaccacacatgagctgggagttccagtacctgggtgggcctccccattgaaagtgtgggagctccctggatagggctgagtcttcccccgcagagtgagagttaccgaagcaggctctgtctcctccatcagactggaaactcccagagctgggggatgatgtctctctcccccatcagtttgggagctctggagggcagaaatgtggatctcttgcaggtgggcagtaactggggcaaggctgtgtctctgtggacagggactgcgccttctccgtgaggctggtagctttgtaagggcagtgctgtgtctcccccttttgactgggag

SEQ ID NO: 35141 - DNA, 2386 bp, Artificial sequence
  DNA replication origin
tggctcatgtgactgaggaactgagcttgtgatacttttttttccactggagtccagtggtgcgatcttggctcactgcaacctcccaggctcaagcaattctcctgcctcagcctcccgagaagctgggactacaggcctgtgccatcatacccagctaatttttgtgtttttagtagagatgggatttcaccatgttgatcaggttggtctcaaactcctgacctcaagtgatccactcaccttggcctcccaaagtgttgggatgacaggcgtgagccaccgcgtctggcctgtgatggatttaattgtagttgttttaagctgaaatagctacagttggctagctggacggggtagcgcccctttctcttaagaagagaaacgctaatgtgacatttcagggtgtggttagtgggcaggcacttggcattatatgtttgatatcggaaagatgccagtgagaatcacaagatgtcccttgacagtgacaaatgtcaggaggctggatcatgccaccggctggcagcaacaggagggagggggccccgggggccatttggcaacagaattgtgactatgactgacccagctgccctgtgcccgggtctctccctctggcagagtctcactgggtccgtatgtccaagactgctgagggggagttgggggccacctgaagaaccctccctggggattggggagcgacttaggaggtggcgaggggttgggggcatctgtggaacaccaatgaaggcccctgtgtgtgcatccatggagcatgtgtcagatgcgtgcacatgtgggtgaaacacaaggaatctataactggaaccacttaatataaattaaaaagacgatttaggccaggcacagtggctcatgcctgtaatcccagcactttgggaggctgaggcaggcggatcacatgagatcagggagttcaagaccagtgtggccaacacggtgaaaccccatctctagtaaaaatataagaattagctgggcatggtggcacatgcttataattccagctactcaggagactgagggaggcggaggttgcagtgagccgagattgtgccaatgtactccagcctgggagacagcaagactccatctccaaaaaaaaaagacgttttaattttgcaagaactcagatgcaaagacgtccattaaatcctcatggaaatggttgtccctggggcggtcggggaatgggcaggattaaatgtatataacgcagcccacaaataagccaggggccagggcactctgtccccagacatatctggggctttctgtcctcacccccaatctataccaggaagggtgaggcgctgtctcttgctgaggcttgaccacttggtttttggccatgaaccccccagcttgcgagggttgacgccgctctgcccttttggctgtgggtcctgttaggaacgaccacagcggactatcagctctgtaccagcccagggaaagggcgtggtcatcagtgggagctgccgacacagaggggtgctttcttccttggccattgtcaccttctgttccccgccctgttgtgggagggctgtcacggtggtggaggggagcccgtactcgatttttctcagatgtgaccttgggcatgtttatccctgagctgcattctgggggatgtggcccctctctaggggttgcttgtagggggcttggaggaaacctgggttggggcccagccacagggttgcttagtgaatatgttggggttctccatgtgttccccacattccttgggggagtcgtctctaggcaggcagagacagaggccctgattcgatgaagtgtgcccgcagtggtctggcttgtgtcaggaaggaccgagggctttgccttaggtcttccatatcagagaaacgccagtgaaaatcacaagatgtccctcgacagagtggcagatgttaggaggctggatgctactgtagtgaacactctacgctgtagagtgttgtctccctcagggcagggttctgtctgtctggttcactcctgtgtcctcagtgtggggcgctcagtagacagcttaagaaaggggtttgaatgaacgtctgcacgcatgaatgcgtggtgtgcatgcgcagaaaggtctttccccttttgggtgtttcaaactgatctcagcatagccaagtctcctagaagtgtctccttaaggtgggtttctgaaaacccctggggacactgagcgaggctgggagcaccccagactgacacttctccacccccatctcttcttaggtgacaggagtttctgccaaatcctgtatgaccacagcacctgccccctggcgcctgccagcccccctgagccccagagcccagagctgccccctgccctccc

SEQ ID NO: 35142 - DNA, 1194 bp, Artificial sequence
  DNA replication origin
tactgcccggcgactgtgggagggagaggggggaggagggcatgacccgcaggtgattttgatggccagggttggggcacctgcttgtcccctgcagtttgtggggtacacatatccttggctgtgtggagtgtgtatagccacccgacactcaacagtcgggggtggagtgcctgactaagcccaggcatggggcagggcaccatcttctccctggagtggcaggttctggaatctgtttgacccctgtatggagggtagggcataggatcccgtcccacccctcgggcctgtgccaaccagaccctggggatctttgggaggcagggggtacttacctggggacgggggtacctgtgcccttctgacgctgggggcagggccacagagtgcccccagtgaccctgggttggggacaaggtatacctgtgccttctggcactggaggcaagacacagagtgccccactgaccctggagtgggggtaagggggtacctgtgccttctgatgctgggggtagaaccacagagtaccccagtgaccctgggtcagggacaggggctacctgttcccttctgacgatgggggcaggaccatagagtaccccagtgacccggggtggggtgggtgcccgcagacatgacgaggccgagaagcgactgcccaaagccatcctggtgctcctctccaagttcgagcccgtgctccaatggaccaagcactgtgacaacgtgctgtaccagggcctggtggaaatcctcattcccgacgtgctgcggcccatccccagtgagtgctcggcctgctcggcatcccctgccccacatacacccgccctgccctgaccgacccccgccaccgcccacaggtgccttgacccaagcgatccggaactttgccaagagcctggagagctggctcacccacgccatggtcaacatccccgaggagatgctgcgggtgaaggtgagagtgtgagggggtccctttctcctatctctggggcttaggcctccgtctcctctgctccccaggggcggtaaaatttgtccccacgcctgttccagggatgatgcctgtggaggaaggggagaccttctccgcctcggggagcaccctgggcattgtctttataaaccagtgtcctcaggcacccacttctgaaatgcaaccccctttgtggtgttactgta

SEQ ID NO: 35143 - DNA, 1001 bp, Artificial sequence
  DNA replication origin
cctgccgccatccagctttgggaaccgtctgcacggggcagggaggcggtggttggggaagcacgggccagggagctctcacccaaaaattgctggtactgctgcacctgggcgctgatgtccgacagccccgtgctcggctgctgccccaccgccacgccgttggtcatgccttccatcttctggatgggcttgagcctggagtagaatgggcaggtgggccggctgctgggggccggcctgtgtgcccttccccgcctgccctgccctgggtccggccctgccttcctacctctgcttctgcgagaagggctggccccgcatggccatgtgctgctggtcctccatcagccgcagcaggggtgagctggccttgatgcgcaggccatagtagtggtacttggagttgcccctgggagggaggtggaggggaagggctgggctgggggtctgccggctggccggccatggagcacctcacagcacacccgtctcctctctgttaggagaatggatagagagacgcctgccctgcagagacgggggtgctgcactgaggaggcacaggggctgtgggtgtcaggagagatccagcggtttgcccaagattatgcataaatgaatggctgaatggatgaatggctgaacgaggtgacgctgaagctgggaatgggaaccgagacgtgagcggaggtgagccatgggggttgcaaaggagaggaagagaggggcgggttcttgggatgccttcttgttccttcccgcatgaatttactgactcacagaccctgatgaagcactgactaggtacaaccccgcgtcatcgaggtacgagcactgcagacggaccagaacaactgaaataagtcatgtaaaaggcacgtgtgggccgggcacggtggggtcatgcctataatcctagcactttgggaggccaaggcaggtggatcacttgaggacaggagttcaagaccagcctggccaacatagcaaagccctgt

SEQ ID NO: 35144 - DNA, 1320 bp, Artificial sequence
  DNA replication origin
ggatgaatggctgaacgaggtgacgctgaagctgggaatgggaaccgagacgtgagcggaggtgagccatgggggttgcaaaggagaggaagagaggggcgggttcttgggatgccttcttgttccttcccgcatgaatttactgactcacagaccctgatgaagcactgactaggtacaaccccgcgtcatcgaggtacgagcactgcagacggaccagaacaactgaaataagtcatgtaaaaggcacgtgtgggccgggcacggtggggtcatgcctataatcctagcactttgggaggccaaggcaggtggatcacttgaggacaggagttcaagaccagcctggccaacatagcaaagccctgtctctactaaaattattttttaaaaattagctgggcgtggtggcacatgcttgtagtcccaagctactcaagaggctgaggcatgagaatggcttgaacccgtgaggcagaggttgcagtgagccgagattgagtcactgcactccagcctgggccacagagtgagactcttgtctccaaaaaaaaaaaaaagtcacgtgtgagcgtgctgaatgctaaagagaaaaataaagcagggttggggggtgtcgggcaggggagagggggaggctgcagttttagttgaggcagtcaggggacgtgcaagtaaggaggggtgagaagcacatgaggtggaaggcaccgccagtgcaaaggcctagagtgggagtgagcggggctgtcgaggagcctcgcagaggccggcgggactgggctggactggactgcctgagatgactcggagtgggggtgggccttggcatgcccaccaattccccagggactgctgggagtagacggatggccctacctggtgcccagacggcgggttcgcaggcccatgaagacggagcggatgagcttgccgaaggaggcggcgttgacgggctccagcttctgctcctggcagtgcagtaagtagtggcagtagagggtgctccgtggcagactcacgccctcagccgtctcatagttgtccaggagccactggacctggggtgggagggagatgggagagcaccagtcagaggcgcttccgtcatctctgagtgctggggctgagtgccccacatcgacttccagctgggatcctgacagccacgcccacataagttagcacatcctactgccatcctctccaagaactatgtcccacagaactctagaactgcactgtccaatacagttgccatgtatagctaaatacattaaaggccgggcacggctcacccctttagttccagcactttgg

SEQ ID NO: 35145 - DNA, 907 bp, Artificial sequence
  DNA replication origin
cagagaggctgagtaatttatctgaggccacacagcattcaatcccaggacatctgcatatgttctcttcattgggggccacacaggctcctgctagcggtggttggtaaccaccgtcatggactgggcttctagtgcccaccacccaccactgcctgcctcctctggggcccgcgttggggcacttaccgtggctggcgaggcacgggtggtgtgagagtaagactggctggcactgcccagcatgtagccgccttggatcacgtaggtgcctgctccgctgccgccgcctccggtgctgccactgccacccccgccaccgcctcccccgccgccgccgccaccaccactgccaccacctccgctgctgttgctggccccagccccagtgctggtggagctggcgacgacctggctgccggacacgtacatgggcatggagccactgctggccaccgcctgggaggtggcgggggtgctgacctgggtggccgtgcctgcggcctcgtagtagctggtgcttgccgtctgcgtgtacagcggcgtctcgggataggagtaggtgctggaacggctgggaaagaggcaaagccaagggagagtcagggggatgagaactggggggccgaggggcatgactgtgcaggaaggggggtcctaggaggggactggggaagcagcagctcccctgcagcaaggagcagatcctagcattcatctacaacggactgggtaccatcctgagtgcttgatgggcagtatttcatataatcatcagctgggcatggtggctcctgcctgtaattccagcactttgggaagcagaggcaggaggatcgttgaaggccaggagttcaagactagcctgggccacatagtgaaaacccatctctacaaaaaatatgaa

SEQ ID NO: 35146 - DNA, 1759 bp, Artificial sequence
  DNA replication origin
cctggagccccgcccgcggccgcccccgttgaccccccagtgtctctgtttgtcctccagagctcaggcagtcagtttcccgctaggaaggcagagcagcgagatccccggcccacgccgccgccggagccgccgccccggccgcccgcgtgcagcggcgaggccccgcagctaggcagccccgagccgccgccgccccattacgagccgggcgccgagcagtgggtggagctggtgggcgtgctgcccccacacctgctcctgccgcagcagaaagtggtcttcgagccactgtcccggctcccggcccgagccagccccgaccagagggtcaggatccagagaatcccccaggtgctagtgttcggcacggccgccacggccctcaaagtaggtggcggacgcacgggcggggggcagcgggcgggcgggggcgggggcgcccagtctgggccgcccaccaggccccgcaagccctgtagaccccacctccgcccgacgggtcggtctagggacccgcctctgactccccacccaagccccgtccaggtcccagctccgcccctgcagacaagggtgggggatggaggtgggggactcaggccccgcccctaaggccctgtcagtgattccaggttctgtcccaccaaccggggccccaggctccgcccctcacatcctgtgcccggtttccaggccccacccctgaggccctttctgtagctccatggctccagcgatagccttgcccctgtgcctggggtccaaccttcacgcccactacaggaccctgtctcgggtcccctccactgtccgtcaggccccacccttgctggccccagccgaagccgagagtcctggcttctcctgacacagctcttcctgattcccagccctggcctcctccagggtgttttgttgagagtccagaagccacccttgggtccgggagctgggcgtcagggatagcctgggtgggcaccagccctttagagggagaaccgtaggagctggcccacccctgaccctccacgtgcccttcctctgccccaggtgcagcagctccagcaggtgcccgtcccacacgtgtactccagccaggtgcagtatgtggagggcggcgatgccagctacacggccagtgccatgtaagtgaagggagaggggtgggtgagggagtcaggtctgcactggagcctccccagtctcccaggacaccagtccccagtcccagcccccagcaggccatccggccttcaaggcctcaggtgacagacacacaggtgggcactccccaggggcagccacagccacgaaaagtggcgaagcagagggacccttgaaggttgggaaaggcaccccggcatagcttagggcttgggagtcaaatgagcctggtttttaaccaaaaaaaaaaaaaaaaggccaggcacggtggctcacgcctgtaatcccagcactttgggaggcctaagcgggcagatcacttgaggtcaggagttcaagactagcctggccaacatggtgaaaccctgtctctactaaaaatacaaaagttagccaggagtggtggcaggcacctgtaattccagctactcgggaggctgaggcagaagaattgattgaacccaggaggcggaggttgcagtgagctgagatcgtgccactgtactctagcctgggcaatagagtgacactccatctcaaaaaaaaaaaatcatttgactctcaaccctgtcccagagaggatgctgtgacc

SEQ ID NO: 35147 - DNA, 1765 bp, Artificial sequence
  DNA replication origin
gtgggcggcccagactgggcgcccccgcccccgcccgcccgctgccccccgcccgtgcgtccgccacctactttgagggccgtggcggccgtgccgaacactagcacctgggggattctctggatcctgaccctctggtcggggctggctcgggccgggagccgggacagtggctcgaagaccactttctgctgcggcaggagcaggtgtgggggcagcacgcccaccagctccacccactgctcggcgcccggctcgtaatggggcggcggcggctcggggctgcctagctgcggggcctcgccgctgcacgcgggcggccggggcggcggctccggcggcggcgtgggccggggatctcgctgctctgccttcctagcgggaaactgactgcctgagctctggaggacaaacagagacactggggggtcaacgggggcggccgcgggcggggctccaggcctccacccaccgggttgctgagcgcgcacgcagccacccgagggaagatccccgccgcccggggtctcggagaggggttagaactgacccagggccacgcaagaaagaagaggggtttgaatccagatctctcttagcaaaacctggaccctgagctgccagggggccgggaaaggggaaggatgtagggcagtgtctgcagctcacagaggcatttccctccctgcggcctcaggggcctgcactccccagccccagcccgggaccagcccctttgcccgtggggtaggagggggagacacacacctcttgagccacgtggactggctggaggccctgcacggtcagcggctgcaccgggccgggtttgggcgcttgtggagtggcctggaccacagatctctgggaggggaaaggcaacaataagatgaccatggcaacgatggccgtcaacctacccagcccctgcacaggtgagcttctgtaaagctcacagcagacccataagcaagaggccaccattctccagccaagcaaggagggtgctggatccattactgataaagtgaggctcccaggaagcagcagggctgagttgaacctgggactaacttcggggtctctgctctccgccccctctccctacgggcccctgaagctgtgccaagaacccgcaggcaaggccttgggttatctttcgtccccacaccccccaatgtcaactgtgtgccctgttctgtgctgtggcgggcatgcggggattatcctaggggcgcagagccagggacggaggctggcggaggagggtgctgagtggaggagctggggcctggacctaggtctggaggttcgggggggctctagtgccaggcgggggagtatctgtgaaacctctgggacagggtttctgtttacacttggggaagggtctatggatttcatctgttttttcaaggggcttggaaccccctcaacttcagtggtaacaaccagatggtgcgcagccccagcatcttaacctgcgccggctcagggctctgcctcctgcagaggctgggtgtggatttgggggctgggtcccctccctgaaatcctccccagaaggagccaggatgtggcctcggggcttccttcaggcaaatgggcccaaagaggctcaggtggcttctccaagcggttcccatggcccactacgccccagtctccttccaggaggttcaaatttcgtcctccccgcggctcccccatcctctagccccaggatgctgagtctggagacaggcagagatgcttatcaaaggcc

SEQ ID NO: 35148 - DNA, 857 bp, Artificial sequence
  DNA replication origin
cctactcaggtggttcagcaggtgcagggcacccagcaggtaggatgtggccctcccagggggtgggggagggcccgggaggggggcagtgcaggctgcgtcctcgggggcctcacctcccctccccgcttcctgctggagccatctgctcacctgttcttatcaagatgtgcacagcagccgcccgccacccaaccacgccaggcctccctgggggaagtggcagctcagctcctcctgccttgtctccacagcggctgctggtccagacgagcgtgcaggccaagccaggccacgtgtcgcccctccagctgaccaacatccaagtgccccagcaggtaatgctgctgcacctggccaccaccctggaaggctccctcagggtggaggaccaaccccctgtggcaagcctggatctgtcctcaccaggatggagggaagagtccccatccaggggctgccctacctcctggctctgggcagtcacctccccagggtgagactatccggcaggggccatcagggacagaggagctgcaggagccatctcagcagagagaacaagatgtatagttgggaaggtggtttgcgggtccaacccagtgtcccgaagcagagaacccaaggccaggtttagagtcaggagtccacagccagcacagggtggtctgtcccccagaaggctgcgcatgaggtgccgcgcacacccgtttccgactgatcagcgcagatctggacaaagtactgttgggttttacaatggctcgatctcggctcactgcaacctccgcctcccagggtcaagtgattctcctgcctcagcctcctgagtagctgagactacaggtgtgcaccac

SEQ ID NO: 35149 - DNA, 826 bp, Artificial sequence
  DNA replication origin
actccagggtcctggcagcgctggaaggatcgaggtgctggggccaccttctctggggtgaccctggcttcccgggagtggaagctgctcggaggagtggtccctggaaggtcttgctagcctgtggccaagtcctccctccctgcccctctgtcctcagtggggtggggaccacaaggggcttggagtgggggaggcaggtactcacgctgacaggcagctgagaagagacaatcatagaacatggtgctcatcccctcccccaccccacccgccccccaccccgtccgcctgtccgtccaggggggcctgcctggccctctttgctccttgcctgcctctatagaacagcagggtgtgcaggtggctttatacccacgaccttggggcgctaatccccccggtggatgcagagagcctgcctgccctcttggaaaaacactcccctccccagcaaagcggggccttcgcggggctggggcagcgctgcggggtgaggagggaggttggtacccggagatgctatcaggcaggcacaggtcaaatttcatgcacatcttgctgagtgattagcaggggtgctgggggtagaggcgagtgttcccaagaggcgctggctagaagaccctcaccccagctgggacaccatccatcccatcccctccatgtgacctggcatacccccagcagctccagaggccgaggtggggctgggggtggacatgtacctgcccttcctccaccatcaaggagccaaggtcccaggcccacctttcttggggatttagaggggtttatccgacccccggcaggactgaagggccac

SEQ ID NO: 35150 - DNA, 1273 bp, Artificial sequence
  DNA replication origin
ttttttgagacagggtttcgctctgtcacccaggctggagtgcagtagcacgatcttggctcactgcaacctctgtcccctggggttcaagcaattatcctgcctcagcctcccaagtagctgggactacacgcatgcaccaccatgtccggctaatttttgtatttttaatagggactggggtcttgctatattgcccaggctggtctcgaactcttggactcaagcaatccacctgcttccatctcccgaagtgccggaattaccggcgtgagccactgtgcctggctgacagtaagagctttccgggatttttttttttttttgagacagggtctcacagttgcccaggctggagtgcagtggcgcaatctctgctcactgaaatctccgcctcccggttcaagtgattctcctgcctcaacccactgagtagctaggactgcaggcacccgccaccacgcccagctaatttttgtggttttagtagagacggggttttgccatgttggccaggctgctcttgaactcctggcttcaagtgatccgcccgcctcggtctctcaaagtgctgggattacaggcatgagccactgcacctggctgacagtaagagcttttattacccattttcagacaaggcaacagagaccagaagcaaggaagtgatctgtccaaggtcaaatgcaccatccaccgtgcaggccatgacgcaggttcccctctgggcccacacgaacctcataccacatatggaaccggagtcactggttctgcctgggctgcgccccaagggcagtgatgtgtgaacttgggtatatgggcacaggaaggaaagtaagctgggggtctacggggacccctcaaagtctgaagtatccagactgggtctcggctgtccaggcagggcacaggagggagaggggcctggacagggcaggagggctattcagggcagatgcaaaggccaagtcaagggcagagcgcaggagtgtgtgttgggggcgggggttgccagatgtgggaggtgttgggggaggcctccgcgtagccgcatgtgggctgtggggcatttggtcaatcccatgcctgcctgaccagctacctgtgcagccaattccacaggccctaatccctgtgttttgctggaatcttccctggcatctgctttaggcttcccagccctgagccataagggaggaggcccttgctgagagggcccctcctgggagaaacccgagacagccccgagtcatgtgaccggcactgcaca

SEQ ID NO: 35151 - DNA, 1068 bp, Artificial sequence
  DNA replication origin
tgctagtaggggcacagggtgtgtggagcatttttgcattttgtttttgtttttttgtttttgagacggagtttcactcttgttgcccaggctggagtgcaatggtgcagtcttggctcactgcaacctccacctcctgggttcaagcgattctcctgcctcagcctcccaagtagctgggattacggcgcccaccaccacacccagcttagagagagagagagagagacagacagacagacagacagacagacagagagaaagagagtgtgtgtctgtgtgtgtagcttttaaagtccttttttgtcaggtatcgggggaggggaaggagcctgctctcccagagctgagaaagcctaggctggggtttctcaaagagtgcccatggaaccacctggcttggagccatcagggttgagctaggatgtgacgggacctaatggacagttgtgaacctgctccctctggctgctgggaggggtcagactgtgagggcggaggctcgaccaggattggggtcatagaagtggaagaggcggggggggttctggaagagtttaggaggtggagccgagaggtcttactcaaggaggagtaggacagaaacaagactgaccgtgggcctgggaggatgagaaagccttgaaggagagatttgaagagggaaaaatgcagaattcaatgtggctgcactggcctgcatcaaattcaacaccaagtggatgagtcaggaggggctggatgtggggtcctgcggttcagggttgcagcccaggctggagacctcagtgtgggtaatgagagctgggacacaggatgaggccatcgttaagggagaactacaggagctaagagaggttcccaggtctgagtctggggctccccgtcctttgctgacaaggtcagggagatggggagaagcagcagagaggaccacggaggggctgcgggcggtgggcggagaccagggcagtgtgggctcctggaggcctcacaagaggggatctttgggaaaaagggggccagctgcagggggtccagcagctggaggttcctggagaaaatggg

SEQ ID NO: 35152 - DNA, 1183 bp, Artificial sequence
  DNA replication origin
gatcctgcccaaaacaacagggcggctgctctaggaaggggaggtgacatgtccaggccctcacccccagctgacctccctgaagtgcccactcaaggccatcctggctatgagaccctcgcatgcgtcccctgagagagaggagctatgatgatcccatcacaaatgaggaaaccagagcagggaggccaaaagactggtgtgtagccaggccaggcctctgtctcccacaggtgcatgcaaactttgatgccactgcccaaacccttcttccagtgacatcttatttgcaaagagaggtcagaacagctctaagaggctgagcatggtgactcatgcctgtattcccagcactttgggaggctatggcaggaggatcgcttgagtccaggagtttgagaccagcctaggcaatatggcgagacctcatctctacaaaaaatacaaaaaaacaaaaaaattagctgggcacagctgcacacctgtggtctcagcaactcaggagaccgaggtgggaggatcatttgaggccgggaggatcatttgaggccaggagtttgagacctgcctgagcaacatgggaagatcccatagctacaaaaaattttaaaaattagccaggcatggtggtgggcacctgtggtctcagctacttgggaggctgaggtggaaggattgcttgagcctggagggttgaggctgctgtgagctgtgattgtgccactgcactccagcctgggcaacagaatgagactctgtctcaaaaaataaaataaaaccaaaaaaagaagctctaagagctgctctggtgggaaggagtttggggggacagaggcctccttgcatggcttaagcacccctgccctagtgataccccaagtcccatccagaaaccttggggggcatggcagccctgtgccttcacacccagggtctaggctatctgaacaactctgagaggagttttcaggacacacgagcgcggcacttaccagagacagtgaccacgatgtactgctggggtgcaggcgaaggggtgggtgcaccggttggctgcgagggtgcgggtacagccgggagctccgtcacgtactgcttctggccacccggtggctgtgcctggggctgggggctctgcagctcggtgacatattggggctgaggggtggcagcagcggtgggt

SEQ ID NO: 35153 - DNA, 881 bp, Artificial sequence
  DNA replication origin
gactctgtctcaaaaaataaaataaaaccaaaaaaagaagctctaagagctgctctggtgggaaggagtttggggggacagaggcctccttgcatggcttaagcacccctgccctagtgataccccaagtcccatccagaaaccttggggggcatggcagccctgtgccttcacacccagggtctaggctatctgaacaactctgagaggagttttcaggacacacgagcgcggcacttaccagagacagtgaccacgatgtactgctggggtgcaggcgaaggggtgggtgcaccggttggctgcgagggtgcgggtacagccgggagctccgtcacgtactgcttctggccacccggtggctgtgcctggggctgggggctctgcagctcggtgacatattggggctgaggggtggcagcagcggtgggtggctgcgggggctggggtgccgctgggggtggtggcggtggcggctggggctgggcttgtggcggggcctgtggcggctgggatggtggcggggctgcctgtagctcagtatacgcctgtgttgccatgccaacggtggggaaaatgataataaataaggcttttttttttttttaattccttgggaagaaagacggggatgggggagagaaaaacaaaacaaaacaaaagaaggaaaaacaggaattaatccacaggcagagaaagcagggacagctctgggttccctggagatgtgcttgggttcatcactaacttaattaaatccccaggctggtggccagaaatatccaacccgtcactgcagggggaccagctgtagaccagggctggagccccactccgcacccccactcaccccaagccaggactcctgccttcccagtccc

SEQ ID NO: 35154 - DNA, 1331 bp, Artificial sequence
  DNA replication origin
gtgggtagcaacagttgccccggtgagggaaacggaggcgccatagccacggtagtcgtggcgaccaagcaacccggcaacgcgagtcaacaacaacaaccgcccggccgacccccacccccaccccccaggcccggcccggggaccccagcacgtcccgtccccttcccaacatcgactccgagacctccgaaaagcgtttccgcagacagaagtggggagaagcggaggtaaccagggcggccccggggtggctggccgggccggggtgggcggcggggccggggcagtaggtgtctctgtaatcacagtccggggggaaggggcgggcggtcaaaatggcggcggcgactgtctggaccgtgggggagggggccggggcccggctggaacgacaccacccgcccccgtccccgcggcccggcccccgcgaggggcgggcgctcgcaggcccgcggcgagtggaggtcggcaggccggggcggggggcttttatatgtcgggagcgcgaaggggcgggcctggggaggctgggccaatgggagcgagggaggtacgaggcggggccaaggtgggtgggcgggaccaggagggaaggtatgggcggggccggctgggtctccccaacctccacctcgggaaccagggtgggcagccaccacccggtccgccttccagatccttaagcgactcccttcttccttaagagctttgcagttgtcccaggactcagaacttggacaagtgcctgtccatctgaggcctcagttttccatcctgtaaaatggggagaatcattgacatcgcccttttcctgcagtaccgggactcctcattccttccaggaattttacttacggcttatctttgaaccttttcctcgtatctaccgtttctgaatgtggtttgataaaataactgtcagctagtcctgatttcaacactgcagcccactcctaaacctgccaccttctctctgggaggaagcaaagaggaagcaaagtttcatggaggagctaggagtcgatttggctttagcgtggaggatctggtttgcagaaatcaaagtccatggtagggaggagtgaccatgagggaatgctttagaggaacagaaacctgagtgcttttctctgggctgctgtttgagacctgatgtttcctggtttgaggttgcgggggtttgttcctggagatggaacgtttctgggtcctgcccatcgaggtctcccctactgggaatgggggagcaaatgaagcctgaggaagtttcttagattttttaaacccgcttctcttggccagacacatgtttttgtgtcaaacgagtg

SEQ ID NO: 35155 - DNA, 1158 bp, Artificial sequence
  DNA replication origin
gggagacccagccggccccgcccataccttccctcctggtcccgcccacccaccttggccccgcctcgtacctccctcgctcccattggcccagcctccccaggcccgccccttcgcgctcccgacatataaaagccccccgccccggcctgccgacctccactcgccgcgggcctgcgagcgcccgcccctcgcgggggccgggccgcggggacgggggcgggtggtgtcgttccagccgggccccggccccctcccccacggtccagacagtcgccgccgccattttgaccgcccgccccttccccccggactgtgattacagagacacctactgccccggccccgccgcccaccccggcccggccagccaccccggggccgccctggttacctccgcttctccccacttctgtctgcggaaacgcttttcggaggtctcggagtcgatgttgggaaggggacgggacgtgctggggtccccgggccgggcctggggggtgggggtgggggtcggccgggcggttgttgttgttgactcgcgttgccgggttgcttggtcgccacgactaccgtggctatggcgcctccgtttccctcaccggggcaactgttgctacccaccctagttacgtcacgcgcgggggcggggcccggggtgattggcggcggccggagaagtgattggacggcgccaggccttgcagctaaactattagttccgatgcacgcttttcaacaccctctggacttcccggcgatctgatttatcagtatgaatgtccatcaaaagaaactgaaccctcaaaggcagccgggcccgtcactccggcagggaagcagctggttaagaataaaggggtaggactcgtgaggacgggattggtttgccgatgtaaaaccggcctcctggttcgactaaagggacgtcaatctaccaaaggtttgccgcgctctctggctggaggccgtgcgcatgctcggcacgcaaggccgattgggagttgtagtccgctcttgcgtacactttacatgtcttaccaaattaaaaaggcgagaaaggaagactccgctccagacttctctctcgctcggtgggccagtttctggcttcttgcgctgacgtcaggggaggaatgcagtgacgcagcgcagccc

SEQ ID NO: 35156 - DNA, 1175 bp, Artificial sequence
  DNA replication origin
gagtggcgcctgcacctctaccgttcgctctgcatacgcgtggcttatcctggagcactggcgccttcgcggggagcgcagcggcagcgcccgggacacgagctccctccagcactcaccctggggacgcgtccgctggaaaagcacccacaacagaggcagcagcgccagcttgggcagcggccacagccagaaaggggcgcccctgcctccccgcatggcgtccctcgggagccccgagtccggcccagccttgccgggtccgcgcggccgcgctgctcctcttcgagctctgggtacagcgcccgaggcggcaacgggaagccgaaccaccccggcaggccgcctccgcacctttcgctcagggtccccgccccttccccgcgacggaaagtccccggctggggctgcttgagggggagtggggaggcggcctgggcgtctgggggtgggggcctccgaggggtggtaccgcgtaccgcgcatccccgaaacctgtcctacgcccaacaaccatacacacacacacacactctctgccaaagtcttcgaatttttattattggagtttgggaagattcgaatgtgcccagagctctcctaggggggccacctgccaccttctctggggtccacagccttggaactctggcaggggagttggagggagaggggatggaaagcagggcaaaggaagcgtgcgtgcaaaggctggactgagacagaggcttgattttagctggtcaggggacaatggccacagtttggactgggaagggggcaggggtctctgtgtggccagcctaggtagagtagggacccagttgtggcagtggagtgtgtaggccaggcaaacgcatggttagggctggggagaggtcaggggtcaggatgggggggtccccacttgaccaggcaggggcacagcttccttaggggccagggtcatgataggctggtcaaagggcagggttggataggtggtgtcgggagactgtgcctgagcccacagtgcctctgtgacttgtagatgaatgaatgaatgtgtgaggctcgaaagacaggtgcccagccagacactagttgagtggatggcaggactggggcattggtcctggtgcccacggctgcccagccctcaaactagcaaaggctactgatttcacttttgctac

SEQ ID NO: 35157 - DNA, 1723 bp, Artificial sequence
  DNA replication origin
cgaagactttggcagagagtgtgtgtgtgtgtgtatggttgttgggcgtaggacaggtttcggggatgcgcggtacgcggtaccacccctcggaggcccccacccccagacgcccaggccgcctccccactccccctcaagcagccccagccggggactttccgtcgcggggaaggggcggggaccctgagcgaaaggtgcggaggcggcctgccggggtggttcggcttcccgttgccgcctcgggcgctgtacccagagctcgaagaggagcagcgcggccgcgcggacccggcaaggctgggccggactcggggctcccgagggacgccatgcggggaggcaggggcgcccctttctggctgtggccgctgcccaagctggcgctgctgcctctgttgtgggtgcttttccagcggacgcgtccccagggtgagtgctggagggagctcgtgtcccgggcgctgccgctgcgctccccgcgaaggcgccagtgctccaggataagccacgcgtatgcagagcgaacggtagaggtgcaggcgccactcggctcctcccggggcagggacccggcgacactggggaatgggcggcagcgaggtcgaaccggagccccggggcggggtgggggagctctctgggtggttaacaggatgtggcgagcacagggaaagggggggtttgcacggagcccgggcaggggtgcctagcgcctcccttcctgctgctcatttccctaagcccccccaccttgcaattgtcagaagtccaagttctggggtgtgcaggcggaagggggggattcgaccccctttcctgagaccctctgactccctctccaggcagcgccgggccactgcagtgctacggagttggacccttgggcgacttgaactgctcgtgggagcctcttggggacctgggagccccctccgagttacacctccagagccaaaagtagtgagtacagggaggtgacgtggggaaacaggctttggaggtggccgctcaggccccaggctgctttggttgaaaggttccaggagtcaagcctggccaacatggtgaaaccctgtctatactaaaaatacaaaaaaaaaaaaaaaaaaaaaattacccaggggtggtggcgcgcgcctgtagtccctgatactcaggaggctgagacaggagaatcgcttgaacccgggaggcggaggttgcagtaagcccagatctcgccactgcactccagcctgggggacagagggagactctgtctcaaaaaaaaaaaaaaaaaaaaagaaaagaaaagaaaagaaagtcccaggagtctgcccccctcccccaatactcctccactccttcaattctagcttccctcgtttctttgctgtgtcaccctgggcaagtcactttccctctttgagtctccttttcatttctctattaaatagcaatcatagggccaggagaggtggtttgcacctgtcatcccagcattttgggaggccgaggcgggaggatcgcttgagcccaggaggagttcagagttttagagagcccgtcacttttttttttttttttttttgaaacggagtttcactcttgttgcccaggctggaatgcaatggtgtggtctcggctcactgcaacctccacctcctgggttcaagcgattctcctgcctcagcctccagagtagctgggattacaggcatgtgccaccatgcctggctaa

SEQ ID NO: 35158 - DNA, 1860 bp, Artificial sequence
  DNA replication origin
ggaggtggggatgagggccagcctgaccttgtctccgccatctctgcagggtcaccgtcctctctcccagtccattgtcgaggcaggttctgtaggtaagtgtgggagcccctaggtctgggggtcaggtcaccccagagcctgggtgtgagagggtgactcaaggggagtgtggatggcagtccttttgttccatcttaaccctgtcttcccttttgtcctctcccctccacctctgactcccccaggccagactgatctgaacaagagagcctccctgccggctggactagtgggcacgcctccagagtccccctctgagcccagggaggatgtcttggggtttctgccaggcccgaggcaggtccccggggcagcaggagactcctcagaagccaatggcccatgccccagccccatccccactccagagcaggggctaagtcagagggcagtgccatccgaagggcgggtgggtgaggccaaaggagggggcgtggtgagtgtggtgtgggaagggctgagggccacagaggactgtgccacaggggccacgggccccgagctggaggctaaggtggaggaagtggtgctggaagccatcggagacaggaagggagctggtagcctggagctcccggcctgggtgaaggaggacaggggcatcgtggaggtggtctgggagggggtgggtggcagtgatgcagaggccatgggggagataggcagggtccctgaggtcgtgcagactagctcgcctaggctccaggagagattagaggcagcagcttccatagaaggggaagatgtgccccagggcagccctgagggtgatgggcagggaggctctggaggagaggagggatccttcatttgggtggagagagtgaccctcagtgaagagtgggaggagctgctggtggaggggttggaagggcccgaggtggcagggagggagagaggagatgaaagcccgctgggggccgagggggccaagacgggaggaggcgaggagacctgggaggcagagaagagaaaagcggaagaatccatgggaataggaagtgaggaaaagccagggacagggagggatgaagcggagatgtcaccagtggtagagaggaaaggaggagagaagaagttggagctggagagcagaggaagtgcagaaaagctgggaacagagagggaaggaggtgaggaaccactgggcatagagagaaaagttgagggacatttgagggcagagaaggaaggagatgaggaaaagcgaggggcagaggaggaggaggtagaagaaccattgggagtagagaagaaaggaggtgaggaagagccagaggcaaccaaagaaccactggaggcagagagaaagggaggggaggagacactggaggcagagaaaaggggaggtgaggaatcattggagacagagaagacccaagggacggagggagatctgaatctagaacaagggtctagggaaggaagtgaatcccaggcagaggagatgaatgaggcagggcctccccttgaggctaacacggagacaaggccagagaaggaaggaccccagccccaggagaagccagtaggagccctggaggaggaaggagtgaagccccaaaccgctgctgagggccaaggccccttgggggatgccacacctcttctggcagagaccccagccccagagcagcccgccgaatgccagccactgcttcagggggaggggcccagcgccaaccccagtgcccaccctgtgcccacctacgcgcctgcccggcagcctgagccatctgcccccaccgagggtgaagaggcaagtggccctaagcaaaagacgtgccagtgttgtgc

SEQ ID NO: 35159 - DNA, 1267 bp, Artificial sequence
  DNA replication origin
tgtcccaaggccccaccccctacaccccccatccacagacccccattgggcgcgggcgaggcctccgcagcatcccgggcgcggccggccccgcccccgccccgccccccccactccgcccgccgctgagtcagcgcctccgcagccccctccccgccctgggtgcagacccgcgctgggccacccccgccgggctcgctgcctcgggagccccgggagctccggtgagccccgcggaggagggaggggaaagggagggaagaggaggtggtggaggccgcgcccggccggcgggcagctccgggtcctctgtgcgcaggagaagcggcggctgcaggaggagatccgcgccgcgcgccgggaggtggaggaggagaaactccgcgtggagcgtctcaaggttgggggcgggcgggggcgcctgcctagcctggggaatggagtggggggtgtctgtgcaagtcggtttgggggacgataggagcctctgtccaatttttgggggggagcgggcagttgggggcgttggttccagcttggccggggcggggtatgtctttcccagcctgggagggacgaagtggggtggtcatggggacatttgttccatttggggaaaagtctgggacagtgatgctgtttgtcccaatttgggggagatggagaggagccgaagtctagctttggggtagggaggggccagtagggagggacattgatttcactttggaagtgcccgtttcattttggaagggtttggaacaagggatgtctgcccacttgcagcgttggggggcactgtggccatgtatcccagcctgatgtatgtcgcaactggttgtgaggtggtgataagatacctgcccagcctgcagaggtcgggaggggactttacatggaccggggtagtctgtatgcccagccccaactcccttcccctgcccagaggaagtctctccgggaacgttggctaatggatggggcagctgcagtgccagagccatccgaagaccccacctcgaaggacccccagtcacccgagggccaggctcaggcccgaatccggaacctggaagacagtttgttcacgtgagtggagaccttctagctctgcccgaaccctgccccagctgggtgagatcgagaccctgggcacattccaaggaggtggtcgcttgagtctaggagcccaaggagcctgggggcccagctcctagcagccctctctcttcttcagactccagtcccagctgcaactgttgcaaag

SEQ ID NO: 35160 - DNA, 2666 bp, Artificial sequence
  DNA replication origin
attggacagaggctcctatcgtcccccaaaccgacttgcacagacaccccccactccattccccaggctaggcaggcgcccccgcccgcccccaaccttgagacgctccacgcggagtttctcctcctccacctcccggcgcgcggcgcggatctcctcctgcagccgccgcttctcctgcgcacagaggacccggagctgcccgccggccgggcgcggcctccaccacctcctcttccctccctttcccctccctcctccgcggggctcaccggagctcccggggctcccgaggcagcgagcccggcgggggtggcccagcgcgggtctgcacccagggcggggagggggctgcggaggcgctgactcagcggcgggcggagtggggggggcggggcgggggcggggccggccgcgcccgggatgctgcggaggcctcgcccgcgcccaatgggggtctgtggatggggggtgtagggggtggggccttgggacagctatcgggggaggggcagagctggggagctccgagatacgaggttaagagaaatggggatcaaagggagggtgcggccgtacgcggtggctcacgcctgtaatcccaggactttgggagaccgaggcggacagatcgcttgaggtcaggagttctagcctaccctggccaacatggtgaaaacccggctctactaaaaatacaaaaattagctgggcgtggtagcaggcgcctgtaatcccagctaccggggaggctgaggcgggagaatctcttgaactcgggaggcgcaggttgcagtgagcggagatcgcgccactgcactccagcctgggcgacagagcgagactccgtctcaaaaaaagaaaaaaggaggggagggtgctagtgagatgggggtccgaaatggggatgcagccatgggagcccagagtaatggagtgtagacatggaatctagagagatggggtgcagaggtgggggtgcagagagatggggtacagaagtggggtacagtgagatggggtacagaagtggggtgcagataggtggggtatagaagttgagtgcgaagagatagggtacagaagtggggtatagagagatggggtgcagggagatggggttccatagatggggaataaaaaggagggtgctagtgagatggggatccaaaatgggggtgcagccatgggggtccggagagatggggtgcagagatggggatcaaaaggaggatgctagtgagtagtgagatgggagtgcagccacggggtccagagatactgaggtgtagaggtggggatcagggagatgggatacagagataggggtcagaaatatggggtacagaggtggaggtatggatagatggggtatgtaagtgcgtgcggaaagttggggttcagggagatggaggagggaaggatgcaggacagagataggatcagagtggtagagacccagagatgggggagtccagagagacgaggaagtcagggatgaaagttcccaaggaaggactgtcaggatgggggctccgaggtagggagatttgagagatagcggtctgataaaaggcggtccgagagatgcggctcaggcatggggtttttgggaggctggggttcaggaatgaggcatagccgatgcaggctctggaagtgtgggggccacagctccccattctgagggtggtagtgaccagacaggaactggggggcagagggggctggagaattggtgtggggagccctgggcggggctggagctgagggcgctctccgcagagatgacggagagacgagaagggagcatggtggaaagtttgggggtgcccagggcgcggggagggcgtcacttacagcgatgacttctagccgctgccggtagagggagctctccgccatgggcctgttgggagagggcaggggcttcgaggggctcccatcttgaacgcccccctcttggccaagatccctgagcagtatggaaattgccccgagcccagcactttgcctctgtttcccctttgcacctgggaagagtctgggcggggggcgagggtcttgggaggggaactgagcagtgaccacgactggtgaggctaaagccctccctaaatctggctttgtctctctcagcctcagtttcctcatctgtaagatgggcaggaatagcttgaccaccctgtccttgccacccccgatctcagaggacgcttgcaaggagctattcatgcagggaaaagcttagggtacagtgctacaaaaatagtcccattgtttatgaataatcataatttatataattccatgatgaataatatgtatgattaattataataaccatctccagtccaacctgcagaaactctcaaatgccaccaggcccctaacaggctgtgtgcctctttctcttcccagtcccacaccctctctggacctcagctcctacccagaatttctcaagcgctgggggggcaagcgagtctgtggccctcccactgttgccatggtaaccccagagctgcctcctccacctgctaacccccctccctggggacaaggatcactgggtcactctgcctaggactggactctgagctgggaggagggggacttgccatttaaggtttaactcgagattcccctgtcattgtcttcctcaa

SEQ ID NO: 35161 - DNA, 884 bp, Artificial sequence
  DNA replication origin
ctagcacatgagaagatctggtttgacaagttcaaatatgacgacgcagaaaggagattctatcagcagatgaacaggcctgtggcaggtgcctcccgccaggagaacggcgccagcgtgatcctccatgacattgtgagagccagagagaacatccagaaatccctggctggaagctcaggccccggggcctccagtggccccagcggagaccacagcgagctcgttgtccggatcgccagtctggaagtggagaaccagagcctgcgtggcgtggtacaggagctgcagcaggccatctccaagctggaggcccagctgaacgtgctggagaagagctcgcctggccaccgggccacggccccgcagacccagcacgtgtctcctatgcgccaagtggagtccccggccaagaagccagcctcaccagcagaggatgacgaggatgatgacatcgacctgtttggcagcgacaatgaggaggaggacaaggaggcggcacagctgcgggaggagcggctacggcagtacgcggagaaggccaagaagcctgcattagtggccaagtcctccatcctgctggatgtcaagccttgggacgatgagacggacatggcccagctggaggcctgtgtgcgctctatcgagctggacgggctggtctgggggacctccaagctgatgcccgtgggctacggtatccggaagctacagattcagtgtgtggtggaggacgacaaggtggggacttacttgctggaggaggagatcactaaatttgaggagcacgtgcagagtgtcgatatcgcagctttcaacaagatctgaagcctgagtgtgtgtatgtgtgcgcgtgcgtaaggccctgccacgattaaagactg

SEQ ID NO: 35162 - DNA, 1007 bp, Artificial sequence
  DNA replication origin
cggcacctgccaggaggactcccgccccgccctggccccgccctcgggacaggggcgcctcggtggggcactcagtttcatcaactagcgcgcccagtcacctcagggcacgggacttcttggaagagggcttccctagacccggccccgctctctggggggccattctgggtgctgggttctactgagcgcaccctggcactttttcagagccatgtccccgtcatcgtcccggagactgggcccagcagcgcgtcggactggggttctgaaccactagccgcttggtgaggtgtcccccgaagccgtattttcgggacccgggcagtcccgcttggtcgtgccagccggcaggcagcgactcctcaggcccctgggccctccctccgatccagccttgcagcgcacagctccggcccgagggggcgccaggagccgccttactggccgctggggtctccctaccaatgcttgggctcagcgaggttcccagccgcgcaccactgcccccacgccaagccgagaagcggcttcccctctcctcccggaaaaatccgggaggtgtccgctgccaagggcactcccggattgagggaggagggagagacggacacagtgcgccgtgggcgcagcttagcggttgcagttgaaaggcggtcaccttgggcccgggcgcctggggaggcccagacaggaaacaggaggcgtccagggtagggggaaagagcagctggggccggatcatgcggttcaagggcaggatcgatgcccttgcgcgggccaccctcccctagggacgttttccactttccccctaatggaagcagactcttcccagaacctgcccccaaccccaccattctggggtgcccagaaggaaaaatacagttaccggccgggcatggaggctcatgcccgtgatgccagcactttgagaggccgaggcgggaggatcacctgaggtcagcagttcgaaaccagcctggccagcatggccaaaccccgtc

SEQ ID NO: 35163 - DNA, 1000 bp, Artificial sequence
  DNA replication origin
ctcgcgctcgcgcacggcgcgcacctcctgctccagcagtgacggagtgaaaggcggcggggcgctgcccagcacccggcacccgccctgcacggccgagcgcggccgtcccccaggctctggcagcctctgcgggcccgcgccgtcccccgcccccgccgaggagccgctccccgccgcggcctcgaagaagcgcttgagttcgcccagcggctgcggcggcgaccgggcgcgcggctcggggaccgcggggcgcgccagcgccgcctgccggtgggcctcccgctcgatgtcccgctgcatctgcgcgcccgcccgcgcccgctccagggcgcgcgggagcgcggggccaggacccggcaggttgagcaccggccgcacgcgcagctcgacgagttcacggcctgcgcggcccgggctcaggccccggctccggcgcaggctctcctcgcgttcgcagctgcggcggatttcgcgctcgatgggcgtctccatgaaccgctcctccgggggacgctggggagcctcggggcacggcggaaaacgcaggtggggggcttccgagcctgacctggaggaggaggtcttagggcctggagggggatgctgcccctggacctccgccctttgcgcttcggacggcccagggtcgtctctgcctggctcaggactctcaaagcccgcagctgtggacagcccggggctctctgcgtcctgctcgactgatggctcgaggacttcgctctcttgctccaggatctccacgtcctttgcggagggcttggggacctcggtgttcagctccgcagcagctctggggcttcgctgtctggccctggggactcctggccctcctcttcagacgaccccagggtttcgttctccggccggtgggggccttcgtgtccagggttggaagcagttcggaagcctcagttcccaaccggggttttgattcccagagcgaggacagagggcactgtgaggcacctgtggcggc

SEQ ID NO: 35164 - DNA, 1770 bp, Artificial sequence
  DNA replication origin
cctcccaaagtgctgggattacaggcgtgagccaccgcgcccggccacggatgcttttggaaagcagaaactcttgacccaacaccacgaatgagcacgtctcatagtgaggacccatgaggtcaagaagaacggtgatcattaggaactaataatgttgagaagcctgaaccctcaccacctcttttttttagtagctattgtttacgttcccagggtaggaacagcctcttatcaccactgtctagccagtgcccagcgcagggcacatcgttggcaccaataaatgttgacgaggaagcctggaaacgagagggtgtgaactcggtaagcgcgccacattttgcgcccgggccgccagggggcggtaggacctgggccaggccgtgtctggccgtgccgggggaggcgggcagccccagagcagggcggtaagggcgcattcccgcattccggcccgcacctcttggggttttctcgggcctccctcggcccgccgtgctcccgccccaccccagacgaagaggacccagaaaaaaacaggctgcagtgccctgaaagaagaggctttattgggggtggggggagtggggcaatcgaggcggtaactccggccctcttaacagtcaagggagagggtagttcagtttgcaattaggcagagaagggctgggcagtttcactggcggagttgtgggtggtggtcagtttcccaatgggggactgtaagttttatagagggggctggtcaatttcacaaaggcaagtcgatttcatcttccccaatgcagagagccgacccttctccaggcctaatgctagacgccccccgccctgttcctctgacgcgtacgttacttccggccgggggtcccagccttttcaaacctcaaggtttgcgctcctcctggggacagaggaccagaaggaaggccggcctcagggacctgcgcactgcatccaggctcggggtggcggtttgggcctcaagaccaccgtctcctcttcaccccggggatgcgtcccagactgagttctgaccagagtggccctccagggaggatgcacttttccccaccaagcgtcctggcaccggaggggtggggggaccgacaagcgctagaggcacacgggtaagggggctcccacctgctccaggccgttctccgagacctttctgcgggggggccagatcaccaccaactttccgtcgcccctgctcgctgcgggggaaggggcgctcagctcaccagctggcggcagccaggatgaaaggccggccgcaccccttaaacacacacaggcgttcaccctccgcctccccatgaaagcctccattcaactccaggcacccaggaacccgagggaggagggaggtgaacccagaatggagaagcaggagcccgaaaattcagagggaggacccaggagtgccagaacccagtcagggttccctggaacccgacaaaaaggaagacatctggaatgcccccacccccgcgcagcctgggtggtgtggatcagagagtccatcactcccggtggaggggtggatcacagcgagtaatggagctccagaaggggtaggcaagagacaaaattgagagggggtctgggagcttggagggagagaccccgagaatcggagggccacaggaggggccactgaagttgggcaatcggtgggggcggctggaaccctgggggtcccggcgttgctacgcccgcggcttaccggtgaggctcggcgtaggctccttgaactccgcg

SEQ ID NO: 35165 - DNA, 1323 bp, Artificial sequence
  DNA replication origin
cccggccctagccacacccccaggacacggccagaggccacctccctaggcgggtccctccccaccgccaggttcctggagcgcgtgcggcgcgtgtgcaggggtagggggccgcaggcgcgcggactggagaggcgcgcccctcccgcgtgttgaaattcaaaagaggcgaacggcccccggcgcggcggcgcggctccggtggagaggtcaaggcaggggccagtcggaggctcccggggcggggtcgaacccgcggccaacctgagcagcagcggaagcttaaagagctcaggttcccgccccccggccctaccatggctacagagcagtggttcgaggggtcgctccccctggaccctggagaaacaccgcctccagacgccttggaacctgggacgccgccctgcggagacccctccaggtcgacgccccctggcaggcctgggaacccatctgagccggatcctgaagatgccgaggggcggctggctgaggcccgggcctccacgtcttcccccaaacctctggtcccccggcctgggccagcacctccccgcctatccctggacactttgttcagccccatcacccaacagctgcgctacctactgaagaaggcagatgatttccagagctacttgctctacaggtgatgctggacagggtcccaggtccccatgggtaaggagacttggaggggaggcgacaggatgggtgacacacaccagggtcgcaaaattacaagcgctaggagccagagggagacagtggaagaagctagcatattagaatccagtttaagagaatgaggaagactgtagaattgcgggtaggggatggctgctattactgtcgtggcagtgtgggcctggggttgtcaagtctctaggactttttctcccagtttttaagtgctgtcttacattttgagccctgtgctggctaaacaagacccacctgagccaaacttggcctgcaggacatcagtttgagactccaaaggataatgtgattcccagaccaggtttccctgtgactctcaatttcagtgtccattggaatttcctaggaggctgggttgggttttgtttgcgtgtttgtttttgagatggagtctcactctgtcgcccaggctggagtgcagtggtgcaatctcagctcactgcaacctccgcctcccggattgaagcaattctctgcctcagcctcccgagtagctgggattacaggcgcccaccaacatgtgttgcccggctaatttttttcttttcttagtagagacagagtttcaccatcttggccagactggtcttgagctcc

SEQ ID NO: 35166 - DNA, 1356 bp, Artificial sequence
  DNA replication origin
tccctccccaaacaattctgtcctaacctgaggctctcttaggaggctctttagtgccctctccccaccccattcataaaatggactccgtggcttttttttccctttttctttttttaaaattttatttaaaaaaccttcggtgcaatattaaaaagcaatacagccagctggagcgacaatcaacagaaagaaaagagggaggagagaaaaggcccgaggaaccccaacccagctagtcccctaggggctggaggccaggggcagactgagaaggggggcatgggtggtaggggagggaggaaagaccacccaccaaaataaacaggcagatccaaacatttatacaggaaacatctggctgaacggaagaggatcttggggagatgagaagccccccacatttcattttttttttcctaaaatgtcctggactgggtggggagggtcagccacctggggtttaaggagcaatcccctccccacaccgacgtgctgaggagcagatgtgtgtgagacagacacaaggggcaaagataaggacaagagggtgccctctccttggaatctgttatgagggctgagggtgtccccgtccagctcctggactctgggggatcttgggtgagatgggggccggaatgggctggggcaggggtgaggctgggcgctcagcctaagaagccatcggggtcatcatcctcaaagtggccttgctgaagcaccttgatgtggtgctcgtagattttcagggctggcccgaggcggatggacaggccggtgagcacatctgtgcgctgcatgagcagcaaagatttgccatcaatttcctgggtgggacaggaacagagagagccgggatcagggcacatcccagggaggccctctgtgtctgtcagtgtgtagtcctgggctggaaactcacctgctcttggaaagctgtcgcctgctccgggaatccagcctcagtaaaatattcgacgacatccatcacggtccactcgacgggatcagatggcttctctttgcgcccgggactgcatcaaaacaaacagacaccagtgaacacggatgtctctctggctgtaccacacacctgagcagcacccccatgtctccaataccccaacttacggacagccaaagggggtcccgtcggccccaggtagggctggtttgcctgggggcaaaggcacgggggacggggagtctggcccggtggcaacagaagctgggaaggaaaaaaacacctgtctttggctttgtcttcgggctgagttcctctccacctagcactcttccccacccagagggatccttacctgttcccccttccttgttcatggctgccatgga

SEQ ID NO: 35167 - DNA, 1031 bp, Artificial sequence
  DNA replication origin
cggcccggagccggagcgcacgcgcgccgagctcgagaaactgatccagcagcgcgccgtgctccgggtcagctacaaggggagcatctcgtaccgcaacgcggcgcgcgtccagccgccccggcgcggagccaccccgccggccccgccggcgccgccacagcagcagcagccgccgccgccgcagccacagccgccgccggaggggggcgcggtgcgggccggcggcgcggcgcggcccgtgagcctgcgggaagtcgtgcgctacctcgggggcagcggcggcgccggcggtcgcctaacccgcggccgcgtgcaggggctgctggaggaggaggcggcggctcgaggccgtctggagcgcacccgtctcggagcgcttgcgctgccccgcggggacaggcccggacgggcgccgccggccgccagcgcccgcccgtctcgcagcaaggtgagcgcgccggggagcgggggcgccgcgcggtgggcaggtgcgggcgaagttggtggcgggggcgcgagtcccgggaggaactgggtggcgggtggctggggctttgcgcgcgtttcctgcgggctcggtgcgtggtgaccttggcaagtgattgaatctcccggagcctcagtttcctccgctgtaaacgcggtttaataacagtagcgaccccttggggttgttgagcgagtttagtaagatttggttgtcgagggctttagttaacacagagcctggcacggagtgaatgcgtaaaagttagtccgtattgttcttaaaggtggaatcggttcctcctccccaccgcccggacgccacagtcagggtctgggattagaacagctactaattttgcatgcttctctcctcggctccagagaggtggagaagagcgagtacttgagaaagaagaggaagaagatgatgatgaagatgaagatgaagaagatgatgtgtcagagggctctgaagtgcccgagagtgaccgtcctgcaggtgcccagcaccaccagcttaacggcgagcggggacctca

SEQ ID NO: 35168 - DNA, 1580 bp, Artificial sequence
  DNA replication origin
gggaggggagtgccggggggagtggagagggggcgggcagggcgggcgggcggcgctcggccgccctccagccattgggcgcgggacccagacgtccccggcgcccagcccccctctccacgcctctccagcgcgctccgctctcgggaccgcacttaccgggaactcgccgcccgcgggccggggctgccgcgctcgcagggtgctgcggggaccctcctgctgccgccgcccccgcgtccctcaggcgcgcctggcccggcgctgaggatgcgggaaggggggcgcgcaccctctcccccttctactccccctgccagggccgcccccgccgccgctcggcctcctggcgcgccagccccagcgcctccctagagcgccctctcggtcccgggctggacgccgagggggcgcgccgcagatttggggaccccgaatctggggtcaaagggcagtttgacgctcgtttctcctgcggggccgaaggagtgccggaatttcagctaaaccctggttacaaggacttcaagccaggacctgatcggcctgcacgctggggtccgaaattccctttccaaccccctgggggtgtgtgggtgggtgatcgaagtcgagaacaccagcgacactttttttttaaacaaaactttattggtaatagttttcaaatatgtttacaacagcacactgttcaagaggaagtctcgtccttcgcagcacacaggttgaatcgcccccgcacccacccggggccccaccccaggcctgagaactcctcctgggatggggagaagttatgagagggggaaatacggggatgaatggggtggctccccagcggctccccacttttctattacgagagaaaaaagcacaaatgagaaagtgggggagaggtgatggacagctgacagctaagctggaggaggggcgcccaggatgggggaggcggaagctggtgggtgagtaaaacaggcagcccctccccagcagctctagccttgaaccccgggccgtggcttggggggacttggcctcttctgttcccttttgcagggatgccctccccactcagctgagggaaggctggacgttaaaatctagcggagaataaaattaaggagttggggggaaacgctgctgggaggaaagacttgggcttggggctccccctctgtctttttgggggatgactcctctttggcagggagaggggcagctgctttgtctggctttcaaagcccaagggtgaagacaggtctgttggggaaaaagagagcggaggcttcctaaaggggcctagaccctcgcaggattggcagagaggattccccggggaggggcccaggggagattagcagcggggaggttcaaaccccagcgcctccctttccaaagtcagtctgcttctctttaaaatggatttgaggaatggggggacatgggaggggtgggagtagaggaaggagggagggaggcactggtggaacttaaataagattttaaattgttgtttttttaaaaaaattctagcaagcaacccactgaacatgtcactaaaaatctctccttcccaggca

SEQ ID NO: 35169 - DNA, 881 bp, Artificial sequence
  DNA replication origin
ttgtctggctttcaaagcccaagggtgaagacaggtctgttggggaaaaagagagcggaggcttcctaaaggggcctagaccctcgcaggattggcagagaggattccccggggaggggcccaggggagattagcagcggggaggttcaaaccccagcgcctccctttccaaagtcagtctgcttctctttaaaatggatttgaggaatggggggacatgggaggggtgggagtagaggaaggagggagggaggcactggtggaacttaaataagattttaaattgttgtttttttaaaaaaattctagcaagcaacccactgaacatgtcactaaaaatctctccttcccaggcaggattactccgaaaggaaggttggcgcttcgttcatttgcccttagcaagtggggcctgtggttgggtgggatgggggtgtgggtgggggctggagttaagcgtgagcccctctttccataccctgtccctggatacaccagcaagacctggtctgactggagttgagaaactcgtttaaaacaggcagaagtgggctgggagggctgaggggctggggggctgtggggaaagaggaagggaaaagtgggagagggggcaggagggtgaaggggatgagggggagcagctggtgtttctgtccctctgattatctgggcttcctgctccccctaaccctggagggtggggtgggggtgaaattagatgcaaggaactctggggccctctggctgttcaatccaaccctcccacccccccgaccaaaaaaaagaaaaaagaaaaaagaaaacccatgggggcacaggcatgcccctaaaactcagaaaactccttgccacacttctcattgatggagacccggatt

SEQ ID NO: 35170 - DNA, 1114 bp, Artificial sequence
  DNA replication origin
tttctgccttggaatttgcgaaaactcacactaactgggatgaggagcgaaaaggagggtcgtctggcagggcggtttgtgttctgtggccaagatgttcccgtgaggctcgggattttggaagcccatgggattctggaaccgcggggttggggctggacagcaagggggcttgaggtgttggcctcagtgtggccggcgcgtccagcttcaccacctggcctgacttaaggaacttctagattattctgacaacaagcagggctccccagggaataggatgggtgagcagggaacggtctgtttcttccagggctgtgtccccacatccggacctcaccttcccagagacgatcttctcatagatctggatgggctggtctgcgaagaagggcgggtagccagcggccatttcatagataagaacccccagggcccaccagtccacggccttgttgtagccctggagcaagatgggggggcacagggtgaggaggaggcgagagcaggagagcagagccggcctcaggggaaggggagggctggggaggctcctactttgctcaggataatctcaggggccaggtactcaggggtgccgcacaaggtccaagtgcggcccttcacgcgcttggcgaaaccgaagtctgtcacctgtgggcacaagaacaggcagttggcagggaggaagggtccaggccacggcttccccagggctgcccctcgcccggcctggtgggcacctgaatgtagccctgctggtcaatgagcagattctccggcttcaggtccctgtagatgagatccagcgagtgcagatactcaaaggtcaggacgatctgggccgcgtagaaacgggcatggggctcactgatggggacaaatggggaggtgaacgtcagtggtcatgccccaaaatggtccagcaggtggccctgcagagcctaccccagaggaagacacctccagtccagccgtcagaaacgcaaggcacctgattcttagatagcccgacatgggaaacagcctgtgggtccatccacaggaaaatggaatcacagactgagctatagtcatacaatggaattccactcaccaccaccaccgccaacag

SEQ ID NO: 35171 - DNA, 1740 bp, Artificial sequence
  DNA replication origin
aagctgtacttcctcccagaggctcccagagaaggaaataagatgaggaaggaagtccctctttgctttgaggcgctctgattctgagaggatggagttagacaaaatttgccctcttagaagggtggggcaggggcaggggcagtagccaggccagcctgcagggggcacctggatttcatctgccagacgccggcccgactggggtcaggaaaatgcccaggccttgggaggcaccagttaagcatcctgcagtcccctgtggtaccatctctgtgccagggcaggacagagtccgcctcctcccaagaggccagggatccagaatgaaccctggagtggagttgggggaatctacacccaaagatggcaaagccattgggagagctgagagggccaagaaaaaagactaaggcccaggctctggccaagttggaagaatggagagggagcagcggccccagggggcaggcgcccaggtcagacagccaagtggggctcaggtcgtggctggcactggctgaagatacccctgggagctggcccacaggggaaggggcagagctagtaaaagggagcccccgatccccaggacacaagcagatcctggcaaagagagaaaagcaccccccaagaagaccctagatgggaagaactagtgccgtgtaacatcctatggatgcctaagacggccaaacaccttctgtgccttggcagttgtatgggtgcccaagaggtcttatcaaggcagctctccccttagcgcaaccgcgtctacagaaactcggagggccctatctgtccctcctccacacccagtggcctctgggttgggtttctcttcctgctcccaccccacggctccctagctccccctgcaggcagggttctggggacagacagccgaacagacacggcaggtctcatgagccttcccagccaccgtagtgccggtgccctgagaacaggactgagtgatggcttccaactccagcgatggtgaggctgagtcctgttactatagcaacttcctaggcacactctgccccttaagtcagggaggggctgcagcggggtctggggcacaggcgaagagaagaaggatgtgaacccctggctggccctggaaacgcctcctgtacagccccgggctgtgcggcctggggaagagagaggggatcggtggcccagttcagacaagggaggatggtccacccggcagggggccagctcagagaggggtggtggagtggtccatcccagtgttggggttcagctcagactgtaggatgagccatcccagtgttggggtccagctcagaatgggggtcgttccagccagtgttggggtccagctcagagttgtgtcatttaggtaagcccagagcagggaatccaggctccactggaggaatcagccagcctcgagtagggggcccagcccaggctgggcattcctgccccagaattcccaggacagccagatttcaaaagggcagaaggtctgagattgttgtccggaggaagggggttctgtggctgggctccttccgagagagaccccaagccccttgcccaaattgatattctgctgttgcaattccccattcccagggcgagtttctagatttctgctttctgctgtggtcctggcttttcaaggggtgtcaaggagttttccctatgaacccaaatggaatctggaccagagtgagagctggcaccccccgtgtgggagat

SEQ ID NO: 35172 - DNA, 1754 bp, Artificial sequence
  DNA replication origin
ggactgtcatctccccaactttcaactgagctaccgcaatatatagctgcctgcctctaccttccacctcccagctggcctcacctgctgggggcctgactcctccccccccggccaagtcccctccaagctcatgcccagaccttttttggacactacccacctgctcctctgtcatcaggcactcagctacaggcatttccctccccagcccccacccattggtgacatgtcaggcctcttcatgatcgctctgtgactctgagttctgctatttgaatccgtatgggaataaagttccctggctttcatacctttctgggagggggcattcaggaaactcagatgctggggtttgagaccaaaaactggccttccttttcgaccaatagttccgactatttctgggtaagtggacaggggatcccagctgccttccagctttcagactggagtgacaacaatttaagagctgtaaaaattgggaatggggttcaagaccatttctgatggtatttccagatagagaatctctttctctggctggctggaaaagaccaacctaatgtgtgggcaagtgggtgaaacaggtctctctctggctgagccctgggaatgatcagaatcactagacgtcaaagcaaatcactagacgtcacccattactctctttgactgcctcctcctccccagtgctctttctgaccatctcagttagaaccgaatgaacctcgctaaacccagacacttttcatcccaagccaggagtggtggaagaagccccagggactgggtgaatgacggagcctcagttgtgaaacgaccatttattgaggggccctccatggagcctagagctcactgcaagacaggaaatgagagggggctctgccaccacccccttaccccaacgcaggaaagaggatgcaatgaatcccaacaagaccagctcaaacttggctttggaagcactgaagcaattctctacgttcataaacagtctgctaccccagccagggacagacgcttgcttggaggacggagcacaagcagagcagcagaatgacagagtgacaggatgagagaggcagagggacccagaaagatcctgtcccccatgccaagtgacacagaagaaaaaaataatgctggaggtggctctgggaaatgttcagggggcaggatgggtttggaagggggggctgtgctaaggtgaagagggaaagggcaggagaaagatggcgggggctggaggggggaggggtgtggtcagcaagtggccaaggtccctgcgcggtggaggcagacagacctcatcgcattcccaaactggtagaaacctgggtcggggtcaggcagaggatcccataggtgagagaggtgagtgaggaagtggggggattagaatctgggaagaggggccaggaaaggagggggtaggctggtgacaggggcccatgtggggccccagcggtcatacgtgccatggttggcagtgacagctgggggggagcacggtctttgcagcatggggcggccctaggggaaggggacccctacagggggtactctgcgggcccgcgggccccagccttggacaggccggggcaaggggcgctggggggtaggcagagaggatgaggggccccgtagggggaggggccaggcgatgatggacaaggccagggctggcagcgcagggccaagatcggggtcacagcccgggcactcaccgctctcctgctcgctgccct

SEQ ID NO: 35173 - DNA, 1415 bp, Artificial sequence
  DNA replication origin
gtccgattggccgagacgctggactgggcccggggtccgccctgcgaggccgccgattggcggaggtgccgggtccgccaagccccccagcagaacgctcagtgtcaatccgggggtgagagggcggggcggagacgcagtctgcgggcccgggccggcggggcggggcggcggaggctggctggcggccgcgcagcgctccgaggctcaggaggcggccccggcgggcgcccggccggccccgcgcgcgccgcagtcccccgcccccgctcagtgcggcagcggctgtcggccagccggagttggcgccgcggcctgcccggcgcagccgctgtccacctgccagcgggggaggggcgcggccggcgcgcgggtcagaggtcgcccggccgccgccggcgtcattcataaggcctggcgctgggcggccgaggccaggcctgcttgggggccaggccgcggggcctcctgggttttcccagccgcactcaggaggatgccgggcccggcgcaaggggtggctgggaaggggcgctcagtgtccacccctttgctgggccctagccctgggctcctgccagtagtaagagctggcacccacttaacgctccttcgcaccacactcccatcgcgtaggtgctaccatcatcactcccattgcacagatgaggaatctggggtacagccaggcagattccctgctcctgttccccgtctgtatttcctgtctgggcaatgcgaagggaacctgccccttccttcaggatcctctttcagtacacacttagcagaggacagtcggggtttcccaactgcgacactactgacggtgaggctggatcattttctgctggggggtgtcttgtgcaccactgggtgttgagcaacatcccccgcctctacccactggatgccagtagcccctcctctatcttcctgctggctgtggcaaccgctgtctcctgacattggtgaatgtgctcttgcggggccgaactgctcctgattgagaagcacttaagagagggtcaggggaggggagaagccaggtcaccccgactcggaagggctagctgggcttaactacaagccgatctgctgcttcgacttgaatagcctccaccttctccagctgctgtctgcccccatgttcccagatcaaccacagttccagggagggagagtcagagcctttctgtgaactatggggaaatggctgaccactccgcctctggatggatagatacatggtaaggtttagtaaaatttaataaaagcattgctgtttgtgtgttgggatcacgatgttaatttcctgtgggtcaagggcaaagtctgaaaaatcactcattataatctatctgcaggacagctggtttaagttttgacaaagaaaaacccctcctggaacctca

SEQ ID NO: 35174 - DNA, 1790 bp, Artificial sequence
  DNA replication origin
cccaccccccagactaggtcagaccatcaaaagcaacgggagcttggcactgattatccagctatattaaaaaaaaaaaagaagaagacggggcacggtggctcacgcctgtaatcccagcactttgggaggccaaggcgggtggatcacttgaggtcaggagttcgagaccaacctggctaacatggtgaaacgctgcctccactaaaaatactaaaattagctgggcgtggtgacaggcgcctgtagtcccagctactcgggaggctgaggcagaagaatcgcttgaactcgggaggtggaggttgcagtgagccgagatcgtgccattgcactccagcctgggcaacagagtgagactgtctcaaaaaaaaaaaaaaaaaaaagaagaggaagaagaagaaagaaaaagtgacagaaaaattgctgcagtaactcagctggaaacgggtgggcaaacctggagaactagctaatgcctgcctggctatgccacccctcggatctcagtgtgtttatccaagcccacagagaaaggtggggaaggggagctggggagacaaagttcccctcaaagacggtagcatcctttcccagggagagctcaagcataggggggttgggccccaacgaaggagagaaaccaggttccagggtatgtgcattggggcagaaaagcggcagcaactggtgggcgtggggttattgaaatattggcaggttggggaggggactggtgggacacaaatgggaagatggggttgagagaggtcctgaaaaggggttgaggggttttcacaggaaaaaaaggttactggaggggagggtcttcacggcaaggagagaggagcttgggtgagaggtctccatagggaaaataggagatggctgggatttcccccggggaaaatgggaaggggctggatattgggggtctccagagggaaaatgggaggtgtgagtatctcactacaggaaagagggaataagtgggcaaaaatgggtgggtggttgaagcgggggtcttgccacagggaaaccacggtggctgaagatctccgtgggttaagaaatggaggccgagaaggtctccccatgaaaacgggtacctaggaagagctccagagaaaaaagatggatgaggttccccacgcgggaaatggggcttggagggggttaatctctatggggaggtcggggcgggcagtgggggaagaggccactgggaggtccgagttagctggcggggggtctccacccgggaggtcaaggcgggcagtgggggaggaggtcacggggaggtccgtgttggctggtggcggggggtctccaccgggagatccggttgactggcgggctgggggagatcggggttggcggaagggggacgaggggtttcatgggggagatcaagttggccatgggagcggttctctgaggggaggccggggtcggcccgggggtgggggtccccgcacaggcccagcctcaccgtccgccagggcttcactgcactcgaagctgatctcgaaccggaaggggctgtggaaagggctcgggttctccaggaccgccacgttcagcaccgacaccttggccatcgcctcgcctcgccgcgccgcagcaggggcaggggctgtggctgtggcggaggccgcgcctgggtccggtggggtcagtggggtagggctgaccaggtccactcccgcctcttctctccgagaactgaagtgcgcacctagtccgcgcgccgccttcaaatagccggcctccgccctctggccaatcac

SEQ ID NO: 35175 - DNA, 1490 bp, Artificial sequence
  DNA replication origin
ctttccccttgctcttggtccctgccccgcaagcaaacctgccccctctgcctcccagtgcacccaatgaccccctcccttggggcgactcctgatgaagcacaactccccgcagggcccccagcccacaggggtggccatatttgggcagttcccagtcctgtgggctcggctatctggggagcagattttgggtctggatctccctggggagtgggtcctgggcttggatctttccctagggggccctcttactccttcctctctcctcctccttccccattgctgtaaatatttcaacgaaatggaaaagaaaaaaaaaagacaaaaaaaaaaaaaaagaaaagaaaaaaaatctcatcacttgaagccaccgggagcctgcggcccgggccagcccgggctttctccggagcagagcagcgctgctggcctggcagccaggacttctccgtgtacgtgcatccccagtccccgccggggcgggcgggccgccagagcagctttttacaatccagagacagaaaacaaaatctagatgcaacagcgaaacaaagaacccatttccttcctggcaccctcctttcctgctccgcctgcccggcatcatcagcccttctggggcgtgtacctctcactgcctgccccaggaccagaggcctgtctcccccttccctccccaccggcccgggggagacctcttcacacccaaagatgctttgtcaagatggctgcgctgtccctttgagttcctgcttcttgtatattgctctggggactctcgccggggaagatggggctgatttcccacctagagaggttgatggcagaaggaaaatggggaggcactggggttgtggagggcatgggtatggctgaggagggtgctgggaacggcaaggcggtctgggggatggggaggggcaaaggtgagagatcaccttccctatcctccaccttcccgcagggaagacgaagccaggtgccagggctggggtcgggacacccatgttctgggcggcttgaccccaaatcccagaccccggaagctccaggctcgggatgtgtcctgagcacctgtcccggccccctcctctccagcctgtcaggccagcctccccagcccccttccctcaactctaggggcagcatagccccaggccaccctagcccagcccctgcattgccgtttccccagaggtggcccctccacctctgctctgacctctccccatctctctgcccctccttttctcacaagtgccatgagttttcaaacatcttcgggtctcagcctgctgctgccatgaactttgttgggttaagggggaggggctctaggaaggaactggggggaaggggacaggtaggtggctggagggaccctttttgctgctagaaagcccctcccttctcccggggagctggggctggcttgtccccatcaattaggggagaaggggtcagaccaaagatggtggtttgtcccg

SEQ ID NO: 35176 - DNA, 1408 bp, Artificial sequence
  DNA replication origin
aggcgggcgggcccgggggtgctgaccgggccgagattgaacttctctataaggccctggaggagcctctgctgctgccccgggcccagtcggtgctgtaccagagcgatctggacgagtcggagagctgcacggccgaggacggcgccaccagccggcccctctcctcccctcctggccgggactccctctatgccagcggggccaacctgcgggactcaccctcctacccggacagcagccctgaggggcccagtgaggccctgcccccaccccctcccgcaccccccggcccccccgaaatctactacacctcgcgcccgccagccctggtggcccggaatcccctgcagggctactaccaggtgcggcgtcctagccacgagggctacctggcagccccaggccttgaggggccagggcccgatggggacgggcagatgcagctggtcaccagtctctgagggcacctcatggaccaggggctggtggcccaggccagggagggaaccctgggcagggctctggtgggagagggagacagatggaggcagtggctggtgggccactctctccaggtgcccctcagccatgggccctacagtcccctcaggggactctaacctgggggcctgaggtgccagggttcacagacagggtttcccaccagccacacgcaccagctctatttgggggaagtgtagtgaggaggagcccagaggaccccaggggagtgaggagggagaacttggaagggtgcagcccacttccagactctcccctctcccacccttctaccctgtgaagggaaatgagggctttagtttcctgggcagggaggggcagcttctgaggttgccaaaggcccccactggatggaacctgttagctgctcctctccgcagccagaaatgctgccggctgcacccagagggagcagtgaggcaggacagatggacaggttcctcctgcgctgtaattccctgctccctggagactgggaaaaggccgcagggcagggggactgggcggtggtggctggtggtttaaaggttgaactttctctgaagctcctttccccttgctcttggtccctgccccgcaagcaaacctgccccctctgcctcccagtgcacccaatgaccccctcccttggggcgactcctgatgaagcacaactccccgcagggcccccagcccacaggggtggccatatttgggcagttcccagtcctgtgggctcggctatctggggagcagattttgggtctggatctccctggggagtgggtcctgggcttggatctttccctagggggccctcttactccttcctctctcctcctccttccccattgctgtaaatatttcaacgaaatggaaaagaaaaaaaaaagacaaaaaaaaa

SEQ ID NO: 35177 - DNA, 1705 bp, Artificial sequence
  DNA replication origin
ggggtgggggcagggcctcactgggcccctcagggctgctgtccgggtaggagggtgagtcccgcaggttggccccgctggcatagagggagtcccggccaggaggggaggagaggggccggctggtggcgccgtcctcggccgtgcagctctccgactcgtccagatcgctctggtacagcaccgactgggcccggggcagcagcagaggctcctccagggccttatagagaagttcaatctcggcccggtcagcacccccgggcccgcccgcctcttcctcgcccccgccccctggcacaggtggcacagggggctcaggcggtggagggcccttggccgcgctgctgctcccccgcaggttgttgtgcaccagctctgagatgatcatcttctcaaaggccgccgcatcggctaggttccggcctcggggcggctcagggcccccatccccgggagggaaatccccacttcgcaaggagtaactgttattgaagttgccgttcaggggcagggtgtccatgccacaggcttcccggcctcccaaggggtgctctgcagggcagaaaggggctggtcaggttgaagaggggccctggatgcactaggggacagtgagggggtgcggtccatgtggagaagtgggcttgattcctgctggttttccgtaggcttccccctgccccctggatctctgatctcacattccctttctccctcactggcactagacacaccagcccagcagcgtattgatgaaaggtgggggacaaggaccagttcccccaggatctcatccccagctggaggttcagaatctcagcagtgtgaggaggcctgggcaacaggatcgctttcctgtgctcagaccctcagcacttaacagcccaaactcaatgaacaccatccattatcctccattcggctgccagaggctgtgtgtcggggggtggggaaatgtgggcatggggaggcatcccgagttctcctccttaagtgaggccgtctgagaaggccactgtctgtccctctcccagcctcagaaacatccccagggaagagtcacacttactgggttcccggtagctccctgcaggtggcagccagaagagagaagagaaaaggcaaggatgagctcgaaatgcaagtccaggctccagttctggggcacagaacatcccatgcagaggtcccttgggacacaaaccctccatttcccaacctgggatgtttcccccgtgctctcacctggggagttgaagacagggggcgaggagggattgaagcccactgactcggcgatgagggtgttgtagggactggtgcccccacggggctgcagcacggggttggtcagcaggtggttccccatggtacctggccaaaggatcagaggtcacaaggcagccgggagcctccagagactgaagccagaggcagaaggatgccttctcacctcggttcagggtgggggtgctgttgatgtcacccgccatgaaggaggactccgtctgtttcctcacagtgtcattccacatcctccgaattcggctctgggaacacaacccaaatgtgaggggatccttgggccacccaccctctggcgtctttctgagactgctcacctgatcatcacgatcagaaacctaggccaagccactccccacctctcaggctccaggttccaacactcagccccagggag

SEQ ID NO: 35178 - DNA, 1235 bp, Artificial sequence
  DNA replication origin
tcttgtgcagggtcaccatgaggaacaccaggttgacctgggggcgggacaaggggcaggctgggctgagagtggccctgcctccctcagtgagcactgaggctagggcccagcctggcgaaatctcagctgtggccctcgcctctgctgggagaaccccgtacctgcccctgaggtgcccgctgtgcagcggtgagctgattggcatgaccggcaatttaatgccactcctggctgctgggaggacaaggcccatggcctgacacacactaggggctcaaatcacagccccccaggcgagcagccctcagcactggagctccatggacccagcacactttcatcctctcagccggtggctcagttccgatgtgtggagagagagagagtgtgtgtgtgtgtggggggggtggggggcgggggcaggggctggggtcaaggccagcctggatgaaggaagatgtggtgctaggggtgtcacctcccaactcaccacgataacgaaggagactggcccgatgaaactccagatgaagtaattgtccactcggagccagcagctgtaaaggaaacagggccggggtatagagagaagccgaggagccattcccagcgactcatgaaggcctaggactctgcaggctgcagcctctgggatcaggaggaggaagggactaccgccctgagggtcctggtccaaggggtgccgcccagcagggaaccaggtgggagggtgcagggctgggaggtggaaactcacgccttctcggtgccgtagctgcggtagtcaatggcagccgcgatgcccaccaccagggccgggaagcagtagccacccaggtagtagtacttggtgcgggaatactcgctctcaaacacctccactagtagcaggtagaggtgcacgccctccaggcacagccaggagaaggcagccaggaagaaatagtgcagcaggccggcgaagatggggcaggcaatctgcggggagcactgagggtgaggggctgctgcctggacaggtgtcccccttcttctcccggcccccaggcgctggccgtcacctgccctagagtcccagcccacctcatactgagtcttgtcgatcccgaccaggaagagcagctcagccaggaagaggttgatgcacaggttcttgtggatggtgttgcggtcggtctgcagcccccgcaggaagcagaaggtggagatgcagatggccaagcagaccaggg

SEQ ID NO: 35179 - DNA, 822 bp, Artificial sequence
  DNA replication origin
gggttggggatccctgaggaatgtcttgctgatagcccagccctgggtcagtggtaaccgcagacgagagagctatccagatgtgacagtattagggtgagggaaccggcacccagaggcctggcctgacatcacctccatctctttctagatgcacaagcgagagagaacttgtaaggattatatcaaggtgagacccagggggtcccagtgtaaggaccgtgggctccagctgatggggggattaggggtggaggttgagaagagggcatgcagagcccacccccaggaattagagggtgttggggggctcacagcaccatgccctctgcctgtgcaggccgtggtggagacagtggacaatctgctccggccagaagctctggagtcctggaaggacatgaatgccacggagcaggtgcacacggccaccatgctcctcgacgtcctggaggagggcgccttcctgctggccgacaatgtcagggagcctgcccgcttcctggctgccaaggagaacgtgggtgagtgccacagtcacccagggcaaactcagatacgaaccttaaaccacggggttctggcctggaggccacaggggggctatccgacccttgggcatcttgccagagtctcgttctgcagcctgagcccctggactgggaacagaccccaactgtgtatgccttgccttcccctgtccccacagtcctggaggtcacagtcctgaacacagagggccaggtgcaggagctggtgttcccccaggaggagtacccgagaaagaactccatccagctgtctgccaaaaccatcaagcag

SEQ ID NO: 35180 - DNA, 778 bp, Artificial sequence
  DNA replication origin
cccggcggcccccagccccgaatctacacgtgtcccctgagctcttctgcgagccccgagaggtacggcgggtccagtggccggccacccagcagggcatgctggtggagaggccctgccccaaggggactcgaggtgagtacagaggctgcagccaggggagggatgggggccatgcccccagcagcttagcacagatgcatgtgtgggtgggggtctctactgcggagcagaggttttctgagggcaggggtcatccccagtgaccagcagagctctcagggcacaggagccactcagtgcccctggccccacctgcagaacctgcagggagtccgcaggaggtgacctggctcccggcctcaggctgacctgccacagccccaggcacagtcagcttcacatggatggccagctgaagtgcaaaaagggcagggccgtgtgtcctggagatctgaggggagggttggcaggtgcttcgtggagagggggcgttcaagatgggccttgctggaaggttctaactctggaggcaaagacagaagggggcaggagggagagctcaggggaagtgagtggcgcctctttcgactgtccagcccgcttcatgtctgtttctccgtgtttccctcacctccctcttcgcccgctcgtcccccactctctgtcatctcctttccccctctctgtcccatccttctcttcttccctttggctcccttgtctgttcctgtctgtctgtccctgcaggaattgcctccttccagtgtctaccagc

SEQ ID NO: 35181 - DNA, 975 bp, Artificial sequence
  DNA replication origin
ggtcagcctgaggccgggagccaggtcacctcctgcggactccctgcaggttctgcaggtggggccaggggcactgagtggctcctgtgccctgagagctctgctggtcactggggatgacccctgccctcagaaaacctctgctccgcagtagagacccccacccacacatgcatctgtgctaagctgctgggggcatggcccccatccctcccctggctgcagcctctgtactcacctcgagtccccttggggcagggcctctccaccagcatgccctgctgggtggccggccactggacccgccgtacctctcggggctcgcagaagagctcaggggacacgtgtagattcggggctgggggccgccgggtgctggggactggggctgtggctggaggcagatcaggtcccagctggttgatggcacccactgggtgcgtggtgaggggtgcccggcggagcggggtggtggctgcgggcgaggctgtgctggtgaggggcgtgggcctggctgtggtggtcgtgctgaggggtggggaagtggctgggcctggagaggggatacgagacagggtcatccccatgctcagggccatgccacagtgtgcttgggcagggggtcccaggccatcttagcatcttcctcatctactgaagtggaaacacgtgccgggccccactgggtctatgagttgatctcccctggccgctctgtgcccaccaaagtcccttatgcccatgggcccatataaagtagcaaagagtggtaaaaatccacgatgtgtaccataaggtctgagagaacggtcaggggagaggcagggacagaggtgtctgggggacaggaatcctcccaggttgagcccgagggcaggagccctccccaatccaggtcagccccgccaccaggtgggggctgaataccaccgccccccatcctcgttctagctgactttggcttatgtaacctgg

SEQ ID NO: 35182 - DNA, 973 bp, Artificial sequence
  DNA replication origin
agcatccagggcgggtggggagggagggactcccttccccggctcccccactggggcaccgggtgagctgtctctctctctctctctctttctctctctctctctctctgtctctcccctctctcttcctccttcccctgtaccttttataacatgtttctggttcatgggaggcgggctggaggggacaccattgttttccttttggggagcagattctcctatgtctcgggctcctggtggcttaagttccttctggtttgatgtttccaaggcccagagctgttttggagcatggagcaccagtcctccccacccccaacctgatccccatctctgaccagctgggggcccagccctggggaggggtgtcagctgtccccagccctgggagggggcagcctgccaaaaaatgaaaaaatgagggcgagggggcgggggcgggcctcgtggttgggggagcgaagggtgggggagcgtgttctctgtttctttcacacttgcaaagctgcagtcagggtttcttctgggctgttgtggttagaggaccagggagatgggcggcgggcggcgggggcacagtctggggacttccacagactccgtaatttctagcagagaactccctagtggatggggctggccattactggctgttattggggggagcggaggtgctgctgctgaggggcttctagggtgagatgttagggatgaccatttcctctccagaaagttttgggaaatttacccatctgaggccggcagcagcaggcagggctggaggacatggcctttagggatcccttttgccttgaaattacagtggtctgtggagcatcccttccgaaggaggtggggcagggtccctctgagctgctcccctccccgtcttcccctctcccccatctcagagaggcctgggctgctggccccaggtccgccccctcaccacacccctccagtctcctct

SEQ ID NO: 35183 - DNA, 869 bp, Artificial sequence
  DNA replication origin
agttacagggcctcttagtccccaaacccggcccgccacactcagacaccctgatggccctgccttctccccactcttcccggaggccctaccaccaggttgactacatggaacccattgtgggaggagaagggaagggataatgggaaggagggagggaggagagagggcaggaaaaaggtgatgtcaagggtggggtgctgaggaggagagaccttgtctttgtctgatccctttggccaggtgcaagatggccaggctcctggctccccaaatcactttcttcaggctgcctggaggccaccctcagtccaacatggcggcatttcctttgcagacaggaagtgccacatggtaatggggagaccagtgaggagctatgaatctgttgaaaatgccccccagcccttcaccctgaatctgccaccaggcctcagaggatggtatcccactctatgggtgtagagtccagcttccatgattgggaagaagtgtgtggggagtgagggtgctgagagaacggtgttgagaggggcagtggggtaagtgagagggaagagaaggtagatgagaagggtcagaaaaggtcagaagagtcagaaaaggaagggatgtgagaaggcgagggaggcagatgggggagaaaagcatagaggccaagggagaagagagagacgtaagtgtgccaggcagagcacgggaccatggcctggcagtgtggaaatgagtatagggtgcatgaagaagcagggtgagtgggctggggtaaggagagctggagaaggtgtccccacaggaggggacagagtctgtgaggcgggggagcaggcactgagtgtggacactggtgtctgggattagagaatgtg

SEQ ID NO: 35184 - DNA, 785 bp, Artificial sequence
  DNA replication origin
cacctctggtgatccacccgcctcggcttcccaaagtgctgggattacaggcacgggccaccgtgcccagccgtgtgctgatttgtaagggcctctctcaagaagctcgtgttgataaaaaggtaatttcaggtgctcacttgagagctgtgaattaaaaacagggaaaaggatggcgggtgagggcagcaggcgaggactgttttgtttgcagggggtcagggtaggtcactctgctggggtgaccttgcggctgagccctgaacaatgagcagccgcagccgacatgcagggatcctgcttggggactggaactggaatgttgaatgtttcaggaacaggagggaggacagaatggggcttggagagcttggtggcaccagttcacccacagcctctgggctctagtgaggaactgagaccccagcagagaccagggggtcagttaatgttcggatcaacatcatcatgtggtcccttagctctgagtgaagggcggattgggaggcgggcaaggaggccaggacaacatacaggtgacataggatggtgcatgggcctgggtgctgtgcttagagccagaagtgggcaggtcgcgaggtacttcagaggcagagcccacaggagttgctgatggcttccgtgagggggatgacagggaaggtgaggaatcaaggcagagtctcagctttgggatctgagattcattcaacaaataattaattcattgccacgtgccaggcctattctaaaagttgaggatatgaagacaacagtggtgatgg

SEQ ID NO: 35185 - DNA, 931 bp, Artificial sequence
  DNA replication origin
gacccatgtggattcgctgcccacacaatttggcatcgagtggcttccctgccatttatttatttatttatttttattaagagagggtcttgctctgttgcccagactggagtgcagtggcaggatcatagcttactgcagccttgcaaactcctgggctcaagtgatccacccaccttagcctcccaaagcactgggatcacaggcacgagtcaccgtaccaagccagccatttttactccctctaaccagttcctctgctcggatgcctgttgcagtgggaaagaaagcgcttggagaccctgggaggggagtatcctcagcttggggacactgcctcccctgaacctttctgtggctgggcagttgggggagaaatgaggaagttgaaataaggaagccactccccattcccaaggtaacatgctggaaaatgatttgaaagtgacaccggccatgtctagtcacagatgtgggggagatgcggataggggctggtggcggcggcggggtaacacgctgtaaaatcatctgaaagtgacactggccgtgtctagtcagggatgtggggggagacgcggttgggggctggaggtagctgggggggatttactgaagaagctggggcagtggagagggagctggtatcgggagtgggcatgagaggggaagcgggcagagagctacagggctggagagggggtgttcagggctgtcttgcagatattatcttcccatttcccacgtgaggagactggggtctggaccaggtgtcctgccctgtggggatctttatttattgagggcctgtgccgatttgttttatttatttatttttgagacagtctggctctgttgcccaggctggagtgcaatggcacaatctcagctcactgcaacctctacctctcaggttcaaccagttctcgtg

SEQ ID NO: 35186 - DNA, 1406 bp, Artificial sequence
  DNA replication origin
ggctggcagcgatcgcacccgtgcacggagccacatacgtgtgcgacatacgtgtgcgctcacatgtgggtcccggccctcctgctggtcttgccaccatcttcctacccagcttggtgacctccctcatggccccgctcggtccaccccatgtgtgtgtggcatctgctctgggacacccctgcaggccctctttctctccaaggggcgcccatctcaatccccacttctgggcgcttgcgtaccccgtgatcacccacgctgattcctgctcttgggggtgtagctggcgcccaggcttggggaggatggggagctggggaccagcacacctgggctgtggagcctgcagggagggggtggaagggggggactcgaagcccagcttctattcccagcctgcccaggggagccctttctcctggggggccttggaggaccctgtgggcacgttggggaggagcctacaggcgcctcagctgcacgggagtgtgtttgcatccagcagtttgggctcctggcgggtggcctctccacctgcatgtgaggctgtgtgacgcttgcatctcggggcgtctgcgtcctccctaccctgccaggctggtggcagagcatgtgttgcttcagccccagcgcaggcatctcggtggggagggtggcagtgggtgcccctcaagaggaacgggaggagtgggagcactgccatccccgccagagcatcgtctttgccctccaccccctcctttctccctggcgagacatgtggccaaggacacacaaggctctcgtttctgtgtgggttcctctcacggatctgatttccagatgccagacacttcccctcctccagcccctctgtggggaggcagggggaggggctcctgaggcgggggttccctgggtctgaaaccctgaccccagtgaccctgaaggtgccgtggcaagacagacagctcctcccaggctgggtttggggcaaagtggttgctattgggcaccctgatggaaggggagagacgggtcctggagtgaggtgggaggccaagtagaaacatggagggggtcccggtgtccccagaatccagatgtctgtctgtctgtctgcacctgtgcataggtgtcctctgcctgtgtggcctggatggtgatctagccaagggtgcatgtggccacgtgaccatcagactcatccggtgttcataaaggtccctcctgtgctggtgtttgtgttttgcagagggggtggtcatgctgggggaggcagggctgcaagaaggagtagctgtctgtgtgcacacatggggctgtctgcatcttttgtgcacctgcagttgtgtgctcaggacttcttggagcaaggctgggtgcaccttgtcatgcaatctgcacacacttgcctccccacc

SEQ ID NO: 35187 - DNA, 1013 bp, Artificial sequence
  DNA replication origin
aagagcaggaatcagcgtgggtgatcacggggtacgcaagcgcccagaagtggggattgagatgggcgccccttggagagaaagagggcctgcaggggtgtcccagagcagatgccacacacacatggggtggaccgagcggggccatgagggaggtcaccaagctgggtaggaagatggtggcaagaccagcaggagggccgggacccacatgtgagcgcacacgtatgtcgcacacgtatgtggctccgtgcacgggtgcgatcgctgccagccatggaattagttcccttttccgaattccagatgatttttcatctctgtaattaatgggcaagtcagttctgaacggcatggcagacaaattgctagttaggaaaatcacggataattttctcgatatgataatgaaggttgtaatccttctcttattctccctgttttcatcctacttttaagtaataaatttggcattagtgggaggggagcagggaggaaggagaagtcacctgccccccaaagctggggcctgacagggacccacgcagagtcccctgccgggggcagacaggagaagagaatgaggggtgtggaccctccgtggggttgatcaattcagggggccaggccctggagagcaggtggagggcacggagctttcaggctgtgagccagggtgaaggagtggggtctggggtcaggttagactcatgccagcccttggggtgttggagagagaagcagaaaccaatggtctgtccccaaacagcatggaggtcaacggcccggaatagacattcaccctcaggtgtgccccactggatccgacctcctctaagcagtgactccctaccaggataagggagccgggcaagcagagaggggaagagagaaagacagagagagatagagaaagacagagagagtgagagagagagagagagagagagagagacagacagagagagagagagcgcgcgagccagccatcttggcagccattttgaacccct

SEQ ID NO: 35188 - DNA, 1125 bp, Artificial sequence
  DNA replication origin
tggacaggtgagtgtctgcgggcccagggcgaggggcgaagccgcacctgggccaggtgtgcggggcgcgtggaagaggggaggcgggaaggatgggaggccggggcctgtcctggccgcgaggggggaggggacacgggagccgcgcggggcaccgcacctgagcgggaggggcgtcgggggcagcccgcacctcacccccactggcgaggggcctgggaggggcggcccccacggagcgcccggggcgcgggggtgcggacgggctaccgcagggtgcctggcggggggaggggaccgcgagtgtgcccgcgcgtggctgcgtgtgcccgcgcgcgcgccagcctttgtggggaagcggcgcggcggtgcctgcgtgtccccggtgcgtgtgcgcgcgggtgcttggcgccctgtttgtgtaggtgtctgggtgtgagcggagggggtgcgtgtgcgcgccgcgcgccggccccgcgccccagaggagccgtgtcgggggctggcaccacaggatgctgggcgagggggttgtttttctctgggaggcagtggcgcgggggatggggaggggtccgtctgggtgtccagccggccgcagtccggggggcgccgctgtcaggaggagggggtgcagccgggcagcaccttctctccgtggtgccgggttaaagcacgggaggccggcaggtttgatccactcggattattcgtgctttgaggacagctccccacccccaccccaggtgcgcattggattgagctgcgagggtttggttgtcatcctcccatctgacggtcctgggacccgagtccaggcctgaagtggtggggtggggggatgctgtgtttgctccagccgtgtccagaaaatgccctcccaggtatctctccagtgcacccctggcccccatctgaagacagccgctggctacacacacccctgtctctacacttccagtccgggtcctcacactgccccatccctggccaacacctcactgtacctgcctggaccctttcttcctgttccaacccccatccacccccagccatgccagctgcgtgggtgtttctgtatcccagttccaggcagggcccccccttccgcctggcttccaccgg

SEQ ID NO: 35189 - DNA, 2309 bp, Artificial sequence
  DNA replication origin
ccagccccctccgacgccggcggtggacgaggggttaacggggcagccggggcgcccctgcaggcccccgccgcccggcggcgccgctccggggcccgcgcggccccatcagccggggcctcctcggcagacggcggggcgggggcaccgcagcgccgacagctcccgcgccgacggctcgggctccccgcagtggccgcggggagctcgggttgggggcgggcggcgcggagctggcggaggggggcggcgcggctggaggcgggtgccgcggcgtcgcgcccccggtgcggccggagggggggcgccgggccgggcccgtgggcaccgcaggacgcgcggaccgagccggcgccgggcaccagcaatgacaagccgcctgctcgccccgctccccggcgcacccgctccgggaggggggcggtgggcgcgcgcaaaacccggcccggagtcgccgcccgggactggccgccgcaacccgcttgagcgccccaggagccggcccgaaaacccgggctggactttccttcctttcgcctcctctcgcctcctccctggaaaagcagggagagggaaagcgacgtgctggagccccgcgttggagcggggagtgggggaagggagacaggcgtaaggaagacccggagcggattttccagtgaagtataaggaaaggcgccgagcccggggaaggagggcgcaaatggggagatctggaagggttgtgcaaaacccgagttggattagataaagatgggaggaacggtgttggagcggggggttggggggtagatgcgacatggccaaatgcacccggggcacgcaaatttcgggccggattctttctcgggagacggagtaatgcgtcaggcctaacgcagtggaaacaagcaagacccggcccggaactcccgggacctgggttcgcatggtggggggttctggaagggggatgcttagtggctgaggcgacttgggctgccctcatcttcctggcagcgacgtgcaagggggacgggcaaaaggaggactggactcgggtacgaagggatttggcgcgctggctgcaccggagcggacaggtaaaagcggtttctggatccaggggcgctgcgaagggaatgcgatgaggccgctaccctgggagaccagacctacaataaaaggcgagggaggcacgcaaagccaggactggagcgcgggacgggatgagaccctcagcagaagatcctgggccaccgggacaggggcttggagctgaccgggcagcaggggcggagggaagcgttagggggaggtttgtacctgtaaacgcctcaaagtcttgcttttggggagggggtgcgaggggaaaaattgaattttatgttctctaaaagagtaaaaacccggcatggattttcaacacctaacaactccattgcagctggtggactctaagaagtagggcaagaagcaggcttgggttcccaggcatcagaccaagtgaggcgaggggcaggtttcgggttgaggctgcagagggagcccccgcaccccctctctggggtggggaaggctgttggacccggcttggctctctggagagcgaaagttatgactgccaagacctatagctggggctataaaactgggccccaagccaaaaataggcacttcggcagaacaggcaactttgtgcagggtgggggctggagggaaatggaagtgggaagaatcctggagtggagggaacaggggggagggggggagtccctgaagcggggctgctggctccattttatgaaagatgggaagactgatggctggggagggcttggaatcctcagggaagggaatccattcaagtgaggcccaaatgttaaagcagacagctcagagttcaaagttgggctgcatcttagcagcagggcagacaaaccctgatctgagttttagaggagggggacgggctgaggatggggatgggggaaacccccattccctatatgtccagggaagagagtgcattgctaaccatgcgctttgcagaatgaatgaggaaagggaaaagggttcctgagtaggagtggtaaatccacaaaacttgaggcatatctggatgggaaaaatgagtatctaagaaagcctgaattgaatatctgcacgggaattaacttggcctctaagaatcccttcctagaagcacgtccctgtggctaaactggaggaagtgcagggacaccagacttccaggctgcccgggtgaccacgcaccactgctgtggcagcctgtcaccctccaccgccttctacggacagctgtctct

SEQ ID NO: 35190 - DNA, 1094 bp, Artificial sequence
  DNA replication origin
gggatgctggaggtgctaggcgtacaaaatgtggagtcccagatacgcaggagagcacagggtgccctaggcatagggcaccctgggcgtgcgggttctctagcacagggtgcgcagaagatggggcgtccaggtgcagggttcatagaacatggggtactcgaggcgcgtggcaccgtgggcgtggaggtcccgtgggacggaatacacagagcgtggggtgtctcaggagcggggctcatggggagcccaaggcgcaaagtgggaggctggaagcgaggagcgccctgggagcagggtgtccgaagcgcgggtaccgacctgggcagcgcggggcacgcggcgcgcgggcgagtctgcgtgcgcgcgcggacgccttggttcccggagcccggttgctggcgcggcctccactgcggctgcgcagccgaaggcctgaggggcgccagggctctttacgcgccccccagcccctccgcactctttgcctcctgagcacgccgctcacaagtccaggagacatggatcagatggaggctggagagccgatcccagctgggaccagtggggtttagagggtctagaaaggggcgaggggcgggggtgaggggggttccggctggggttttccaaactgagctgagggtgccttaaagaatgtcgttgctttccctcatgtaagtaaaggccactccttctcgtagcctctggagagtgcaagttagaaccacctcctaggctagctctgtagggggaagtgggtgggctgctcagggctggagggtggggtggggacaaaggcctggagcaggagaacaaggaggtgaccagcttttcctgagcgtcaagttctgttcccttttcggtactgctgggtttatagaaagctggctgcctggagtgccctccatctcaaagccttcatgggtcttacttggtgctgtcaatatctcaaactgggaaattgaggcgtagagagatgggatgccctcctccatacccagtggatctgcagtcaaccacagatggatgggatccgttttgcactcaccaaatcctactttatatttggtcccccagatcccggtgtccaa

SEQ ID NO: 35191 - DNA, 979 bp, Artificial sequence
  DNA replication origin
ccccaccctcctcactcccttgatctcctctcccctttatctctctccagtcccagagatgtggggggggggggggtctcgctatgttgtccaggctggtctcgaactcctggtccccacagcatatcctgacctagtttcgttttcattcatttatctgtctccctcactagaataccaactccccagtccagagatgtttgtttcttgttcactgctgtctacccggagcctaggaccgatcctggaacatagtaggcgctcaggagaaagcgggggagtggaggaaagcgagaatcccggaagccgccgggttccagcctgagcagcaggcgggcgtttaagtggaggcggattcctagttaggcaccagctgaaaggggagcccggctgggctgcgcttccttccccggccgctaggggccgcttccccgctgctctgcggccgccaggtgagggggccccgccccttctccccaggtgctcagggagttggggtgtgaggggacaaagtgggggtgaagggagagagctgagcgtgtttgagatgggggctgcttaaaggaagggaaaaatgcgtagggaggttgggaggtgtgagaaggtgaggagacagcccggtgttagggagagaggagcggagagttgagggaggtgcgggaagatgggtgatcaactggggagtccgggaaagtctggcaggcggaaggccttgccctggtggctccactggaggaaatttagaccatgcatggaaaagaccgggacgattgaggggtgggattggcctgtggggttgaggatcccagggaagaagccctaagctttgctggacttggacttggccagtgtgttctggggaggaagagggatttctcagacccagatccctcagaccagcaacggggagggacttctcctttgaggagtgagatgtgcctggcaagctcaccagctagcttttgcagaacgtgtggcc

SEQ ID NO: 35192 - DNA, 921 bp, Artificial sequence
  DNA replication origin
accgggacgattgaggggtgggattggcctgtggggttgaggatcccagggaagaagccctaagctttgctggacttggacttggccagtgtgttctggggaggaagagggatttctcagacccagatccctcagaccagcaacggggagggacttctcctttgaggagtgagatgtgcctggcaagctcaccagctagcttttgcagaacgtgtggccagtaagtggcttattcaacctggcactgactctgcctctctctccttcaagcctcagggccaggattcattgtgtaatgaattgagtggtgggaaaacagcaatgaatgagacagatccagtcccggcactggccagtcctggcacaaagaaggctgcccagccctggggaagtgacaggtaaactgaggcagggacctgctggctttaaatagcagtccccctcatggtgatctgggcagagaggaccactcatatggaggctctgaggctgttaccaagaaaaaagccggcaggatccaagctgcaatagtgtgatagggagtgttggggtctgcggcaacccagaaatgcctgccaggtctaaagggatcctgtgtttgggattaaggtggatgtgggggcttgcaggctctgtggaatggagataggttgggaagggggttgggaataggagtgaggggttataggtgggtcccagagaggtagaggtgatggccacgggaaggtagaaggtgactcctaaccttgcatgagctcatttcaggggacacaaagccaaatgctgaccagggaatgaaaatgcagaaattgggcaggtgtgaggcggtggtgaaggacagggtagctgaagttgcaccacccccccttttccttaggcacccgcttgctaccactcagctccagctgtgcgctaccacgt

SEQ ID NO: 35193 - DNA, 1208 bp, Artificial sequence
  DNA replication origin
gggtttcaccatgttggccaggctggtctcgaactcctgacctcaggttatccacccacctcagtctcccaaagtgctgggattacaggcgtgagccacagtgcccggcgaaaattttttttaattagctgggcaacatggagcctgcctgtaatcccagctacttggaaggctgaggtgggaggatcgcttgaccccaggagtttgaggttgcagtgagctatgattgcaccactgcactccagcccggggaaacagagagagattctgtttctaaaaataatataaaataaaatggcgagtgttacgttaggtgaattttattccaaaaaggaatttaaaatttttttttaattttttttaaaaaaggaattttttaaaaacaaggagttaaccacacaggccaaacaacacatctggggccagtttggccccagggctgccgtcatttgggaatggagggaaaggaaggggacggggtgggggggtgggagggtaatgcaccatccaggagttgtgggcgttcttggtgaagggtgggggatgacgcaacttggaggcaaaagaaagtatgtctcggctcaggggagcgctccctcttaacccaacctgtcagccctggaaagaaatcagctacgggtcggaggccagccagcgaactgtcaaggaagtgcagagttctgacgagttagagaaatgacaaccgctcagccccgcccggcctgacaccctggcggtggcatgatgaagtggtgcttgccgggtgggcggaggatgctctctgcgagcttgcgggaaagtgggggtgctcacccgagttcttctgcagtgtgaagagaggtgggttcggcctccctggtaacaaagggcggacggggtggcatttgcccctacccatccctcctggagggagagccattcccgtgggtgcaaggaagagagaagacagcgggcttctgggggcacggctgggggtgcagggtctgagtctccgttggcttcaaaaaactgaatgatggccgggcgcagtggctaacacctgtaatcctagcactttgggaggctgaagcaggcagatcaccggacctcaggagtttgagaccagcctagccaaaatagtgaaaccctgtctctactaaaaatacaaaaattagctgggtgtggctgcaggtgcctgtaatcccaactactcgggatgctgaggcagg

SEQ ID NO: 35194 - DNA, 861 bp, Artificial sequence
  DNA replication origin
gaccaagccaattacatctgtgggctggattcagctctggggcggacacagagggaggggcggggcatttagtgaaggcgatgcaaagcatcatgggtgagttggggaccacatgggccagggggtttgactaggtggtgcctaggcgggtgccagcatgtttgtcggggctggcgcggtggagggggcgtggtttaaactgaacaggtgttttgggtctaggttggaaaggacctttggagccacgataacatttttcaattttgaagaagtcagtgatagcttttaaacagctgaatgactcagtcatgcctgtctgtccccatcccccaatcccaacacccagaaagctgtgaatcaggctttctttgggggtggagggacagtagatccatccatgaaggaaacaaactaaacagcccccgtcttccagcgcgctcacagccgccggggagagggggaaggtgtccttagtaaggttaggataggatggcagccgtgatggtgggaccgtggcagagggttagtggttgtctgcagatatgggagccactgctatgtgttcaatgcactaaggatgcaacgacgaacaggacagacatggccctgccttcaaggaaaaagactgtgaaggaggaaggaaataaggagagacggtaattccagggggtgatgagaaaatgtaaaaattaaaatagcaggatgggggatggggctcagatcggcagcctacaggcccaggagacagagcgggtgggcaggaggatggaggatggggagcgggggtcctcagtggctcacaagccaccgcttgctccctgggacccagcagcctggctgggcctctgtctccccagaatc

SEQ ID NO: 35195 - DNA, 1051 bp, Artificial sequence
  DNA replication origin
caccaggacctgcgggaggaccctgaggagcagggagggagggagctgccgctgaccaaggcacaaaaacatgttcctggggcagttcttggaaggcagatttccaggtgcctgcccccaatgtggccctgcctcccgctccccctggccccctcttcctagagggaaggcggcaagaggcgcttcattagcgcctctgaggccccagcagccccggggggatgaaaagggcctaggaggggagccgtcctaattttggcacacctggcagggggcccagggccactgaaagggattcagctggggccggctgggcaggccccgtcattgttccggctagatccgcggtcagggcttcaaatgcaaaatcgggctggggatggggtgggggcgccggtggcctctgctcttcctttaatagaccaaaggactctggcggcttagctctttttcctaatttaaaggtattttcaggcgtttgggagctcccctacggcgaagcaggaaggctgggaagtggggggccttgaaactctcttcgtggttgcccgcggaggatggaggaaaaggcggggaggaggggggctgaggttggtctggggtcactggtggggcgctgggcaggtggagacccgtgttgagttctcggctgtcctctgccccagtttccctctctggaacctctgtctggtttctggaaccgtccccagcaggtaggacggatgcaggtgtgcccaaacggcagtttcttcctaaggagctctttcgggtcaactccggaggccttgactagggaggcagatggaggaggcttgatccctctcagcatggcagccgtggtgccaaggcaggaaggagggtagggaggcaagccaatggggtgcagcggcctccatgccagaaaatgggggctccctggatcatctcctcggcgggagggtgcacggggaccaggagagagaaccaaaggaccccgctggaggggggcttggagcctagagacagttgagggggtactgtcttcccctctctcctggccacgctgcccggt

SEQ ID NO: 35196 - DNA, 1179 bp, Artificial sequence
  DNA replication origin
agcctcccgagtagctgggatgacaggcatgcaccaccacaccggctaatttttgtactttttttttttttagtagagacagggtttcgccatgttggccaggctggtcttgaactcctgacctcaagtgatccacctgccttggcctcccaaagtgctgggattacaggtgtgagccactgtgcctggcccttgactaattttttcaaaaaaattttttttttaatttgagacaggggtttcgctatgttgcccaggctggtctccaactccttgcctcaagtgatcctcccacctcagcctcaggttctttgaacataattattcccaaattacaagtagagagaactgaatctcagagaggttaagtaatttgcctaaggtcacacagctatgaaatggagaaagggtaagaaaatccgtctgaccttccttcagttatgcaaaagatgtcatgtggtgggtggtgtgacctcagaaaacctagaggagtggggggtccaggctggtggtggggtaataagacccaagtgaacacacctgtcctgctggggtaactactcacccctaggccacagggcaagcaaagtggcaagccgcaaattgaattggggggctggagggggatgtttcattgatgtcacaaatgagcatggaccccgtatctgcagcagggatgtttcagggccagtcaaggagatgatcggggcccacggaccctcaaacgcgtcaggaagccaggctggtccctgagtgtgtgtgatggggtgtgtgtttgtgggggggcactgccgggagctgccgccgcccgccccattagcaacaccgtcattatcccagatttatgtatgtataattcttcttcctcaaaccgctccaacatctcccctggctgcaaacccgcctcccccggaaacagccacggagccgcctgccaccgggccattagcacgcagggaagggggtgtggagggagggggcaggcagcagggaaggggaaggggggagccaggagaggacgaggaaggcaggagctgtaaggatgggagtgaggcggcaagatggaagaggggaaggaaacagggcttggaggagctggggaacctcggagggttctggggggagggggggacacgtgtcccagaggacctggccgcagacagcgggccccaggggcag

SEQ ID NO: 35197 - DNA, 1098 bp, Artificial sequence
  DNA replication origin
gtcccgcgctgtgcgcccgcacttctcagctcttgggtggtcggtgggacccggcgccgcggagcagggggcggcgctggtaggggaggctcaggccgcacaagaggccatggcgttgggggaaggctcaagcatggcaggctgcagatcccgagccctgcccggcggggaggtagctgaggcccagcgagaattcgagcacagcgccgggacccggcgaaccctccgcagctgctggcccgggtgccaagcccctcactgcccagggccggcagcgccagcctgctgctccgagtgcggggccacggagcccacacccacctggaactcacgctggcctgcaagtgcagcgggcagccctggtttccaccagtccgcacctccccacaagctgagggagctggctccggcctcagccaacccagagaggggttcccacattgcagccgcaggctgaagggcccctcaagcgcggctagagtgggcgcctgaggcccaggaggcgccgagagcgagcgagggctgcgagggctgccagcacactgtcacctctcactgggattacaggcttgagccaccatggccggcggacatcctcttcttaaatgcccctccactaaaccctttgaggccaccccacgtgcttccctccagccccaaacccgccagcaaccccaggcacagggcctggcccggtttcttgcaaaactttctgaacccgctctgactactaagtggttaaaaatatccactccacccaggcaattttgctaagcttatgtcagggggagaaagggagactccggagagctcacaaatgaagcaaattgctgaaaatcggatttttactgtcttatctcggagccacatgagaggagaggagattgcaatttctgcgggaactttctcacatccccgagtttgaagagagcaagtggcaggggaggaggtgcagagagaaggctgggagagggaaccagaagagaagagagaggtgtgagaaggaaaaagcaagtagaggctgggagcggtggctcacgcctgtaatcccagcactttgggaggctgaggtgggcggatcacttgaggtcaggagtt

SEQ ID NO: 35198 - DNA, 1256 bp, Artificial sequence
  DNA replication origin
gcctgggcgttcccctgcagcttcaccccctcaagagcagatctgcttcttccaaagggaacctcttttctttcttcagtcacatccattttttttctttttttttgagacagagtctcactccatcacccaggctggagtgcagtggcgcgatctcagctcactgcaacctccacctcccgggttcaagcaattctcctgcctcagtctcctgagcggctgggactatagacaaggcatgtgctaccatgcctggctaattttctgtatttttagtagagacggtgtttcatcctgttggccaggctagtcttgaacaggacctcacatgatccacccgccttggcctcccaaagtactggtgtgtccagaatcagtgggttcttggtctcactgacttcaagaacgaagccgcagacccttgcagtattacagttcttaaaggtggtgtgtcgggagtttgttccttctgatgttcggatgtgtttggaatttcttctttctggcgggctggtggtcccgctggcttcggcagtgaagctgcagaccttcacggcgagtgttgcagctcttaaggcagcacgtctgtagttgttcattcctcccggtgggttcctggtctcactggcctcaggagtgaagctgtagaccttcgcggtgagtgtcacagctcataaacgcaatgcagacccaaagagtgtgcagcagtaagatttattgcaaagagcaaaagaacaaaacttccacaccatggacgggaatgggagcaggttggcactgctagctcgggcagcctgcttttattcccttatctggccccacccacatcctgctgattggtccgttttacagagagctgattggtccattttgacagggtgccaattagtgcgtttacaatccctgagctaggcacaaaagttctccaagtccccactagattagccagacacagagcactgattggtgcatttacaaaccttgagctagacagagagtgctgattggtgtatttacaatcccttagctagacactaaaggttctccaagtccccaccatattagctagatacagagtgcaaaccttgagctagacacagagtgctgattggtgtatttacaaatcttgagctagacacagagtgctaattggtgcatttacaagccttgagctagacagagtgctgattggtatatttacaatcccttagctagacataaaggttctccaagtcccactggactcaggagtccag

SEQ ID NO: 35199 - DNA, 1032 bp, Artificial sequence
  DNA replication origin
ctcagggggctgaggtgggaggatcacttgaacccaggagtttgaggctgcagtgagctgtgatcacaccagtgcactcctgcctgggcaacagagagagatctcatctctaaaaaaagaaaaaaggagccaggcacggtggctcacagctgaagtcccagcactttgggtggccgagctgggtggatcacctgaggtcaggagttcgagaccagcctggctacatggtgaaactccgtctctactaaaaatacaaaaaaaaagtagccaggtgtggtggcacatgcctgtagtcccagctactcaggaggctgaggcaggagaatggcatgaacccgggaggtggaggttgcagtgagctgagatcaagccactgcactccagcctgggcgacagagcaagactctgtcaagaaaaagaaagggaaaggaaaggaagggaaaggaaggggaggggagaggacaggaggggatgggagtggaggggaggggaggggagggggagagaaagaaaagaaagaaagaaaggaaagggaaggaagaaaagagagagacagaaggaaagcaaaagaaagagaaagaatagtaataaaagggaccaggtgtctgaaggctgagttgcagggtgccccattgctgaagaactgcttccagaatgcagctgtgtaagtctgccagtgtggccagtgtggctgggtgcaagctcttcagggtcccaggctacacacaagcgattttactttatttctaaaatggactaactcggtttgaaacttaacccaactcactcacaaaaggaatgttctctcatggccatgaatgcaaaaccaccacgagtggccacaaacaagtataaaatagacaaaatgaggcttggtgcagtagcccatgcctataatcccagcactcggggaggctgagggtggaggatcgcttgagctcaggagttcaagcccagccagggcaacatagcaaaaccccatctctacaaaaattagccgggcatggtggcatgtacctgtagtcccagcta

SEQ ID NO: 35200 - DNA, 1049 bp, Artificial sequence
  DNA replication origin
tcccggctaccagggaggctgaggcaggggaatcgcttgaactcgggaggcagaggttgcagtgagccgagatggtgtcactgcattgcagcctaggtgacagagtgagactctgtctcaaaataataataacatgcaagatgaatcaatgaatgaacaaaaagcaaagaatctcaggcaccctcatcactccaggcttggagccattcctttgtctgggagggttttcctggtcctcctcatcccggagacccagggggtgctggcgttgaggggttctggttttcaaagggtgatcctctctctaaatggggctagtcatgaagcagagggatttggggcatcttcgggcccctgctcccctcccacccagcctccccttctgcactcccctcctgctcaggccacagcagcagcagtaggtgacatctggagagtcttcaggcagctttgggagggggcgaaggcagaggaggccacgggtgtttgcagaatgtgtgtgtgtacgcatgtgtgtgagaatgtgtgagactgtgagactgtgagtgtgagtgcctataggtgtgagcatgtggttgtgtgttcctgtgtgaatgtgtgagtctgcatttgtgcaacaatgtgtgtgatgtgaagggtatgagacttgtgaagatggatgtgtgtgaggctgtggggctgtgtgagggtgggtgggagtgtgtgaggctggggggctgtgaggatgcgtgtgagtgtgcaaggctgtggggctgtgtgagggtgggtgggagtgtgcgaggctgtggggctgtgtgagggtgggtgggagtgtgcgaggctgtggggctgtgtgagggtgggtgggagtgtgcaaggctgtggggctgtgtgaggatgagtgtgtgagaccatgtatgagcatgcgtgtgactgtgtgagtgtgacagagcataagtgtgagtgttgagtgtgagtgtatgtcctggggacagggcccctgtttgctgagaatgcacgtgtgctccaggcctggccgccgttctcttccaccctgctcctcctgccct

SEQ ID NO: 35201 - DNA, 2205 bp, Artificial sequence
  DNA replication origin
ccagccttttttttttttttttttttttttttttttttttaatatagtgatgcggtcttaccatgttgtccaggctgttctcaagctcctgggctcaagcgatcctcctgtcttgccatcccaaagtgctgggtttgcaggcctgagcaactgcgcctggcagtggtaactcttgaatgggggaaaagtgggcacagacaagccccacgatggtccagcctccaaagcgcagccgcctgggtcttcccctccagcctccgggacaaggggaatctcagtggctgaaacttctggggatggaggaggagcggcatccggggagggtgagccgagcccggcgtgcggctccggaggaggctccgcccggctcgggtcccctcccaggggctgggctggcgggaagggcccgggctgccgggcaggcagaaacggagcctgggagtctgctatcgaccgcctgggcggcggtagggaagcttttagatctgcccgctcgtcccggaggggggcaagggcgaggctccccctcccctaaagagcggaggcccggggggtttcctgtcacccctacaggccacccaccagcaaggcttgcaggctagcctccgaactgagcccaaaatccggttgctggaattggaattacttttcctggaactttattgagagttaatttacatgcggtgaagtcccaagcctgcacatattatttgcatgcacgaccccgtgtccccaccccatcaaagtaaggaacacttccattcagacggcccagaaatcaatgtcccttcatccattccccacccacagccactccactgatttttttttttttttttttttttttttgagatggagttttgctcttgttgcccaggctggagtgcaatggcacgatctgggctcaccgcaacctctgcctcccgggttctagcgattctcctgcctcagcctcctgagtagttgggattacaggcatgcaccaccatgcccagctaatttttgtatttttagtacagatggggtttcaccatgctggtcaggctggtctcaaactcccaaccttagatgatccgcccgcctcggcctcccaaagcactgggattacaggtgtgagccaccaggcccggcctgatttttcttttcttttctttttttttttgttttttgttttttgagacagagtctcgctctgtcagccaggctggagtgtagtggtgcgatctcggctcactgcaagctctgcctcccaggttcacgccattcttctgcctcagcctcccgacaagctgggactacaggcgccggccaccacgtccggctaattgttttttgtattatttagtagagacggggtttcatcatgttagccaggatggtctcgatctcctgacctcgtgatccgcctgcctcggcctcccaaagtgctgggattacaggcgtgagccaccgtgcccggcctcttttcttttctttttagaaacagggtcttgctctgttgcccaggctggagtgcagtggtgcaaccatagctcaccgaagcctctacctcctaggctcaagcaattctcctgtctcagcctctgagtagctggaactacaggccctcaccaccaagcccagctaatttttgtattttttgtagagacagacagggtcttgctgttatccaggctgatgttgaattcctggcctcaagcgatcctcctgtctcagcctcccaaagtgctgagattacaggtgtgagccatagggtggggcccactatcctgaattctttttgtgtgtgtgacagtttcactctgttgcccaggctggagtgcagtggcacgatctcagctcactgcaccctccacttcccagggtcaagcgattctcatgtctcagtctccaaagtagctgaaattacaggcacacgccaccacaccccgctgatttttgtattttttgtaaagatggggttttgacatgttggccaagctggtcttaaagtcctggcctcaagtgatctgcccacctcggcctcccaaagtgctgggattataggcgtgagtcactgcacctggctactattctgatttctatcaccttagattagttgagccttttgcaaaatttcagataaataaaatcacacagtgtggtctctcttccactcagcatcatgcattctgagatttatcaacattgtgtgaatcagtagtt

SEQ ID NO: 35202 - DNA, 1406 bp, Artificial sequence
  DNA replication origin
caggaggattgcttgagcccaggagctggaggctgcagtgagctatgatcgcaccactgcaccccagcctgagcgacagagcaagaccctgtttcaaaataaaaagaaaaaagagaaataaagaactaatatatacatctctttaaaagcaaacgaacaaaagacttgggccaagcatggtggctcacacctgtaatcccaggactttgggaggccaaggcgtgcagatcatctgaggtcaggagtttgagaccagcctggccaacgtggtgaaaccttgtctccactaaaaatacaaaaattacaaccgggcgcggtggctcacgcctgtaatcccagcactttgggaggccgaggcaggcggatcacgaggtcaggagatcgagaccatcctggctaacacgatgaaaccctgtctctactaaaaatacaaaaaatgagctgggcgtggtggcgggtgcctgtagtcccagctactagggaggctgaggcaggagagtggcgtgaacctgggaggcgaagcttgcagtgagccgagatcgcaccactgcactctggcctgggcaacagagcaagactctgtctcaaaaaaaaaaaaaaatacaaaaattacctgagtgtggtggtgcgtgcctgtaatcccagctactcaggaggctgaggcaggagaatcacttgaacccgagaggcggaggctgcagccagctgagattgtgccactgcactccagcctgggtgacagaatgagactctgtctcaaaaaaaaaaaaaaaaagacctgaagggggcgagagaaagccatgtggggatctggaggaggaggtggtgctgcaagtgagagtgagctgccgtgcaaagcccctaaggtaggagcatgcccaaaacggcgaggaagctggcctggctgaagggaatgagcaaaggggagagaaggaggaggtgagggcagataagtgctgagcagatcctgcagggccctgtgggccacaagaaggaatttggcttttgcactgagtgaggtgggagccctggagggtccttgagcagaggagggacgtgccctgacagaaaagcatggagcgggcgagcaagggcaggagccaggagaccagggcagaggagtctgcactgggccaagggggagttgatggggccggaccaggtaggggctgtggaggaggtgaaaagtgagtagatgctggatagattttgaaaatagagctctcgggatttgctgatacaatagagagagagagaaagggacaggggcagagatagaggccaggcatggtggctcatgcctgtaatcccagtactttgtggggcagaggcaggagggtcactgaagcctaggagttcaagaccagcctgggcaacaaagtgagaccggggaaggagaaggaagg

SEQ ID NO: 35203 - DNA, 1769 bp, Artificial sequence
  DNA replication origin
aagaaatggagggagggagggaaggaaggaaggagaaagaaagggaggagagacagagatagatgaaagaaagaaggaaggagaagaaagaaagagagggaaggaaggaaggaaggaaggaaggagagacagagaacgaagaaagagaagaaagaaggaaacagaaagagagaacaaaataaaacagagacagagacatggaggactccaagtattttgccccaagaatctgggccaaaagaaaggaaacaaggtggccgggcgcggtggctcccgcctgtaatcccagcactttgggaggccgaggcgggcggatcacgaggtcaggagattgagaccatcctggctaacacggtgaaaccccgtctctactaaaaatacaaaaaattagccgggcgtggtggggggcgcctgtagccccagctactcgggaggctgaggcaggagaatggcgtgaacctgggaggcagagcttgcagtgagccgagatcgcgccactgcactccagcctgggtgacagagcaagactccgtctcaaaaaaaaaagaaaaaagaaaaaaaaggaaggaacaaggctcagagaggtccaaggagttgccctggcggtccggggccacagtggccttcatccccagctgagatgtgtccccagtctaaggccactcagagccaggcaccttctccggctgcctcccaatccccgccccccgcttccgtcccagcaccctcaccccgcccccgggcccctttgtcctcctcttcgtcttatttccagaatttctcctccctagggaatccagtccatgtgcttttgattcctttgtcctgaactcatgcggcatgagcacccctgaagccttatgtggaaaaatttggaggctgggggtggggagggggtcacattcctcccgggggtacagagctacgtcggcatctccagggccccccagcagcaagcaggcatcctcccaggccaggccagaccggacgctgcccaacacaggctttctttggggcttggccggcgcccgactacagccccggctccagctgccctgcctgtcccccgcccccacgcctcccgtcccaacctcccacacgtttcctcctagaagcccagacccgtgggacttggcctcccccgcgccttccctctctactcagctctgcagctcctgtaggcctcctccccgggtgatcacagaaggaccagctcaccttagcgggacaggcagggcatgggcgtggccagagcctcgggcaggcatcccaggctccctggtgtctctctcatccgctggcctctgtgccctcttctcttccccacccccgctcgtggcccctcctgcctctccatcgcaaagtccccagaggagtctccttaatcacttgcttttgactgaatcctgaccacctggaccctgatctagctactgaggagataaagtaaccaacacttaaaagctaaccttcaggcattctgggaggctgagactgacggatcacttgaggtcaggagttcaagaccagcctggccaacaagatgaaacctcgtctctactaaaaatacaaaaaaattagctggcgtagtggcggatgcctgtaatcccagctactgcggaggctgaggcaggagaatcgcttgaacttgggaggtggagattgcagtgagctgagatcgtgccactgcactccagcctgggcaacaaagcaagactccgtctcaaaaaataaaaattagctgggtgtggggccgggcttggtggctc

SEQ ID NO: 35204 - DNA, 1268 bp, Artificial sequence
  DNA replication origin
cataagccaccacgcccagagctcccttttgggctgtgtggtctcaggcaggtgatgtggcctttccgggcctcagtttcccgatctgtgaaatggtcagaacttctccaggtgcccgtgaggaccagactggagggaacgcattgcagaagtgtaggtgggcatggacgctcaataaacaacaggagccgcggttaggatgatcccagagcggggtgaactgtctctttgctgccctctgcaacagggagggacaccaggagaccccaacgccccactccccggcttcttatgccgccagcccttgcccagcacccgcacaagcctgggctgaggcggggggtcagatggggtctccgggtggaggggggcataacaggatgccccctggctgggagacaatggcagaggaaggggccgggcagcccccacacggatgagccccgcagctggctccaggagggcggcgcagctattgtgagaccagacagctgtccctgtgccaggaagccccagagaacgggaaagagggtgggaagcccgctggccaaccctgatcccccaccgggggcaggtcccactatggtctgtttgtctcctccagcaggctgaacacctgggtttccgggagcctggcctgtcagtgtgcacctggcccagggggccctcactgcagaccccatctggccccactgacatctccctaactccttgctccctactcatcccagcctggcctggggattttggaggctgcactgatctgggctgtatttatagttccctggtgctgctgagccagcttctaaatatagaagtccagctatttggggcctcggccctggagcagagtggggaagagccagtcctgcacatgtgtgcctccccgcccatcccagagaccacccaggcctcttagtctcctggggtctgggctgcaggggtctctggtgctgaagggaagtccaggaggagcccaaacataaagagggcagaagcgagaggccgcgatggctcagagggacaaggcaacgaggccccgtgctccggggctgagggggagtgcatgtgtttgcgacctggggtgccagcacctggttcctcttcttcctccttggccccatgacccactgtgggaaggaaggggggttgatctgtcagctcagtgttctcagcttctaggaaatgaagcccttcaggaagcagcagaggcacccccaaaccccaaacaaactctagcacctagtaacccacttccccttccccat

SEQ ID NO: 35205 - DNA, 961 bp, Artificial sequence
  DNA replication origin
ctaggaattggaggctgcagtgagatatgattgcaccactgcactccagcctgggtgaccaagcaggagcctgtgtcaaaaaaaaaacaaaaacaaaaaaacccgcccctatgggaacagggtgacagactctttggctttgagcatctgagtgggacatgacatctgctcactctgaacgaccgtcaggatctgagcctgagaggggtcagcatcctcctcccacaaagtgcatcacccttacgcctcctttcccaccctgggatcccctctgaccccctttcctttctctgttgcagcattctgtgtctggctgactctgccgggagctgaaacccaggactccaggggtgagtctgctgggaagcagaaagcacagtccacagccagagcctggggagggtcctggacccccgcccagcccccttcagcccagggaaagagagggctcgcgcacgagaaactcagcgccctgccccatctcccccagtgccccctttttgtgtattcccttacccctcaccttctgaccgtgctccctgctcttgcaggctgtgcccggtggtgccctcagaactcctcgtgtgtcaatgccaccgcctgtcgctgcaatccagggttcagctctttttctgagatcatcaccaccccgacggagacttgtgacggtacagaggcttgagggcagcgcaggggacatccgcgattatgaggcattgcccagccagtgggggacagaggttgttgtgaggggccacagccttaccttccagactatcatcatggccagagaaaagaaaaagagggcaggcgtggtggctcacgcctgtaatcccagcactttgggaggctgaggcgggcagatcgtttgaggccaggagtactcagaagactgaggggagaggattatttgagcccaagagtttgaggctgcagtgagctatgattgcaccactgcact

SEQ ID NO: 35206 - DNA, 1470 bp, Artificial sequence
  DNA replication origin
ccttccagactatcatcatggccagagaaaagaaaaagagggcaggcgtggtggctcacgcctgtaatcccagcactttgggaggctgaggcgggcagatcgtttgaggccaggagtactcagaagactgaggggagaggattatttgagcccaagagtttgaggctgcagtgagctatgattgcaccactgcactctagcctgggcaacagaatgagatcgtgtctcagggagagggagaggaaggggaagagggagagggggagaggaaggggaagagggagaggggtagggggagggagaaggggaggggaagggggaaagggagggggatggggagggagagggggaggggaagggggaaggggaggggaaggggaggggaagggggaaggggagggggatgggggagggaggggggaaggggaggggaaggggagggggatgaggagggagacggggaaggggagggggaggcagagggagaggaaaggaggcaggaaggaaggaagggaggaagggagggagagagataggcccggcatggtgggtcatgcctgtaatcccagcacttcaggaggccgaggtggacagatcacttgaggttgggaattcgagactagcctggccaacatggtgaaacctcctctctatactaaaaacacaaaaaattagccgggggtggtggtggtcacctgtaatcccagctactcgggaggctgaggcaggagaatcgcttaaacctgggaggtgaatgttgcagtgagccgagattgcgccactgcactctggcctgggcgaccagagcaagactttgtctcaaaaaaaaaaaagagagagacagagaaggagagaaagagaaagaaaagtaggcccggcatggtggcttacgcctgtaatcccagcagtttgggaggccaaggcgggcggatcacctgaggttgggagttcgagaccagcctgaccaacatggagaaacctcatctctactaaaaatacaaaattaaccgggtgtggtggcccatgagcacatgcttgtaatcccagctactccgggggctgaggcaggagaatcgcttgaacccgggaggcggaagttgcagtgagccaagaccgtgccattgcactccagcctgggcaacaagagtgaaactctgtctcaaaaaaaaagagaagaaaagaacaagagagagagggagggagggagggaaagaagagggagggagggaaggagggaggaaggaaggaaggaaggaaataagggaagaatatgaagggggagaagtaagaagtgaataggcatggcttcctggagagagagaagctgggtgctcaggaatctggagtctgtgcctcagtttacccttaagactggggagggggtacattctggctatgaggtttttttttccttttttttttttttgagacagagtctcactctgtcacccaggctggagtgcagtgacc

SEQ ID NO: 35207 - DNA, 1971 bp, Artificial sequence
  DNA replication origin
ttggaacacgcgcaccacaagaaagtagagctccaggccttcgaggctcatccagcagaaggcggccaggaaacagtagtgcagcagcccggccaccaggcggcagcgcagccccacctgcggggcggggacggaggggcggagcgacgtcagcgcggggaggggcatgcggcgccagagccagtcgcctgccaggtcccgagagtgggcgggaccacagccggagggtgggcgggtctggagcgggggccaggtttccccccagggcccacccccaacaacgctcagaagcgagcgggcactcggggtgtggccaggcagctccaaagccagcgccctttaaagagacaacccgaccccccggtgggcggggccagatcccggacaggggcggggcctcatgcctccagggcccgcctacccgactgagccccgggagtgggcggggctaacccctcccaggcctccctgaccccagagctcaggagggagcggggcgggacctcacctggccgccttcgttctcgatgccggccaggaagatggtggagcccacgaagaggcagatgcagaggtgcaggtgtatggtggtgcgcgagccctggatgggccgcaccagcaggaaagtgaggatgcacagcagcaggcagaagagtgacagcgccagtcccaccctggtgatcagggtcagcttccagtcctaggagtggcaccgggtgctcagggttccttcagggcatgaggccttcctgccctctttgtggtcccttttcccccccacactttgacgggcccacctctctgacctcctcccttgtccctcctagatctggccacacttaccagctggaaggggagtctagggatttcacatttttgtgcttgctgggcctttggcctggaccacaggcgccccccttctctgcctggttaattgcagttttcgacaaggcccagcttaacgatggatcctactgaagtcacgtacagaaagtggtgctccaggctgggtgtggtggctcatgcctctaatcctagcactttgagaggctgagggggggcagatcacctgaggtcaggagttcgagaccagcctgcccaacatagtgaaaccccgcctctactaaaaatacaaaaattagcggtgcatggtggcatgcacctgtaatcccagctacttgggaggctgaggcaggagaatcgcttgaatccggaggcgggggttgcagtgagccaagatcacactactgcactccagcctaagcgatagagcaagactctgtccaaaagaaaaaaaaaaagaggccgggtgcggtggctgacacctgtaagcccagcacttcgggaggccgaggtgggtggatcacctgaggtcaggagtttgagactagcctgggcaacatggtgaaaccctgtctctactaaaaataccaaaaattactcaggcatggtggtgcacgcctgtaatctcggctactcgggaggctaaggcaggagaatcccttgaacctcactagctgagattgtgccaccatactccaacctgggcgacagagactccgtctcaaaaaaaaaaaaaaacgggcaagtggtgcccccttggaatgctctccatggggagcttttagttgacatctcacaactggtacgggatggacaggcagaggagcggagctagtggctgcacccagtgtatagttgctgggttgtagagaagaggccaaaggaagaggctgcgaagggtgtgacgtggggacacctgggctgtgcaaccatgcagatatatctgagcaaccagtagggctccatggagaactagctgcctgtctggttgcagctggacctcattacctgtgggcacttgaggatgcctccagctacttacctccacgtcataatgagccataaggatcgcaaagctgctcaggtggctgcattggcaggtggtgctgccgttcttgctgcccagca

SEQ ID NO: 35208 - DNA, 1448 bp, Artificial sequence
  DNA replication origin
catctgcctcttcgtgggctccaccatcttcctggccggcatcgagaacgaaggcggccaggtgaggtcccgccccgctccctcctgagctctggggtcagggaggcctgggaggggttagccccgcccactcccggggctcagtcgggtaggcgggccctggaggcatgaggccccgcccctgtccgggatctggccccgcccaccggggggtcgggttgtctctttaaagggcgctggctttggagctgcctggccacaccccgagtgcccgctcgcttctgagcgttgttgggggtgggccctggggggaaacctggcccccgctccagacccgcccaccctccggctgtggtcccgcccactctcgggacctggcaggcgactggctctggcgccgcatgcccctccccgcgctgacgtcgctccgcccctccgtccccgccccgcaggtggggctgcgctgccgcctggtggccgggctgctgcactactgtttcctggccgccttctgctggatgagcctcgaaggcctggagctctactttcttgtggtgcgcgtgttccaaggccagggcctgagtacgcgctggctctgcctgatcggctatggcgtgcccctgctcatcgtgggcgtctcggctgccatctacagcaagggctacggccgccccagatagtgagtgcagcgagatggggcaggaggaaggcggggtgctgggcctggggctcacaggcagtgccacacacaatgtccggccgccctccgttccgctcctggcttcctggggcactgatgggacccctcccttccctcctagctgctggttggactttgagcagggcttcctctggagcttcttgggacctgtgaccttcatcattttggtaagtacccactctccctccaccgaagcccgagcgccacaggcccaggcccggctggaccatcgctctcgccctctaacccacaatctgctccctgcccagtgcaatgctgtcattttcgtgactaccgtctggaagctcactcagaagttttctgaaatcaatccagacatgaagaaattaaagaaggcgaggtgagaggagaggctggaaggacttggaggcggggccggggtgaggggcatgaagctggaggtgaggtgggggcccacgctgcaaccccgctcctcgcagggcgctgaccatcacggccatcgcgcagctcttcctgttgggctgcacctgggtctttggcctgttcatcttcgacgatcggagcttggtgctgacctatgtgtttaccatcctcaactgcctgcagggcgccttcctctacctgctgcactgcctgctcaacaagaaggtgggggcctgggcacagtggcgcacgcctgtcatcctcccacctatttgggaggctgaggtgggaggattgcttgagcccagaagttggagaccag

SEQ ID NO: 35209 - DNA, 1092 bp, Artificial sequence
  DNA replication origin
ttggtgctgacctatgtgtttaccatcctcaactgcctgcagggcgccttcctctacctgctgcactgcctgctcaacaagaaggtgggggcctgggcacagtggcgcacgcctgtcatcctcccacctatttgggaggctgaggtgggaggattgcttgagcccagaagttggagaccagcctgggcaacataaccagatgctgtctttacaaaaaaattcaaagatagccagggtgaggcgcctgtaatcccaacagtttgggaggccgaggtgggcagatcacctgaggtcagtaattcaagaccagcctggccaacatggtgaaaccctgtctctactaaaaatacaaaaattagccaggcatggtggcacacgcctgtagtcccagctacttgggaggctgaggcaggagaatcatttgaaccaggagtgcagtgggccaagatggcaccattgcactccagcctgggtgacagtgagacttgtctccaaaaaaaaaaaaaaaagccgggtgtgctgaatacccatctcagcttctcaggaggctggggcaagaggatcacttgggcccaggagttcaaggttgcagtaagctatgatggtgccactacactccagcctgggtgacagggggacccgatctcaaaaaaaagacaaacacaaaaacaccaagaaggtggggctgagggcagagcatggggaggagcgtgcatggtcccagggcctgctcctgccctgacttggtgtctgggccggcaggttcgggaagaataccggaagtgggcctgcctagttgctggggggagcaagtactcagaattcacctccaccacgtctggcactggccacaatcagacccgggtaaggggctgcgcctggggcgggtgtgggcaggaaggcaccagggctagcggggctcaggcctctgggctctcctctccaggccctcagggcatcagagtccggcatatgaaggcgcatggttctggacggcccagcagctcctgtggccacagcagctttgtacacgaagaccatccatcctcccttcgtccaccactctactccctccaccctccctccctgatc

SEQ ID NO: 35210 - DNA, 1289 bp, Artificial sequence
  DNA replication origin
tgagtgggttacatgggcggccggcaggcggggctcctgtggtgatcttggggaaagctctgctgctggcagagggatgtgctgtttctgagcccgagccgaatgggaccacggggcccaagcaagcccccgtccctcctggacgtaaaggcatgcacacatacctctgggagtatgaggcttctgccacctgttgggttggttccaggccccgcctgccctcagtgagccccgacagggccggtgggagatgggcttgtgtcctgggaggcagctgcagctctcaccccagcggctgtctctgcctcaggctcccctccctgaagcgtggctcgaggcgcacgggcacggctgctccgcgccagcgtgtaagtggattgcagctcctcccgcgcctgcgctcgctggccaccccccagcccctcaggcaccaggactggccactcccgcggctcactctgccctcgtcacggtgccactggctccctggcacaggttgggaggggtctgggtctggtctggggtgggggtcctgcatggcagacgctcatgcccacccatgtcttgccctccccacctagacatgcggcgggatgtgcaggagatcttccgcctgacaccacacgagaagcagtgcatgatgttcagcgccaccctgagcaaggacatccggcctgtgtgcaggaagttcatgcaggatgtgagtagggcgagagtggcagctttggccttccccaggggcctggagcctggggccccaggacacccgcacggcccacatggcacggaggatgctgggatgctgggagccggcggagcctcctttcctcccctcggtcttgtcaaactgggagtcaagcttggtccacacctgagtcgggccagagcttacatccagcttttgagcgatgtttactgaggtctggtgcagcaggtcctctgggaagtgtcgcacaaaggagtcgcccactggaaggttctgggcaggcgagatgcccagaggtgatccctgcccgcccctcccacctcccttcccacacagcccatggaggtgtttgtggacgacgagaccaagctcacgctgcacggcctgcagcagtactacgtcaaactcaaagacagtgagaagaaccgcaagctctttgatctcttggatgtgctggagtttaaccaggtgatacttccatcagcctgtcctggggctcaggaccttcgggaggtcactgggccacagggactgtgtggccctgactgccactccttccctcaggtgataatcttcgtcaagt

SEQ ID NO: 35211 - DNA, 1092 bp, Artificial sequence
  DNA replication origin
gccggctcccagcatcccagcatcctccgtgccatgtgggccgtgcgggtgtcctggggccccaggctccaggcccctggggaaggccaaagctgccactctcgccctactcacatcctgcatgaacttcctgcacacaggccggatgtccttgctcagggtggcgctgaacatcatgcactgcttctcgtgtggtgtcaggcggaagatctcctgcacatcccgccgcatgtctaggtggggagggcaagacatgggtgggcatgagcgtctgccatgcaggacccccaccccagaccagacccagacccctcccaacctgtgccagggagccagtggcaccgtgacgagggcagagtgagccgcgggagtggccagtcctggtgcctgaggggctggggggtggccagcgagcgcaggcgcgggaggagctgcaatccacttacacgctggcgcggagcagccgtgcccgtgcgcctcgagccacgcttcagggaggggagcctgaggcagagacagccgctggggtgagagctgcagctgcctcccaggacacaagcccatctcccaccggccctgtcggggctcactgagggcaggcggggcctggaaccaacccaacaggtggcagaagcctcatactcccagaggtatgtgtgcatgcctttacgtccaggagggacgggggcttgcttgggccccgtggtcccattcggctcgggctcagaaacagcacatccctctgccagcagcagagctttccccaagatcaccacaggagccccgcctgccggccgcccatgtaacccactcaagagccttccgcctgctatggggcccgcctagtcactgactctcagctggggctgcaagggcagaggactcacccagctgctccagcatcttgtcacactcgtccagcacaaagtgcttcacattctttaggctgaagctcctattccgcacgagcgccaggatgcggcccggggtccccaccacgacatggggacagttcttcttcaacacttcttcatccttcttgatggagagaccaccgaagaacacagacacctatggggatgaggaggaaac

SEQ ID NO: 35212 - DNA, 1027 bp, Artificial sequence
  DNA replication origin
ctcacacctgttagcccagtgctttgggaagctgaggctggaggattgcttgagcccaggaagtcgaggctgcagtgtgctatgatcacaccactgcactccagcctgggtggcagaggtagactccatctcaaaaaataattagttataacaaaaattagaaattgccaataagccaaaataactggaaagtgcccacagtttgccccttgccccagaggcatcgttgctgttttgccgtgccacttacctagagagtgtccatctgtgaaggttgggttgccccgaatatagctgtcaccactgtccttgctgttaggccctggctgtcttctcccattgtcttgtgtgccactgtcctggggagacacttcagtgaattctggtgtcttgctcccgagtcaggccaggtgcacatctttgggcttcatattggcgcccgtgccctcgttatctcagagcacatcctgaaggatgaaggtgctgtggagggctgtggtgtggtccagtgtctgatggcacgggtgggaagaccggggccgcccgagtgccgagattcaggaaatccttagagagccaggtcccatgtcacccaggcaggccaggtctaaccattacattatgcgggccattttctgttccattttctgtttcttattgtgggtcctggtgttgggagacaggtttcaatagctgtgggagggtatagggagtgaggggtggggaagggccgtgagaagtgggaggcatttggaccgggccttcaaatggcctgtgatgttgggtgcagtgtcagggggactgggttgggtggactctggtggggaaggggtttaggacactgcctaaggtaaggccctcttcttatgccacttcccaggtgacggtcctggtcatgtgccacacgagggagctggccttccagatcagcaaggaatatgagcgcttttccaagtacatgcccagcgtcaaggtgagtccctcgggccagactggaccaggcgccacttggtttctgcagctttgt

SEQ ID NO: 35213 - DNA, 1545 bp, Artificial sequence
  DNA replication origin
gagagagagaaaacagccattgagacaatggaattgctgtttctgagccgggaatgagtgacagcgaggccaaaagtggcctaggatcctcagcatccagcctcaggaagaattgtagcagctgtcaccctctgctccaccccccactggagtctggggtaggggaggaggacgaaagacaattgtcctcatgtttgggtcccttgcacccagcaggcacttggtatgcattagattaataaagcaaagaggtaggcagactttgtattaattccattttccatcttctcagctttatttttattggcccaggcccaataggaggcctttcatgagagcacttaattattcccctgtgcagaccacagagagtgggagaagctggggctggacagatactgcttgctctctcgcaaactcagttcccaccagcatcctggcagccccacccctgggatctttgggctcctgccccatgaaagcccagtgggttccttggggagtgatagggagggggcttctctgggctgagtagtctgaggaggttcactggagctgaggcttgcgtgtggagaaggaggcatttgtgcagagacctgggggcagagcattcctggcggtgacagccaggttcaaaggcttggggcaggggctccaggggtctgagcagctgaacaaggctgggggtggtgtgggatgaggtgagcaggggtcaaaccaaggggattgcctggcctgtggtgagagttgggattttaactctgtgagccatgggaagcccttggaggtggagggtgttctgtctgtgggtgtggccagaggggcatgggggagagatggggtagcttgggggtggggaggtggagacagggcgaagctgcgaggtgcagcccaggtagagctgatgggctcactcatggaaggaggcggcagagaatgccatttgaatgaagcttcatcatccttctgtgcccactcgcgggaccctgcctctctctcttctcagcatcatggcagaacaggatgtggaaaacgatcttttggattacgatgaagaggaagagccccaggctcctcaagagagcacaccagctccccctaagaaagacatcaagggatcctacgtttccatccacagctctggcttccgggactttctgctgaagccggagctcctgcgggccatcgtggactgtggctttgagcatccttctgagggtacgccttctgggtgttatcctcttgcccaggtcctcaccaagacaagaccagccctgcccgcccagagcggtgccgcctccagtttgccgtgggtgagggaggggcccgtctgtcccgcggatcagttgtgcccagcggggcctgtggctgccctcggcagtggggcgttctgctttgaccaggcggataccccagccctgcaggtgtctgtggccttgtccggactcggcctcttctgattgccctcactgtgggcccccggtcaactggtgaggatcctgcacgggggtgcatccaggttctcgtccctcacgctctgcttct

SEQ ID NO: 35214 - DNA, 801 bp, Artificial sequence
  DNA replication origin
gcttcggcctctcttgaatgaaaaggcagcggcccagtcagcagagcagcagcccgacgcaagaggcaggaagcgcagcaactcgtgtctgagcgcccggcggaaaaccgaagttggaagtgtctcttagcagcgcgcggagaagaacggggagccaggtgagcagcggatcccgggcgcggggccgcggtgtggggacgtctgaactgagagcgagaggacgaggggagacgttgggatctaaggggagggggagaaagggtcgcgagacggtgggggcggggcggttggtgtgtcagagcgctgtgtgttggccgttgggcaccggggcgcatgcgctaggggtgggccagccgttggcgcgcggtgctcggggctcggggcccgcttctcggaggggctgtcatggcctacggcgctccgagccccacttggagtctgtcagttcgtccgaatagaccccgcggcggcctggggccatttggagagggacgagggggtgacgccggggtctggggcctgggtgggagaagttggagctttcagttgtcaggggtttctttgggtccgagggacttgatccctttcccagtctaccttcttcttggtctactttttacgggattcgggattctgagatttagagcaaataagactttattttggaaggccgggcgcggtggctcttgtaatctcagtactttgggagagaccaaggagggcggatcacttgaggtcaggagttcgagaccagcctggccaacatggtgaaacctcgtctctactcaaaatacaaaaaaa

SEQ ID NO: 35215 - DNA, 1312 bp, Artificial sequence
  DNA replication origin
tcccccggcagcgcgcgggcggggtccgccggcgccgtccggtcgccccgggactccagacgcaggtgcgcctacctgcacggcgtcgctggccatgtcctcctgccgcccgccaggggtccccgcgcggagggaggggcggccagaggagcgcgcgtgcgccccgggcgtggcggggagggggcgggcgcggcgcgaccctccccggcgcgcggcccgctccggcctgctcggctcccgcctcgcctggccaggccgccgcgtccccgcgccgcgccctccggccccagcggccgccgggcctggtcacgtgaccccggaggtcggcgcccggggagggggcggggccgaggggggacgggttcccagaggcccccggggctgcggggtcccgcccgtccgccccctcggtctcccgagcccggagcatccccatcggctccccacctttcctctttccgggtcccgagacgaccgcacgctgccgaggggtcccccattggagcgcgcgggaacccgaggagaacggttccacgcgttcaagccgagagcggcggaggcctttgggcctcccgggacccctgaaaaaaacaaacagaataaccccccaccccaccctaccccggtgcatttgcaagctcgggacgcctgcatctgtggtcccctattcaagggcatggaagtttccccgttacctggagacaagctctgggcggatctgcattcaaatcctagcgctttacgccttgagggagacaaacccttccaggcacctcatctgtgaaatgggaatgatgcgctcacctcctcggtgttggtaaaattcaataagacagtgcaggccaagagctgagaacacactagacgctccataagtgttagctgctgtcacttttaatgttatcgtaattgtttgtttgttgttttgctatttttggacggagtttcgctctgttgcccatgctggagtgcagtggcgcgatctcggctcactgcaacctccgcctcccggattcaagtgattcttctgcctcagcctcctgagtagctgggattacaggtgcccaccaccatacccggctaatttttgtatttttagtagagacggggtttcatcatattggccaggctggcctcgaactcctgatctcaggtgatccgcccgcctcggtctcctaaagtgctgagattacacaggcctgagccaccgcgcccagcctctattatcgttattgttattaaaagaggtttgaatcccaacttgctgttcatcctggggacccctgtggcctctgagtctcagttttccccg

SEQ ID NO: 35216 - DNA, 2545 bp, Artificial sequence
  DNA replication origin
gctcacacctgtaatcccagcactttgggaggcctaggcgggcaggttactttgagctcaagatttcaagaccagcctgggcaacatggcgaaaccctgactctactaaaaatacaaaaattagccaggcgtggtggtgtgcacctgtagtcccagctactcaggaggctggggtgggagaacggcttgagtctaggaggcagagatcatgccgctgcactccagcctgggtgacagagtgagaccccagtctcaatttaaaaaaataaagaaaaaaaaattagccaggtgtggtggtgcatgcctgtagtcctgtagatcaggtgtttgaggctgcagtgaacaagaatctcgtcactgcattccagcctgggtaacagagcgagaccctgtctctacaaaagtaaaaggaaattagccaggcatgttggtctgtgccttttgtcccagctacttgggaggctgaggcaggaagatcacttgagccccggaaattggaaatcgaggctgcggtgacataggatcgcaccactgtactccagcctgggtgacagagcaagactctctcctctaaaataaataaatataaatcagtaaatcaatcaataaggacacagattcacaccctgagctgctgaccaggacgcttaccagtaacgacttcacagcagccctgcctgccaagtgctggcaaggtctcggtctctctctctcccatgaacaccctcttagtcccatttttcctaggtcagaaccgaggctcagagaggcgaaggcactgggcccaggacacacagcgaggaagtgtcagcgctggaatttaagcccaggctcaccaaataccaccctcgctcagaaggccccaccccatccccagcaggcagagggaggacacagccaagagcggggccagctcaactggggaagtccaggcagagaggagaggtggcctccctcagccccacctccagcagctgaggtctgtaatgcacagagggagggaggctgggctcctgggttctcctcccctgagtgactcacttctacccaaggcacaggggtcacctgagggccagcaaggcaaacccaggactcagggccctggcctggcctgtcctatggagaacccctgctcctccgctgcccaccatggagcggagacctcagacccagaggacctgcctcccataatccccatcttgccagagcagccagggacctagactcccacatccggagatttcaatgccttgggcgtttccggaatctggacaggacatccgtttgcaggacacagaacagacaggcacacgttgggacagacagagggacagggcagcaggcccaagcaaccatgagagagggatgaccaggagcggggaagagactggggaggagatgggaaggggggaccagggcgtgggtccagcctcgttgcaggaatcacagcctgtctgggtcatgtgtgggatgcgccaagcgcatgcatgcacccggggattcctacacagccctccctgggccgggggtagaggcagggaccccggcccatcccggccttgaggtctgaccttgtgtgatcggcaacaccagatacgcccagctcctcggcaaggccggcaggccatcagcaggactgggaaggcgggagggaccgggggttaccggggagacacaaaggggccgggggcaggtgcagaaggagacgagaacccagttacacaacaaccacaggacaatgaactggatggtgaggtgctaatggggacactgaggcacagacatttctcagatttgggtcacttgaaccaaagaaggttggcagtcaccctggccgtgcttgtcacagacggggaagatgagtccaggtcagtgatccccaccaggtggcacaaggggaatctggctgggcgggaggctggtgccagtcacgtgtgtgtgttagcagggtgggggtgacccagccatgcccagccaccatgcaaaaaagtaggattctatatatgggagcatccctggcctgttgactgagacactccccacccaggagaaggttccacctgacagcccaagggtgggagtgggggtccccattcccccgacctaatgcagtgactcgggtacttccgccaacaggtgccaatctgggtggcgtctggaacatcataaagctgtctagaggcgggggtggctggagctttgttatgcgggggaagggcacgggccgggcccagcagcctcctcccctcccagggcactgcgccaggcacgtgccccaggtggagcggcacctgccgggtacccaaccctggggagggggatgagtttgggggcggacgagaggcactgggacgcccagccagccacagacacccgaagtagagcctccgccgcgccccttctagttctccaggagaggccgagtttgagggtgtagcaggggttgcctccgggatcgcccccaaaccagcccagtccacatcgccacctgccgagaagggggcctcgctggctccacagtcccggcccagggagggggcgccgg

SEQ ID NO: 35217 - DNA, 1440 bp, Artificial sequence
  DNA replication origin
acctgaggtcaggagttcgagaccagcctggccaacatggtgaaaccctgtctctactaaaaatacaaaaattagctgggcgtggcggcacatgcctgtaatcccagctacttgggaggctgaggcaagagaattgcttgaacctgggaggcggaggttgcagtgagccaagatcacaccagtgcactccagcctgggcaacacaaagggagactctgtctcaaaaaaaaaaaaaaaaaaaaaaaaaggaaagaaaaagaaagcgtgcaaacatttgtgagcctgtgttctgtgcatatccacatatgtatttgaaagttagtgcacactcaagtcagccctcggagcctgcgtcccctcatggatacaccatgagtgtgtgaatgtacaaactgcctgcaccttggacattctctagggacagggagcaaggactgtccctgggtttcatctagaggaacaggaggtcccttagatgccctggagttggccccgcgcgaggggtgctgggagttgacaggaaagaggaagtggcagccgagaggccctggtggggctgaggttcaggaagagggcggggccctcagcccggacccaggatggcggaggccaataacccctcggagcaggagctggaggtggggtccagggtccctgtgggggcaggcagaagggggccccaagtggcacaggccagtagtccttccccgggtacttctcagtttgggaacaaggagaggagatggggcactggcctcagagttctctctctggaggatgagagtatccagtgcccttcggggctcccagattggggagagacagaaggaaggagaccgggctctgttctttagggtcccagttgttgaacataggagaagagcagatgagggtcttcaagaccccatagtttgggggtacagcagagagaagacttggcctgcccttgggataccctagttttgggggtgtagccaaggaaagatgaggcctgccctcgggatgccatagtttcagggtacaagtgagggaagatggggcctgtcctcaggaccctgtagttttaggggtacagcagagagaagacagggcctgcccttgggccctcttagtttcggggagcagcagagaaaagaaggaatcttcccttgggaccctctagtttgggggaggcagcagaagggagacagatcttattcttgagacccccttaatgtgggggacgctgtggtggtgggggtgacaaggccctgctcttgagacctcccagtttggggaggtcaggaagcagtggcaaggcctcgtcaccttccagttttgggagtcagaggaggtagagcaggccctgtcttgggagccccagtccagggcagaggctgggccaggctggctgcatgtggtctgcacctggagttctcctagctccactgaccctgttct

SEQ ID NO: 35218 - DNA, 1048 bp, Artificial sequence
  DNA replication origin
gccctgctcttgagacctcccagtttggggaggtcaggaagcagtggcaaggcctcgtcaccttccagttttgggagtcagaggaggtagagcaggccctgtcttgggagccccagtccagggcagaggctgggccaggctggctgcatgtggtctgcacctggagttctcctagctccactgaccctgttctgtcctccgcagagtgagcctcgcagctggtccctgctagagcagctgggcctggccggggcagacctggcggcccccggggtacagcagcagctggagctggagcgggagcggctgcggcgggaaatccgcaaggagctgaagctgaaggagggtgctgagaacctgcggcgggccaccactgacctgggccgcagcctgggccccgtagagctgctgctgcggggctcctcgcgccgcctcgacctgctgcaccagcagctgcaggagctgcacgcccacgtggtgcttcccgacccggcggccacccacggtgagctgggatgcctctggggatgcgggactccagggattccactgctcactggctcacccatggtctccagagccaggttaacccatctccacggacccccagggagatgcatgccatgacccccgtagccaccaacacccagagaggtgcatacagccacaccagcacccggtaacactcaagaccgtgcatgctgtcacatgaatacctctagacacagccacgccaacacccaggcaacattcaaggatgtgcatgcagtcacacaaacacctaaaaaaacagccacaccaacacccaggcaacacccaagggtgcacatactgtcacacgaatacctccagacacagccacgccaacaccccaggcaacactcaaggatgtgcacactgtcacacgaatacccagaaactcccacagttacatggatgataaccaaagactgtttatttttgtttttgtttggagacaggatcttgccttgtcacccaggctggagtacagtggtgtgatcaaagctcactatagcctcaatttcct

SEQ ID NO: 35219 - DNA, 1319 bp, Artificial sequence
  DNA replication origin
tgagtgggcgtgtgcacacagggacacatgtgtacacatgcaggtaggtgtgcacatgtgggtggactgtacgcacacaggtgtggtgtgtgtacacagtgtgtgtgcacgtgctgcctcaccttggtgctgccattgctgtaggtctggatcatgttctccgccccctgcttcaccttcagctcaatggccaactgcttctccaggcccgccacgcggctcaggttggtggccgagcaggtggggccacccgcaccaggggactgggggccatctggaggcgacaggtgggagagagtcaccacgcatcctcacctcggcctgcctgggaggcttcatcctcagcccagcctgggcattgcccctggggcatggaggagggggagctgggggccagcagacaggcaggcagggggacaccagggcccagcagtctacccacccaccctcccagggaaacccctcggggctggggcagaacccaggatgaatgagtgcaggcgagcacccaggtgtgttagtgtgtccttggtgctgggtccactgcatttgagaggcccatgagtaactacgtacatggcttgtgtgagcctatgggtgtgggagtggtgccatctgtgagctgcagggtgttggcatggctgagtgtgtgtttccctaggtgttagtgtaactctgtgagacgccatgtgttagaatgactgtctgagattgtgggtgttgggagatgctctgcgtacatctctgactgttgctacaactgtgagttcagatctccaggttggtatgactgagtctccgggtgttggcacatccggatgcatgtgtctgcatgagtctctggagagtggtgtgatgcttgaggggaccctgggtgcagaaatgactgaggccgggcgcagtggctcacacctataatcccagcactttgggaggccgaggcaggcggattgcttgaagtcaggagttaaataccaccctggccaacatggcaaaatcccgtctctactaaaaatgcaaaaattagccaggcgtggtggctcatgcctataatcccagctacttgggaggctggagcaggaaaatcacttgaacctgggaggtggaggttgcagtgagccgagatcgtgctattgcacttcagcctgggtgacaagagcaaaactctgtccttccccaccaaaaaaaattcaagctgctgagtgaggtggctcacacctgtaatcccagcattctgggaggcacatcacctgaggtgggtggatcagttgaggtcaggagtttgagaccagcctggccaacatggtgaaatcccatct

SEQ ID NO: 35220 - DNA, 1567 bp, Artificial sequence
  DNA replication origin
caagtgccatcccactggggattaggggttcaacataggaatttggtaggagacaaacattgagtctcttaacagtgtctttgtgactgacaccgtctgtgtaaatgtagtatgctgtggttgtccagatgtccatgagtgtcaccatgcctggttgactgtgtaacctggtgactgttcattggggaatgaggtgtgtcaacacgggtatgacagtattattatttttttttaatgacttagagtctcactctgtcacccaggctggagagcaatggcgcaatcttggcttactgcaaccaccgcctccggggttcaagtgattctcctgcctcagcctcctcagtagctgggattacaggcatgcgtcactgtgcccagctaatttttgtatttttagtagagagggtttcaccatgttggtcaggctggtctcaaactcctgacctcaggtaatccacccgccttggcctccgaaagtgctgagattacaggcctgagccgccatgcttggcctatgatttagatgttcctgtctgtttgggtgacagcccctgggtgacagtgtctgaatctagataatgtggctgtccctgggggccacaatgtgcctgcgtctgtccctgtgcaaatcactggaggtgaagagggaccgtgacaatgtgtgtgtcggtaagcgtggggtgacagtgtgcctgtgtgtcattgctcagactgtcccctgtaacagggtaactttttccctaggactggccctgtgagtgatggtgtttggataaaagagtctgggtggaagtgtggctgcctgcaggtgacagtgcgacagtgtcactgtgcctgccccttggatgaagcgtgatgcatcttcatgatggtttgtctgtggcccgtgcctgttcctgcgaatggctgtgtctgcgactaggttggtggggcgctgcaggctagcctcactgccctgtattccacgctcacagggagtcctgacctgggggctgtggagctgcgcatcgaagagctgcggcaccacttccgagtggagcacgcggtggccgagggtgccaagaacgtactgcgcctgctcagcgctgccaaggccccggaccgcaaggcagtcagcgaggtgaggggcggagctttcattagaggcggggcttcagcaaggggcggtgcttcagcaagcggcggggagttcaccaggaacacccacggtgaggggtggagcctcaaagggggtgggaccttcataaggggtggggcctcagccagggtagactactgtgaggggcagggcatcaggcaggaacagtgcaactgtgaggggcggggcctcagcgagggggcatggtttcaggcaggaatggccctcggtgaggggaggggcctctccaaggggcggggcctggttttcccagaggtgggaccaagttggtttgaggtttagccctctagggaggagctcagtgtgagactcagcctgggggtggggcctaggcctgcacttgggaaggggcaagcctggtcccgcccccagcccccacacttcccaccacaggcccaggagaaa

SEQ ID NO: 35221 - DNA, 1173 bp, Artificial sequence
  DNA replication origin
gtgcaccaccatgcccagctaagttgtatttttaagtagagacagtgtttcaccatgttggccaggctggtctcaaattcctgacctcaagtgatccgtccaccttggcttcccaaagtgctgggattacatgtgtgagccaccacacccgacccctggcttattttttaaaggtttacaaatatggggcattccaggtccccaatgccacctcgtttctcagggcccacgatgcccactcactggtgttctcggcttctgctttgaggctgctccggccactgaggcttccgcttcggctgtaaaggccccgggctgggcggctcaggaagggggggcggctgtctggggtcccaggtccccccattgagggggtagggttccacgggatggtctctgggaggtctctgcagcccaccactcgtacctccagggtccctgcaggaggggaaagctcagcagggggccacttctggggcaggctgagcggaggggaccacagcggggaggggacacatccagacgcagccatggtacaagtgggagccagtgagggacaaccagaatggagcatggggcatgaggccgggatgtccgtgctgggataggagaatatgagagaagcagtccttccaggaggggctcagatgcgggagtttaggggcagaagagaggctcagggtacaggccgtaggctcagggtacaggccgtaggcccaggcaagcaggaacagggtaggactaggggttctaggggaggactcggtggacaatctgaggtctaagatgggctaggggtctacggtggggctggtctggaggggtagatggctgaggggtctgtggaaggtggggctggctggtctgcagcaggcgggtaggaggctcatggctgagcgttgtgaggccgaggtggggctggggaacaagggctgggagaaaaatactgggccaggtgaagagagatggagaaactgaggtgtggggggggtgggcaagagcccagaatcagagggcaaaggaggggaggagacagtggtggaatgggagtccagggttggggagagcggagattgaagtcgggggtcacaggaatggggaaatgagaggagtcggaggcccagggctgcaggggtggggtagggtctcagacccacctgtgagcggcgcggg

SEQ ID NO: 35222 - DNA, 1981 bp, Artificial sequence
  DNA replication origin
agaccctggctaaaaaaaaaaaaaaaagggaaaagtggagatgtgggattaggagggtccttggggggaacaaaagtggaggagggaaatgggggtgtcaaaggaggtgacgatgttgccctggaggtgcaacgaggcccttgaggcgcaacgaggcccttgaggcaaagcggctaggcatgggggccgtctgctgtggggtgatgaatcggccctgggggagggccggggtcactgaggtccttgtggggaatctcaccctgaagaagggctgtttcttcacatcttctgcatctctctcgctagatcccagcctccgctctgggttcctccgaagcagcttggaggaaggagcactgtgtcaggatctgtcccctcctgggccccactgcccctccccaggcccgccccacgtcgggggtcctcacccttctcatgatgccgatggcttcggccgacaggaagcgggggtagcgaacctcgtcgttgacgatgctgtcgaagacctcctcctcatcatcccctgggaatggggactggggagagggaggcccggggtgaacgaggcccctcctctggctgctccaaacccagcccggcctgagccccacactctgctgcagctcttgggtgctggcttacttgggcagggaaatgccccattttatagatgtggaaactgaggccagggaagcagagccagcagccctcaatcacacaacacatggtggaggcagacttggatcccaccctgggcacgcgcaggttccaatgagatccgagacacacaggggcggggtctcacctcgccaaccagcatctcgtagagcagcacacccagtccccaccagtccacagctcgcgtgtacgacgtgtccgtcagcacctcaggggccaggaactccggggtcccacagaatgtgctggtccggtccccatagcccatccctggggacagcaaggccatgtgaggttatgggggccagaggagtcactcagcccaatgtggggttgtccacacagccagccctgtcccagggtcagggtggggggcaccccgaatagggttagggaccccattccttccccctcctttgtctaatccagaggccagcccctcaccctccttgcagaggccaaagtctgcgatcttgacgtagccctcggtgtccaggagcaaattgtccaacttcaggtccctgttgggggttggaggggtggaaagagggatgagcgggggtctgggtcctgtccccacaacgggcagtgtgcacatgcatgcacacacgcacacacctgtagacgatcttgtgttcgtgaagaaactgtaggcccagcaccacgcaggcggaataaaagctgcagagagagagaggctgctgagaggggtggggccaccctgcaaggagggagggtcacataagcctggcttccacatcctcaaaagccccccagtctccccaaagctctgggaggctgagggaagcaaggcctgagggtggaggggtgagaagcaggctgccagcctctcggggggactaagtgtcagatgctgtaggggaggcaggggcccgggctggggtccaggctcacatggcacggggctcagagaacacgtcgctgtggatgtgcagcatcaggtccccaccggccgagtactccatcacgaagcacacgtgctccggtgtctggaaacagccgaagaggttcaccaggaaggggtgtcccgcactggtcactgccgccaatatccgcttctcacacatcaggctggggaggggtgggggatagaagtcagagaccatggccgccacttactccagactcccagatggcaaccaaagcccatacagagggaagcagaactgagaaacgtcatctcagcacctggatacagccatgcctgaaggtagcacactcctggacttttcagatccagaccaataaatttctttacttgtttcagtctttctcagttggg

SEQ ID NO: 35223 - DNA, 1399 bp, Artificial sequence
  DNA replication origin
acgcccctgggcgccccccaacacaatcccgacgccccctcccatctcggctcacccacgctccccaccataagaacagccccgagtccacgccgccccttgatcctcttcagatgacacccccatcagtcgagactcccacgaccacccagccacctgccccgcaaacgtccacacctccaagcacgcccccacccccaatgactgcacacaagaagacacggaggatgcaaggatccggcaaatcccaaaggcctttttaaaaactaagagctctcgggcaggggcaggggcaggggcaggggagggggctagcagcccccggccacgaagtcgaagtccaggaaggctgcctgctccgcggctgtgaggggccgcgcgtcgcggggcgggctcagtgtgggggcctccccggtgaactcctcgtcgaagttgctgacgtcggtgcggccggacagcgtgggcacaaagggcggtggcaggcgccgggccaacagggcttcccagcccagagtctgcaggggagggaagcggaggggagggtcagcctggaggctgaggagggggcgtgctgcagtggggaccagtcctggggctcggggaccacggagaggagtgagcatacagaggacaagtggggtggggggactggggctcaggagggatcacctgcgagagcctggtggagaagccggattaggaaaagtggaggcccggcgtggtggctcaggcctgtaatcccagcacttcgggaggccgaggcgggaggatcacttgaggccaggagttcaggaccagcctggccaacatggcgaaaccccgtctctactaaaaatacaaaaattagcctggtgtggtggagtggtgcacgcctgtaatcccaggtactcgggaggctgaggcaggagaactgcatgaacctgggaggcggaggttgcagtgagccgagattgagccactgcactccagcctgggcgacagagcgagaccctggctaaaaaaaaaaaaaaaagggaaaagtggagatgtgggattaggagggtccttggggggaacaaaagtggaggagggaaatgggggtgtcaaaggaggtgacgatgttgccctggaggtgcaacgaggcccttgaggcgcaacgaggcccttgaggcaaagcggctaggcatgggggccgtctgctgtggggtgatgaatcggccctgggggagggccggggtcactgaggtccttgtggggaatctcaccctgaagaagggctgtttcttcacatcttctgcatctctctcgctagatcccagcctccgctctgggttcctccgaagcagcttggaggaaggagcactgtgtcaggatctgtcccctcctgggccccactgcccctccccaggcccgccccacg

SEQ ID NO: 35224 - DNA, 992 bp, Artificial sequence
  DNA replication origin
gttggccaggctggtcctgaactcctggcctcaagtgatcctcccgcctcggcctcccgaagtgctgggattacaggcctgagccaccacgccgggcctccacttttcctaatccggcttctccaccaggctctcgcaggtgatccctcctgagccccagtccccccaccccacttgtcctctgtatgctcactcctctccgtggtccccgagccccaggactggtccccactgcagcacgccccctcctcagcctccaggctgaccctcccctccgcttccctcccctgcagactctgggctgggaagccctgttggcccggcgcctgccaccgccctttgtgcccacgctgtccggccgcaccgacgtcagcaacttcgacgaggagttcaccggggaggcccccacactgagcccgccccgcgacgcgcggcccctcacagccgcggagcaggcagccttcctggacttcgacttcgtggccgggggctgctagccccctcccctgcccctgcccctgcccctgcccgagagctcttagtttttaaaaaggcctttgggatttgccggatccttgcatcctccgtgtcttcttgtgtgcagtcattgggggtgggggcgtgcttggaggtgtggacgtttgcggggcaggtggctgggtggtcgtgggagtctcgactgatgggggtgtcatctgaagaggatcaaggggcggcgtggactcggggctgttcttatggtggggagcgtgggtgagccgagatgggagggggcgtcgggattgtgttggggggcgcccaggggcgtggggcaaaatggtttggggatagggttttggggctgtattggaagagctcaaagccgcagtgagcagaatggtttcggaagtccgttagggcagcggcaaggtcaggaaacgccccacacaccctctgtctctgctcccagcggagccccagccccggccgcccgcacggtgcgcttgctcctg

SEQ ID NO: 35225 - DNA, 1116 bp, Artificial sequence
  DNA replication origin
ctccgcgccctcttctggtaggccccggaactgcatccaccctggaggcgcacgcggcgtccctgcagccccccgcgcggccccagtggatgccgaagccccgacgggacacacggtcctgcctgggctcgcagaatggctttttattcccaaaggctctgcgccgcgcacctgggcccagcccagggtgggctggcttagtcgttgggcctctggttgtgcttagaagtggctgaggccgctgtgccgggagctgcgcagcgagctggcctcccaggcgctcggtgttaggcccagccccgcggggccgcccttggctccggccctcgggggcaagaggcgaagcagttggcgcagcacggcctggcgcagtaggatgtacacccaagggtccaggatctggttccaggaggcaaggcgcacggccaggaacagtggccgctgcagggaggtagagctccagccgccgacggccagcgccaccaacacctgcgggggaagccggtgtgagctatagagcaggcgcgggcgcaggggggcgcagggatggtgggggcgtggctggaaggtaaaagcctgggaggaggggcgagccgtcgcagggagggtaaatggggatccagatgagaaacggatgcggaaaaaaaaggggggcaaagaaacaaacaccttcagtgggtgggggtccggccgtagaggagtctcaggtgtcccggaaagaggaaaagcaagggggttgggtgaaaggactagggaatgaagcgcggcgacttataacggtggggcaggagaggaggcttgtgtgggtcggggtgcgctacaaagaccccaaaaaggaagaggagaggggggctaggaggaaggatgggaggtcagatggagaaggcgatgctggctttcggggcaggtggggcctctaggggccggggccttggttgagtccaggatggaggccccaggtgtcctgggacgacaaagggcgggagggtgccgagagggagcgggaaggagcgtggctcgaggggccggtgcgcccctcaccagcattgggctccagcagatgcacgacaccaccatgataccgacaagctggcccaccatctccacgtcgtgggc

SEQ ID NO: 35226 - DNA, 1526 bp, Artificial sequence
  DNA replication origin
ccctgcccaccagcacccaccccgacatccacgaaggctttggcagggcagggggggcattgctggccccacagaattggagttagcctctctagctccaaagccccagggaggggggcagtggcaccccctgcagctgccccagcccgccccagacgacgctcacattttccagtgtttagattttatccgctttattaatgaggcaagaggcccgatcctgggggggaagggggctgctcccgccctgctgggaggagggggtcacatggggccagaccaactccagggagcctcactcctcgtggagggagccgctggggcccagagtggcccccgcccattgccaggagcagagaggggggtctctgccactccaggcccccagcgggcgtgcgcggggtggagcggcccctggaggccagcaagggcggcgggaggagctgaggagccgccccaggaagagggagggaggaagcggcttgccggagagccagggcgcagtgggcggcagggctgagcggccggtgatggggaccccacatcccaggcagtgccgggtaagggggttgcacatgagggtccctgattggggaggaggagggcatgaaggggtggggccatggccacctgctgtccgtcctgtgtccccgggctcttctccctgatctgtgcgtccctgtcttaccgtctgtccatcctcccttcccatctggcctggtgggcagttccgccctttcagccctcaccaccaggatatcaaagagtggatggtcgtggggccgcctccaggcctctggggcagggatatggagtggaaccgtgggcacccagggtgaggcagaggtgatcggggtagggcctggcgagagaccgcagtggagcagaggcaggtccatggggcaggggcagagatgggtccatggcacagatgtggctgtgccatgtggggtcagagatgggtccatgggggacagggacatggccgtggggagagatgtgcccgtggtggtagagatggggctggggcatcgaggatgggactggagtaaagctgacatggggaaagtcaggtagggccacagtggcagaaatgggtgagagctatcagatggagccacaggccccaggaatttgctgggtgtaaaaatggaaggtgggggtcggaggcactggcagagatgcctgagggcggggctggggggaatcttgcaggaaaccatgaagggcagagaaagggccagtggggttagagggaggccctggagcaggagatggggtggtgagaggcaaaagagagggagaagggtttccaaatggagtggccaggtcatttggagttgcccatggcaactgccatgggcagaggggccgcctgagaacgccatggagtcaaacaggccctgatgttctgagatggcaccgtgggctggtccccgcccgggcccagccagcctcactctgccctcctctcctctatccagcacccctggcgcctgacatgagcccttgcgggcccctcaacc

SEQ ID NO: 35227 - DNA, 1552 bp, Artificial sequence
  DNA replication origin
gcttggaaatagaaagatggaacctcaggcctgccagagccccacccctacaccgggaggttgggggcaggcgtgaggcagcccccaccccacccggcccaatgctggacacgcaggcgtccatggggcaccctgctttgtcctagacataaacccagcatacttgttttgacaacccactcatcttcgaggattgagggtgatcagggaaaggcggggtgggaccctggccagacctggagggaagggaagggattgaagcaaggggcgctgggccagaaggccccacaggaatgcttgggggtgagccgagaggctgtggggaagtccgaggccagcttgcaatcctcgttccaaaaggcgggcgggcactgggccaccaggaagaggggaagggggaaaaggggaagaccctgggggctgggtgttggtggacagacccgggtggagtcggggagccgcagtcctggtgactcagggcatccccgggcacctgtgggctcctcaggtgtctgtgctgggagccgcttgcggtggtgaaggggtgtggctatgtgtgtctcgggtgttgggtagcactgtgagtctatcaagagtgttgatggctcgtgacgcaatgagggagggctgtgtcgtgggtaagggatgtgataaccggctctgtgttccagggcaattgcaggtgtaactggcagtgtctggtggtggggagtgcaacggagtgactgtgtcttggggtgtcccggggtgtgggggtgtgtgtcttagggtgctgtttctggggcaaggaggggtgcttggctaggccttggggtgttcaggggtgtcagggtatgtctcggggtgttgctgtttcctgggtgggggtgctggctaggtctaggggtctctaggggtgcaggtgtgtgtgtctcagggcgttgctgtttctgggtgagggtgggggtggccagctaggtctctggtgtccagcggcggggggtgtcacttcttgtgccttgggtgtacggagtgtgctggtggggcctgtctgggattgttgaggggtcattgaaagtcaaacagagtgtggtcaggggcagttttggcaataaggagtgtgtgtgcgtgtgtgtatctctcggggtgccaagtgagaccctatttcccagcactaaggagggtggttcgggtgatcatctcagagggctgcattttggggtgttgggaggggctggaattgaggcagtaactctgggtgcgtcccggcgctgggggtaagaccctgagttcagggatgtggcggcagcaacctggctgtgctgagatggggacaggatgaaactgagtggtaagtgacaggattgtatgtcttagggtgtgaggctgtgccagtgtgaccctacttctcagggcaggaggcgagtctttgtgtcttaggacgtgtgtcacaggtgtcactcagcccatcttaaaggagccagtcactggggagagtccccaggtcgccaggcctcctggttcccctgccccctttcagcctcctcccaggatatgactcgctgtggcccta

SEQ ID NO: 35228 - DNA, 1040 bp, Artificial sequence
  DNA replication origin
gggggctcctctcaggaggggtgagggcattattgcatttgctggggggaaggacaaccctctcccctgtattccctgcgtcaggaaactaggaaggtcatgacccccaaacagaacccaaggccccagggagacagagggaccagtttggcagctgatggtggaaagtggtggaggcgggggtggccgcccaatttggctgatccctcccctccctgtgcctgacccagctgaggtaggtggggaacagggcacaggggggccggggaccccggccagactgggaaccagggaggggatggtaccgattggagcggggcagggggcctggccccacctcccctcaccatcgtccttgggctgctgagctaggctcaggctggaggctcgggtcctgacgtcagtgtccctgctgggggcccccaccaggttgcgcccgggtcatcatcgcagggtccgggggcagtcctagtagcggccgaccttggcgtccccaatggcgccccagacgtcaaagacgaactcgtcagggaaggcaaagtcacccagccgttcgtccagggcctcggccagctcatccgggttccttttgtcctttcccagctccaccatggtggccgctattgggggaggggtcagaacggaggcacaaatgacaccagggaccaaggggctcagggtggattcggcccccagcagacctagatgccccctcccccaggcagccctcactcacccagctccgtgtccctgatacccatgtaactctccagcaggtcatccaccttctcaatggccttctcttcaaaggcagagggctgggggccagggaggggtgacagcgacatcataacaatgtgaatatacatagtaattggacggactgccattgtcaccactttacatatattcgtatttagacctcaggacaaccctgagaaggtggtatcggtgttcagctcatccccattttactgatgggcaaactgcggcccatgtgcccaaggaaggtccctgggagctgggaagtggcagaagtg

SEQ ID NO: 35229 - DNA, 1170 bp, Artificial sequence
  DNA replication origin
gctaacaggtaatgctgccggttatgaaaaggaagggagggctgggcgcggtggctcatgcctataatcccagcactttgggaggccaaggaggctggatcacctgatgtcaggagttcgagaccaactcctggcctggccaacatggtgaaaccccatctctactaaaaatacaaaaatcagctgggcatggtggtgggcacctgtaatcccagctacttgggaggctgaggcaggagtatcgcttgaacctgggaggcagaggttgcagtgagccgagattgcaccactgcactccagcctgggtgacaagagtgagactctgtctcaaaaaaaaaaaaaagaaagggaagggatgccggagatagggtccggctggagcactcaccagatcctccaccgtggcggggccccgggatcggagccgcagggtccctcggccagtgcccagttgtgggccagagccagggcggccacccgctgaacgctggctgatcatgtctgtgggaggcaggagaggagtgagtgtgggggaagcttggttttagcacgttctgggcaggaacttgtccttcctggctttcaccaccaccccaaacttctccaggcttctgcaagtttctgggggctggggccggggtgatcccaggagggcaggaatcctgactcaggcctggcatggatgtggggcagagcagggggaacagctgggggccaggaataggaaatgctggaggggagactggaggggccacttctgctcccaggggctgggggacaggaagcaggtgtaccccagcctgagtctccagctgcctgagtccgtctcctcttggccaagggggtatggctgctgggccacagaccagccctacctgcccagggaagtgatttagtcccccacccccacctcaggggcctggggcccattcctgagagttagtgaagccagatggaaaagtgggggggctggcactgagcagtcaagcctggcctgttggggatagggggctggccagggctgagggcgcttggctgggctaatggcccctggaagctaggtgtgagggcaacttcctcctcgcccccgcccttctcccaggctgggccaagggccagcaccccgtctggggtcgggaggagctgcaaccccttccctttctgcaaccc

SEQ ID NO: 35230 - DNA, 1394 bp, Artificial sequence
  DNA replication origin
cgctcatattttattcatagcagttagtgccatctgaaattatcttctttatttacttgctaacttgtttgttggctgcttccttcctttcagagtgccaactcctcaaaagtagggattttgttttgttcactgttgcattttctgtgccaagaacagtgcctagcacatgcacgtagcaggtgctcactaaatatttgtagactgagtgaatgaatgtgtctcaggtcctcgttctgattgctctctgtgctccccatccttgaaacagccccctaaacatgcctgctgtgcggttgccaactgtcctaggctccccactttccctggctcccctcacacctgaacacagagatgaagagccacttcagcccggatattgagtgtttgggctggaatttcagcatcctcaccccctcatcctgggaagggcctgaaacttagcaaccccacggccacacagaagcagtgtggccagcaggaggaggggaagggggttcctgggagcacacagaagctaggggaagggggaaaccacgcccaggctccccgttccagcacagtgttgctttggagagaaggagggaaagaggcctctgattcactcttgaaaaaccggctcctgggtgtttccggggagaacgcctacttcccagcctcggcccaggttgccaggggggaacccagtgggcccagaccccagcatcctggccccctgcagacgccactctcttctctggacccaggtagttagacctgccctctccagctctggggagaagggaaaggagggcagcttcctgtttgagtggctggtaaagcaaaagaccagcaggtgtggccctgatgatgagtacggggtagggggtgggaggggtagggggccggagctactcagcaacaactgagccgtggagttattggtatccagtctagtgggtgtgactccagttctggaccctggggcatgagttccagtcccagatgtgccagttactagctgtgtgaccttgggcaagtcactccacctctctgggtaggctgcctcaccttttttacaagaaggcacagcacctcccatgaggtgtttagagtcaattatcctcatggtaaatgcctgacacggaagctctccaataaatgctagctgaggtggagtttttcatgacgattattattcagaccgtggtcctcactgcgtcccccccaaggccctggagggttcagacgcggttagctcaggggaagtgcccaggaaagggtcagaaacactgaccccgcgcctgtccacgctgggatggggacagtccagccgggggacggggggaggggcaagcccagaaaccccagcccagcgttgggaggcgtttgtcccctgcccgccagcaggaagg

SEQ ID NO: 35231 - DNA, 2109 bp, Artificial sequence
  DNA replication origin
ccacccccgcttcccctgggaaggggcctccggcatccccgcgcgcagcctagacctccagtcgcgtccacggcgccggccccaccctgcaggatcggccggatcctcgcaggcccgcgacccccgaggcccccggagcagacacatccttctcgcagaggccactcacctgctccgccgccgccgccgccgccgccgccgccgccgctgcctccgcctccccgtgcgcacccggctcggccctccgcaaactccagaccgggcctctcccgcagcggcgcctggggggcggggccgacgcccgcggccggccaatcagcggctgcctctcggtgctcgcagccaatccgcgtcttccgcttcgggtggacccgacggaaacattccagagggatccctccgcctcgcccggctcttcccgactcctcccctcgccgcgaagcagtggaccgttccgccccgcctaagccgcggctggctgtaccaccggagggctgaggaggggggggagctgcagctgggccccggccaatcgcgagggaggaaggagacaagcggccaatgggaaggaagctggggcccctgaaccacgtgctgtcggctgagtgtcagtctcgggtgccctgggtggtgaggggcgggggagtcaggtgacctaggccaggtttcggggaaaggattcgaacttccgacgtccaggaaagcggacagtttaggagacctgggtgggggtcaatggcagtccccaacccagttccctgcccggcctcctctgccccagcctggccatcctcggagcggataaaaagatgcattcaatctctgggggcgggcgggggatcgagatgaatagggagggtcccgagtttccctgcttcctgggctgtacaatggacaaaggcattcattcattcattcgttcactcactcatcaaatatttaatgtgccagactgctccgtgccagactctgtcctacctctgaagacgcgtcagtgaataagctgaatgtgctcctggtagaggtaacagagcgtgcaaaagccggacagagagatacagcacgctttaggatactgcaatatcgtgggagctagtaaatcagtgtggaaaggcaagatgcaatgaaagacaagggtgagatagtttatctgcttgttggtttgtttatgtgctaggtcacagaaggtacccagccagcctttcatagatctgtctcctccatctgactgtgagggtggaggctgagtctctcttgtcaacccctcactcccacctcaggctgccacacggcaggttctcagcaaacctgtgtggacaaatagaccatgtagtttataaggaagggggatttatcaggtggacacagatccaagaaacaagagtcacaaatgcacctggaccaggccaggacgctcagttcccgggacaagtgagatttccttgttctagttcaaacccagccacttggacagcaactggggctgaatgctgtgtgttctgggaactgtagttcctggaagcctctaagtgctgagaccctgctcaagctccatagaaagactggttctttgcagttcccagggtgagatgttgtgcatatcagtcccaccaggacctgcagaggggcaaactaaaatgggagatggaaccttgagctttgctgctgaggattgcctagccagccccacccagctggcaaacaccgagattgctgtggcaggccaggcaacaggcacagctattgtccgtcccttcctgttctgctgacctctgccatcccactgagcaatcagttgcctgggctggccagtaccctctgtgggactgtgctgcctgccctgcttgagcctggcatctaagctgccccctgcacacttggagaggacgggatgctgagcccaggggacagcatgactgaggctgcagagtcctgagccagactccaactggctcctgtttcctgatgaggaagtgcccggagaaggggtgatgggattgtgggattgctcaagacacagagcagcactgggcacctcctttctgaatttttttttttttttttttgagacagtgtctagctccgttggccaggctggaatgcagtggc

SEQ ID NO: 35232 - DNA, 2067 bp, Artificial sequence
  DNA replication origin
cccgcgcaagcgcgagatcttcgaccgctacggggaggaaggtgtgtgctcgcggccaggggcgcggccccgccttttgacagacagggaaactgaggcacgctggcccctctcggcggccccccgggaaggacgccccgggccgtggggccgagctgccccgccctccggcctcgcgggcctccgccctcggattggcggccgcgcggtgggaggaggagccttggcccagccgctcggccagaagcttctagcatgtctggggctgcccctccccgggcgcctcctcccgcggccccgagcagccccggggtgcggtgcatgggggtgggggagccgggggtgacgacggggacggcgcggcggagcccgctgcggacccgggctcacctgggctcggccgccggggtccgcggggcggcgcctccggctcagctgcggggcgaggggttgtgaatgcaggagccgaccccgttcgtgggcttgggggctgggttgggataattcccgggaagtgatgacctggccccggcagggcacgcaggaggcagcggccgcccaggtccggagagcggggccgcctcggagggtaaggagagcagggctttttgttcctgtgcccgttgatgattcaggctggcttctgggcttgatctggagctgactttttgtgcaaggatggtggcagtgaatgctaatgtgtgaggatttaaaaactccctatttatttttgtttttttttttcttctcttcctacgcaccattagccctaaaacgttgagagtaaacacttaccgaaagccgaccctggaccatgtgtctttagccatctcttggtgatgttgccaggaggatgggtcagtccaggagtggcagggcctaggtggcacctggaggtgaacacctaaccgcatgagtccttttccactgtcaggctacgcggaaatactgttggtaggggggcgtctctgctgttggcagtgagaggtagaaacttggggttcttccttgctctcccctgacagacaaaaaagttcctcccccatggcttccaagctgtttccccctgtaagggaagctcgagagagagtctgctgttcagccatctgactgcttctaaatctgcttttcaggcctaaaggggagtggccccagtggcggtagcggcggtggtgccaatggtacctctttcagctacacattccatggagaccctcatgccatgtttgctgagttcttcggtggcagaaatccctttgacaccttttttgggcagcggaacggggaggaaggcatggacattgatgacccattctctggcttccctatgggcatgggtggcttcaccaacgtgaactttggccgctcccgctctgcccaagagcccgcccgaaagaagcaagatcccccagtcacccacgaccttcgagtctcccttgaagagatctacagcggctgtaccaagaagatgaaaatctcccacaagcggctaaaccccgacggaaagagcattcgaaacgaagacaaaatattgaccatcgaagtgaagaaggggtggaaagaaggaaccaaaatcactttccccaaggaaggagaccagacctccaacaacattccagctgatatcgtctttgttttaaaggacaagccccacaatatctttaagagagatggctctgatgtcatttatcctgccaggatcagcctccgggaggtaaggtgccaggtggggcggtgtctgtagagggcgatggctgctttttgaagcagtttagtatttgctgaaccaatgtgttggggtgtgtggtgcgtgccaggcttggggcacaacagtgaacaggactgaccagggcgctgttgtggagctttcgtggtggggacgtgtagatttgggggccaggtcttagctgcagaggcctgatgggtcttatctatggcagacggcctctgggcaagagctgagcctcttgagccagcttccatctaatgctgtccttttgcttttcaaggctctgtgtggctgcacagtgaacgtccccactctggacggcaggacgatacccgtcg

SEQ ID NO: 35233 - DNA, 1478 bp, Artificial sequence
  DNA replication origin
ctttgcaaatgttgactcatataaacttcaaagccctcatgatgtgggcacaactgctatcctcattcctcattgtgcagatgaggaagctaaggccagcaaaggcctagtaactaacccaaggttacccagccgggaaatgctggagctgggaatgaagcccagctgtctggttccagagccagtgttacatggctctgacctcccaggcagttcttccaggaacctcccccacttccctgggcccttcccaggtggaacccctttctgagcctccttttcccatcagctctgtccttgacagaggcaccccagactttcagagccaaacgcgatcgtgttgcctacaattgaggaaacagaggccttgaaaggtgtgtgacacacctatgtccccccaaattataaaggtagttggggaagaaaaagaagcacgtgtgtaagaacggggaatatttatgaggttctcactgcgttccaggcactggggacccagtgcagacaggacctggcccctgcccaggtggcgatgtcagactgggagggaagacacattgaaagccaagagacaagataaatttcaaatttagcggcaagtgatcttgagagggcagtaaagggaagaaggcgggactgggaggaccttgggagatgcgcttccgtccagatcctcaccttgctttaggaggtgagaacagaggcagtcttccgtcccaaaatccttctccccacggttgggagaatagcgctggtgggttttttgttcattttactttattttacttattttatttatttatgagacggagtctcgctctgttgccgaggctggagtgcaacggccggatctcggctcactgcaacctccgcctccccgattcaagctattctcaggcctcaatctcctgagtagctgggattacaggttcgtgccaccaacgcccgggtaatttttatatttttagcagagatggggtttcaccatgttggccaggctggtctcgaactcctgacctcaagtgatccgcccgcctcggcctcccaaaatgctgggattacaggcgtgagccaccgcgcccggcctgtttgttaatcttaaatagaaacggagtctccttatgttgcctaggctggtctccaactcctaggctcaagagatcctcctgtcttggcctcaggaagtgatgggattacaggcatgaggctccgcgcccggcctgataggttctcttattgccatgttgtagatagaagggggcccctgggttaggcagacacaggttaggtagttcgtccggcgtcaccgggcgggagcccaccgcaggccccacgagacaagggcgagcaggttcatcgcctcccggggaaaggactgggtagtcccaggccccaccccttcctggaacagcaagttcgctgtgggtcccgacctactgacccaggcggagggcgggacgcagggtagctggggccgcgta

SEQ ID NO: 35234 - DNA, 878 bp, Artificial sequence
  DNA replication origin
ggctgctgctgcctaactgcgcggcacagcacaggctccctacagcgctcgcaaccgcagcgatagactaaacgcggctctgcgtccgccccgcccctccaggccgcgcgcgccccgtcggccaatcagggcacgaggcgcccacgttcgcccctgctccttggggccggtccgaaccaagactaggactagcaccaggggattgaccaatcaacttgcgagaccaatcgaagggggcggaacgcctgtaggaggggctaaagagaaggggcttgaccatccaccaatccaaaggaggtctctgccccgcgcgtccctttgccacgccccctgatggcgtcgctgtggaaaccaaggtaagcgacggttaggccagacgcgggggcggggtaagaagttgagtgacaggcaaggcagcatccacatgacaggcggcgccgaaggggtaaattctgaggtgggcggcccccggggtacaccgggaacagcaggagagggctaggggctggggtcgcgggctgcggagtctggttggcgaggaggtcactatgggaggagactcttgagtgggagggaaggaaaggcgaaacggagtcgcgaaaagctccccatttgggaacccccaacctgcaagaaccttgagccccagccccattctggggtggcttcactgccgtttttaatgaaagccccgccccactttgtttttctgttttgttttgtttttgaaacaatctcgttctgtcccccagctggagtgcagtggcgcaatgacggctcacgcaacctccgcctcccgggttcaagcgattctcatgcctcagcctcccaagtagatgagattacaggcacccgccaccacgcccgactaatttttg

SEQ ID NO: 35235 - DNA, 2496 bp, Artificial sequence
  DNA replication origin
cctgaggtcaggagttcaagactagcctggccaacatggcgaaaccccctctccactaaaaatataaaaattggccgggtgcagtggctcatgcctgtaatcccagcactttgggaggccgaggtgggtgaatcacgaggccaggagatcgagaccatcctggctaacacagtgaaaccccgtctctactaaaaaatagaaaaagttagctgagtgtggtggtgggtacctgtagtcccagctacttgggaggctgaggcaggagaatggcttgacccgggaggcggagcttgcagtgagccgagatcgcgccactgcactccagcctgggcgacagagcgagactccgtctcaaaaaaaaaaaaaaaaaaaaaaaaaaaaaaaaaaaaaatatatatatatatatatatatatatatatatatatatatatatatgtatgtatatataaattagccaggcatcatggtgcactcctgtaatcccaggtactcgagagactgaggcaggagaattcgtttgaacctgggaggtggaggtcgcggacgagctgagatcgcaccactgcattccggtcctgggcaacagagtgagactctgtctcaaaaaaaaaaaaaaaaaaaaagggaaagtggtgagccttgagctgtggtgagctataaagacctttcctatgttagcctgactcaggccaagatcctgagggggttggaggggatcttaggcttttcagattttcctgcaggcttcttgctttgagcagatggtgactcactgggcagattctcctggtggagtcccttctgtcctggctgtagctttgtacttaggccatttctttgctgtaggcactcagaatctcagagccccaggcttgagataatttttctggtttaacttctgtaaagttacagatgagggacctgagacccagagaacaaggccttttccagggctgcaggccagttcccctttgggttgggcagtattgattgatactcttcctgggaaggtggcaatgcttacgggctttggatcagtgctaggctcatatgcttaactgccactgacaaggtttggagcccacgggcaaggtctttagtttctcgagctagtttttttttttttttttcgtgagacagagtccccctctgttgcccaggctggagtgcagtggtgccatctaggctcactgcaacctctgcctcctgggttcaagcgattctcctgcctcagcctcctgagtagctgggattacaggcgcccaccaccacgcccggctaatttttgtatttttagtagagatggggtttcaccatattggccaggctggtcttgaactcctgaccttaagtgattctcccaccttggcctcccagagtgttgggattacaggcgtgagccacagcggctggccttgaactagctttttaatccataaaatgacacctgggtgtgcgagacccggctgacattggctgatggtgtgcatcttcccaactctgtgttcagggatatcaggctgacatctctaagtcacaggtagggtatttacatcacggaaagtggcaaatgctacagctgaggccccttcctctctcctgcccaatgttcatattgactgggataattgtccctgcctcccagggttatcgtttcaagggtttcttggtctggtgagcatcgtatgagcagatacatacctggaaagcctcagcttggtgcagcaccttgcagcagctaacatttgacaagtagtacggccctactcacctctggacctctggacacggggcagatgtggggaggaggggccgaggagggggcggggccgaggaggaggaggtggggcttgaggacggggaggggtgtcgaggagggggaggcgggtcccaaggagtaggaggcagagtttagcaggaaaaggcatgtcctgaggaggaggagggggcagggctgaggtggaggaggtggttcctgaggatgaggaggtagggctgagaaagaagaggcggggccgggggggaaggggaggccgagggggaggaggtggggctcaggaggaggaggcggggcaagaaggaagcggcgggcctggatgggggaggcgggaccagggagggggaggcgggaccagggagggggaggcgggaccgagtaacaagaaggtgggacgggatgagtggtgggctttggtgtgtgccaggtggagtagctgtttcagccgcacccaggtggatttagaggctccaccagctgggcccagcaaagccttctggactaactggttcctgagaacagaggagggttgacagccttgagtgagggcggtgcttggaaaggccttgcgactctgataaggtggttgggtttggtcgggaatcctgcactttcattgacaagcctggctgcgtgagaaaggccagagaccttgagctagttggtcaagttcaggctgggtcttaacaccttcttgctgatactgatagtggcagct

SEQ ID NO: 35236 - DNA, 1913 bp, Artificial sequence
  DNA replication origin
tcaggagctgggtggggttggaggattgcagagggtggggtgggggtgtgtgtgtgtgcagatactggaattcctgaggagacatgtatagttggaaacagtgtattgcctgtatactacttgtttcagagaatatatatatatatatatatatatatatatatttttttttttttttttttttttttttttttttttttgagacggagtctcgctctgtcgcccaggctggagtgcagtggcgcgatctaggctcactgcaagctccgtctcccgggttcacgccattctcctgcctcagcctcccgagtagctgggactacaggcgcccgctaccacgcccggctaattttttgtatttttagtagagacggggtttcaccgtgttagccaggatggtctcgatctcctgacctcgtgatcctcccgcctcggcctcccaaagtgctgggattacaggcgtgagccaccgcgcccggctatatatatatttttaaattgagacagagtctccctttgttgcccaggctggagtgcagtggtatgatcgcagctcattgcaacctctgcctcccaggttcaagcaattctgcctctgcctcctgagtagctgggattacaggcatgcaccaccccacacctggcttatttttgtatttttagtagagacagggtttcaccatgttggccaggcaggtctcgaactcctgacctcaaatgatcctcccgcctcagcctcccaaagtgctaggattacaggtgtgagccaacgtgccgggcctggagaatagtttaacaaaatctcccagccaggggtgggggatccacagaggacagagctggagaatccctatccaaatactggtgtggggatggtttctggagaggctggctgtgtggtcttggtctgaatgtgacaaaatacctccgagaagcctctgcccctgactcacccaggccacactcatcaccttgtcacctcatgtttgagttctccacacagcacttggcaccttctgataaggcatgtttgtgtaagcccctggctctcccctgtaacccctggccctggggagggtctctggatacttgtggaacgagtatgtgtatgtttgatagaggccactgtcttacggagcacacaggacaggctcagccgttcagccgcataattgatgcctgccctcaaaagtcactgcaactgatcaggacgaggatgcttgcatgatctcggggtgtgcggccattctatgggactggcaggtctggctttgagtgcgggtcctgagcttatagcatatccttggtgatagtagcagagggttctgctcttccatgaaccgggctcatcttttgctgctgcggtgtttggccattccttttttttttttttttgagacagggtctcactctgtcgcccatgctggagtgcagtggcacgatcacggctccctgcaactccaactcctgggttcaagggattcttgtgccccggcctcccaagtagctgagaccacaggtgcatgccatcacgcccggctaatttgaaaattttctgtagagatggggtcttgctgtgttgcctaagctggtcttgaactcatgggctccagtgatcctcctgcctctgtttcccaaagtgctgggattacagacaagagccaccatgcccagcacgtggcttgttttgaaccattgacacatcagaatctaggaactgcggtgtccttttcactccttcccttctctgttccctccctggtccaagcacctgagtctctgccctgagttgtttctaagcctctcaccactgtctctgaagccacatttgctcccttactgttcctctgtccccagcagagagatgattcttcaagaaaccaaagcagcctgtggcattccagcgattcctc

SEQ ID NO: 35237 - DNA, 918 bp, Artificial sequence
  DNA replication origin
cctggccctgccaccagccaagagagctcagggagcctgcattcatttatccattcattcattcctgactccctccttcccataccccaggcactgttccagttcctgggatatggcagtgaaaaaaaccaagccagcctctggggttcatgggacctgaattctagcctgtgcgtgctgggcaagcagggggtgggggcagatagccatagcatgttttgtcaccaagagttgtgaacaaaactagaaggttgtgggggaggtcacaatgtggttttttttgtttttgttttttttttgagagagtctcgctgtcgcccaggctggaatgcagtggcgcgatctcggctcactgcaacctccaagaggatggccatttgagagtggtcagagaagccctttctgagaaagtggcgtgtgaacaaaggccagtagacagtgggggaaccagtgcagtccaggcagagggaacagtaagtgccaaggccctgaggctggaccatacctagcgtggctgagcaggaaggagtcctgtgtggcctgagcagagtgagtcagggagagagtgggaggaggtgagggcagaaaggtgatgtggcggtctgtgccacggctttgtgggccacggggaggacgttagcttttactctgagtgaagtggcagccatagagggttcttgagcagaggagggatgagacttggctcaggttcaagacttggcttccccagctttacctgcttgccactgctgggtggaacagactggaggagtgagggcagaagctgggagcaaagagggagctatagagaggtgaaaagtgggctgggcgcagtggctcacgcctggaatcccagcactttaggaggctgagacaggatgatcacttaagcccaggagttcaagaccagcttgggca

SEQ ID NO: 35238 - DNA, 1283 bp, Artificial sequence
  DNA replication origin
attggaggggccaggggctgggcggggggaatggggagtggctgctgctgggtacccggtctcctttcagagtgaggaaaatgttctgggacgagacagaggtggaggctgcacaatgatgcacgtgcactcaatgccactgttcacttttaaatggttagtttcatgttacatgaatttcacctcaataaattattgtttaaaggggtgaggggtaacaaacaggccccacatacccatcaaaataaaaacagtcgggtgggaggagcaggagaggttccccacccctcagagggagggcctaatgtgagacctcatcgagggctccgcgccccacaccccactgccaccccaatctctgctctgtgcctgccacacacacacacgcctgcccaggcctgaggccaacagggggcaggggctcccaggggaagcccagggctgcagagggtacaggcagctgctgaacagagccccaggcaggggatcctgagcacagacggggaggtggcaggctctggccccatctccaggagaagcggtgaggcagggaggacagacaggaccttctgaggaagcccacggagccactcggaggggctgggaggggctgagatgctctgggtggatgaagggatacctgtgggaggggggctactggtgtcagcgaggtcccagcactggccacgggcaaggggtgagaccacatagcctcaggcacgacgggcagggagagggcaggaacgggcagacaggcaggcactctggcctggggcacaggctggtggctctgccggcctgtggctctgtgatgacagttccactagcctgagaggaattctcaccaggaggcccaagattcccggggcccagccaacagcaactcgtcgcagcacgaggtcagggcagagccaagagccaggacacacggtgcggcgtgaagcgcaccctgcaagagggagcaggggcgaggtttgtgcctcccaagcccagaggggagtgccgcaagcaacagagcccgtcttcactgtctttgtggtcatgaagatattactaatgggggcaggaggagtgaaaaggggggctctcgttgtctaagcacttgtcacagctcctgggaacccgcccgcctggtgggtgaacaacccagagaagcagacctgcccatttcctggctgtgtggccctgggcaagttacccaacctctctgaacttccatctactcatggcaaagtgggctgtccccagctgccatctgacagggttaccgtaatcatccccag

SEQ ID NO: 35239 - DNA, 1167 bp, Artificial sequence
  DNA replication origin
ttcacctgctgagctccgtaggctgaagaggaagcagggaggggagcccatgaggggaggacccgctgggtggggaccgtgggggagggaaggatggtctgaggccacttactagggggagtgtagagagggtgattgatgtaataggccatccacgcggcgaagccccagtagtaggtgcagttctgaaagggagcagggcagggatgggacttgggccagcaccggacaaggcagatgctgcccatgtctcatcccgaggggcctgggagcatggtgggaaaggacaggaggggccttggggcggggctggggaggataggcggggccaaggggtgaggctagggcagggctctgtgagggcgtggtggacaggaggggcctaggggtgaaactggggcggggctctgcaggggcggggctggggggataggcggtgcctaggggtgggactagggtggataggcaggcctaggggcccgacgggggcggggctggggaggacgggcggggtctagaggctctgcgagggcggggctggggaggttaggcggggcctaggggtagggctctgctggggcgtagtggcagacaggaagggccttggggtggggctcggtgggggcggggcggggtggggcagaaaggcggggcttaggggtgaggcggggacgggctctcaccttgaagatgttgcgcaaaggcatagtgccatgggagaagcggtgcacgaagagcgtctccagcaggcgcttgatgtagtggaatgagtgacagatgcaggcgaggctggtcggggggagcaggctcagctggggctggtccggcaggtcttctgccttcccctaccctcctcccacctgccccacttactgcaccactgtatgccgactggacgtaaagtcatatttgtggccatagatgaagggcactcggaagtagaagagcaggtagatgaaaaggggccccgcgtactctgttaggaagacctgagagtagaggggggcaagatgagtcacccaacgtggctgacgggaaaagaggccgtgggtagggtcaggactcaccgtcacccagctgatctgggcccccaggtcccggaagtacagtgtggccgtggtgcccacgggcagcttctgcagaacatcctcatccttcagggacttg

SEQ ID NO: 35240 - DNA, 870 bp, Artificial sequence
  DNA replication origin
ctcccaatgctcgcagtgcaggcggcaaaagcagctgcccagccaggcgccccatcctaggggctggtccctccacatgggaccccaagtcccagggcagagaggggtaaggcagcccctcacctcgtaggtgtagttggggcaggacaccagcaggaagagccacgtgaaggggttcttggtggggtatgggatcttccgcgtcttggaccctggcaggcaggacagaaggagaaagtcagaccccctcacccagcccagctgtccccctgcccccagcaggcactcaccagcgggccgcaggtcccgcagggccatgtggatggagaagttgccgagctggcagatctgtcagagaagcaggatcagcctagggccgcccagactcccccgaccccgtccccacacccagcctccttaccacaaagatggcgagcgccagtttcacctgctgagctccgtaggctgaagaggaagcagggaggggagcccatgaggggaggacccgctgggtggggaccgtgggggagggaaggatggtctgaggccacttactagggggagtgtagagagggtgattgatgtaataggccatccacgcggcgaagccccagtagtaggtgcagttctgaaagggagcagggcagggatgggacttgggccagcaccggacaaggcagatgctgcccatgtctcatcccgaggggcctgggagcatggtgggaaaggacaggaggggccttggggcggggctggggaggataggcggggccaaggggtgaggctagggcagggctctgtgagggcgtggtggacaggaggggcctaggggtgaaactggggcggggctctgcaggggcggggctgggg

SEQ ID NO: 35241 - DNA, 1105 bp, Artificial sequence
  DNA replication origin
aggaggacctgggcctcagtgggatgagagaatcgcagctgggaagcaaaggggagagaagccagcaggggacgactgccattgagatgtgaatatatctcgtctcacttgcgcagatgggaaggagctgggaccgagaaagatgtggtggacgtcaggagggctagggaggctgggtctgagggaggcggtggggaacgagtgcaggatcgccaggcacaggctccggggtgagtgtccaggattcctcatgctcccatcggccccctcctgaaggttgatttgtccggagtcaggtttgctaggtgagtggggcaccgggacccagatactagtccagctgtcttctgagcccacgcctaagtaccttacaggtactgttagctcagtggatgctcgggtaacttccatgaccggatggtcagttctgaggctgagagagaggccacgccgccggccagtgcagagctgggccttgggtgggttgcagacaagaaaggctgggagtgctgcctggagccccaggtgcaggtggaggggctgagggttactctgggagaaggtggattctgaactcggactctggagagcggggctgtagagagctggggacgggcatccctgtgggaggggaggcaaggatccggcacgggatgttgaggtgcctcagggtgatggggagccaccttctcctgtctggcccttggtgtctggagttgcctttgtgcaaattagaaaaggaggccccttcaggacagtgcatccgtcaaaggcatctgccatccactgccatctggatgtgaatgggggacaccccaagccgtgccttcctgaagccgtgtgcctcggtcccctggggatccccggaattggggtggggagcctccagcctggttgagccccgcccactccctgcagagatggtggccacacagcaggagatgatggacgcgcagctgaggctccagctgcgggactactgcgcccaccacctcatccggctgctcaagtgcaagcgtgacagcttccccaacttcctggcctgcaagcaggagcggcacgactgggactactgcgagcaccgcgagtgagcacccccacacca

SEQ ID NO: 35242 - DNA, 1068 bp, Artificial sequence
  DNA replication origin
acaaaagagggaggagtctaggattgccacctggagctccaagtgcagatagggaacagccaggggctgcaggtgatacccaggcctggggctcaagcgaggtgtggggtggagggaccacatcgggctcatctacatacggggcggcagcagagaaaaaggctctcaggccgggcacagtggctcacacctgtaatcccagcactttgggaggccaaggtgggtggatcacctgaggtcaggagttcaagaccagcctgactaacatggcgaaaccccatctctactaaaaatacaaaaattagtcgggcatggtggcaggcgcctgtagttccagctactcaggaagctgaggcaggagaattgcttgaacctgggagacaggggttgcagtgagctgagatcttgccactgccctccagcctgggtgacagagtgagactccatctcaaaagaaaagaaaaaggctcccagaacaaagcgtaaggtaaggcagccatagagatgggaggaaacctggggaggagggatgtgggaggagccacaggaaagaaggaagcgggaggctggggtcctgggctgttgggtggccctgtgagagcccgtgtctgggcagtgagggggtagggcagaagccagggaatgggacaaggggcaggagaggaggacctgggcctcagtgggatgagagaatcgcagctgggaagcaaaggggagagaagccagcaggggacgactgccattgagatgtgaatatatctcgtctcacttgcgcagatgggaaggagctgggaccgagaaagatgtggtggacgtcaggagggctagggaggctgggtctgagggaggcggtggggaacgagtgcaggatcgccaggcacaggctccggggtgagtgtccaggattcctcatgctcccatcggccccctcctgaaggttgatttgtccggagtcaggtttgctaggtgagtggggcaccgggacccagatactagtccagctgtcttctgagcccacgcctaagtaccttacaggtactgttagctcagtggatgctcgggtaactt

SEQ ID NO: 35243 - DNA, 2960 bp, Artificial sequence
  DNA replication origin
cactaagcctgcccattgcttttcttaccagctattgaaactcaagcgattacagacaattgctctgaagaaagaaagacattcaacttgaacgtccaaatgaactcaatggacatccgttgcagtgacatcatccagggagacacacaaggtatgcctgatggctgcattcagaatccttcacacagagccatgtcattgtgtgagtcatggggaaacaagcccactgggctctcccctcatgggctttttaccctcaaactacgatattggagattttccctttaaaaaaaaaaaaaagacattttcccaaaatggaggttttctgttattcagtatgggagggactttgcaatttgggatggtgggggagtgctgttctgcctgtgtcccggtttgggttcacccagaagcaaaccctgaaagaagtgtgagaagtttctttgggaggtgatccccaggaacaacagtgggtgtattcatcagtgttctccagagaatcacaactaaagagctgaagagtgtagggtgtgggggggtgtgggaagaggggagagagagagagagagagagagagagagagagagagagagagagagagagagatggagacagagagcaagagatgagagagatggagagaaacagatgtggagaggcagatgggtaaagagagatggagagaaagatggggagagaggtggaaagagagacatggggagagacagatgggaagagagagatggggagagaaagatggaattagatggggagagagatgtggaaagagagagatggggagagcgatggaaagagagagatggggacagcgatggaaagagagagaaggggagagagatggaaagagagaagggaagagagatggaaaaagatagggaaagagatggaaagagaaagatgagaaaagagagatggggagagtggtggaaagacagagatggggagagaaatggaaagagagagaagggaagagagatggaaagagagagatggggacagagatggagaggagagagatgcaaagagagagatgggggagagagataggaagagaggtggaaagagagagatgagtagagagagatggaaagagagagatgaggagagggatggaaagagagagatggggagagagagatcaaaagcaagagatggggagagagatgggaagagagggatggggagagagatggaaagagagagatggggagggagagatggagagagagatggaaagacagagattgaaagagagagatggggagaaagagatggagagagatggaaagagagagatggggagggagagatggagagagagatggaaagacagagatcgaaagagagagatggggagaaagagatggagagagatggaaagagagagatggggagggagagatggagagagagatggaaagacagagattgaaagagagagatggggagaaagagatggagagagatggaaagagagagatggggagggagagatggagagagagatggaaagacagagatcgaaagagagagatggggagaaagagatggagagagatggaaagagagagatggggagggagagatggagagagagatggaaagacagagatcgaaagagagagatgaggagaaagagatggagagagatggaaagagagagatggggagaaagagatgaaaagagggatggagagagagagatggaaaaagagagatggagagagagatcaaaagagagagatggggaaaaaggtggaaagagagagatggggagagagagatgaaattagagagatggggagagagatggaaagagagagatggggagagagagatggaaagagagatggggagagagatggaaaaagagagatgggcagagggagatcaaaagcgagagatgggaagagacagatcaaaagcgagatggagagatggaaagaaagagatggggagagaaagatggaaagagatagatggaaagagagagatggggagagagagatgaaaagagagagagggagagaggtggaaagagagagatggggagagagatggaaagagagagatgtggagagagagacggaattcgagagatggggagagatggggagaaagatggaaagagagatagggagagagagatggaattagagagatggggagagatatatggaaagagagagatgtggaaagagatcaaaagagagatcgaaagagagagatggggagagagaaatgggggagagagatggaaagagagagatggggagagagaaggaaagaaagagatgaggagggacgaggagagtcattttaaagaattggctcacgtgactatggaaggccgacatgtccaaaatctgcagggtgggcaggcaggcaggagacacaaggtagaactgatagtgcagcttgaatccaaagagagtctgaggccagaactacctctttctcaggagaccttagtctagtttctcttgaggccttcaactgattggataaggcccacccacattatagcaggcaatctgttttactcagtctactgatttaaatattaatctcatctttaaaacaccttcatggcaacatccatgcctcatgtctggggaccatggcctaaccaagtggacatgtaaaatgaactatcacagtaggtaagaggcaaagtaagacaggcaagtaaaggcagccaatgaggtaggtacctgagtgagcagcttgctgttggggtacctggggctcaatctcactgagctgtcccattcgagaagagggagctaggacgtctgtccatctgctctgatctatcattggtggagggttgctccgggggctgaactttcaagctcttccagcctgtcctctgtgcaggccaaacacaaattcacgcccatggaagttcccaggcagaatcaccgatgcttacagca

SEQ ID NO: 35244 - DNA, 1092 bp, Artificial sequence
  DNA replication origin
aggtgacagctgcagtgaaggtgattgttgtggtgatggtgacgaaggctgtgatagcagtggtgataatgatggggtgaaaatagcaaaggtggtggttatattggtagtggaggtaaagacgaaaagaaatgattttggggctgctttttgttaacagggaagccttactgaggactctcttaccctcaccagttgcctgaataatatctttttagctcttgtatcactagatacaacaggaacaaaaaggaacaaacaaacaggcaaacaaacaaaaaaaccactgcaagaaagtagccctggtggcaactgaagacacggtcatggattaaatcatttagggagagattatagagtggaaaaagaaccctgagtaattcatttaaaaactcaggcaatgttaatttgtgcaaaggcaatagaaaaaaattaaaaaaaataaaggaatggagaggcagctaatagaggagacaggacgagaatggccagagagatgaggggtgggggtgggaaatgaatggagtatggtattatggaggtaaaggaaagagatcacactgaattaagactgaaagacacccacaggagagagctgcaagggggttgtttgtattcttagcatgaacaattacagtagtgaaggtggtggtggtggtgatgatgctgatgctgatgatagcggttgtggtggtggttgttatatataaagtttcggtgacgtgaaagaaatagcacttgaatataaaattttccttttaattctcagcaaggcaagttacttcaatatagaagggtgtgcccttacagatggaacagtggcgagcgcacattcggacatgggaggggaaggggttcttatccctgactcaggtggcccctgctgctgtgtcgttcccctattggctaggattagaccgcgcaggctaaactaatgccgattggctaatttaaagagaatgacggggtgagtgctttggcgggagtcagggcagagcaggtagcaggtaatcggaatgagttagggtggagcaggtgatcagaatgagtcagggtggagtaggtaatcgaaaaagctgctttacgaggaag

SEQ ID NO: 35245 - DNA, 1414 bp, Artificial sequence
  DNA replication origin
gatagcggttgtggtggtggttgttatatataaagtttcggtgacgtgaaagaaatagcacttgaatataaaattttccttttaattctcagcaaggcaagttacttcaatatagaagggtgtgcccttacagatggaacagtggcgagcgcacattcggacatgggaggggaaggggttcttatccctgactcaggtggcccctgctgctgtgtcgttcccctattggctaggattagaccgcgcaggctaaactaatgccgattggctaatttaaagagaatgacggggtgagtgctttggcgggagtcagggcagagcaggtagcaggtaatcggaatgagttagggtggagcaggtgatcagaatgagtcagggtggagtaggtaatcgaaaaagctgctttacgaggaagttaagtttaaaagtagaaggcaaagaattgaacatactgacatattaattctttgaaaataaatttagaactcatatctaacatggtgatgatgatgatgataataacggttgtggtggtgatgatgatggtgatagaatggttgcagtggtgatggtggtcatcatggtagtggcagtagcgatggtggtggtagaggtcgtggtggtgatgacggaagtgatgatggtggtgatgatgatggttgcgatggggctgaaggtgacgaaagtgacgacggtggtagtagcaatggtggtggtaacatcacagtgatgttttcagagatggtggtgatgatggtgattgatggtgacagttgtagtgaaggtgactgttgtgatggtgatgaaggctgtgatagcagtggtgatgaagatgggagtgaaaatagtggcggtggtggttatgttgatagtggaggtaaagatggtggtgatgccaataatggtagggaaggtggtggaggttgttgttataatggttcaagccagaattatgtggattgaggaaaaagcgcgaggggaagaagtggagacagcaagtgaagtcacctgtaaagacagttggagaaaaaagtatgagcaaagcaagatgatcaagagacctccctgggtgtttggagcatggtggaattagctggctattgggattgtcaaggccatgaacgtacgtagtaggtttgttgggctctcaacatcctactgtcccagcatgcatgcagtgaggcttcctgatctttctccctagtgatcgtctaggggtggggttgtagaggcaagagttgatcaagagagacaggtggtgctacctaatggtcaggccaaagtggttcacatagtttggatgttgttccctctaactctcatcttgaaatgtaatccccagtgttggaggtgcggcctggtgggaggtgattggattatgggggtggatttttgatggctggtttagtgccat

SEQ ID NO: 35246 - DNA, 767 bp, Artificial sequence
  DNA replication origin
cccctcacacaggcggagctgttctaggccctccagtccctccccgcgccagccgagccctccccgccctccccgccctcccgaggggccgggccacacctgcaagccagccggagacactcccaccgtgccgtgccgcaccgcgccgcgccgcgcagcacagctcagccgccgtcggccgccgccgcgcgcacttccgcttccggtctcggggccgccgggaacggaagtggctgtggctcaggctgttgtggccagggtagccttaggcggcggcagagaaactaacgtcttctttagcctccaaggagaaattctagtattcttacccgggggatgaggttaggctctggagtggggtcccacagagcatggagggtggtgctgggggcggagcctatgtccgagagacagggataggggtggggcttaggtcccggggcaaaagtggggcggggcctgtgcgcgggggcggggtggagtgtggcttgccctccgatggctgatgggcggggcttgcaccccaatggcggagtgggcggggccttggtttgcagggtggtagtaggggcgggtcgtgcgcctcaggggcaaaaatggggcggggcttgtgcttggggtgggaatgggagctgaacttgcattcggaaggcgggatgaggggacctgggcttcaagggttgagaggggcacacccgacccctccccgggtctctttagggatgctcaatatttaacttacccttttctccttccttttccccaac

SEQ ID NO: 35247 - DNA, 1022 bp, Artificial sequence
  DNA replication origin
tgcaccagccatgctttggaaaacactggacaaatggatctcccacgtgagagggaaactgacaggaacgtcttggcagctcctgacagcctcaggtggcaactttacctttcacctacctcatccggcattgggctcttcccacatcccgcttccaacatccgtgggctcctctgagctccagctgaggccccctcctccctccccaaccctcccagccaagctgatgaccgcttaagtctcacctgctggcaggtcctacccaagccccctcacctgatggttgtgatctgacccaggttgagctcgtagttgttaacttgagcaatgaagatggcagccagggcctcgtagagggcagtgccatccatgttgaccgtggcgcccacgggcaggacgaacctggtgatgcggcggtccacacccaggccctcctccaggcagcggaaggtgatgggcagcgttgccgagctgggggaaagagcccaggactgaggatggggcgtggcctggtgggggcggggctgggaacagggtgtggcctagtggggcagggcagagaatggggcgtggccgaagaaaggctggggaacagggcgtgacctagtggggtacggctgagaatgggtagggctgggtcacatgggcggggctgagaacaggggaggagtaggtgaggcggggctcagagcaggacgtggccaggtgaggaagagctgagaatagggcgtggcaaggcagggcggggctcagagcagggcatgggctgggcgtggcctgggcagaaatgagcccaaggagcgttccccttgagaacattgagcaggccaggtggggggctcctcaagatgcagaagacaagggtataacatttcagaggctgataactgtacaaaggaaaggagcaactcctcatgatacaggaagaaaacagcaatgagggtctcccaagctgaagatctcttcacccacttaaagccaatagctaaggccaatgactacacactagtttatggcagtag

SEQ ID NO: 35248 - DNA, 1353 bp, Artificial sequence
  DNA replication origin
cgccggtgcctccacggtccggtccccgcgccggtgctgcacagtccctggcgggtccccgcggccccggccgggcgcttcgccgggctccggctcctgcatccgggcgcagcgcgcaggccgaggcgcgggcaggccgcccccgccgctccggacgccggtgagtggggactccgcggctcggcgcggggactcggtgtggctgcggcgcggaggttgcgggcaggtgggggatccgaggcgctggggtcaggcgtgtggggcgctccctgcgcccacgtccccacttctccgccgccctttgtctctgagctcctgcttgccccttagagccgttgccaccgcttttctcctggtcgttctggtgagtttcctatccccttagttatccccgggtctccctgcccgtctccccacctccccaacccgtggcctccgcacacaggcacgtttccagcaccgagcccgatgccttgtgcatttatagggctcggttgccttctctgtcagagggcttatttcaccaatttcagatgtatctgatgtggctgaggctgcagagggtctgggcattagtgtgtgtgtgtgtgtgtgtgtgtgtgtgtgtgtgtgtgtgtgtgtgacagagagagagagagactgaatttgtgagtgggatcgccgtcctgaacaggtgtgtggagctgaatgtttaaatgtgaggatgattttgaaagtctgaagtttgtgttttgtgccctaaagagtgtgtgtgtgtgtgtttctgtgtgtaggtaggaattgtatggctgtcactgcctctgtaagatttaattcatgaagggtagttgtgcagagccacgaaggtgtgtgtggttgtgtgcctgagggtgtacatgaatgtgtatgtgtgtgtgcagaattgtatgactgcatgcctggaattgcatttctgaaggtgtgggtggttgcgtgcctgagggtgtacatgaatgtggcaagtgtatgtgtgagtgtgtctgtgtgcagaattgtacaactgtgtgcctggaattgcatttctgaaggtgtgtggttgtgtgcctgagggtgtacatgaatgtgggaagtgtgtgtgtgtagggattgtatgactgcatgcatggagctgcatttctgaaggtttgtgtgggtgtgtgtgtggttgcatgtctgaagagtttgcatgtgactgtgtctgtctggggttgtggatatgtcaattgcatacaagaggttttcgaggttatgtgtgcgtgtgtgtgtctgagtgtgtgtgatgtacttggtttccatgccgtctctctcttccctcactcactcctctggctagcatagcattgacataaaatgtac

SEQ ID NO: 35249 - DNA, 724 bp, Artificial sequence
  DNA replication origin
ggctccgagcagggggcgggggctggatgccggagaggccactcacccccgcccacccccagtccccctcccttcgcaagcacgctgtcccccttctcccacacggctgcggagcctgggctgggcgcgggggaggcggagggcatcgcggaggggatcccgccccctcccccggccgctcggtgcccccacacccacgtgagcgcagggccggcccggatccctcccgcagcatagcgcgtcccggctccgcgccggtgcctccacggtccggtccccgcgccggtgctgcacagtccctggcgggtccccgcggccccggccgggcgcttcgccgggctccggctcctgcatccgggcgcagcgcgcaggccgaggcgcgggcaggccgcccccgccgctccggacgccggtgagtggggactccgcggctcggcgcggggactcggtgtggctgcggcgcggaggttgcgggcaggtgggggatccgaggcgctggggtcaggcgtgtggggcgctccctgcgcccacgtccccacttctccgccgccctttgtctctgagctcctgcttgccccttagagccgttgccaccgcttttctcctggtcgttctggtgagtttcctatccccttagttatccccgggtctccctgcccgtctccccacctccccaacccgtggcctccgcacacaggcacgtttccagcaccgagcccgatgc

SEQ ID NO: 35250 - DNA, 1043 bp, Artificial sequence
  DNA replication origin
agcagctgtcgcacccgcccgttaatctggtgctgcgcgcggccgaggcgggcggcggtgaggcgcgctccacgcgcgtgcgcgtgcaccacctcggtggtctgcagggcgcgcgctttgcggtgcaagggtagcggcaggcgggcgtaccaggcgggcggcttcatcttgcccttccacagcgtgacgccctcgcctggcggcggcttctccaaggtgccgccgcctttgatcatctccacgcggaagcgccagggctggatgtaggcggcgcggccgaggtggtgggccacgttcgggtccagcacgctgtccttgggctgccacatggtcaccgcctcctgcccgcagcgatcggtcagaatgtgcgcggtcctcgccatggcctgagctgcctcgcgccatgctggggccccaacgcgtgtgtcctggctgcgctcagccgggggtaccaacacgcgcatggtccctgcttggtctctcggcctggccgggaaccctaggcggagcggaagggaccccaaagacacacaactctttcctggcctgtagagacagtgtactgagagcgcccgtcaccatagcgatgggcgcaacaagggaggtggaattccagaggtggggggaggagtaggatggagtctttgctttggaacttggcctaagtgcactggcatcctgactccttgagaaagagcccatctagcatccttctcgccgttgcttccagcaacatggcccttcttccagctttaggatgtcctaagcgcttccagctgtccaggtcacactctgtcgcatgtcggtaagcatggaagaagggccaggcttctcaccaggcattcctctcgccgttaccttccagcacatggcccttctttcagcttcagggtgtccgaagcgccttcacacttggaagcttgggacttgctgttcccacaggtagaatactcccatggctggccactttgcagtcttcagatttttgctggctgggttcttggtgtccttgactacccaaaagtagcttttttagtcttacg

SEQ ID NO: 35251 - DNA, 2690 bp, Artificial sequence
  DNA replication origin
ttcgttgttattctgagacccaacgtcatctcccatgacctccctttttccatttcacaaagcaaaatgcagtgaatatctggtcagtgtggcttgaaggaattgctattgtgacagtccccaggtcagagtggtttgtccattaggcagccagggatccccctccagcccccgtaacttgtccacaggcacccctaaccttgagtaggacctctgatttttccatatctctctccattttcctcttcatgcttttcagctcctctttctcccatgtaagcatactgtcagctttgtcagggacctagaaaacgaggagagaatccctcacatcgttaagaaagggctgggaagagattcctctttccagggtggtagagggtttgccagcctcataaactctgagtttgaaggatgaagttgagggtactctcatcctttgggtggggtgtctcactctttgagaaggtttgatcttttcagtgggctctctgacttggcgggtcttgctctctggagcttgaggttgggggcgtctctcttttacagataggagcccagggggctgagatgaaggtgtctcaacttgggggagggttgttctcaccccctgaggctgggagctgggcaccccttcctcagtgatggtcttatctcctctccctggctacaggtggagggatcatatcatacggatgatgagggtttacgtttttggagtcttaatatttggatctgggggctgagggtaggaatcccattctgtgggtggggtctcatctctcccccgggaggcaggaatttttgtaccttttggggtggggatttgagatttcactttaaggggaagatttcaccaggactggtactagaagtcttactctttctccctggatgggagcttaacctttgggtgtgagggttgggagtctgaagtctctctctgtagggaggacttcttcctttcaccacagacgaggcctgggggtggagattttcacttcctgaagccaggggaattgggttttatttaacattctgggggggagtttcacctgggttgggacaagggtatcagccgctctcctcagctgggagttgggagtgtgttttcactaggactggggcactgagggtctcacatctatggaagggtcttaccctctgggcctagggtctaggtggatgattttatgcctgggctgagggctgtgggttttactttttggggagattttcaaggagtctgaatcaggggctgcaccctctctccctggctgggagatttggataattttctcctctggggcagggaagctgaggatctcatctccttgggcagggctcactctttgggtcttgggggcttaggcatctcttcctgggcctgtatccatcatctttttttgtttgtttgtttttgagtctcactatctcctaggctgaagtgtagtggccctatcatatttcactacagccttgaactcctgagctcaaacaatcctgcttcagcctcctaagtagctgggactagaggcatgcaccaccatgcctgactattttttttaaactttggtgcagagagggtcttgctgtgttgtccaggctggcctcaaactcctggcctcaagcaatcctcctgccttggtgtcctgaagtgctgggattacaagcacaaactaccaaacttggctaatttacctgcaatttttggagagatgggatctcactgtgttgcccatgctggtttgcggttggcctgattatagcttactgcagcctcaaactcttgggcttaagcaatcctcctgcctcagcctccaagtagctgggaccataagtgcatgccaccatgctgggccactaaaaatttttttttttttgtagagacggggtctcactatgttgctcaggctggtctccaactcctggcctcaagcaatcctcccgcatcggcatcccaaaatgctgggattacaggtgtgcaccaacacacccagctaactttttaaaatttttggtagagacaggttctcacctgtcacccaggctggaacacagtggtgccatcatagttcactgcaacctggaaggcctggactcaagcggtcctcacaccaaggcctcccaaagtgctgggattacaggcgtgagctactgcatctggccctcatcttcttgtgcccttattcaccggagttgggtgttctctctatggaaatattttttttttttttttttgagatggagttttgctcttgttgcccaggctggagtgcaatggcacgatctcggctcactgcaacctctgcctcccgggttcaagtgattctcctgcctcagcctcccaagtagctgagattacaggcatgcgccaccaggcccggctaattttgtatttttagtagagacgggggtttcaccatgttggtcaggctggtctcgaattcctgacctcaggtgatcaaccagccttggcctcccaaagtatggaaaggatttccccggggctggacaccgcatagcggaggcctcagtctttgcagttaggctggggttgggcgtgggggagggtcccaccttctcagacttgggcctgtagccccgcagcttgacgctctgctggttaataagcagacccttgcgcacttcgctgagcctgtggtcggtgacctcgcgctggcgcagca

SEQ ID NO: 35252 - DNA, 1405 bp, Artificial sequence
  DNA replication origin
ctgcaacctccgcctcccaggttcaagtgattctcctgcctcggcctcctgagcagctgggattacaggcgcccaccaccacgcccggctaatttttgtatttttagtagaggcgggtgtttcaccatgttggccaggctggtctcgaactcctgacctcaggtgatccacccgcctcagcctcccaaagtgctgggattacaggttacaggctctgcttctaaggaaaccaacccaagacgcttcttacactatcccccgcgccccctggactttcacccagttcctcaataaaaccccctcgcccagggcccaccaccacctgagaatagagagagggacaggggctctgggaacggaggacttggcacccccacgcgcatcctgggcatttgcagcgtgcgccttggcgctaaacgaagccaagcggttgttggtcgagtccaaggacaccttggtagaaatggcaaagaacgaggtggacgtccgggagcaacagctgcagataagcgaccgtgtgtgtgcctcgctggcgcagaaggcgagcgagaccttggagctgaaggtgagcgcattacctgcggctgcgggccagggtgggacaggggaggagacgcggactgggagccagcgtgatccccctgcgcttccctgcccccaggaaagattaaatatgacgttaggactgatgaggggaactatcctccggtgtacgaaatataaccaagagttgtacaccacccacggtctcatcaaggtacggttcggggtgagagccttcgggggtggaggcaggggtgccggtggctggaggctgggtttcaatgcgcttgcacaccgcaccccaccagggtcctctgtcgaaagttcacctggagaccgcagaaaagctggacagacccctggttcgcatgtaccagagacacgtgggcacccaactcccggaggctgcgcgcctcgcacaggtaaaccccctcccccgtacccctctaggcccagccccgccaatggtaaggctccttcctcaagcacatctggaccaggtatgatccccctctcacccaagtcggcctgtccttcaactcctgccacgaagtggggaggcgggggcttcactgggtactgaagtgggtactggcgggggcttcagtgggtactggctcaaataagtcccctcaacccctgtcctcccccctcacacacaccctcactgtccagctctggccttagtctctctaacctgtaaaatgaggagcacgtcagcacccacttcaaatggtggtggtgaggacagatgagttcatgcatgaaaggtgtgtagcatggcacctgcatagaatacccttaaagctgcccagctgttattattaactattattgttattattatttgagacagactctc

SEQ ID NO: 35253 - DNA, 954 bp, Artificial sequence
  DNA replication origin
caggttggagagaccaaggccagagagggacagtgacttgtccaaggccacacagcttgaaactgggaagctggaatttaaatcccagccatctggcacccaaatccatcctattaactaccaggatatgcgcttataacgtgtcctagggtaagtggttgacatacagtaggtgcctaatacatgataattattgttatttttaattataattctcctagagggtgcttggagggagggtgcgtcaggggagagggagggccatggggctgtgtctgctctccgaggtcccagccagcatccaatcagctggctggggcgggggacgctggggtcactaggggtccgcgctgctcttgctgcgcggcggcggcgtgcgcgggtcccagtccttaaccaggcgctgcgcctgctcgtagcacacgtgcggttgccgctggcgcaggcgcaggcgcaccacgttgccgtccacctcatgcccgatgttcttgcagttgaggccccagctgaggttcttgtgcgtggcgagcagctcgtccaggttcttttccaggtacgtgatgtggcactgcagcttgtcggtgccctggatagggagcagggcagacccgtgagccagagcagatggctacctggcgtgggaaggcacacctgcgccaggtgtgtgtgtaaggaacacagctgaggaggggaacacatctgaatgggccaggtgtgcctggaaaaaaaaaaaaccgcgacagggcaggctgagggaggggaatgcatctagtcaagatgtgtaggaaggatcctccttaggaagggtacttaataataacagctcagggccggacgcggtggctcacacctgtaatcccagcactttgggaggccgaggcgggcggatcacctgaggtcaggagttcaagactagcctggccaacatagcagaactctgtctctactaaaaat

SEQ ID NO: 35254 - DNA, 1119 bp, Artificial sequence
  DNA replication origin
tggggaaatagcagaggtgaatgagtgagcttggtgaatgcaaggcaccatgtctgtttccacatggccagagaataaagtgtaagagacagtggtggtgagagttagtccaggtggtgagaggtgagttcaggtgatgggagatgagtctaggtgatgggagatgagtctaggtggtgagagatgagtctaggtggtgagaagtgattccaggtggtgagaagtgattccacgttgtgagagatgagtccgagtggtgcgaggtgaatctaggtggtgagagatgagtctaggtgttgagaggttagtccaggtgaaaggtgagtccagatggtgagatatgagtccagggtgtgagaggtgagtctagggggtgagaggtgagtccaagtggtgggaggtaagtccaggtgagaggtgagtcccggtgttaagaggtgactccaggtgagagatgagtccagaaggtgagagatgaggtgagtccaggtgggctagtccaggtgttgagaagtgagtacagctggtgagagatgagttcaggtgagagatgagttcagttgagatgtgagtccaggtggtaagagatgagtccagtgagaggtgagtccagttggtgagaggtgagtccaggtggtgagaggtgaatccaggtggtgagaggtgagtccaggtggtaagagatcagttcagttgagttgtgagtccaggttgtgagagatgagttcagttgagatgtgagtccaggtggtgagaggtgagtccaggtagtgagagatgagtccaggtggtgagatatgagcccaggtgggtgagtccagctggtgagagatgagtacaggtaataagggatgagtctagttggtgagaggtgagtccagggggtgagagataagtctaggtgatgagaggtgagtccagatgggtgaatccaggaggtgacagtgagtccaggtggtgagatgtgagttctggtggtgagaggtgagcccagtgatgagaggagagtccctttgttgagagatgagtcctggtgatgggaagtgagtccaaatggtgagaggtgattccaggaaagggtgagatcatgaaggggcttgaagtcactttaagggagtc

SEQ ID NO: 35255 - DNA, 1227 bp, Artificial sequence
  DNA replication origin
tgtaattcaagtaggagcaagcagagctgtgagagtccagagaaggaagaggaaagttccaggaggtcaagagggatcctaaaacctacctgggtcaccattgctgttaagcacctagagctctccccaggtcctttgcggatgggaaaatcgagtctcagagaggagagtgagatgccgaaggtcacacagctgggaagggactgaggcaggattcggttctggctccagggctatgctccttccacttcctccctcacaatctttggctcctctttcgtcacagcacttgctgtgtgtgtgtgtgagtgtgtgtgtgtgagagagagagagagagagagagatttaatattcatttctgtcacagactagagctacagaaggacagaaagtcagggagcatgtctgtcttacttaatggattctaagtgcataacacataatagatacccagaaaatatttgctgggtaggtgggtgggtgggtggatggattgatggatggatggatggatgggtgggtgggtagatggataagtaaataggtggatggatagatggaagatagagatgatggatgaaggaatggatagaaggagggctagatggagggatagttggaagatagaatagatggagggatggaagacagagagagataatggatgaatggatggatggatggatgaatgaatgagtggttggatgaataagtggatggatagatagatggatgggtagataaatgggttgatggaagaatgaatgggtatatgggatgactgattaatagatgggtagacagacggatgaatagatgtgtgagtgggtggatggatggatggatgagtggatagataggtaagtggaaagataaattggtggatgggttgatgaataaaaggatggatgttaaattggattgatggatgactagatagatgtgcgggtggaaggatgggtggatgggatgactgattaatagataagtagatggacagatgaatagatggaagggtgagtgggtgaatggatggatagatgatgaattaatggatagatggtagatggatagatgaatgaattgatgggtgactggatagatagatggataaaaacatagatgaatggatggttgatgggggaaggcatagcagatattatgccaccaaaattgtcagagaaggatctagatagaaaaaaaaaaagcattcccggtggggtgcag

SEQ ID NO: 35256 - DNA, 1803 bp, Artificial sequence
  DNA replication origin
aaaaaaaaaaaaagtttgggccaagcattcccggaatgtgcttcctgctggcgcggggcggggggcgggcggggaggcccgggcggggcggggagggcgcggggcggcgcggccggagcccggggcgcgcactcggctcggcccggcccgggccgcagcatggccgagccgctactcaggaaaaccttctcccgcctgcggggccgggagaaacttccccggaaaaagtcggacgccaaggagcgcggtaagcggagatcggtggggaacagggggcgccgagccccacccggcctgggagcggggtcccagggccccgaggacagacggtgggggggatcagggggagccccccgcaccccgctgcagactggggtgcctccagccaggggagggtaggggtcctggaaggaaggggctgggagggaggggggcgcggaccgttatgtgctgctggccggggatgccagcgctgcgggctccttgggaggcccgggagggggcctcgcccacgacaggaaatggggccgcgactgagggcctggagggtggaggggaggaggggctgggaggccgggacactggggcccagtcgggctgggcaaggggcatcgggagccctggaggcgcaggatgggagatgggaggcgtactcctgcaaaggaaagagaggggcggcccgtcaatcagagtagctgccccctccgcctcccacctactaacagtgacggcaactgcgcctgccttagccccaggaaactgtcccttttatacagatggggaaactgaggcacggagcaattgggtcatgtgcccagggccatcgacttaaacagctctttggactatgctacaaacagagaccctagagggtggacatcagaggtggccagaggaggagttcagcagggtagcaagtaaaaaccttagagaaacagctgcgtgggatagggggacccaggaaggaaggagttaaaggaggaaggccagaccattccatggacgtaccccttccccccaggccttcccaaagattcccaatgttcccagggaagggagaagggacagagatgcccaaacacaaacacacacaggaaacagcccaggacatgagacaggagaggagggagggaaggggaagtcccaaagcattgagcgtggggggtctggcctgggctgagggacaagggcccatcccaggatggcgacagagtttggaagacaggagggagggtaaaaggggcaggggactgggagtgactgtgctgcagggaatagaaaacccagctcctcactcctgagcacgtagtgcctgctgtgggctgtatacttttccaaaaggctcctggaagcctccctggacatggaaatcacatccccccatttcacaggaggatactgagcctcagagagggaagcgacttgcccaaggccacgcaggtgcaaagctccatgccacggttattgagagggtagaggaagtggagactggaacgcagtacctacgggccccaggaagcctgacttagaaccctgaggctgcagggatggagtccccttttgggatgccagggactgagtagggggtgctctaagctgataactgagatcgctagcctgtggctgcctattccaaacaaaacagcaggatccaaggaaccatgacttatcaggggccggccagggccgtacacagcatcccacccactgatcaattgcacagggctgctctgcaggcagtgaggggctgggtgggtctcactccccttgctctctgccaggccacccagcccagcgcccaga

SEQ ID NO: 35257 - DNA, 1059 bp, Artificial sequence
  DNA replication origin
gcctccagctccaggtggaaggtgtggtccagccgcaggaagtccggcccccctcgcagtggccctgttcgggccctggcctccccatccacttgcagtaggcagcagaggtccctgggggtggcccccggcgctggccgcagccccccgagaccgtacaggtgcaggctgaggcggccccagagtgcggccgggggtgcccgggctgcgggacccacctcgtagggccggaaggaggtgggtgatgggggcccagctgggcgctccggtgagtccccgtcgctgaggtaaccggccctcgggctccgggtgcccccaggccctgctgccggcccggggccccccacgctgctgtccaggtggtagcggctgatgacggagcccgcaggggcagccctctcgcgctccctgccagcccgggggcctcgcaggctcaggcggcgccgcagttccggcagcttcttcatctttatggagaggcgcctggcggggcccggggacttggtgcgggaggctttggttggggggctggcgggggctgcacctgtgtggagagcagacttcagggtccaggaacctgggcttaggggaggggggtgaggctggtgctcccctgaagggaaggagtgtgaggctggtgttcccctggcggggaggagggtgtgaggctgatgctcctctgggagcatctgacggggtggggatgtgaggctggtgctcccctgaagggaaggagtgtgaggttggtgctcctctgggaggagggagtgtgaggctggtgctaccctgaagggaagggatgtggagctggtgctcaccttggggaaggggatgggaagcttgttcttaccttggggggccaggccctctgactcagctgagccaggctgtggccccgggggctcaggtgctggaggtctggggtcttcctcagggatggggttgtaccagatctcgccggcgggctccccagtgccaggtaccccaggccctaaagaggtgtcctcagctggcttggccccacccagcacccatcggcggctactgggctccaggctt

SEQ ID NO: 35258 - DNA, 1796 bp, Artificial sequence
  DNA replication origin
tgtgggcgcctggcgtgccggcagcagcacaggcccgaagcacacggccaagttctgtggggtcatgcggttgtaggcatggaaggaggagacgaggcgcaggtggtccaggagaagcgtcagcgtggcctgggagagggttgagaggatgtaagtcagacaaagtcaggcccctgtggcacctacctgcaagagactaaggtggctagagtagggaagcaggttcacagtctcatagctgggatgtggtcgggttaagactattaatcattagatgttagtattatgagcctattttgttggagggaagactgaagccaaaggcaactaagcattggaaaagcagagctgccatgaatctcattttacagatgaagatattgaagcacagagagggatgggacttgtctaggttccctcagccaggaacctcccttgtaggttgaaagatcagcgttcagcctgcatttttgacacatcctggctgtgtgaccttgggcaactgtcacctgctttgggcctcagtttccaaatctatgaagtgggatgctaatagcacctatttcttggggatatgatgatgctgccagctcatgcccatctcaggcccaggcatgggtgaaacattctattggtatcagcccactctcaagtcccatcactcccaccaggcccaactcaccctttccacatctggcaggcagctgaggagccctcgggtgccctcagtggtggggggaactctgtttggggggtcccgggccatggcctccagtaccaccttatacaggggctgggtgatgagtggggtgggcaactctcgaagataatccttgaggatgcctgtgaacacagggtcccctctggtcagggcaccactggcttctaaggctaaggagggcacagctaagggggaagaggaggtgggtgaaagcaaggtcagataggaggactgaggtcccagaggagccccaaggccttgaagtgaggcattgaatgggggtgagcaggcaggggagagggggccatgctgaccagtgatgacattgatatcggggtacaggtcctcagataggcagaccgctgcactgtcccgctcaaaggcatcccgaagctctttcttcactgccgctgagccacaaagacggtacagtcccactacctgggggtgggaagagagagtgaatgtcttcttgccggggccacagactaatcagggcccagtggggtgagcactggaattctgggccaggcagcaatgggcattgtgggctgggaggttggaactaccttgacaacctggccttgtaaaccctctgcttggactacttgtcttggctgccatctcctttgacttaggaaactgacacttctttgaggaggctttccatgactaccccaggttttgttttaagctctcccagaccctaggtacaccccaccccaactccagtcccagttatagttttacatttgtgaatgactagagtcgtatcttttcccccatcagactctgagccccaggagggcttggatcctgtttttaaatcaatggatgacccatgggttctgcccagggtgctacagtcaagggggcgccttctgcccttgtctaggttgggattggagctaggagtggctcaggcctgggggtaggggtctggcatctgtacatagggtgtcctgaagagtggtctgaggtctgggggccagagggttggggtggggtgggtgctcacccgcagccctcggcgctcgatctgcccaacgcacttctggatgatgaggggcacctg

SEQ ID NO: 35259 - DNA, 1110 bp, Artificial sequence
  DNA replication origin
ctgccctggctcccatttcccaccagcagccccctagttcccaaagggagatggccaagggtggggctggggcagagggagttggcagtgggcccttccccagcaaggctatggaacatgtcccatctggaatgcagtgaagtgagggaggtggggtggggaggaggctcccaacactcccccgacccctggccccagtgggtgcgcccaagggtgcctacttggtacatacctgggtcgtgtactcggtacacgggatcccagtcatgcctgtgtactaggtacacagaatccagcttggccgaatgggcccacagactcagccccacgggggcactggggggttcacagggggagggagcatctccatatatatattttgtaaaaaataataataataagtttgtttaaatgaatttgtttctatacaaaatgtaaaaaaaaaaagaaaaataaaaataataataattcattcatgtcagagtgtaaggaaatgagaggccagaaggagagagaaaggaatgagggaagagagaagtggggaagaaggaggtcccagactcttcacaagactgagagggtgggtggtagcccccacccattataaataaaggaagactgaagccctgggctgatgacctatctcggtcacgctgcaaggcaaggatgcaggagggttggtggaaagagaagaggatgaaaaagactaaaaggaaggaagagacagagaaagaaaggaggcaggacgggggtctctttaggcccccaagatctaagaactgacgagcgtctcaggccaacacttgcctcttgggggtaacttccggctggggccccagctgggtctgggcctgagcaagggagctgggaacagacaagggaagtggctgggcaggcagtgccccagtggtggtggccatggccccagtggcagtggctgggctaggcgtggattcggaccagtctgagagggagggaggtgaggggctggcccagtgctcaggggattcgggggatggggtcaggtaagggtgctcactgggaacccgcaggaagcgggcctttggggggctgctgtgtgccccagccgccgggtactcctcgccatgt

SEQ ID NO: 35260 - DNA, 939 bp, Artificial sequence
  DNA replication origin
ctgcggggagacgggggtccctgggttgagcagctggggtcccggcgccagtggcagcaggaacgaggggcctggaggggcaggtgggggcagccgggcccaatcgaggggcacagccacagggttcagcaggcccaggctgagtacacatcctccagggggctggcgccctagacccgcccggcctgggccaccaagctgtgccagagacactgcagtggcagtggcagctgcatagggcccctcaagggggaagccaccaggggaagcagggggcccaccgaaaggccgcggggagtccagcgagtccacgggcgacagcgtgaccgagctgtcagccagggggcccgggcaggccagcgtcagcttcttgccccgcccccggggcccctgcggccccagccccgccttcccggggggcctcctgctcttcttggaccccgactgtgccgctttgaggccagggaggaaggcccctggaggacagagcagaggccccaggccgtggggaccgggggggctgcggggcccactgggttgatccagcaagcgcacgatgtcctggtgcagtctctcctgggctacgtcccgcggcagcctgtccaggtggtcggtgatctcacggttggcaaagtggtccaacagcagcttggcagcctcatagctgccctcgcgggcggccaggaataggggggtctcctcctggggggccagaacccacagaggtcagcgaaaccccagctaacagtagcaaagtcttccagcctcttgggggagcccgagagctatgagtttgtacactggagcttgacagacctgggttaaatcccggctgtgctgggggagcctggacaagttctttcctctaaaccacattcatccatcacctactaagtgccagaggtcaaggccaggactagggtgagttaagcgaggtac

SEQ ID NO: 35261 - DNA, 1123 bp, Artificial sequence
  DNA replication origin
cccatgctgtgggacttttttttttttttgagacggagtttcgctcttgttgcccagtctggagtgccaggttcaagggattctcctgcctcagcctcccaagtagctgggattacaggtgcccgccaccatgcccagctaatcttttgtatttttagtacagacggggtttcaccatgttggtcaggctggtctcgaactcctgacctcaggtgatccacctctgtgggattttttaatggcagccaaagctgactcatactgaacccaggggcatgactccatgagctcagaaccggctcagagcactttcaggctaagtccatgctggacaaaataggaactgacagagataaggcagactcgctctctgggctggggggacacctccaggaagagtgcaggctggccaggaagcaggatcctggctggggaggggcaggatggaggggaggattttccacctgcccggagggacccttggggccccagtggcaaatcttcctccctctgaggtcacagaaccacactgagaagaaagggttgcaaagctgggactattctctggagctagggaggtggggacagcggtgccatcccctgatcacgcccatcatccactggggaccccacccagtaccctgaggggaggggtcagaggagggggcaaaggtcagagggggggcagtacctttagccgcttggcctctgggcactctgtgtccatccagtctgtggccacctcccccatcaggctctcacccttggccatgttcctggcggacaatgggaagaggggatgtgagggggacactagaggtgtccagctgggaaggaggatttggggtggggtcagaggtctgagtcaggtcaaggcggggtccagggttcacaaggtccccgtagtcagggacagggagcgagcagggttctcacttcatgcccagcgcgtcctggcccacgggttcccgccggcccttgtgaccagaggccacgtccttgtgcagtgagaagccctcagggaaccagagggtgctgtgctcgcgcttgcgccgggccaccatgacacccaggacgagaatgaccagcagcaagacagcgcccgccactagcagtggcagca

SEQ ID NO: 35262 - DNA, 891 bp, Artificial sequence
  DNA replication origin
gatttggggtggggtcagaggtctgagtcaggtcaaggcggggtccagggttcacaaggtccccgtagtcagggacagggagcgagcagggttctcacttcatgcccagcgcgtcctggcccacgggttcccgccggcccttgtgaccagaggccacgtccttgtgcagtgagaagccctcagggaaccagagggtgctgtgctcgcgcttgcgccgggccaccatgacacccaggacgagaatgaccagcagcaagacagcgcccgccactagcagtggcagcagcgggacgctgggttctggaggctccagcggctcccctaagagcaggaagcagagggcggggcttcagccgagggcggggctttggcctcaggcggggcttcggccgcccccagctccgcccccgccaccccctccccaaggcagggccgcaccccgcacgtcccgcagtgggtacgggaagtccaggcgctccaccgctgacaacgctcccaggtagtcagcggcgctctgggcatcggggaagcagtgatcattctcaggcgactgcaggcagagccggttgtcaatctccagcattactaccgagctgcagggacagcagggagggaccagagggctcaaaaattgcccgatgcaccccctggtaccaagccccactttccctccccagcgcctggctctgaagcgccatctccacccacaggtctccatggcccacctgcatccacctggcatccaaccccactgcacccctaaaacgtgtcttgctgtggtcagcagtccccccagagccatgaatccaatggatattattttttgatcttgcaccgaggctggagtgcagtggtgcgatctcggctcactgcaacttcccctcctgggtt

SEQ ID NO: 35263 - DNA, 967 bp, Artificial sequence
  DNA replication origin
gaggccaaggtgtacggataacctgaggtcaggagttctaggccagcctggccaaaatggtgaaacccccgtctctactaaaaatacaaaaattagtcaggcatggtggcgggcgcctgtaatcccagctactcgggaagctgaggcaggagaatagcttgaacccaggaggtggaggttgcagtgagccaagatcacaccactgcactccagcctgggcaatgggagagaaatcctgtctaaaaaaaaaaaaaaaaaaaatacatatatatatatatatatgtatatatatgtatatacacacacacacacacacacacacgcacgcacacacatagtgctggatggaattaaatgctaagcagaaaaataaagcagaggaagggctgggggtgaccagggaggtgctcactgagaaggtaccaccatttcagcaaagacttgaaggaggtgagggaggagccatgtgggggaagggaacagccaggcagtaggaacagcttgtgcaaaggccctgatatgggatcaagcctggggtatctgggaaacagcagagaggccagggtggctggaacagagtgagtgaggggaaagcagagaagatgaggatgtggagattaagggggtggagggttccaagcagacagagaggtacgcagaggacagaaggggcagggtgtagggatggacagatggactgcctaggacagacagagagaggggcagaagaggggcagagatagtcaggggcacccacagatagccatatagaggagcaaaaagagtgcatggatggacagattcggcccaaggatggacaaacaggagtggaggaagacagttgggtacacagaggaacaaaagcaatttttttttttttttttttttttggtgagacagagatttactcttgctgcccaggctggagtgcaatggcacgatctcagctcacctcatcctccacctc

SEQ ID NO: 35264 - DNA, 828 bp, Artificial sequence
  DNA replication origin
gctcctgccgggagctgcagtgcccggtgggcgtcccatgccagcagacgccccgcgggccgcgctgcgcctgccccccagggttgtcgggaccctcctgccgcagcttcccggggtcgccgccgggggccagcaacgccagctgcgcggccgccccctgtctccacgggggctcctgccgccccgcgccgctcgcgcccttcttccgctgcgcttgcgcgcagggctggaccgggccgcgctgcgaggcgcccgccgcggcacccgaggtctcggaggagccgcggtgcccgcgcgccgcctgccaggccaagcgcggggaccagcgctgcgaccgcgagtgcaacagcccaggctgcggctgggacggcggcgactgctcgctgagcgtgggcgacccctggcggcaatgcgaggcgctgcagtgctggcgcctcttcaacaacagccgctgcgaccccgcctgcagctcgcccgcctgcctctacgacaacttcgactgccacgccggtggccgcgagcgcacttgcaagtgagcccatccacccgatcgatccgtctgtctatgcatccatcccagtctgtttgtccgtgggccctgcctctctttccacctgcccatccacttgccccgtctgtttctctgtgcactctatctgcccatcggtgtgtcccacgtgtctgtccgtgtgtctgttcatccatgtgctctgtctatcttgttcttgtttctatctgcctatgcacttctctgccccgtttgtctgcccttttctccatccaataattacttttttttttttttcccgagatggagtcttgctctgt

SEQ ID NO: 35265 - DNA, 1516 bp, Artificial sequence
  DNA replication origin
agaggcaggcgggcgagctgcaggcggggtcgcagcggctgttgttgaagaggcgccagcactgcagcgcctcgcattgccgccaggggtcgcccacgctcagcgagcagtcgccgccgtcccagccgcagcctgggctgttgcactcgcggtcgcagcgctggtccccgcgcttggcctggcaggcggcgcgcgggcaccgcggctcctccgagacctcgggtgccgcggcgggcgcctcgcagcgcggcccggtccagccctgcgcgcaagcgcagcggaagaagggcgcgagcggcgcggggcggcaggagcccccgtggagacagggggcggccgcgcagctggcgttgctggcccccggcggcgaccccgggaagctgcggcaggagggtcccgacaaccctggggggcaggcgcagcgcggcccgcggggcgtctgctggcatgggacgcccaccgggcactgcagctcccggcaggagcgcgccacccgctcgcaacgcggaccccagaacggctgggggtcgggtttggggagggagggataaaaatgagggtggggagtggagggaaggaggagaagaaatggaggagtggggaaaagaagagtcaaggggagagagggggaagagaagaggtcaagactaaggaaggttgagaccccctcaacctccccatgtcccacccaaccgctcccctttccacactggagaccccacctggcagataagccctgccatcccaggaggccacgccccccaatcaccatcctcacccttttcccttcaaacctccaggaaatgtcggggcagggggttgtttctttgttttttgagacggagtgtcactcagtcgccaggctggagtgcaatggcgtgatggctcactgcaacctccgcctcccgggttcaagtgattctcctgcctcagcctcccgagtagctgggattacaggcagctgccactacgcccggctaatttttatatttttagtagagacggggtttcaccatgttgcccaggctggtctctaactcctggcctcaagtgatcctcccgcctcggcctcccaatgtgctgggattacaggtgtgagctaccacacccggcggaaatgtcagcattttccagaaactcccttcccttcgatgtctcccctaaagccacatcctcctcctagacgccacgcccctactactccagaggccacgcccctactcctcctccaaaggccgccacccacacctacctgggcacagtgacaggtgaaggtcagcccacccccaggacccgggctaggacggcactggcctccatgctggcatggctgggactcgcagggagacaggacagtctgacagcgaggacctgagcgagcgggagcatgtagatcagccacaatgggggaatgacaggcggggtcccaggccagccccttcgccaacgcttacctgagaagccagcatgacaaaggcaacggaaacctccgcctgggtcctgcaggcagtcccgg

SEQ ID NO: 35266 - DNA, 878 bp, Artificial sequence
  DNA replication origin
acctgtgtggacggcgtgaactcgttcagctgcctgtgccgtcccggctacacaggagcccactgccaacatgaggcagacccctgcctctcgcggccctgcctacacgggggcgtctgcagcgccgcccaccctggcttccgctgcacctgcctcgagagcttcacgggcccgcagtgccaggtgggtggagttactggggacctgggggaggagcctgcctgggatcctaggagggagaagccaagtcggggcacagtttctcccagactaccccccaccccacagtactgactctgagtgcttcccctccagacgctggtggattggtgcagccgccagccttgtcaaaacgggggtcgctgcgtccagactggggcctattgcctttgtccccctggatggagcggacgcctctgtgacatccgaagcttgccctgcagggaggccgcagcccagatcggtgagtgggagcatgtgggcgggcgtgtggggccttgggaaggggctcatgcacgtacctcctgctagtgtgagccgaatgggggtgccacagagcctatggggcatgatggggtgtgtggctgagtggtgtgggtgtgtgagcatgtgacaactggccgggatggtgtgtgtctgtcactgtgagacagcagggatggtgtgtgtgctacagggtgtgaccgagctgctgtgagcgttgaaggcatgtgtgtgtatgtcagtgatgagaccttgcctgctggggggatgtgtgacaacctgatggagtgtgggtgcgatcctggggactcattccaccaaggatgttgaatgatctgtgtgatggaggcagaagggggatgtatggggttacctctgttcctgtgccactctcc

SEQ ID NO: 35267 - DNA, 894 bp, Artificial sequence
  DNA replication origin
ggagttcacactgacgtcctgttgggggtggaagagagggaagcagagatagccttgagggactccctgatcccatctccccccacctcccccaaccccagggtccccaccttgatacccacctcccaagctcctggagggaaatgattgaaagcaaaaaagaagctaacatagcgggaggagagagtagaggagaagagagatgagaaggcccatggtgttggtggggctgcagagggaaggtgaggtacacaccctggacaccaggcgggcaggtgcagtggaaacccattccatcgctgctgcatgtcccaccggccctgcacggctgggactcacaggcgtctcgggccaggctctggctgcagcgggggccactccagccaggctcacacacacagcggaacctggcaggggaaggtagtcaggccagggaggtgggccagggagagggggcagtgtctgaggctgagaagggccctcacccgccaggtgcatcatagcagatgccgtgactgcagggctcatgggcacagggatggctcggggggaggcagagtgggggcaaggagccaggcgggcagaggcagcggaagccattttccccatccacacaggaacctccctcgccgcatgggctggaagcacactcattgatctccacgttacaaaggggccctggggagtacacaagcaatctcatctcagaacaaagtcagcagggacaaccagggagggacgacgtgaccccacttagcacacccacacccccgagcaatgacctctttttcataacgcatcagctcttgtgcagattaggacacccgcctcctcaaccaagagctgacttgccccagatcattctggtccccaaacttccatgaagtccctttc

SEQ ID NO: 35268 - DNA, 903 bp, Artificial sequence
  DNA replication origin
tctccagtggagggtggggcagaaacagggctggaggtggggccacagctgggggcgggatttaactgtgggagagtcttggctagggacaaattctggagcttgtagtggggtggagtggaagtaagtggggggtggggggtggggcctgtattgagctcgcctcctgacagcttgatgggcagggcctcagatagagctgaaccaggattggtccgaggcctcacttgtgggcaggcccctggcaagtgggcggagcctgaccctcttggccccacaggctttgagggcacgctgtgtgatcgcaacgtggacgactgctcccctgacccatgccaccatggtcgctgcgtggatggcatcgccagcttctcatgtgcctgtgctcctggctacacgggcacacgctgcgagagccaggtggacgaatgccgcagccagccctgccgccatggcggcaaatgcctagacctggtggacaagtacctctgccgctgcccttctgggaccacaggtgggaccgggggctggggcagaaacagcacacctggaggggcacagagggtttgggaatggtgcatctagtggggcacagtggtggccactccatgccatgttcctggcccctaggtgtgaactgcgaagtgaacattgacgactgtgccagcaacccctgcacctttggagtctgccgtgatggcatcaaccgctacgactgtgtctgccaacctggcttcacaggtgggcaagtggctgccatgagagggggtccttagatcgagggtgaagtcactcgtctctgtgggcctgttttgcccgtatctttgcagactcttgtccaacgaggttgtccgtgctttgccctgagtctgtgctgtctcattggcataaggttgtttcgag

SEQ ID NO: 35269 - DNA, 868 bp, Artificial sequence
  DNA replication origin
agcccccgctttcctaagccctattccctgccccaggcttcacaggaacctattgcgaggtggacattgacgagtgtcagagtagcccctgtgtcaacggtggggtctgcaaggaccgagtcaatggcttcagctgcacctgcccctcgggtgaggacctcaggagagggagcccgaaaagacatgtctgggaaggggcaaaaactccagggtgggaacctgtaaaaccacgttagcggataacttacaatagaaaccatatgttatgaaacattgaagttaatttaaatccaagtaaatgggtttttccacccaaacaaggcggggctggagaggggtgtactgctctcaccctttctgggcctctgctcatcccactccccaccccaggcttcagcggctccacgtgtcagctggacgtggacgaatgcgccagcacgccctgcaggaatggcgccaaatgcgtggaccagcccgatggctacgagtgccgctgtgccgagggtgaggcgggccaatgacagtccgacaagaatcaggaggcggggcttgtgggcgacagggccaataacagacttggggagagcttgggggcggggttgtagcaaggcaggacccagtgacagagttggggggtggagccaataatgcatatagactgacataaggctacgtgtggagccaaagtgttgggctgggcacagggtgcctgtaactgaatggggagggcccaataccttcccctggcacctgccatgtgctcccatctccagtggagggtggggcagaaacagggctggaggtggggccacagctgggggcgggatttaactgtgggagagtcttggctagggacaaattctggagc

SEQ ID NO: 35270 - DNA, 1131 bp, Artificial sequence
  DNA replication origin
caggaagatctgcctatgacttctgcttaccacttcccaggcctcctgtgtcacctggatgacgcctgtgtcagcaacccctgccacgaggatgctatctgtgacacaaatccggtgaacggccgggccatttgcacctgtcctcccggcttcacgggtggggcatgtgaccaggatgtggacgagtgctctatcggtgaggggagctccatcgtctgtgaatgggctgggaaagaggggagaggagggggtcccggccagccacgcccacaccgatcgcactccatccggcaggcgccaacccctgcgagcacttgggcaggtgcgtgaacacgcagggctccttcctgtgccagtgcggtcgtggctacactggacctcgctgtgagaccgatgtcaacgagtgtctgtcggggccctgccgaaaccaggccacgtgcctcgaccgcataggccagttcacctgtatctgtatggcaggtgggtggtgggcgtggcctgggcgggtcctgaggcagggggcggggacagagaagcccgcggatggggagctgagcagaatggggtgtaagtgggtttggagtgggacccttagagactgaagcctggaaggaggtggggtcaggaccagaagggaatactgtgtgattctgggggcttggtcaaatggagtcagtagaacctcaggtgggctgggagtattcttggccttaggacccactcgggaaggggttggggatagagaggcagagtcggggctgctgtgaggtcaaggtgaagcctgcagacaagcttgcagtaagcctgggcaaaggctatggggggccctggggctgggggctggggactggggaaagggcttagtctgaggactggggagaggaggaggggtttgaaggcaaggcctctgcggacacccatgagccttgggccagttgggaccacggctgggtgacagtccagcctgtggctgaaaattaaggttgggctgggagtgtagaggtggggacgaaggctcgggggatttgtcgatgagtaggaagggaagtacctccttccttgcaccccgttcacaccatagggtagcccccgctttcctaagccctattccctgccccaggcttcacagga

SEQ ID NO: 35271 - DNA, 1116 bp, Artificial sequence
  DNA replication origin
gcttccgaggtgagaggggaagagtctggaggggaggtagtcgggggtgtggtcagtcctaaactcaccctgtcctggtccctccaggccctgactgctccctgccagatccctgcctcagcagcccttgtgcccacggtgcccgctgctcagtggggcccgatggacgcttcctctgctcctgcccacctggctaccagggccgcagctgccgaagcgacgtggatgagtgccgggtgggtgagccctgccgccatggtggcacctgcctcaacacacctggctccttccgctgccagtgtccagctggctacacagggccactatgtgagaaccccgcggtgccctgtgcaccctcaccatgccgtaacgggggcacctgcaggcagagtggcgacctcacttacgactgtgcctgtcttcctggtgagtgagccctactcaggagagtcagaggggtgggcgtggggacagcaggccagcccggcggtgaccatccttgcccccttccctgctagggtttgagggtcagaattgtgaagtgaacgtggacgactgtccaggacaccgatgtctcaatggggggacatgcgtggatggcgtcaacacctataactgccagtgccctcctgagtggacaggtgggcactgcggccagagggagcggggaggcaggcctcgggtggacatgcgccaggtggctggactgctgcatctgtgtgccacaggccagttctgcacggaggacgtggatgagtgtcagctgcagcccaacgcctgccacaatgggggtacctgcttcaacacgctgggtggccacagctgcgtgtgtgtcaatggctggacaggcgagagctgcagtcagaatatcgatgactgtgccacagccgtgtgcttccatggggccacctgccatgaccgcgtggcttctttctactgtgcctgccccatgggcaagactggtgagtggccgttttctctgcagggagccatggatggtttttagtgagggcaaataagaagtctgacttgagtgttagaaagattatgctaggctgggcacagtggctcatgcctgtaatcatagcactttgggaggcccaggcgggcggatca

SEQ ID NO: 35272 - DNA, 997 bp, Artificial sequence
  DNA replication origin
cacccgccgtgccccccctaactaggtctgcgctcccccctccgtctcccccaaagcttaggccgtggggcggggcgcgggctggggctggaaccggcccgaccggtcggcgggggcgcgggacgcagagcgtgggaacccgcccggggcgtcgggagggggcccgcgcgggtcgcgccctgcctggcggtgggaccagctatcctcggcgcccagcgcagcgcgccccctcccgacgcgcggtcggggccgcagtggtcgccctgcgggccttggaggaggggacgggagctgtgccctcccctcccaacgccacccgcacccttgcttgctcggccgtgccccgacctgtttcgctgggggccggggtgggggggatcttgcgggtgacgctaaggactgagtcagccgcttgttgagttcagtctcaggcgtctgggacaagccggagggaggacaaccgcgccaggggcggagggtggggggatagaggggggtgagggttggcagcgtcggggggcggagcttggactctctggcttctctaagcccctccctctgaccccgctagtgccccttggagatttccagtcttaagaccaacccctcccagttccaattcctcacactccttggtgggcttggggagggggctgcaggttgaaggaccacccccccaagatgagggtaccaacagtggtgtcagtaccccaaccctccaccctcccatccctgcataagaggctatataagtcccagagaagggacttgagggtttgtgggagccctgctgtctgtccctgtgagtgagagttgctcatttccgcgtgggatgctgtgggttggtgtcttgagtgctggccaggccatggcgtccaattggtgtgtccctctgtgtgtgtagctgtggtttctgggcctgtctgtgtgtgcctgcgtggttgtgtcctggggtctgagacttctttttttccttttccttttttttttttttttt

SEQ ID NO: 35273 - DNA, 923 bp, Artificial sequence
  DNA replication origin
cgggttcccacgctctgcgtcccgcgcccccgccgaccggtcgggccggttccagccccagcccgcgccccgccccacggcctaagctttgggggagacggaggggggagcgcagacctagttagggggggcacggcgggtgaggcgaggactaggagatggggacgaggtctatggaaacgtctgctgccggtgggggggtcttgggggatccatgggtggggtgacagcttgggggcatccttgaaaggacttgagtatttgagaccgtgaaagagactcgtggggggtggagggcgtgtagggagtggttcccacagcccaactcggaggactgagcccgctccactccgggcgatccgggctccgggcgccgcgcgcgccggtgattcacctgtcgaagggcggggcagccgcgggctcattcacctgtcggcagtattccaggcgcggagctccactgcgcaggcgcccggccccaccgctcgccctcccaggtgtgtggctccaggtaaggtcacacttttccccatcccgccccaccttcgcagaccccccagccccaggaaaccctctcagtcaggctcagccctccacaaaggtgagcccgagtgggagatccagccaaaataaatgtaggtgtaacttcaaagcggctcttcttggtctaaaatcaccccagacccacccagcttgggcctgacccagtacttggcacacatgatgctgaataaatgaatacattaatgagtcaatcaatggctactgcgtgaactgctgttattaatgatagcatgaaaggagccaagcatttcctcataaccttgagagacttctccttagagcacctgtttcctgcctccctaccattattatttataataatgcctatgttgagcacatactatattctgagcacttaa

SEQ ID NO: 35274 - DNA, 1342 bp, Artificial sequence
  DNA replication origin
gccaagaagagtgcagagcccctgctcagtttccaatggggaaacacgagaggttgcccaagccacacacatgtaggaagtggtagagacatccatggtgaacacagaggcagagggagaagacaaatcgcccctcccccccgcccccacacacagggcccactggtggctctgagccaggcactcacaggcaggcagcctcccgggagggcagctgggtgcaacgacctccatttgcacacgggcttccgtccaggcaagggggggctgtgtgggggtgaaggaaggtggaggatcagccaggtgcccaggaaccccaggcccaagtgacaaaccccctccctccctccaccaggcaacagctgcatggggatgggggcgtctctgcgggtgcagggagtccccccatccacagttcccacgccccccccccccccgccccagccccagctgttgaggctgcagctgtccctgccagctcgagccctgggaaccacaaagcaggggaaggcaggaggaggggctgtcttatgccagatgtgggggctcgggaagctgccagagctaagatgtgcagaatggggtgtgctgagacaggaagtaagggtgctgagtgttacagggaggtctggggcttcatgcccaggttcaggggtaatagaaggggaaggggcaggggatcctagggccacgggtcttcctttccctgatgggcatctactccagccaggcaggcctgcgtggtgctcttgggagagggaccaaggcatgtacccacgagtgagcacagcatctccagaagcagccagcgctgggcgttgctggaatagggtgtgtgttgaagggaggggcaactggcacaaggcatgtgctgccctgtccaacatcgccatccctaagggctgtgtccctctagggtgtggcatagtctaactgtcctgccagaagggtccagggtgtggctgggtctgagctagtggagaactgtgtgcatgcgatcaggtgtggggacacagtgcgtgtgtccatgcatgctcttgtcagagagagggtgatggagagaggaaggaagatcgagaaaaacacaaagacgtgagaatgaactagaagcagatagaccaggagaagacagagaaggacagaaagaaatagaaagcggccaggcatggtggctcacgcctctaatcccaacactttgggaggccgaggctggtggatcacctgaggtcaggagttcgagaccagcctggccaacacagtgaaacccagtctgttctaaaaatataaaacttagctgggcatggtagcaggtgcctgtaatcctagctactcaggaggctga

SEQ ID NO: 35275 - DNA, 1059 bp, Artificial sequence
  DNA replication origin
aggagaatcgcttgaacccaggagccagaggttccagtgagccgagatcacgccattgcactccaccctgggcaacaagagccaaactccatctccaaaaaaaaattagctgggtgtggtggcgcacgcctgtagtcccagctactcgggaggctgaggcaggagaatcgcttgaacctgggaagcggaggttgcagtgacccgagattgcgccactgcatgccagcctggcaacagagtgagactgtctcaaaaaaaaaaaagagagagagaaggacagaaagaaatagaaaacaagagggtgagttacagaatctgtcgagctgaacctgagcatgggcctacatagtatatgccccttcctcacaggacaagccgactggacaccatcacccacaccaggacctgtgggtgttcgtgaactcacactgtgggtcccataacatgggctatgggccaccctgagctgtaggcaatgtgagccacatgtgtgtgcgtgcacgggcttgtgtgtctgtatgtggatttgggcatgcatctattgtgtctcagttgcagctacatgtgagtctatctgtacatgcatgtcagcgtgggtgtgcccgtgtgtgtatgagctgcacacccatacgggaatgcacagatgtgtgtgctgtctgtatgcaggttgtgtctgttgtgcgtctgtgtatgtgaaccgtgtaaatgggtgtacagctgtgtgttggtgtgacctgtgtgtgcaccgctgtgtctgtgtatgggttggctgtgtctgtccatctgcatgtgtgagctgggtgtaagcatgtccttgagtcttcatctatgtgctgtctgagtgtgtgcaggcagcgtgtgtgccacacctgtgtgatcatatttgtgtgtgtatgtatgtcaatgtgtgagctgtgtgcgtgcagctgggtgtgtctttcctgagccaggtgtgcaagtctgcgagtgtgctgtgtgtgtgcaggtttgcatctctgttacgtgacctagagctatgtgtgccagcgagtgtgtcacaggccatgtgtgtgcgccgct

SEQ ID NO: 35276 - DNA, 894 bp, Artificial sequence
  DNA replication origin
gaggtgtccggctctgggtgtgtactgggggatggggatggggtgcgtgggcgttcacgaggttgggtgtgcccgccactccgggttctgcccgcgtctcactgcatgctcggcctgggtttccgagggtccgcgcgtcccaggctgtgcgggtggagggtgggcagggaccccgggaggccgggcggggggcgggggcgcgctgggccggccccggggcggggcgagccttcgagggctgggggcggggcggcccggccgcctcacttcggcgaagttggcggcgcggaggctggcccgggacgcgcccggagcccagggaaggagggaggaggggagggtcgcggccggccgccatggggccgggggcccgtggccgccgccgccgccgtcgcccgatgtcgccgccaccgccaccgccacccgtgcgggcgctgcccctgctgctgctgctagcggggccgggggctgcaggtgaggggccgggacctggcggatgggacgagggcggcagagggggagtgcaagaacccccaaggccggggctggcgggggttcatgggaggcaggaaccagggtcggggaaggggcgcaggagccccgggcttcatgccagtcctggaggacccagagattcagaatggggaggaccccagaggcccaaggaacagggacccttgagcgattagagctgaagatgaagggacccaggagtccgagactgggagctcgaggtgcggggatcagggactcgaggtgggggggtgcgtacagagttcgggactcgtccccatccaactcacgcctggagtcctgggtaggttatgattgggggcccaggtacttctaggccggggacctctcgcacaaaagcccccccaccccgcccccgac

SEQ ID NO: 35277 - DNA, 1274 bp, Artificial sequence
  DNA replication origin
ctgaatctctgggtcctccaggactggcatgaagcccggggctcctgcgccccttccccgaccctggttcctgcctcccatgaacccccgccagccccggccttgggggttcttgcactccccctctgccgccctcgtcccatccgccaggtcccggcccctcacctgcagcccccggccccgctagcagcagcagcaggggcagcgcccgcacgggtggcggtggcggtggcggcgacatcgggcgacggcggcggcggcggccacgggcccccggccccatggcggccggccgcgaccctcccctcctccctccttccctgggctccgggcgcgtcccgggccagcctccgcgccgccaacttcgccgaagtgaggcggccgggccgccccgcccccagccctcgaaggctcgccccgccccggggccggcccagcgcgcccccgccccccgcccggcctcccggggtccctgcccaccctccacccgcacagcctgggacgcgcggaccctcggaaacccaggccgagcatgcagtgagacgcgggcagaacccggagtggcgggcacacccaacctcgtgaacgcccacgcaccccatccccatcccccagtacacacccagagccggacacctctggagccgggacaaaaaacacagcctcccagaaactctggaaactgaggccagtcacgtcctgagaggctcatggacccacagccacggacgcacaaatgcaagcccatgcaccaagcttccccaggactctgatctaaaacattcacaaacctaaaagtcggaccgggcgcggtggctccggcctgtaatcccagcactttgagaggcagaggtggatggatcacttgaggtcaagagttggagaccagcctggccaacatggtgaaacccggactctactgaaaatacaaaaattagctgagcgtggtggcgcacgcctgtagtcccagctattcgagaggctgaagcaggaaaatcgcttcaacccaggaggctgaggttgcacttagccgaaatcgtaccactgcgctccagcctgggcaacagagtaagaccctgtctcaaacaaaacaaacaaacaaaaaaccgctaaaactcactcagccaggccaggagcctaggactacatttgcagcctcagacctcagacacgtactaggagtcacatgcatgtgtgtgtgttcacacatgcacacacaaactcttcttgctctcagccctcccagaaagcaacccacttcctctgtgactctc

SEQ ID NO: 35278 - DNA, 873 bp, Artificial sequence
  DNA replication origin
tgagccaatcccggcccgttttttttttttttttctggcccaagggcttggcgcgtgcatcttttagggcgggagcggggacctcgggggcttgggctgggattcctcgcatgatcggcctgtccctctccctgcctccagaccactttccatcactcactcactcactcactcactcactcactcattccgagggctgcattgatggtccagtagtagaattctcacttcccattcattcattcatccattcatctgtccctgccaccagttctaggaggggtggtggaagacaaagccgggctctgacactgccagcagggtgtgatcaggccctggtggaatgagcaactggggaggagcacttacctgggggaagggagggaaggctccctggaggaagcagtcttggagctgaaccttgcaaagctgcgccccgacccacagaagcctcccacgccgggatgatttagcatttccgtgagactgggaggaaagtttgggctaggaagacgtgagactataaaaggcttcacatgccagcaggggagggtctcggacagatccgtgtgtctggaatgttacttgggggatggtgagaaggccggaccagaggacgggaaggcctcagaggaggatgggcgtggtccaggcagtggagaacgagactcaagtccaggcactggaagaggagcagatacgctgagaaggtacagaggcaggtttgggatatattcagtctgacggcgctggatcccggggtagggacttagaagcatgttatgggctaaagacaaaaatagcccagcaagcatcggtgtattgtggggcagagaggctcttaagctgggagcgagggtgaagtctccctag

SEQ ID NO: 35279 - DNA, 1541 bp, Artificial sequence
  DNA replication origin
ctctgcccaatcgacgcgatcgtcttccccagaagacccccgcctccctcccgccggcggccgcggaggcggaagaaggcgcctttccgtcgccctagcaaccgtcagcggatctccgtcgcccgggcaactgtcccaggcctcccgtcagcctttgcctgggcccctccggtcactcggacaaccgctacccgttccggtcaaccatcaacccgtcccccgtcaccccggcaaccatcgccggacccacctacccctggacgccgtcctggtcctgtccgcaggcctcctcgccccaaacctccgccgcgggctccgacgtccgcgaccccacgtctcaggggctccctcctcctcctgcccgtcttctcgcctccccggggcggggggcattgctcctcccctggcaggggggccccgggttggacccggctctgggggtccctgctcggtcgggacagtgggaccgccctgtgctgtggccgcgcgcagccccccgcaggcttcggcgctcgcactcttgcgtgggactgtccaaccgccacagggagctcttcaaaatgcaagccatgtcccttccctgctgaaaaccctcccctggctccccttgagaatcgaatccaagctcctcgcagcccctggcgatctggctgtgtggcctcttctctgaagcctcctcgctcactctgccttagcaaggccctggcctgcgtgttgtaactccaatgacccaagcttcttcccgcctgggaccttcctagtcactacttcccactccaccaaaaagtgcatcctagacgggcgcggtggctcatgcctggaatcccagcactttgggaggccgaggtgggaggatcacttgagccgaggagtttgagaccactctgggcagcatagtgagacgtctgtctctataaaaaatttttgggaggccgaggcaggcggactgcttgaggtcaggcgttggagatcagcctggccaacatggtgaaaccccgtctctgctaaaattacaaaaattagccaggtgtggtggcgtgtgtctgtaatcctagctactggggaggctgaggcaggagaatcacttgaacccaggaggtggaagttgcagtgagctgagatggcgccactgcactcccgcctgggcaatagagcaagcctccattctcaaaaaaaaaattaaaaattagcctggcatggtggtgtgcccctatagtcccagctactcaggaagctgaagcaggaggattgattgagcccaggaggtagaggctgctgtgagcttacgtcacaccactgcactccagcctgggcaacagagtgagaccctgtctcaaaacaacaacaaataagtgcatcctctagctagggtcccacctgtgagtcttcagtgaagccttccctgagccctgtcagctctctcctccttaaactctttctggctcacactctgtcactaggacctagaacactgcctggtatctatgttgagtaaaaagatgttgtgccaggcgcagtggctcacgcctgtagtcccagca

SEQ ID NO: 35280 - DNA, 1879 bp, Artificial sequence
  DNA replication origin
acctcttcctccccagcctccgcaccctacccttgtttcctgtccctgtcgcgcccaggtgtttacctggcactcaggtgagtggtgcgctctggctgttttctgtcggagccgcccgcctcttccttcagcgcgtcccacaaatcccgacggcacggaggggccccaggccaagggcgatgggcccctgagccctgacaccgcttcgccgctgctgcaggtgcccctggccggcagcgccgccgtggtcccggagcgcggcgacatgccggagctggtggtgaccgcgctgctggcgccgtcgcgcctgtcgctgaagctgctgcgcgccttcatgtggagcctggtgttctcggtggcgctggtggccgcggcggtctacggctgcatagcgctcacgcacgtgctgtgccggccccggcgcggctgctgcgggcgccgtcggagcgcgtcccccgcctgcctgagcgacccctcgctgggtgagcacggtttcctgaacctcaaggtgatcgcacgggggcgctatcggggctgcggggtcgcgtggggtcgagacggttcaagcctcgggagagagggttccccaggcttcaggctgtgccctccccctagagctcgggcctgcgtctgcactatgtctcggctggacgaggtaacggacccctcatgctgtttctgcacggcttccctgagaactggtacgtctggggccaggggcctgaggcccacgggactcgggggcaggtggagcttgggctcccaagaggcagggaggagggctgtatagatcgggacaagctgaacatagatggggataggggtactgagccagcatacccaggatccctaggccctgaagggacaggacaaaggggtattgaggttgattgaagttccctggattcagggtgtagctggcttcagcctcagcctctgcctctgcctgggattccccatcctccttttaggggaagtttagagcaggaaggagggtttgccaatggttgctgatgtgcgtagggtgcaggtgcaacctgagggccctgactcagcctccctccctcgcccgcctggcaggttctcctggcgttaccagctccgggagttccagagccgcttccatgttgtggctgtggacttgcgaggctatggcccctcggatgcacctcgggatgtggactgctacacaatcgacctgctgctggtggacatcaaagatgtcatcctaggcctgggtgcagacatacccccatcctaggcgtggcctccctcatcctgcacacacgcatacccccgctttctccttgctggaacctacttcccccatccctgcttcagtcctactgggcacctcacttatgcgagctccttgaattcccacaggttactcgaagtgcatccttgtggcccatgactggggtgccctccttgcctggcatttctccatctactacccatccctggtcgagcggatggttgtggtcagtggtgcccccatgtcggtgtaccaaggtgtgtgtgggagtccgggacactgggatgtacttatgtgcaagggggcagggacatgtgtctgtgttttcaattctctgtatacctgtcaacacatcaggggctgagggtgcagcaatcaacccaggtcccttcggttgtggaactcctcattcggaaattaatgacacgccagacccagtggctcacacctgtaatcccagccctccgggaggctgaggtgggaggatcacttgaggccaggagttcaagaccagtctggtcaacatagcaagaccccaactgtctctacaaaaaaaaaaaaaaaatgtaattagccaggcattggtggtgcatgcctgtaatcccagctactcgggaggct

SEQ ID NO: 35281 - DNA, 1571 bp, Artificial sequence
  DNA replication origin
acatagtgcagacgcaggcccgagctctagggggagggcacagcctgaagcctggggaaccctctctcccgaggcttgaaccgtctcgaccccacgcgaccccgcagccccgatagcgcccccgtgcgatcaccttgaggttcaggaaaccgtgctcacccagcgaggggtcgctcaggcaggcgggggacgcgctccgacggcgcccgcagcagccgcgccggggccggcacagcacgtgcgtgagcgctatgcagccgtagaccgccgcggccaccagcgccaccgagaacaccaggctccacatgaaggcgcgcagcagcttcagcgacaggcgcgacggcgccagcagcgcggtcaccaccagctccggcatgtcgccgcgctccgggaccacggcggcgctgccggccaggggcacctgcagcagcggcgaagcggtgtcagggctcaggggcccatcgcccttggcctggggcccctccgtgccgtcgggatttgtgggacgcgctgaaggaagaggcgggcggctccgacagaaaacagccagagcgcaccactcacctgagtgccaggtaaacacctgggcgcgacagggacaggaaacaagggtagggtgcggaggctggggaggaagaggttggaaaggggggaaataaatgggcggggcctagcaggtcctgtgcggggcttagggccggggcggggcccaggaagactcagcagcgggtgggtgagggtctaaaggcggcaattccgggccgggtgcggtggctcacgcctgtaatcccagcactttggtaggccgaggcgggcggatcacctgagatcaagagctcgagaccagcctgggcaacgtggtgaaaccccgtctctactaaaaatacaaaaattagctgggcgtggtggcgggcgcctgtagtcccagctacttgggaggctgaggcaggagaatcgcttgaacccgggacgtggaggttgcagtgagctgagatcgcgccactgtactccagcctgggtcacaacagggaaactccgtctcaaaaaagaaaaaaaaaaaaggcaattccgagcccagacaaaccttaaggaggggatcctggatcttcagttaagtgggcgacacctggagtgaggggcggggcatatgcagagtaggtgcggcctacaagccaaaaaggagaaagagttggaatggtgggcctggcttatgcgggtgggcggggagagggtggatcctagaggaggtgaggcctaacattgggcgaagaaggcgggagcctgggccaatgagctgacggtaggccggggagggggcggtggggtggggtgggcaatgggcaatgagacggagggcggggccgggacctaatatggcgggtcaggagggtctggaagacgaagaagagggacaggcaatgccaggtctaggactaggagggaggcgcgggcggtattagcggctggaggaggcttcgggaggcccggccgacggccgccgcctggtgctacccacccaggggcgcgcgaccctcccttcggtctggctccaaagacctagcagcactgac

SEQ ID NO: 35282 - DNA, 832 bp, Artificial sequence
  DNA replication origin
ggcctacaagccaaaaaggagaaagagttggaatggtgggcctggcttatgcgggtgggcggggagagggtggatcctagaggaggtgaggcctaacattgggcgaagaaggcgggagcctgggccaatgagctgacggtaggccggggagggggcggtggggtggggtgggcaatgggcaatgagacggagggcggggccgggacctaatatggcgggtcaggagggtctggaagacgaagaagagggacaggcaatgccaggtctaggactaggagggaggcgcgggcggtattagcggctggaggaggcttcgggaggcccggccgacggccgccgcctggtgctacccacccaggggcgcgcgaccctcccttcggtctggctccaaagacctagcagcactgacttcacccagctgtggttccaacggcgggtccagcggcctcggcccggcgccgtcctcctgctggcccaacaggcccgccagcccgcccctgtacgtctgtgattggacggcggcggccactgatgttcaagcgacaggtcctggcccgggagccaatctgcaggtgttgaggcccaggctccgagagcgggccgaggaggcgtggataccctgattcctagggggcaggcctggttcccccgaggaggacccggcctatgaatgactggagttctggggttctggccgaaagaggaagtgggacagggccgggtgtgatggggcctagagtcacagagccttgcggccctgctgtccctgcaagaagccagcttctggccaggcgcggtggctcacgcctgtaatcccagcactttgggaggc

SEQ ID NO: 35283 - DNA, 1380 bp, Artificial sequence
  DNA replication origin
cggcggcggccactgatgttcaagcgacaggtcctggcccgggagccaatctgcaggtgttgaggcccaggctccgagagcgggccgaggaggcgtggataccctgattcctagggggcaggcctggttcccccgaggaggacccggcctatgaatgactggagttctggggttctggccgaaagaggaagtgggacagggccgggtgtgatggggcctagagtcacagagccttgcggccctgctgtccctgcaagaagccagcttctggccaggcgcggtggctcacgcctgtaatcccagcactttgggaggccgaggcgggcggatcacgaggtcaggagatcgagaccatcctaacatggtgaaaccctgtctctactaaaaatacaaaaaattagccaggcgtggtggcgggcgcctgtagtcccagctactagggaggctgaggcaggagaacggcgtgaacccaggaggcggaggttgcagtgagctgagattgcgccactgcactccagccagggcgacagagcgagactccgtctcaaaaaaaaaaaaaaaagcagccagcttcttcctcctattttgcaaccttctcccgatatccttgaacattttagggacagccatcacttaaccatagagcaaccctattaagtctaagtagcataatcacattcctgtagtatagatcatgaacctgaaattcgaggatgaagtcatttgcctgaagacatacatcttgtaaaatagccatccgcaaagatgtagggaaaaaggcagcgatctgtggctacacctccccttcctcccggaagcagccactggaacgtttttagctttttctttttttttcagatggagtttcgatcatagctcactgcagcctcgaactcctgggctcaagcactacaacctgtagttgggactacaggcctgtgccaccacactcagctaatttttcaaaaacttttcagagagacgacttgctatattgtccaggctggtctcaaactcctggcctcaagcaatcctcaagcctccacctcccaaagtgggattacagatgcaagccaccgtgcctgacctttatttcttgacttaaccaatgtatgacatcagccactgacttgctcacatcactaccccggacgtgccgttttttgtttccctgttagtttcctttaaaaacactccacttgtcacctcttgcccctttccacctcccacttttatccatatacctttgtactgtcaaggctgctaaacattatactgtcctgggaccataactaagtccatgaagttgccacttaaaggtgaatagtggtttatgttctgcctcagtgaacaatgcatctcaagagccgaatagaccac

SEQ ID NO: 35284 - DNA, 1334 bp, Artificial sequence
  DNA replication origin
aacctctctgttctgcaggacctgaaaatcaagaacatgggctcctgggccagcctagtgcagaagcatccgaccaccccctcctccacagccaagtcatccagcgacagcttcgagcagttccgccgcgccgctcgggagaaagaggagcgtgagaaggccctgaaggctcaggccgagcacgctgagaaggagaaggagcggctgcggcaggagcgcatgaggtgggcgggtgtctgggtggggcatggggactcttggggccacaccagtccccaggctgactgggaccctctgcccaggagccgagaggacgaggatgcgctggagcaggcccggcgggcccatgaggaggcacgtcggcgccaggagcagcagcagcagcagcgccaggagcaacagcagcagcagcaacagcaagcagctgcggtggctgccgccgccaccccacaggcccagagctcccagccccagtccatgctggaccagcagagggagttggcccggaagcgggagcaggagcgaagacgccgggaagccgtgagtctggaggcctggtggggaccctggtctaaggattagctcctgagggagctgggaaagggggactggagcctggacagggaggggcagcgggggagccccgtccctgctggtcggcatgtggtcctctggactcagctgtagggccctgagtgctgtgtggacggggtgagcgctatgaggggtcagccacggggagggctacggggctgactgctggtagcgggtatgagggcttgtagctgcagggtggctaggtcatcctcctgactccctccttcctttctcctccagatggcagctaccattgacatgaatttccagagtgatctattgtcaatatttgaagaaaatcttttctgagcgcacctaggtggcttctgactttgattttctggcaaaacattgactttccatagtgttaggggcggtggtggaggtgggatcagcggccaggggatgcctcagggcctggccctcctgcatgctatgcccggggcaggcctgacgggcagctgaggattgcagagcctgtctgccttacggccagtcggacagacgtcccgccacccaccacccctcacaggacgtccgctcagcacacgccttgttacgagcaagtgccggctggacccaagccctgcatccccacatgcggggcagaggcccttctctccgccaaatgtctacacagtatacacaggacatcgttgctgccgccgtgactggttttctgtccccaagaacgtgacgttcgtgatgtcctgcccgccgggagtctttccccacac

SEQ ID NO: 35285 - DNA, 1162 bp, Artificial sequence
  DNA replication origin
ttcggctcctgtttctgtttgtccttgtcaggggcccctggtggcggtgcgttctgctctgggggccggatcacaggcctcccgacatccacaggcttcatttccggccctggaacataaacagccggtgggccctggcccacctcaccccagtggggcatggtccaccagccccacagcaagcttatgtccaacacgggcctcggggggcctgagccctggctgtgggcagggagagcactcacgctggggcaggtggacgggggccttgatgctctccgggtgcttggggggctccggccgcagcgaggggctgaagggctcgctgcggatgatgggtgagtggatcttctcctccttcaccaccacgaggggctggggctggaccacggaggcagcacgcagctcctgggatggcacaggcacagcggccggtgaggtgggcaggcacccccggccctagcccacaggactatggcccagccctgccagttacctgtttcttaggctggacgttttgctggggtggagactggtgggtcaggctctggaactgtgacatctggggggaatgtatcataagcggggagggggcttcgcggaggtgacctaggagaagggacaaggaatgtgtcaaggggctggcttagaactgctggccctgagagaattgtcgggaaggaaaacgtgggctgtatggagaaactgcatgtgccgcccaggccctgggacaagggtccattagcccagctcaaaaagggtgaagacccacacaagtgactgggcctggtgaggacatgacccctccccgaaagggctgagtgccctgtgtccccctgcatgtggggcataactcagtgtgcagcagagctttctagggccctgtggcaccagtcctggtgtttgaccctcctgtgtgcatcagaatcatctgggatactgtggaaaacacagatcctgacacatgtgggcttggcagggcctgggccctaatactttttaaacccacaaagctcagcctgggttcctgccaactagcctggcccacctggatgattgcagggggtgcaagacccagtcctgggggtggggatgctcaggaccctccccacagtcctattccccactcagcctgcacgcccccacggaagagagaagcctg

SEQ ID NO: 35286 - DNA, 908 bp, Artificial sequence
  DNA replication origin
cctgcagcagctgcagaaggtgcagccccctacgccgctactcccttccgtgaaggtgcagtcccagcccccaccccccctgccgcccccaccccacccctctgtgcagcagcagctgcagcagcagccgccaccacccccaccaccccagccccagcctccaccccagcagcagcatcagccccctccacggcccgtgcacttgcagcccatgcagttttccacccacatccaacagcccccgccaccccagggccagcagcccccccatccgcccccaggccagcagccacccccgccgcagcctgccaagcctcagcaagtcatccagcaccaccattcaccccggcaccacaagtcggacccctactcaaccggtaagtggtcctcacccgtagactctggggaggctggtgctgggcctatagttttgtcctcaggaagccagaagggttaactcatgcttcaggctgcagtgggttcagagctgagcctcagcttggagggggacctggaagggtcattggtgcttcctacagtgtgtgtttatcaggtgtctctcttgcttgtgaggtgagatcactcagaataaggcccctctggtccctctcttgagtcaggagcacgacaatgctaggtgacttcttgctaggtggggaagctaggagcccaggggaggtacctgatgcacctcagggggtcaggatatgcttccaagaggcagtgatcgcagacaggtagcagctaacttagcagagtgaagaatgaagttcagggagagccagaaccatggtgtggggagcactgagctggaagctcaaaaggcagctcagagcccgcccaggacctgtcctcatcgcctgttaccagcctccagcccagtccacgccacccttttcccattgaca

SEQ ID NO: 35287 - DNA, 1076 bp, Artificial sequence
  DNA replication origin
tgaagcatgagttaacccttctggcttcctgaggacaaaactataggcccagcaccagcctccccagagtctacgggtgaggaccacttaccggttgagtaggggtccgacttgtggtgccggggtgaatggtggtgctggatgacttgctgaggcttggcaggctgcggcgggggtggctgctggcctgggggcggatgggggggctgctggccctggggtggcgggggctgttggatgtgggtggaaaactgcatgggctgcaagtgcacgggccgtggagggggctgatgctgctgctggggtggaggctggggctggggtggtgggggtggtggcggctgctgctgcagctgctgctgcacagaggggtggggtgggggcggcagggggggtgggggctgggactgcaccttcacggaagggagtagcggcgtagggggctgcaccttctgcagctgctgcaggtacagctgcatctgcatggaggtgaggggtggggcaggtggctcttcatcctccagcagcacttgggggggttgggccatggggggctgtgggagcaggggtgtttgggtcaaggctggtgacacggctgggggccgggcgggcttgggaggcagggcagcggctcggttgctgggccgtgatggctgctggggtagtgcgttgtgcaaagctggaagaacacaacaccgaggcggtgaggcctgagcacctgtggccccagcctggcctttctgctccatcctgacctcatctggactccagtgctctcctactggcctccctcaaactggcactccctccccacctaccgtggcctcccacaaactccagagcagtaaacagcttccagagagagctttagggcggtgtcatcctgccctatgctctgtgtccccagctcctgctccccatgctcacaatggcccttcacgcctcagtgcagaactcggtctctcacttgcccggccattccccaggcccccaggaaggtggccctgtccccatatcccccaggtgagtgctgtccaggttccatgggaggaatcccatctcatgagtgcatcccc

SEQ ID NO: 35288 - DNA, 995 bp, Artificial sequence
  DNA replication origin
tgcatgacctgtcttgaggcatctcctttaacttccaagatggcctcgagaagccacagatcttccctctagagaccagagcagctgaggctaagaagctgcccagccagagtgctcggacaccacatgggtaaaccgaggcaggaaggggtctcaacccacactggggcaggccacggctcacctggaggagagaccactgcgtgctggttgagatggggtggagtgctgtgctcaggcggctggggcaggtgagggggcagctcaggctgcggcaggtgcaggatgggctgggtgaagtggccgatggggtcaaagacgctgcctgggagctggggctccaggacgggcacctgggtggcaatgaagggtgggggcgaggacttcatcgccggggctgcctgctgcggcatggagggtgggggaggcgggggtggcggctgctgttgctgctgcggaggtggaggcggtgggggctgctggggaggcgggggcggctgctggggcacaggagccggggcctgctgcatctgctgatggtggtgatgatggtgctgcagacagagagacagacagacagacaggctgatgtcaggcaggcagaactggcccgggccagacccaacgtcccacctaatgaaggatgcccctgagcccatgtaccttcttctgctccctcccggggtgccccttcttttttgacttcggagccatctctgcagaggaaaagagaaggtagtgaggctctgggggagaaggtgagtgagctggccttggatgaagaaagacgagaaaacagggcactttcaggagaaggaccagtgaccctgagaaagggcagccgagttcaatgagggatgagttggtcatcacgggagagggagagacatgcgaggcatcacctacccacttgcctgctgcttttcctagcagggactgtgcctgaaaaagcctcccctgccaagcttcagatcaccacggttgcaccggaagct

SEQ ID NO: 35289 - DNA, 1373 bp, Artificial sequence
  DNA replication origin
caatggaagaccacagcccaagcaatagctggaatcagaggaagtggtagggctggcccactgcactgcatgctgctggggcagagggtggggaatacatggtggcctgggacacagctgggaaagcagcacccacccccgccatcctcctcctgcctgtgttccgttgctccctgaactagagcctggccccagaggaccaccccacgcctgcatcagtccacagcatcccggtctatggatagctaccaagaggggtgttcatgtatcacaccccccagcctcaatctagtgactccattcgttttcttctggtgattcatgtctcagggccgttgtcagcggaactaaccccgtagtataagtgacaaaaataggccctttcaggaatttcggctccaatccaaatggaaacacaagaacgggggggggggggggggcgggggcgcgggcctgcaaatcaactaggcaccaaaagaccaaagggaaataatgttcccccaccctgacccactcccgttaaggcagagctgcctgtaacgggccatggacatcagggctgccgggattcctggacccaggagagcagctgctgaaggagctacgccccctctgccccccgccctgagagtgcagagtcctgtgcgggacagggcagcagaaggctgtatttactggtgccagggtgtgggttcccatttcgggatctgccgtacgaaaccctcgcagcggcccctcctgagaggagaagcaccctgccggcccacgacagagctcactcagtgcacacagaaggcaaaggaaagcccctgctggccaggattgggaagacaaaagggagccaggcaaaacccaaggtggggagggcgcctgggaagaggggaaggccagagcccagatagctgcatgagcggccagggctggaccgccagagcctgggagcctgggagccagcggctctgagactgtaaatctcgccctccttcccgccaggacagctgttcccaggactctcagattacttgttgcacaatctttccacttttttttaaagtgggggagtgaaaaaataataaaatctcggcagcggcaggaggggtgtggggcactcgttcaggaaaccaggagcattcccactcctctcccaaagcagaggagcccagaagagggacgcagaggccaagggcaaaggccatgatcacacactggaaatcaggatgtgatggccacagccctctaaggtgtcttgtcttgtgagggctaaagcagcacactgccacgaccacgtcatgtcattttagttaatcaggtcccctgacaatttcagcatctggggtttccacttggtcactcagatcctcagatgagaagac

SEQ ID NO: 35290 - DNA, 826 bp, Artificial sequence
  DNA replication origin
ccaagggacctctggaggctgcttagtacctaacaccagggcctctccccaagtgcccaggggaggcacaattcagagactatttagatggcccatctgcaaatatgcacagtctaaataaaagaggtgcagggggcaggaacccactaggaggtgtgacacaattatgggacctttgagtcagtggggcggctgtttctgggctgcaatttcaacacagcaagatctccccagaaacacccaccagtgcccgggacccaggacaggctctgtgtaaagcacgggcaaggacagggccgctctcctccctggtgaagcagccctccagagtccaggagactcaccttcacaggctgtggggtggccgcgatgatgggtgggtggctctgtacgggctggggagctggagcgggtgggggttgtggctgggggggcactggcgggggcgtctgcagtggctggggaggcaccactgtcatgacaggggtctggacgatgaggtccggggtgacggcagggaaggggtgaggcgtggcctgcacaggaggaggattcggctgaggggtctgggtctgcggaggagtcgatgcttgagttgtgtttggtaccgtggaaacgccaggttttgctgtccctacaaatcataataagacggcgagttagagaccatgctgacatccacatgctggctgacctcgtggggacatacaccacacacagtgaacgcacattcgcgtgttgcatttgcctgagagacgaacatcccagactccactctgccaaacccttccacctgtccctggggctcaaagaacagcagaaaacc

SEQ ID NO: 35291 - DNA, 1184 bp, Artificial sequence
  DNA replication origin
gcgccgttcgttccgggccggggcggcctgcgccgttggtgtcggggcggcggggtcgctcgcggctgtcctgcctttggtgccgtcggacccgggcttgggctggccggcggggcgcgggtggggggcgcgggcgccgcggcggggccggcggtcgggggcgggcggggggcgggccgaggcgcccggcacttcctgccgccgccattttgttaagtgaggaggaggaggaggaggaggaagcggccgccgcggggtccgcggcgcgcccggcccgggtaagtcccggcctggcgcgggggccgcgagcgcagctgtcccggtccgcggtcctctaggcgggctcggccgcggcgctcacgtgggccggggccggcgcgctctccttctggcacccaggtcgttttgcctgggccggggcagcgcgcccccacccccatctcttcaccttcccggcggtccccggagtgctgcggagaaaggggcaggtcccctgcggagggaggtggctgcggctgcacgccggtctgaggccaggcctcagggcgggagcggtgccctggaggcgagcttggcccgcttgacgcacccactctcagcctggcagccccttgctgggcgctttgttttgctcggtccgtgctcgccggcgtccttgcaacggcctattttatttgcagtgttgtgtggtggtggtgattgtggtgatttggggtggggatgtgggggagttgtgattcagcgaaataaaatgatccccctcctcccaaacggaaatagcatggcttcactcggctgagatgcccccaaggcttgggtttgcttgaagatgggaaaccccactctgttgtagtggacggtgtaaatactttagttcaggccggtgcatgagtcatgtgcttctcctgggtggctgacctcccttttactcaagactacgctttgtttttttaagatttttatttgcttgtttacttgtttacgtttcgtgcagcctggtggggtgtctggtcttgggttcatttctctgcgtgtgtgttggatgctagtgaccccttggaatgtatgcctcacgagaattggaatgtctttgcttaccttcgacagggctctaccagtccgtggttccaaaaaccaagtcgcagtttacctcgtaagccagtggctctttggggctgtaacaa

SEQ ID NO: 35292 - DNA, 2032 bp, Artificial sequence
  DNA replication origin
caggcccgagcccgcgtagccccggcctccccgcccccgcgccgcgcggatggcgtaggtggcggcgccccggccccattacgcaatgcaggttacgcggaccgcgccgcgagcctccgccagccgcccagtgtcgtccgccgccccaaagggcaccagtcctcacctgagacgctaggccgcacgccgcccccgccggccgtccgcccgctgccgccgccccctccccgagctgcctgcgcggcgccggggcccgcccgccgctctgccgagctcacaggccgcgctcgcccgcgggcaccgccggcagccgccgcagccgctgccgccgccactgcttcggctcctcggctgcgggagaccagaacaaacagcccagccgccgccgccgccgccgccgccgccgccagcgcactgacgtcaccgcgcacgctgcgcgcgcggccccgcgccgccgccgcccggtgtgcgcgccccgcccccgcgcccagcgcgaacgagctctggagagacagtggctgcgaggtgagtgggggataccgcggactgagggaggagaccccgcagagcgaaggagcgggctgggggaaacgggcggactgcaggctgggcctgcgggaaaagatctgaaggctgagagagacatccaaaatactaagaaaggtctgaagacagaccctcacagggagggaggatggtgaggagggaccccacagactgatggaggaggcggaggagagagccctaaggggggaccccaggtagggaggctgaggcgagagagctgcgatgggggcgccggggctggggtgaagtggaggaaaggaggtgagaggaggctgcgagcaaggccgaggcggatcctccttggctgcccctgggcagggaggtagcacctttctcctcttatgcccccctgttgatcttcttccaacccacctttttaaaaaaagggacatggtcttgctctgtcccccaggctggagtgcagtagtgcagtcatagctcactgcagcctcaacctgctggcctcaagcgatcctcctgcttcagcctcccaagtagctgggactacaggtgtgcaccaccacacccagctaactattttttgtagagatgggatctcacgatgttggccaggctggtctctgtctcctggactcaagcgatcctcctgcctcgacctcccaaagtgctagtattacaggcgtgagccaccgcgcccagctccttcccatccttaagactcaaccccaagtcagaccaggctcggtggctcacacctgtaatctcagcactttgggaggcagaggcaggaggttggcttgaggccaggggttggagaccatcctagccaacagagtgaaacctcgcctctactaaaaatacaaaaattagccccgtgtgggccgggcgcagtggctcacgcctgtaatcccagcactttgggaggcgggcagatcacgaggtaaggagatcgagaccatcctggctaagacggtgaaaccccgtctctactaaaaatacaaaaaattagccgggtgtggtggtgggcgcctgtagtcccagctactcgagagactgaggcaggagaatggcgtgaacccgggaggcggagcttgctgtgagcggagatcgcgcccctgcactccagcctgtgcgacagagcgagactccgtctcaaaaaaaaaaaaaaaaaattagccgggtgtggtggcgcatgcctgtaatcccatgcctgtaatgccagctactcaggaggctaaggcagaagaatcacttgaacccgggaggcgtaggttgcagtgagccgagattgtgccactgcactctagcctgggcgacagagcaaggctctgtctccaaaaaagaaaaagactcaaccctaagtcagctccaggacgtatgtgcctactctacatgtgtgagtccgaggggaaaaaacatcatatgacctcttctagggcttccaaagcaccccacctggccacggaagagcttagtaaacatggggtagttttgagattgctaa

SEQ ID NO: 35293 - DNA, 2113 bp, Artificial sequence
  DNA replication origin
ttgggtacacctcccagacagggtggtggctgggcagaggggctcctcacttcccagtaggggcggccgggcagaggcgcccctcacctcctggacggggcggctggctgggcgagggggctgacccccccacctccctcccggacggtgcggctggccgggcggggggctgaccccccccacctccctcccggacggggcggctggccgggcaggggggctcctcacttcccagtaggggcggccgggcagaggcgcccctcacttcccggacggggcggctggccgggcggggggctgacccccccccacctccctcccggacggagcggctggccgggcagagggtctcctcacttcccagtaggggcggctgggcagaggcgcccctcacctcccagacggggcggctggccgggcggggggctgatccccccacctccctcccggacaaggtggctgccgggcggagacgctcctcacttcccagacggggtggctgctgggcggaggggctccttacttctcagacggggcggctgccgggcggaggggctcctcacttctcagacggggcggttgccaggcagagggtctcctcacttctcagacagggcggccaggcagagacgctcctcacatcccggacggggcggcagggcagaggtgctccccacatctcagacaatgggcggctgggcagagacgctcctcacttcccagatgtgatggcggccgggaagaggcgctcctcacttcctagatgggatggcggccgggcagagacgctcctcactttccagactgggcagccaggcagaggggctcctcacatcccagacgatgggcggccaggcggagacgctcctcacttcccagacggggtggcggccgggcagaggctgcaatctcggcactttgggaggccaaggcaggcggctgggaggtggaggttgtagcgagccgagatcacgccactgcactccagcctgggcaccattgagcactgagtgaacgagactccgtctgcaatcccggcacctcgggaggccgaggctggcggatcactcgcggttaggagctggagaccagcccggccaacacagcgaaaccccgtctccaccaaaaaaatacgaaaaccagtcaggcgtggcggcgcgcgcctgcaatcgcaggcagtaggcaggctgaggcaggagaatcaggcagggaggttgcagtgagccgagatggcagcagtaccgtccagcttcggctcggcatcagagggagaccgtggggagagggagagggggagggggagagctgaaaatcctgtttctatttcagctctcctcagaggtgagctgatgccccctgcttcactcgctgatgctccctgcttcactcccctccttgttttccttctacagaattcagtttgcctgttctgtatgcaagttccgtagctttgatgacgaagagatccagaagcatctgcaaagcaaatttcacaaagagaccctgcggttcataagcaccaagctgcccgacaagaccgtggagttcctccaggtaaaggaaacctgggccccgtcaccgcgtctcttgcccatcccgcaggtgccggatcccttgaaggaggaagggaaatcagaggctatacttggccaaggtttcctttcccagatagagtagctgtgtaagtccctgagtcacagggacaaccgggagctccagccatcgtgctgtgctgccccacgcagctgctctgatagctgcctgcctagccctggcagttgagaaatgcccacatgcgcccacctctcattttactttatgccctctccaatcccacctaggaatacattgtaaacagaaataagaaaattgagaagcggcgtcaggaattgatggagaaagaaaccgcaaaaccaaaaccagatcctttcaaaggtgagttgtcatcccaggatgagtgctttcctggatggtagtaaggcatgtgacaggacccgtaaaacgtggcacgaggccgggcacggtggctcacacctgtaatcccagcactttgggaggctgaggcaggcggatcatgaggtcaggagatcaaggccatcctgtctgacacggt

SEQ ID NO: 35294 - DNA, 887 bp, Artificial sequence
  DNA replication origin
gcccagcagccaccccgtctgggaagtgaggagcgtctccgcccggcagccaccttgtccgggagggaggtggggggatcagccccccgcccggccagccgccccgtctgggaggtgaggggcgcctctgcccagccgcccctactgggaagtgaggagaccctctgcccggccagccgctccgtccgggagggaggtgggggggggtcagccccccgcccggccagccgccccgtccgggaagtgaggggcgcctctgcccggccgcccctactgggaagtgaggagcccccctgcccggccagccgccccgtccgggagggaggtggggggggtcagccccccgcccggccagccgcaccgtccgggagggaggtgggggggtcagccccctcgcccagccagccgccccgtccaggaggtgaggggcgcctctgcccggccgcccctactgggaagtgaggagcccctctgcccagccaccaccctgtctgggaggtgtacccaacagctcattgagaacgggccatgatgacaatggcggttttgtggaatagaaaggcgggaaaggtggggaaaagattgagaaatcggatggttgctgtgtctgtgtagaaagaggtagacgtgggagacttttcattttgttctatactaagaaaaattcttctgccttgggatcctgttgatctgtgaccttacccccaaccctgtgctctctgaaacatgtgctgtgtccactcagggttaaatggattaagggcggtgcaagatgtgctttgttaaacagatgcttgaaggcagcatgccaagagtcgtcaccactccctaatctcaagtacccagggacacaaacactgccaaatctccctctgcgagaaacaccc

SEQ ID NO: 35295 - DNA, 1098 bp, Artificial sequence
  DNA replication origin
tgtgatggtggggatggttgcacaatcctgtaaattaactaaaagtcgaactgcgcacttaaaaacatttaagtgaatgttgagatggggaaattttacctcaataaagctgctaaaaagagaagcgaaggcggccggaaggaaccttgcgagggcttacccgatcccgatcccgcatccgaggctgcgagcggccacatccgtagggcatggtgctgtcatagccgcccgccccctgcatgcccatcacgccgtagtcgggagccatggactgggagaagagggacggaggtggccggctgggggagggccctcccaggccccgtccacccacgtagttcagctcgttccagggcgtggacaggggctcagaggacgcagcggggggcacgaaggggtcgctgcgcatgaaggtgccagggttgctccggtcctggaagcggccctggccccggccccgcatgaagccatcaagggagccccgctcccgggctgggtctcggcattcactgtactgccccccaaagctgccattgcggtcggaccccaggtcgaactcatagtcgtagctgtagctggggcggtaggggttgtgctccggcaggcagggcctggagtcataggactcgaacggctggaagcggaaggagctgcaacagaagcacagcccatcaggggcggtcaccccgatcacccactgccacactccctcagtataacctcgacgcccctacattcaaaacagcaaaccaaaccaccctgcatcccacctaagtgctgggatgaccaaaactgaccaacaccctccctggaacactgctgagcaggggacagagcccctggccacaggaatagcatgatgtagaaaaaaggagtctcggggagcttagccaacaaccacgcccaagccccgccatgaagaaaagcaaggaagtcctactgtaacatcactgaccccccacgagcccaactcgtcaatgccacacccaagagggaggcggggacaggccctccctcaagagtgggtgcccactcccatgcgcacaaaggtggggatgtgtggggtcccgggggagggcttgggtccataatcacctc

SEQ ID NO: 35296 - DNA, 1248 bp, Artificial sequence
  DNA replication origin
cttgtgtggcgaaccagtgcatgctctctgctggcgaggctttctcctttctgccagcccgtgttttagggcacgagggcttcctttgttttctgagcctgagatctgactcaggcaacatggggagtggggctgcttttgagccaccacccggtgtttcaggaggaggccttccaagtcgctcgtggcacataacgtcctctttttcgcttgagttgaggacgtgactttgcaccaatgcttcgctgtgcagttggcagcgcctgcactctggcttctgatgggaactgaccctttacgaggtctctgcctggggcctggcctggccaacctcttggccagcagcccacagtggacgagcttcctggggagcgtgcggcgtcccttcccttgccctgacggacggttggccttgcccgggatagagggcttgcttgtgctcagcctctcagcctagtgctctgtaggagttgagtgagctaaaaacacccaagggtgtctccctgagcgctgcggagggaagccctggccctggggctgtggagggtggagcaaggtgacagctggggtgtcagtgccttcgttctgcaaacagggctcttgtgtgtttctgtttcccctaaggtgcatatggaactggtgtggccagctggcaaggtaagcccttctgtggggggggtctgtgggcgggcaagtgggcctctgatctgaaggccaggcgggtcagcccgtcagggaggtctggcgtggactttctggctctgttcctgaggacgcagtcagccacggctgctgttgtgtatatggggggactgcagagggctgtggtgggcggcctcaggggagcatgatggggaggactgcgaccgtgctttgggagcagcggtcctttgtggggcctgtcagcagccggaactgctgttcccaggctctcagtcacccggctttgaatggggaacaggtcctagcgtctggcatggaaaacccgccgctcggcactgaggctgcccctttctctggccacctcctgctgcctcttggcaggtcacagtgcagtgtgaagtgatgccagcagcactgggtcccacacccgttttccttctccgtggcagcgggtgcccctccccggttgtgtccaccatggacaggcctcgtggctgctgaagtctgacttggctcctccccctgtgacaggttatgaaaactacaattactatggcgcccagaacaccagtgtcaccacaggcg

SEQ ID NO: 35297 - DNA, 1576 bp, Artificial sequence
  DNA replication origin
tgggctttggcgccgtcgctcccggggctctgcgtgcggattggccgccaggccccgaggaggcgggcgggactcggggttggggcagacgccgcggtgggcttcgtgggggcgtcttagacagtgtgggccgtttttgcccctcaccttcggcggagtccttccggcccccagcgaccccggggtttgcactcccggcttcctcttccgaagacgccacaaaatggcggcgctaggggggcggagctacagcgtggggttgtgaggtcggacccggggagctgggtctggggccgcgggcggaccgcgggggccgcctctctcccgacctgccctaggcccgcggggccgtgtagggtctccgctgggctcacgtggcccagggcgcctgtcccggaagccgtcgggctgcgcggggtcgggcctttagtccccggtgcagcgcggtggggccgagtgctgccggcgcgagagtcagcctcgccgggctccagctctgtacccggcgcgtgctggcttgggacaggatggtgaggggcagatgctgagtgttcgtataaagctggaaacctgatgtgccctggggctggtgacattggcagttctcctttaggcagtctgttgtggtggcctggaggggccgaggggctgtgcaggagggaacgtgtcctttccccactaggatttagcgcttggcctgcagtagggccgatcttctcgagctgcctgctccctgcttctggaatcagagccttttgggagcaaagtttgcccacaggggatagttgggacatgctgggtggagctcgactggttgtagagaagctagtggtctgatcctggctgcaggagctcgagaagttgtcgatcttgagaagtggcagggcaaaagtatcccagcaccagaaattgcagagagaggtttcggtcctgaggcggcagcgtgcgcggtgtgctttggtgtcttccgggtcctagcgaaggctcagcctggctctcctggtcttccgcagcctgggtagatttcaccattctttcccttctttcccatcagatcttttctgcaggtattgtattccttcttttcattcttagtttggagaggttttttttaccccctcttcctacctgccgaaaacctttcagacacactggagatagttaagcttccctgatttcttgtgtttccgggagcgttttaaggttaatagtgcgtgccacttacactagagcttcacagagaagcagtctctcgaggttggttacttgctgttggaatctgcagtctgcctttctgctgcacggatgcgaatttagaaggttttgcggtatgacggaggggaaggcgtagcatagcagagggcaaaactcagcagtatgactgggtcaagtctcgtaacccatgagcctagctcccttgtctctgaatggcattccggacaacagggtttgctgggtgcttgcggtgtatcggcacgcactaggcacttagccgggggcgggggagttgttctggtgagggagacatggatatgttcctgcctcatcaaagtgaagtcatttaacaggcatggtg

SEQ ID NO: 35298 - DNA, 794 bp, Artificial sequence
  DNA replication origin
ggagaaggagcaggaggaggctgagggcggtgccctggacgagggggcgcagggcgaagcggcagggatctcggagggcgcagagggcgtgccggcgcagcctcccgtgcccccagagccagcccccggggccgtgtcgccgccaccgccgccgcccccagaggaggaggaggagggcgccgtgcccttgctgggaggggcgctgcaacgccagatccgcggcatcccgggcctcgacgtggaggacgacgaggagggcggcgggggcgccccgtgacccgagctcggggcgggcggagcccgcgtggccgaagctggaaaccaaacctaataaagttttcccatcccacctccgggtttctctgttactgtgccgcgcgggcggggcggggtgggcagaggggcggggtgcgcatgcgcgcgggccgggccgtcgggcaccgcggtgggaccacaactcccattaggccacggagctggatcgtagcagcccgaaaggccagctgggacggcgagggcgggccctcgtgaagaccagccaatgggggcgcgcggaagtagtgacgtgtgcgcctggtcttccagtagtcgatggcggaggtgcgctgaacgcatgcgtgctgtggtcgcctagtaaacggggctgctggtgggccgcgtcgaagacatggaccagggctacggaggtttgtgttggctgctgggtgcggagcggggagggaaggctctgtgcgggcgacgcagccgctgcgcagactgccgccggccgggccttcgtcccgagcgtggttgcc

SEQ ID NO: 35299 - DNA, 1003 bp, Artificial sequence
  DNA replication origin
tctccctctgtcctgtgggtagattgagtgaggcctctggggaggttgtgcagttggaacctctgccagcccgtgagggactgcagtggaggcaggaggaggtggatatggacatttccagctcagtgcaggcagcacagctacagagagaggggtgagagatggggactctgcctgggagaaggtgatatattctgtgggatatggggacctccatgttcataggggccagcgccagattaggttcagaaaccaaatggagatgatacagtgcaagtgttgctggaggagggggttgggcttgaggctcaggagagctgcactgagaggcctgggcttgttcctgtaggcagttaagtttcaagtgtgggattaacaggttagagttggtgttgaactagagacttcaggcctgcacctgggtggggtggtgggggccaaggaggagctcctgcagtctccagacaagaggagaccccaccttgggagtgaaggggagaagagcagttgaaggaagggagccgggggctggcatgtgggagtgatcagaagcctggggtgactctggtttctgacttggggaactgggaggacagcggtgctgccaagattgtcagggagcagggagcagtagggaagtgtgttgtgcggcatggagaacataaggcaagagaatgagcaaattctgtctcattttccagtgttgctccagtgcctagcatggaagccagagtaggtgtttttttgattgaatggatgacatgctgtgttgcaggtgggggtgaaggggctgtgtatgggcagagagcaaagaggcccaggaccaggtctgggccaaagaggggcttggctgtcttcaccctggaggagggtggtggggtttatgaacagatgttcgcatccaaggtgagcatgggaagcagcatttctccatcttcttccatgctcatcacaattcctctctggtctttttcggtgtgatgattctgaacggtggacaggg

SEQ ID NO: 35300 - DNA, 1633 bp, Artificial sequence
  DNA replication origin
caagagcaagagtctgaggcggaggaggcaagcgccagtgcgggagccctgagggcagacagacccgaccaaggggcgtgaagggctcagccgcagacaggcccggcctgacagggccggcgggcagggcagaaggcaggcccgaggctgccacagcccacaggtgctgccatctctcctgggcacggcggtggcctcttggcagctagctggggcggcacaggcgccttggaccttgagtctctgatgagctggccccctccctcaggggcatcaggcccccagtgcaccttggggttcgtgcgccgagtgacctagcgccagagcttctgagcaacggtgccgagcggtgtcaggtctcggcccacagacgccagcggtcgccaggcggccgcagaggggcaggggatgagtcaggccttgggagctgggcctggcgggaagcagggtccatgcacggccgagcaggtggcggctcccaagggaggccagagggcggcgagctggcagagctatggccctgctctcctggcggcagccccacagcgaggcagaggcagaggggtggagggaagctggttacctttccaccatgcggtctcgctgccgctttttctgcttgtcctgactcttcttgcctgcctgcaacttgcgcttggtctggccattttcatcctgggtggttagggcccctgtgggagcagatgggcactgtcaccaatttggctctgccaggacagggcaggccctgcggcctctggctgaatcacccactgtccactccagagggtccatcgagaatagctgtccaagcaaggcctctggccatgagcagggctgggtatcctgggctgtgcagggagtgggtttggcctaggccccaaggagtgggggccaggcgatgacccctccactctccaggacacccatgctctctgtgcagtgggccaggaggaggctggaaagcaaagagggggtatctttgtggggacactggcacatgttcagaggggccaggtggtgggatgcagggaggctgctcacatggccctgcccacccccaaccgggcaccgcggcaacagtgggctgacgctggatttgctgttaggtacctgctggcgctcatcactcaggtggggggacacggaatcccaacaggggctggagaggtgctaagggagaggatacgcacaccagagccgtaaaaactgcaccgagggtcccagatcggacaccagccactgaggacttggaactgcgcgttactgagggaccgagggcagggggcgtgcctggggttccccacacttttactagctgcccccatctgaaggcaaaaccagtgtgctaggcaggggtcaccaccatccacagcctccgcctgggaaggaggaggaagagtgggaagggggtggaggcggcgaaaagaaagccccctgccagcacacactcgggcccacaagggaggtccccaactggccgcatgtctgccgcaaccctgccctcagctgggtccctcccactgtgagcccctggaagagccgccctagcaccaggcaccccaggaaaactcacccttctctggatcctctttgccttcttctctcccatcctcttttccctcctcatcct

SEQ ID NO: 35301 - DNA, 1953 bp, Artificial sequence
  DNA replication origin
ttggggtctttgcaaatggccacggatggcagacatcgccctgcctggctgctagacgggggagtgctgtcctcccctgtgaccagaccggctgccatcagagacctggctgctgcccctgctggaccaggtgggcatgggctgaaggaagacaccctgtggccccagagtcctcgggctgggggaagggcagctagctggctcccggcgccctggctgtagtgtgcccggcccccaaggggcgccggtttgaggttttggcttgctcctttggaaacggaaagaaagaggaagagggacaaggacacagaggaggaagaagaggagacagaggtggcacgagaggggatctggaatgcttttgtgttagggagcctctgccgccgctgtctgtgcctgcggggcctgggactcctcaggtggggggtccgctttggagaagttcatctccaggatgtgccgctgtaagtgccgcacccactcttcctggatggagagggggccctggaattccacctcacagaacctgcatgggggaacagagagagggagtggccagtgctgtgaggagaggcggaagcatagccttgccagcatccctgggcacacctgctgctactcagtgtggacagagccagcccaggaggcgggggaagagggacccagaagtcaggcgtttcccatggacagccacctccactcaccatggggtcatggcagggtctcacagagacccctgcctctgtgctcagaagtcactggtgccaggtaagggctactggcttccaggtacccctgccatctggcagatacatagaatctgagacagtagagggcacagagaagcaaatcctacccaacgcaccaagccccccacctcctcctgtcttcctggcacctaaaaaggcctcacagcacagaggcctggagcccaagctccatggctcaagacgtggctttgactctgacttctgacttggcctgtatggcctcaggcaagtcacctcacgtctcagagtcccagttcgctgctcttcaatgtacttgtggactttggtaagaattaactaagatctacttttttcttgagccagacactagttgagtgcttacttaccatgtgccaggcagttctgagtgctttataaatattaaattcacttactcctcgtaacaaatctgtaaggtaggtttgttatcaacccgcttttatgagtgaggaaattgaggtaaggagcaggtaagtccttccctgaggtcactaagctggtaagtggcagagttgggatttgaacccaggtctcgcaggctacaaagctcagggtgtcagcctttagcctgagccccaccacacccaagggcagccactgaggcgacacctcccagcttccaccaaaccctatcctgttccaaggctccgggtgaccaaggtccactcaggtggtctccctccctcccccaggggcagcctacctgcatttgagggtgtagatgttgcccacgaacttgacaagtgatgtctgggggggccggggcaccagggaggggactggccggactcggggtgggggttgccgcacctcctccagcttctgctgtaggtcattggtgtcctcgcctccccgggctgcggaggcatctggagggcgggcttgtcggcgttcaaattctaaggtggagagggggacgggagatgagtgggaggggtggatgctgcagagacttggaatacacaagagctgaggactgatgctacctggatgggtgggatgggggatggatgggtgaatgggtaagcaactggagaaaggacttaagggccacagcagagcgcctggggagtggctgggtgggcctgacaggtgcccgctgcgctcccgaccctcctccaccaagcactcactgttgatgttctgccgctggtgctcctcagccttcacggtgcctggcggg

SEQ ID NO: 35302 - DNA, 858 bp, Artificial sequence
  DNA replication origin
gagctcacgaggaacctgggccggccctgcacctggtttgcctggccggccagccaggggcgacagcggcagtggggactgcacgggcccaggggccacggtgggaggcccgtcctcagccagggcaggggccaggtctccagccggtggctccttcttgatgaggcacggcttggacttcttcttgaggatctctcgcagtgtgtcgatgggcgaaccattgacggaccactcggtcacacccatctgccgcaggtgtgagcgcgcgtgactcgacaggcccttgcggttctcgaagaactcgccgcagaactcacagcggatgtcgcgcaccggctctgcccgggacgctgcaggggatccagggtagggggaaggaggaggaggaggaggaggagggaggaggagggaggaggagggaggaggaggagggaggagggaggaggaggaggaggaggaggaggaggaggaggaggaggaggaggaggaggaggagaaggaggcggcggctgcgggcaggaagcctccaagctcaaagcccccgtatcagtgccagctgcctagctacccctgtccacaccacccaccagaccgcaacaacctgctccctcatctgggcttccagaggcccttttaacatctggctcttctgcttgttctgtcacttcaaattctagctggcttcaagatacctccctgtatgatcctgggcaagtcactttccctctctgagcctgtttcctccgctgcaaaatggagatgaaaacccctacctcccagtgttactttgggacggtctaaaatgggaacagctctcagcatggggcacagagctggtacacaacacacgtgagcgct

SEQ ID NO: 35303 - DNA, 956 bp, Artificial sequence
  DNA replication origin
cccgtggtgccccccagggaccctcagatgggtgcagttccccatgaagggcccccggcagcatctcccgcttgatctccacccgtatttgttcaggcttcagcttcttgggcaaggagggtgcagccaggcctgggaacatctttcgggccgtaggaggaggagaggcagttggtgagtggcccagggggctgcccggtggtggtggcaacttcttggccaagggtgagatgtgaaggtccgaggggctgcgggcttccagtgagctgccaggacctgcgccgcccatcatcttggccagggcttttgggcttggccctggtgggttgggaggtccaccaggccgagactgggtccgtctcttcaggatctcccgcagcgtgtcgatgggcgagccattgacgtaccactcggtcacgcccatttgccgcagatgggagcgcgcgtggctcgagaggcccttgcggttctcgaagaactcaccacagaactcgcagcggatgtctcgtgctggctctgggcctgaggctgcagcaggaggagaaaggggcagttagcatcgtggaactgccagcatggtcacctgcaggagtgtcctggtcggctgggcgtgggcggcagcagcacgcccacaggttagggtggtgagggcaggtgcaggtaagggagtggaggagcggggctgggggccagatacccggcaggagtgaggggaggctccagagagcacatgggccctcagtcctggcggaggaggatggaaccaagattccattgctctgtgggtcccaacaaggacagggtgaggcagggaggcagcctaggtgctatgtgccatccagacaggggcagatgtgggtgctctgcacactaaaaggcaggatctccccaccttggccttcattctcaggaagggtcatggaggtcaaaggccaagagagagggcctagcagccc

SEQ ID NO: 35304 - DNA, 1641 bp, Artificial sequence
  DNA replication origin
tcattctcaggaagggtcatggaggtcaaaggccaagagagagggcctagcagcccactgccaacaagatctctgggcagaaccggcccactgccaagggcccctgtctactccctgccccagcagggagggggctgtgaccccccccccgggaggggctccagggcccgcagtgaggagggggcagctgaagcgagaacctacagaggttgagaggagacggctccacatcagaggcccagaaaatgccggcggctgcggcggccgagaggtcctgcttcccccaggggctggccatacccgcggccttcagcttggccttcttggccggcggtggggggggaagcaaggagagggccgcggaggtgggaggcggccgccccgggtgggccagggcgccgcgcctgggtgggaggcggatctggacgccgtccctcctgatgagcccgtggagcacgtctatgggggatcccttggcgtccggatcgctgacgcccaggtggcgcaggtgggcacgggcgtggctagacaggcccttgcgggtctcaaaccaggcaccgcacagctggcagtccagctctctgcccccgtcactatctaaagctgcggagacaaaacacagggggggttcacggccgccaccttggccggccttgggggcctgaggtaggagggtctggtgtgatttttggctgctcaggcagttggggggtccaagactcaggccgcagatttcttttgaagtttgggaagcaggacatcctgtttcctgcctagccctttggcatcgaggggagtgtagagagcttaaggactttgggtagacaggcagtgaccaaattctaggtaatcagatactcccagaccctctcccctaggatccctgctatgggagctatttgggggcgatggtggctgctgggctcacgcagccaagggcacacctgctcaaggccctgcccctggaagcacggcagactcagtggaagcaacttcaagggaacataaggtgccaaatggggggctccattgggcagggggtgagaccctggggtcacccccagactctaatgtccacaaagatatgggaaagcctgatgttgtaagggacgtccttgttaaacctgctcactgcacctggagggtttcttcccaaaccctgcctgccgtgcccacaggcagcccaggaggtggggcttcaccggcaggcgcagagagctgcctctgcgtggtggacagccaggaagacttgatgacaggaccaatcgtgggcacctcccatcaggtgatcccctgtctatccaagatgcttccaactaccactgagaaagctaggccacaggaaccctggttaccttcaccgcccctacccacaggcccagagaaagccaagagctgcccctcagtggcgagcatgaccctggcaggctcatcagccgcagtgaggctttcaggggaagatcagcaaagtaaagtgggaggcacgatccacatccaaggcggcccaaaaggagatgcagaggcttgaccaatactctggcctggctggcccaggacatgggagctgtagtccccaccgcccccacccaccctgggccctgtccctgggctacagcccaacctgaggtcccgaccctccca

SEQ ID NO: 35305 - DNA, 1433 bp, Artificial sequence
  DNA replication origin
tgcccagagagatcttttctttgagatcccctgggatgggagtttgggctcagatttgcattagaccccagacctgtccatgctgtagtgtgtggaagcagctgctggcgtctgctgtcagtggcagcctcagtgtccctgcactggactggtgctgggggttatggtggaacctcagctttcctggggtgagtcgcttcgcagagtgagagcggacatcaaggataaggaagaaggccatcttcttagttctgggtatagacagcctgaaatttgtctgggctgagcctgtctccccaacccacaggcctgggttctgaggaaaacgcaatggtggccatggacttgggctctccctcgctccctaagaagagcctgcctgtccctggggccctggagcaggtggccagtcggctgagcagcaaagtggctgcagaggttcctcatggcagcaaacaggagctgcaggacctcaagggtgagtggcccaggtggcatggcaggggatgctggccaggctggttacactcacaggagcactctcgtgccttggggttaatgtggggcccaaggttgcccgcagttttccctctggcaccttgaggcaccaaggttggcactcagctgtcttctctcttgaacttctactgtcctgggcatgcgtggccctgagctgcaccctcacggggcgagggacagcatccagaagcagtgggtgtggtggtccagagctcatactcagacccagctcatttgctgaatctggcctttgctagctgtgcagtctctcgcatgacaccatttcttcgtctgttgatcctaaggttgttattgactagtgacgggccctggggtggactccagggaggtgagaggagcaaaatgaatttggcccttgctcttgagggccattcaagttggggaacggggagacagagaagcagataggcaaggataaaggctctgtggaagagggtgcaggagactgcaaggaccagtgtttcgggcaggagttgagccacagagggtggttagaacttagttcagtgaggcatgtggctgtcaggtcagcgtttgtgtgaacctgttgccagggcaccccgtaggcctgaaaggttgtgaaaggtgtcccactggctggatgacagaagggctctatctcctgctgtgtgcccttgggcacaacttttccctctctgagtctcagtttctaacccttattggcaaagcagccaagctattctctgcgttgttagggtcattgtgaggtttggggggcctgacggaggcaaaacacttccatggagcctgggtgagtgggactctcaggggaggagaagcgggagagctgggccgtgggcctcacagcctgctctcccggcctctgtgttgcccttcagcccagagcctgaccacctgcgaggtctgcggtg

SEQ ID NO: 35306 - DNA, 1759 bp, Artificial sequence
  DNA replication origin
ttgctcctctcacctccctggagtccaccccagggcccgtcactagtcaataacaaccttaggatcaacagacgaagaaatggtgtcatgcgagagactgcacagctagcaaaggccagattcagcaaatgagctgggtctgagtatgagctctggaccaccacacccactgcttctggatgctgtccctcgccccgtgagggtgcagctcagggccacgcatgcccaggacagtagaagttcaagagagaagacagctgagtgccaaccttggtgcctcaaggtgccagagggaaaactgcgggcaaccttgggccccacattaaccccaaggcacgagagtgctcctgtgagtgtaaccagcctggccagcatcccctgccatgccacctgggccactcacccttgaggtcctgcagctcctgtttgctgccatgaggaacctctgcagccactttgctgctcagccgactggccacctgctccagggccccagggacaggcaggctcttcttagggagcgagggagagcccaagtccatggccaccattgcgttttcctcagaacccaggcctgtgggttggggagacaggctcagcccagacaaatttcaggctgtctatacccagaactaagaagatggccttcttccttatccttgatgtccgctctcactctgcgaagcgactcaccccaggaaagctgaggttccaccataacccccagcaccagtccagtgcagggacactgaggctgccactgacagcagacgccagcagctgcttccacacactacagcatggacaggtctggggtctaatgcaaatctgagcccaaactcccatcccaggggatctcaaagaaaagatctctctgggcagaacttgtgagggggaacgtctgcctgtctcgagggtgagggtgggaggcactcagagagggaattcaacacaacaccagggtcaggaggctggagaggccacacagaggcagggagccagggagccagggacagggaggtggcttcacagcacttgtgaggaatctccaccagacaagacagctggggctgcagagacaatgggggaccaggggtggcctactgatcacaagctgggccctaagtggggtaaggtgtctgcacctacagctatctgacttcggacagaaagagttggaatcacagaactttgtgttaagtttctgagacatctatcaggcccgcagcatccctgggtgaggagtgtgtggcagagggaaccaagggtgaattttcacgtctagttgttcaaaggggcctgggaggccagttgaactccaaatttagagttcagagcaaaggatgaaggaactgtgccaaatggggccttggaggcgttcagtgggatgtaacggggcagggggccatgtaggttctatgctcagtttgagtctcgcagaagcaaagagtaggcgctgaggactggggcaccgaggactttgtcaaagtctccgggtcgggtgggcgcgtctgtcagatggggcagggctgaagtgagtttccgcaccggacggaccggaaccgtggcaagggacgctcccggggctccaaagggggcaagggacatctgtcagacggggcaaaggtctcgaggagcggcggaggagtgtttctgaggcctgggaccctgcgagcggcgacagaaggccctgggcccacacaactaaagggcctgggggaggggggggtcccgcagactggacggaaggcgtcggggg

SEQ ID NO: 35307 - DNA, 1577 bp, Artificial sequence
  DNA replication origin
agtatcgctctgtcgcccaggctggagtgcagtggcacgatctcggctcactacaagctccacctcctgggttcacaccattcttctgcctcagcctcccgagtagctgggactacaggtgcctgccaccacgcccggctaatttttgtattttgtttagtagagacagggtttcaccgtgttagccagcacggtctcgatctcctgaccttgtgatccgcccgcctcggcctcccaaagtgctaggattacaggtgtaagccaccacgcctggcccttttttttttttttttttttaaagatggagtcctgctctgtcgcccaagctggagtgcagtggcacgatcttggctcactgcaacctccgcctcccgggttaaagcaattctcctgcctcagcctcccaagtagctgggattacaggcgcccaccaccatgcccagctaattttttttgtatttttagtagagatggggtttcaccatgttgtccaggctggtctcaaactcctgacctcaagtgatccacccctcttggcctcccaaagtgctgggattacaggcgttagccaccgcacccggccccttcggtactattcctacttgcagctgctggggtcctacctagatctgtactctgggctcagtcagacccactcacaagcccacttgaagggcattcatgagcctgcaaaggggagggtggggctatcaaagccccctctccttggaggttcagagaggacaggggctggttgaggtgacacctcaggaaggggcagagtggggacttgacctcaggcttcttgcttctgctaaaggctgctccccaggcactcagctcacccacgtctggcttgtagtgtctcaggggtggctgcgagacagagctggctctgaggatggctaggggtgcaggaggcactggggtataaggaatcagcctacggatgagaggagccaggtttggcactgccctggccttgtccttgggagggagagctatgaccagtctttcagtgaataactgcgaggcagagggttggcggttagggagtgattgggaagatcttggaagccttgccttaagtaaggatatgcaacattagggctaggtctgggcactggcgctgcaaggctgtcgttagaagcctgccccctctccctaagtgggcaggagggggcgggtgccaggttgggggcggggcaatgttccgattctagccccacccaactgtcaaggaacagctggggacaatcggagagagaagcaggcggtgattgaaatgtgttgccggccttgtggggttccctaggtctgcggaacggcaccgtcgggggacggttggataacaggatgatactggagggattcttgtggttggagatcaggtgttttccaggatccccgactcggagatggagactttccggaaagggaatggggcagggtcctagggcaggtcctagctccgcccgtcggggctcttaagagttttgacgttgtttaagggggtctgagtgaggccggaagattcccatcctagggatagagatgtccggggactgggctggggc

SEQ ID NO: 35308 - DNA, 1134 bp, Artificial sequence
  DNA replication origin
ctgaagcacgaggagcggaaatgcccctactgccccgatcgcttccacaacggcatcggcttggccaaccacgtccggggccacctgaaccgcgtgggcgtcagctacaatgtgcgccatttcatctccgctgaggaggtgaaggccattgagcgcaggttctccttccagaagaagaagaaaaaaggtagggcagcttcacttttaaaggcccaggagacacatggctgggcaacccaccgttgatctaaattctctcccttagcgccaagcagggggacactggggcctctgctcctgagagacttgagagccacagtgaaggccacctggtcggtggatgtgtggagacgccccagtcccctggccattccagccactggaggaaggagtgtgggtagaagagtcagcctcaggcagagaatttcattcattcctccattcaacaaatatttactgagcaaggttcccctctgttctggggacctggggacacagcagtggacagaatagcagttcttggactcttggagttcatggcccagtccaggagtggtgggaccccctccaccccacactggccagcttcagaaccccctggggctgcctgtaaggtttgtcagttcccacagtacaaggctctgattccagaagtctgtttccaacaggagcaccctgggtggttctgacattggcagacacaaagcccacttggggaggtgccagtatggtgtttgagtgtgtgtgtgtgcgtgtgtgtgtgtgtgtgtctacgcactaggggttgggggcaaggggtgacaaccaggaaaccaggcagtgacgacaccgagtgagcagggctgagatgcggggaaagctgggagaaccaggaggctggggaagctgagacaaagtccctaactccagttgcagggctcagagaaggctcccagcagagggcattacatccatttgtccatttcttcatccaacaaatatttaatttacagcacttgcgtgatcatgagtaaaaatagtcacgagaaggctattaatcaaatactctcatagatgatggcaggtccacaactggagaagcatttctttttctttctttctctttttaagagacagggtcttgctctgttgccc

SEQ ID NO: 35309 - DNA, 1008 bp, Artificial sequence
  DNA replication origin
aatttagatcaacggtgggttgcccagccatgtgtctcctgggcctttaaaagtgaagctgccctaccttttttcttcttcttctggaaggagaacctgcgctcaatggccttcacctcctcagcggagatgaaatggcgcacattgtagctgacgcccacgcggttcaggtggccccggacgtggttggccaagccgatgccgttgtggaagcgatcggggcagtaggggcatttccgctcctcgtgcttcagtgccatggccggatccccatccaggagtgtgtccagccccagcgggccgcccagcggcgcgtccaggagcaggaagtccagggggtgggcgcctgccagccccagctcctcgggctgcaaccttgggggcaccctggctgccgccatgacctgcggccccagcttcgccacgagcacaatgggtaccatccctcggagctgctgctgctgcccctgggtggcctctactgcctgcagggcctctcggaatgcctgcttcagctccagggccgcctgcgggatgaggctgggggtggctaggggtgaaaagaccccattttcaggggaaaaatccatctcggaggtcagcactacatcctcctcctcctcctcctcctcctcctcttcgctccaagggcgcctccgttcccccagcccttgtgggtggacggtgcttttgtttctcccgagctgtaaggagtagggggtggatgctagtgtggagggaaaggccagccttccgagaggcctctggcccgtgccatgcaggagtggctttgacagcgggaaatctctgatgctcagctgctggcatcctgggccaaaggccaggctggggtcgtatccagcagggttctcccgccacatgggggccaaggacggctcagctttgccaaagtagtccacagcagtgtcagggaagcaggcgtgagcatcctggctagtgcctggctggctggcagggtcttcctcataagcctcgccatcctcctcc

SEQ ID NO: 35310 - DNA, 941 bp, Artificial sequence
  DNA replication origin
gccccggagatccagcccgagggtgacaggggtgtgggggtgagggtgggaggtagggggagtccacgtggatccttccggacctatcgggtcaaaagccaggttcaactcctaggatgcacctgtccacaaagcctagccccgctgcattgtgggggaatgtacggagaccacccctgggccacacggggatgtggccacctctaagaagtctggtggcaacagtcaactctcatctctccccagggaggacccaagcctctcatctgtgctccaggctgcttctgtcttggttctccccaaactggggtgattttgctaatttagtttcacctctcccccagatttggcgattaactttgtggcagaacagttcaaaggaatgttccttttccctgcatctccccctccagaaaggcagagtcaggagaggttgaaggtccctgctaagcctttggccccagtgatcctgaccttcttgggcagaggggtgggagtggggctgggggaggcaaggtaaccactctgggcctcagttttccaatcctgaaattgggggtaattcccaagaactgggaacccctttgtccttatacaacatctgtggagctttctcatagccatcatcaacaaaaggtgcttgcaacacaaggcaggtgcttctttaaatgctcacaaccacaacctttcaatgaccccgcagggtgtagggtgaagatgacacaactcagtgcttgagaaatgctttgtttcacctcatgcctggcccagtgtgggttcttattatgaccatttgagatcggttctcccttccttttcaagatcctgcctccatcaggggatgccaatcacgcttatggaacagatgtggaaatgttccattcagatgttgggtggagaccataaggtcacctttctaagctccatcactgacatgcgat

SEQ ID NO: 35311 - DNA, 1272 bp, Artificial sequence
  DNA replication origin
tggggggaggggcgggggtcttggggcaggtgtcccccctacctcggcgcgtcccgcggggtctcctgccccggggtgcacgggcggagggctcatcccccggaccctggacccccgaggagtgggcccgcgcggcgcagcccccacctctgcgacccctggggggcgtccgggtaggagccccctccccacgctgccaaagtgctccgaagttgcggtcccgcccgttccccgcgggcagtgcccacccagtggacaaccgcaggtgcttcctccgggcctgggtagggacccccaccaagactgccagcccacggaggagccccctgggaatccccaggcccccgagggcagcgcctgcaaccaggcctggcgccccggccccgccccggttgcctgggcccggcctccccaccatctccctggggagggcgcctcattcctgcccttcactttccgccgttaccttgaaggtatttataggtagagaggacaacccccgctccccagggtcctcatttctggaccaggagccctatcgttttctttcgcccgaggactagagcaatcttggttggggggtggggggaatggaggagcccaagctgggtatgcatgagggataatgttggggagaagcgaaagggttaatgctggggtcacttgaggctgtgtgtgtggaggggggtgaaggggttaatgctggagaaccctaaggtcctgtgtgggggaagggttggagtgtgggaaaagtgcagggatcattggtatgggacaacccaatggagaaaagtaaaggggtaatgatgggagactcctgacggtgtataggatcagagtgtacaagtggctgggattcttgccgaggaaacgaaggcatggcagtaggatgtgcgtgtgcatggatgtgagggcaggactggggaaagtgcagctgtgtgtgaatgaagggaggcgtctggagaaatggtaagattgatggaagaagaccaggtggctgagtgtgcatgtgtcaatatgggtaaactgaggcagtgcaggatctgtataaaggggaggagttattgatggggagacggaggcatgctgagggtaggggccattgggatagaaggtgtgtggaaaaggtctgaacaccattagctcccctgggctgggaggtaaactgaggcagtgagctgcaaagttgaggactgaggttttgagggatgggaaactgaggcagattccctttcctccatcccctaagcacttccttctctctatccccag

SEQ ID NO: 35312 - DNA, 1234 bp, Artificial sequence
  DNA replication origin
acccatagttaaaggcattcgataaaaggtattcaccattgttataggcagcacctgcttctcaatgaagcatggattccacccctggcaacctcccaatcccacagtgagagcatcttcctaggccctcctcatgtcacggaggccatgggtctgggaggcggataaaggaagggggtcaggtgtggagatggttggatactgtgtatgaatgattgggtaaatgagtcattcaaatcatgggtgagtggatgggtgaggggtagagtgggtggagcaaacggcagacggataggttagcatttgctggatgtttgacctggtaggtgagtagctgggtagttggttaaccaggttgggtatgtctgcctagaaaaggcctggttcatagtaagaaaaaatttttttcaatgttgtgattatatatatcatatgtacatatgttgaggtctcctgagacgcctgagaactgggcagtggagaaacaataatgaactagacaggactcctggcctcatggaacttacatgttagtggagggaccaaatcaacagacaaactggtggatggatgtttggggggctgggcggaaagatgtgtgtggggatggttgggtacttgcttggttgtatggataaatgagtatttacttgggtgctggatgaatgggtgggtagatgggaagtgaatgggtgggttgagtgggtgtttgggtgaattaataggtggttggaggggtgggtggataggtgattagttcattggataggtagatgagtgattgatagattgaggaagtggatgagatagctaggtggttagatatctggatacatggtggataagacaagacaacaggccatgatgtgtgtctgatggggtagtcctggaagctgtgatcctgggaactgggtggagaaggtgacttaggactgaagacctagggcaactctagggacatggaggtgctgaagtccagtgtggatgattgggaaggagggagtgagcttgtggttggaaggtagctgatggggggcaggggacaaaaggctaaaaattggctgggtggagtcttcaatgacctatcaatgacccatcaatgacccatgggggaacttctctgcaccctccccactcttttagtgcttttagcgagcctaccattggaagtaccagtgggacgataaggagccattggggtgtgggacgacaagggtgttgtcatggtaacggg

SEQ ID NO: 35313 - DNA, 1333 bp, Artificial sequence
  DNA replication origin
tccgtctgccgtttgctccacccactctacccctcacccatccactcacccatgatttgaatgactcatttacccaatcattcatacacagtatccaaccatctccacacctgacccccttcctttatccgcctcccagacccatggcctccgtgacatgaggagggcctaggaagatgctctcactgtgggattgggaggttgccaggggtggaatccatgcttcattgagaagcaggtgctgcctataacaatggtgaataccttttatcgaatgcctttaactatgggtcctctcactgtgtagggaactttacgtccatttcacagataagaaaacgggctcttaagagaatgaaggtctaaggtcacacagctggtgagaacttgtgtacatggccctctccatgagacttctaattaggggagaatttgggagagatgaatagggcttgcggggcaaatgcctaagaattggcaattcttagtgggcaaagaaaccaccaatttcactgaaatcaagattttactgggcaacttcatactgccagagtggttgggaccagcagctccactccccactgtaggccaagtagggctaaggcaaagtcagacaccccccctaagatggctatctctctgctcccagaccacgtgtgatgaggcaggatgggcagctcaggtggtgtctccattgaggcagggtgctttgaggggctggggttgactccaagacccccgcgtccttggagaaagctgcaggctctggacagcatccctcagctgagcctgagttctctccatctcatttaggcggtgctcctggggaggcagtggtgatggggttcagaaaccaggagagggctgcaccgcaacccttgctcctccaccgcccagacctgccccagggctcagatggcaatctcaccaggtttttcagactgtgcccttcattgcttgttaggttgtgctctgaatcaaactctgagctcctgtgggggtcgggggattggggcgaagggcagaggctaaggaagtcccttccagctcctggtgggagtgccagggactccgggggcggagcttggagtggaggcggagcttgtccagactgaggggcggggcctaaatatgcttgaagaagggtcggaccagagacgggaatggttggaatgacaggacctatcaatcatcccttggaggtggggtttggccagtcctgggtggggtcgtgactgagctggagggagtgcccaggctgagatatctcagtgcccggcccagccaggttgggaggggctgatggaggggtggggcctggatgagagaatct

SEQ ID NO: 35314 - DNA, 867 bp, Artificial sequence
  DNA replication origin
gtccagactgaggggcggggcctaaatatgcttgaagaagggtcggaccagagacgggaatggttggaatgacaggacctatcaatcatcccttggaggtggggtttggccagtcctgggtggggtcgtgactgagctggagggagtgcccaggctgagatatctcagtgcccggcccagccaggttgggaggggctgatggaggggtggggcctggatgagagaatctgccagggtcctaggccgaccttcgttgggtgggtccacctgggggcggggcttgccaagaggcagggcctggacagacttattggggcggggccagggtggggcttggccgtgctaggcgtggtttgggggggggggggagggcctggtcagatctaattggatcgggcccacctgggggcggagctaatggagagggctgggctcacccagcacggagcctggagtccagatcctgcagctggccccgcagctgctcctgctgctccgtcaaggcccggatttgggtgctcagcgactccacgaggcgggacagcactttctgctcctcacgcagagcggccacctcgcactgcagctctgccaactgtggtgggagagcagctgtaatctgacccgttgtcccgcccctgtgtctccccggagaccctgacctcccaggcccaagcgctcagcgtcatcaccggcctgcctagttggggaacatccctcctgcggtacagctggggagactgaagctcagagagggtcgggctaggcctggggtcacacagcacagcgagctgggtacttgaacccagacttgcctggcccttcagtcttccccagtcgcgtccctgttcccactccccaggcgcg

SEQ ID NO: 35315 - DNA, 1553 bp, Artificial sequence
  DNA replication origin
ggcttcatgaatagctctctggaggatcatggaccaatcatgcagtgcttctgggactcccaaccttatgactttaacctttatgcccatagcctccccgtctgaccattcattgcctcttctgcaccagctggttccctgcggagctgggcatcgtgttctcaagctggcgagaagcatgtaaagaacgtggctctgaggtgctgggcccccgactggtgtgcgcctccctcttcctgcggctcctgtgccctgccatcctggcacccagcctctttggtttggcaccagaccatccagcacccggcccagcccgcaccctcacactgattgccaaggtcatccagaacctcgccaaccgtgccccgtaggtgctgggaagctaggggtggggggaccatgctgggagtgtgggggtggcaggtgcctgacctgacccacccagcctggccctgatccaggttcggtgagaaggaggcctacatgggcttcatgaatagcttcctggaggaacatggaccagccatgcaatgcttcctggaccaggtagccatggtggatgtggatgctgcccccagtggttaccagggcagtggtgatctggccctccagttagctgtcctgcatgcccagctctgtacaatttttgctgagcttgaccaggtatggcctgaacccagagtagggaggcaagaaggcttgggagactctgaccctggagactttgctcagtctctgtcctgcatgcctcaccagacaacccgagacaccctggaaccactgcccaccatcctgcgagccattgaggagggccagcctgtgcttgtgtcagtgccaatgcgtctcccactgcccccggcccaggtccactccaggtaacctcaagtctggtctggggtctgatgggtgggaacaggaaggagcagggctcagacaggggtcagaggtgaagttggatcattgtgagcagaggtcaagcccagggtcagacgggaatcacaggttatagaaagggttgggtcaaaggtcacagtgtgtttgaggtcggggatgagaggagaggttagggtggagagatgtcaagggtcatagagaggacagtattatagtcagaagtcaaggacaggagccaggctcagtggctcatgcctgtaatcccagcactttgggaggctgaggcaggaggatcacttgaggccaggaacttaagacaagcctgggcaacatagggagaccccatctctaccaaaaaaaaaaaaaattacctgggtatagtggcatgtgctggtagtcctagatatttgggaggctgaggctggggaatagcttgagctccagaattcaaggctgcagtgagctatgatctagccactgcactccagcctgggcgacagagcaagaccttgtctcaaaaaaaaaaaagaaaggacaagttcacgtggggggtgaggtcacttctggtcaggtcgggatggggtcgtctcaggggccagtggagggtctaagatcctccatcccacccctagcctctccgcaggggagaagcccggctt

SEQ ID NO: 35316 - DNA, 1834 bp, Artificial sequence
  DNA replication origin
cgccgagctgtggctggatggcgcgctgctggcacgcacggcgcctcgggccggcccaggccagctcttctgggccgagcgcttccacttcgaggcgctgccaccggcacgtcgcctgtcgctgcggctgcgcggcttgggcccgggaagcgcggtgctgggccgcgtggccctggcgctggaggagctggacgccccacgcgcgcctgccgccggtctggagcgctggttcccgctgctcggggcgccggcgggcgcagcgctgcgggcgcggattcgggcgcgtcgcctgcgcgtgctgccgtccgagcgctacaaggagctggcggagttcctcaccttccactatgcgcgcctctgcggggccctggagcccgcgctgcctgcgcaggccaaggaggagctggcggcagccatggtgcgcgtgctgcgggccaccggccgggcgcaggtgcggcaccgcgacagcgcggaccggggctaccaggggtagaccgataacgcgcttcgggcaggagttggggcgcaggacctgagttgcacctgtaatgggggagacaccttgaaggggtgtgaggggcgtggtccaagtgtcacctgtaagcggcggggcacctagaagggcggggcacctagaagggcggggcctgaacatcacccgtaaggggcggggcaccttgaagggcgggacctgagcgtcagctgtgaggggctggggctgagctgcacctgtaaggggcggggcaccttgaaggactgggcctgagcttcagctgtgaggggcggggcctaattatcacccataaggggcgggacaccttgaagagcggagcctaagcttcagctgcgacaggggcctgagcatcacgcgtgaggggcggggcccaggttgcacctcagcgctgaaaggcttaaatttctgctgtgagggttagaggttccggcctcggttatgagccccagcagtaaggactgggcctaagcatcagctacaaggggcggggcctgtgcctctggtgtgagggaccagccaaggatccgaattcccttggactctgtctgcatctggtgcaacctgacctcctgcccttcctaggcgctggtgactgacctgggcactgcggagctggcgcgctgtggaggccgtgaggcgctgctgttccgggaaaacacattggccaccaaggctatcgatgagtacatgaagctcgtggcacaggattacctccaggagaccctgggtgagctgggggagagtccatgtcagcggcctgctggtgagctaggggacctgggtgaagttctaagagtccttgagcaacctggattctggtagtgagtggtgttttgggggtgctaggatcctggggacaattgggagctccccaagatgttgggtgcctccggaataacctgaagacaaggttggaggatgggtgtggcaggttttggtggtcatggccccagcccctatctggctgtgctgggctgcaggacaggttgtgcggcgtctctgtgcttctactgaggactgtgaagtggaccccagcaaatgtccagcctcggagctgccagagcaccaggccagacttcggaacagctgcgaggaggtcttcgaaaccattatccattcctacgagtgagaatcagggccccagcagcttagcccacccctgcttaccatgctagccccgacctccagtttagggtggccagataaaatacaggagacactcagttaaatttgatgcaataattgggaccatgcttatactaaaaaattactcatttgaaccaggcatggtgactcacgcccgtaatcccaatgctttag

SEQ ID NO: 35317 - DNA, 1666 bp, Artificial sequence
  DNA replication origin
atggctgccgccagctcctccttggcctgcgcaggcagcgcgggctccagggccccgcagaggcgcgcatagtggaaggtgaggaactccgccagctccttgtagcgctcggacggcagcacgcgcaggcgacgcgcccgaatccgcgcccgcagcgctgcgcccgccggcgccccgagcagcgggaaccagcgctccagaccggcggcaggcgcgcgtggggcgtccagctcctccagcgccagggccacgcggcccagcaccgcgcttcccgggcccaagccgcgcagccgcagcgacaggcgacgtgccggtggcagcgcctcgaagtggaagcgctcggcccagaagagctggcctgggccggcccgaggcgccgtgcgtgccagcagcgcgccatccagccacagctcggcgcgcacgccgggtgcccccgccgctgctcggggaagccccttcgcttcgtgcacccacacgctcagccatgtctcttcccgctccacgttgtcctgcagatgggagtgggatggggggaagcgttttggtttgttggcaccccaaagaaggcaccgcaagtgaagcgtggagcctcaaacctgttgcgtcgggtccctagggagattgctgggcctttggggaaagaagtggagccacgggagtccggaggcggttacgcggaagtcttctagcttttctgggctctccgggagagttgggggctccagggcatacaagagtagtactggagtaaagacttcgcgattgcctggcaggcagggctttgggtgcatatggggccgggagtggacagaaggggcgggtctgatattcccggggctggtaatagatggaaggggagtcttggagccgttgcaacgatgcaggcggggcaggtgtgttgggggcgcgggttatggagcgagctggctttgggtagagtggaaggggcgggccaggcctgtgggcggggtctccgtgtcccgcttttctgagggcaatgacctgggtgggctggaattggcgacgaaggtcctcgatccagcggtctctctcagcggccgagcgacaagagaagcagcggcttccacccgtccaggttacctgttgggatggagaatccaacggtgtgatcgaggccaagggtgaagccaaagggtgggaggtgggactgaggtggaatcgaggtggactgtctacacttacctgaaagcagtggggctcccccaggaggctggggtgcagtggccagatccgcacatcccgctcggcacccaggtccagttcagagagtgtggccagcgactccctagagcccagagcactggggggtctgggaagggggtgggtgagcacaccgtcattcctgcctcttccccatcccccatagcctgaagggtagaggaaggccaggaaggacttcaacccaattcggatcccgtttctcccccgtgccccccccaccccccgccatggcacctccttgcttttaggataaactcaactcctggtgacctacatgaccaagctgggtccagatgttgtcacctcatctccctccacctaatccatcactttctgagctccagcctccctggccttgttttattttatcctatttatttatttatttatttatttgagacagagtcttgtttagtgcggtggc

SEQ ID NO: 35318 - DNA, 1438 bp, Artificial sequence
  DNA replication origin
ggtgtgatttcagctcacggcaacctctgcctcctaggcccaagtgatcctcctacctcaagtgtgtggcaccactcctggctaattttttgtatttttgttagagacggggttttgtcatgttggccaggctggtcttgaactcctgagctcaggcgatccaccctcctcagcatcccaaaatgctgggattacaggcatgagccaccgtgcctggctatgcctggataatttgaaaatttttttttgcagagatgagatttcactctattgcccaggttgttttcgaactcctgagctcaggtgatcccctcgcctcagcctcccaaagtgctgggattacagatgtgagctgccgtgccctgccctgggatctcctctcaataaactacttgtactggaattattgtcttaaggtctgcttttgggaagacccaaactaagacaatgcatgatgatgcatgaacagagactttgtttccatgctgtctttattggaggtctgtggctggcagggtccttgggggtggctccctcctggatctcttagagacactcctggcaggtcttggcttaacagtctggaaaaagacaagggagtgtgaggcttgggggtggttgtggtatgtggctgggtctgccctcctggtggtggaaccctggatcagggaggggacagtggcccaaagtgagagagtgaggacaaagccaactataggccgagatggatgtgctagtcaatagcttaatgaaatggagtggcagtatgtaggtagcacgagattgtccaggtgtgattctaaaattgttttagtgatggcgatcaagggctgggatgaggtcatcaggtcaaagttgtgctggcataagagttgtcatcaggggttaaggagtcagggacgaaacaagcaacctcagagttgagattgtctggacagagaattgcaacacaggattaaggactggacagaggttgtgaaggcaaaaggtcacagcctaggttcatgttgtgtggacagagggccttcgggtaggggcaggggtgaggtcaaggttcggcgggccaggatgaggtggtgcagcctgacaggttgtgacttgggtagagaagtcatgaaggccaggctgaggttgtgagggcagaggggctgttggcaggtgtcagggtccatgccttggctggaaaggtagaggtattaggagctggggaaaggacaggctggctgggtctggggctgagctgaggctgcataggcagaagtcacaggatcagggatgttgcccgcagagtgacccgcaaaggctgggcctaggtttcctgaatagacgtgccgccgggaagttgggggcctggctgaggctgtgcgggcacagctgttacaggcagggggcaggggcctcgtggagcttgtgtagacggaggggcggcgggccgtgt

SEQ ID NO: 35319 - DNA, 957 bp, Artificial sequence
  DNA replication origin
cccacctcgtcctcccaaactgctgggactacaggtgagacccactacgtccggcccacccccaattttttttaataaaaataaaatagatttagttgagtatagttagttggtccccagggaggaccaatgtggggtgagactggaccctttccaaatctgagaggaggctgagggatggtctgtatgtgcgctttaatgcgggtggaggaacaggcagagaaacagttcctgaccccagccttcaacccccttgcctgtaggatgcccggccatccacccccgctgccgctggggagcggcgccttatcggggccgcccgaagctgctgcagctgccgctgggattcttgtacgtgcatcacacctacgtgcctgcaccaccctgcacggacttcacgcgctgcgcagccaacatgcgctccatgcagcgctaccaccaggacacgcaaggctggggagacatcggctacaggtaggaggggcccgaccggggagggggcggggcccacgttcggggatggggtctgagtgggcggagcctgatgcaggggaccgggcttgaacccgaggaaagctggcaagaccaaggaggagtcctgataggtagagcaaagttggagaggtggcgtggcttaggctaggggcggggccttaatagggaccgggaatagctaaatcatgggactccagtcagggtagagaactagtacaggaggcgggatctgggagaggagcgggacctgtggcagagtctgggtctggggccaggcagagatggcctaaaacagacaaggaggcctggtgcggtggctcccgcctgtaatctcaccactttgggaggctgagaagagaggatcgctggagcccaggagttcgagaccagcctgagcaatataggaagacacccccccacaccacccatctctacaaacaaaaaaaacttaaaaaggccagg

SEQ ID NO: 35320 - DNA, 927 bp, Artificial sequence
  DNA replication origin
atgcagtcccagctcaagtgtcacatcctccacgtcgccttccctgacctcatgtctgcctcctccaagcagcaaaacttcaattacttgtgtctcctcttcttcaccaggagacatgccccacacctcccacgccctctttccaagggcccagcaccaaatgagagcgtattcttagaaaaaagagggataaggaagtcttctaagtttaccacctgctggggcaagtggagattcttgtcttctcatctgtctgcccacgtgctaaggtcagccacacatccacccaccgactccggaggacagacacatccagaggcggagctgactctgtctccacacatctggagtagacgggttggccaaggacaacatcctggtcagagggtcaaggtgtctggcagtgggtggggaggagtggcggagggcgggttggcggggagcagaaccagtctggtgctgcttgttgaggttggaggtcttcctggaggaagaggctgcagagcctccaggggtgggtgccggggaagcttaggcccaggatccagagagaggggaagggctggttcccaagggctggtggagccagagaattcctgagggccccagaggaggcttctcgggggggtcagtggggccccagggggtgatggtttagagatcgctgtccaagcttgggagcaaacctggaagtaagggccatggggggtgttggtgtgggaggagtgtggtccagagcgggacttgggcgctaatgcggcccagcagtggcaggagggcggggagcctgatggtttgggacttctaggtgtccaagtctctgtctctcttcatctctccatctcagtctcagtctctctctctttccatcgctctccacccctccacacgcctatttcttgttctctccttttctagggggcagcg

SEQ ID NO: 35321 - DNA, 1210 bp, Artificial sequence
  DNA replication origin
gatggtttgggacttctaggtgtccaagtctctgtctctcttcatctctccatctcagtctcagtctctctctctttccatcgctctccacccctccacacgcctatttcttgttctctccttttctagggggcagcgctggagtccccgcccagaaccctgcgggagcccggggcgggatgtccgggggcggacccctcggcacggccgggcggggttaaagggttgggccgtgggacggcgcggtcagatcccaggtagtggcgccggtggatccggatcgagggcaggaggctgagacccgcgggtgagtgcgcgcgtggtgagggctgtaacctgagcgcggccgcggcgctgcgctggaacccgaggctcgcgcggttcggtgctggcggggcaagggcgaaggtctgcgcgcggcggcgggcggggcgcagccggccacggggacccccccaggacccaggacggggctgcatgcccggggcactcgtggggagaggggcacgtgggtgtgtccccgacgtttgctgcatttgtgagttgttttctttttttttttttctgtgtgcgcctcggagtcctaggcgcatccttttctctgggtatctgtgatgggcagggggcctccaaaagacccctctggtagtcaggacatcccagatgggttcaagccccgccctgggacgcctctttggggctgaatggggattcgccctgagatttcaccactgcacgttgtcttgacggggaggttgtagtacattcaaccgatggggttaggcttgtggttcaactgctatcaggaaccctctgcccatccatgccagacgcagagcccctctatgaaaagacggtgttcttctggccccgagagttggctctgagggttgtgtgaggtcctggggttggtcccaggtgatcttcgtctgatagatgctggaaggaagatgttttctggcctcccaggggcctggcccagcctgggtatgcaagttggccgaggctggccacctggggagtcgcaggctggagaggcctaggctcagggcatctctcctggttcatctgcccgctcacagctcattcatgcactcattgtgagtctcaccgccctgtaggcaaaggagatggccagggctggctgcgtacccgaaattcctcctaccctgtgccccttgctccaccccttatttctaggtcctggagc

SEQ ID NO: 35322 - DNA, 834 bp, Artificial sequence
  DNA replication origin
aaccgtgataaaaggccgggcacggtggctcacgcctgtaatcccagcactttgggaggccgaggcgggcggaacacgaggtcaggagatcgagaccatcctggctaacacggtgaaaccccatctctaccaaaaatacaaaaaaaaaaaaaaattacctgggcgtggtggcaggcgcctgtaatcccagctactcaggaggctgaggcaggagaatagtgtgaacccggggagcggagtttgcagtgagccgagatcgcgccactgcactccagtctggcgacagaatgagactttgtctcaaaaaaaaaaaaaaaaaaaaaagaaacaaaacaaaacacagaaaaaaaaaaaaaagaaaaaccgtgaaaacaaaagagtctaaatttcatttagagcaaagtggggagccatgggagaattttgagcagggaaggttcatgatctgatttaatttgaggaagatccctctggctgtgtgtgcagaatggacttcttgcagggagaaaggatggaactcaggggaccagtgggaacgggccactgcagtgctggcctgctgtgggttgggatgatggggatggagaatgatgaatggattctgaagatgtttaggatggacaactagcaggacccggcaacagattggatgtggctgaaagggggaggaagagggtgaggtgaatctgagagtctaggagatgcccccagggggatgttcaggagctggctggacctggcagtgctggacactgagacatgggaattgcctttgagataggatttctgaaaccacgggaggggtgagatcctcaggatgtgggcacagaggaa

SEQ ID NO: 35323 - DNA, 989 bp, Artificial sequence
  DNA replication origin
cccttgtaagccccttccttcctcccttgcccaaagatcctttgctgagtgttctgtttttgcagaataaaagcaaaggatgcagacttaccccaccctccacccctagctcagccagatccttacacgtggagcccccagcatgggaatgaggggctctgcaactgagcgaagctgcgggctaggaggctggaaagccatttatcctaggacataaactcagattttgggggtcagtttgtgtgttcatttatttcatcaacagatcacatattgtttgctggcactgcttcagaaccacaggcaggccctgttttctgccttcttagggggtgggggacagatgttgaacaaataattccacgtgtaaaggtttatttacaacccaggacaggtgctccaaaggagaggccccgggtgctggatgaatatagcagagggatggggatgggtcagggagagcttctccgatgctggaatggaagttgagtgggtgacaaggggagggaagagtattccaggcagaaggaacaacatctgagaataccctgagctgagggagaacagagtgtgtttgaggaactcaccaggggccaggtggttggatctgggaagtgggggcagaatgaaggaaggggccaaatgcacaggctttatgctgagggcaatagggagccatggagagtgtgtgagcgggatcaggacaggacatggccagatctagggctggcagggaggtgacttgcggggttgggaccctgggaaagagggaagctgaggtccagacaacaggaagggccaggattggggtgactatctagcagtgggggctgaggggagggaggtggtaagggtgatgctcaggtatttggctgagggaacttgatggtagagtagtccctgatatgggaatataaaagatgggggccaggcgtgatggcttacacctgtaatcccagcactttgggaggctgaggctggaggattgc

SEQ ID NO: 35324 - DNA, 1238 bp, Artificial sequence
  DNA replication origin
ctgggctggccaaggccggagcccactccctcagcttgcagggaggtgtggagagagaggcgcgagcgggaaccggggctgcgcggggcgcttgcaggccagctggagttccgggtgggcgtgggcttggcgggccccgcactgggagcagccagccggccctgctggccccgggcaatgagggacttagcacccgggccagcagctgcgtagggtgtactaggtcccccagtagtgccagcccaccggttctgcgctcaatttctcaccaggccttagctgccttcccgcggggcaggcctcgggactgcagcacgccatgcctgagccttcccccgtctccgtgggttcctgtgcagcccgagcctccccgacgagcgccgccccctgctccagggcgcccagtcccatgaccacccaagggctgaggagtgcgagcacatggcgcgggactggcaggcagctccacctgcagccctgctgcgggatccactgggtgaagccagctgggcttctgaggctggtggggccttggagaacctttatgtctagctcagggattgtaaatacaccaatcggcactctgtatctagctcaaggtttgtaaacaccaatcagcaccctgtgtctagctcagggtttgtgaatccaccaatcgacactctgtatctagctgctctggtggggctgtggggaacctttatgtctagctcagggattgtaaatacaccaatcggcactctgtatctagctcaaggtttgtaaacacaccagtcagcaccctgtgtctagctcagggtttgtgaatgcaccatggacactttgtatctagctgctctggtggggccttggagaacctttgtgtccttactctgtatctaactaatctgatggggacgtggagaactttgtatctatctcagggattgtaaacacaccaatcagcgccctgtcaaaacagaccactgggctctaccaatcagcaggatgtgggtggggccagataagagaataaaagcaggctgcaggagccagcagtggcaacccactcaggtccccttccacactgtggaagctttgttcttttgctctttgcaataaatcttgctactgctggctctttgggtccacactgcttttatgagctgtgacactcaccgcaaaggtctgcagcttcactcctgaagccagcgagaccacgagcccactgggaggaaggaacaactccagacgcactg

SEQ ID NO: 35325 - DNA, 1196 bp, Artificial sequence
  DNA replication origin
cagcccttgggtggtcatgggactgggcgccctggagcagggggcggcgctcgtcggggaggctcgggctgcacaggaacccacggagacgggggaaggctcaggcatggcgtgctgcagtcccgaggcctgccccgcgggaaggcagctaaggcctggtgagaaattgagcgcagaaccggtgggctggcactactgggggacctagtacaccctacgcagctgctggcccgggtgctaagtccctcattgcccggggccagcagggccggctggctgctcccagtgcggggcccgccaagcccacgcccacccggaactccagctggcctgcaagcgccccgcgcagccccggttcccgctcgcgcctctctctccacacctccctgcaagctgagggagtgggctccggccttggccagcccagaaaggggctcccacagtgcagcggtgggctgaagggctcctcaagtgccgccaaagtgggagcccaggcagaggaggcgccgagagcgagtgagggctgttgggactgccagcacgctgtcacctctcgcagtggctcatgtctgtaatcccagcactttgggaagccgagggaggcggatcacctgaggtcaggagttcgtgagcagcctggccaacatggtgaaaccctgtctctactaaaaatacaaacaacaacaacaacaacaaaaaactagctgggcgtgatggtgggcatctgtagtcccaggtactcgggaggctgggatgctgaggctggagaatcgcttgaaccctggaggtggaggttgcagtgagctgagattacgtcattgcactccagcctggctgacaagcgcgaaactccgtctcaaaacaaacaaacaaacaaacaactttctccataacttttatgtataaacactggctgatgtacagtcagtcttaacaggacccatttcccatcctggttgttttgagtgagacaagctatgttgtggagcaagagtgccctaatgtgatcaaaaaatgataaaacgaaggaaagtttgtctctccccaaccccctagagaaaccattcacaaagatcctattttaccctgccctagaattcaacaaaaacccttaccttaaatttgtagcagtagctcttattctgagaacatcactgcacctcctagccaagggggaaagcagcttcaataaggca

SEQ ID NO: 35326 - DNA, 1525 bp, Artificial sequence
  DNA replication origin
tcctgccctcagaactccaggttctcaggccgttttggactcaggctgaatttacaccaccagcgtccctggtttctggcttgcagatggtatatcatgggaattcctggcctccatcatcacattatccaattcccataataaattctctctgtctctttctgtctccatacatacatgcattagaggtaagaagaaattcccatctaaggagattccatttctagggagaaccctgactaatgcacctccctagaaggagccacggcaagtccccctgcagccaccagatgtggtgcagcctctgcagtgagcagcgtgtctggattctcaacagctgcagggggtttctgctgacctctgctccttctctcttggggctgtcccaggatccgaaggtaaataccaaagcagagagggaagacaagctgtctgctcaagaggatgtgttttctcatcctggaatgatttcagtctggggattgctttatagggaaaggtccccatgggaggtggtttgggacggcagtgtggcctcaggacatatccctagggcagattcccacatccttttgtgtcctggctggtccacatgggctctggttccccccacagataaagggtctgcacactgaggacccccccattctcagcagcccccagggaagcagaggtgactctaatgtccctcaggatggcagctcccacctgggagaacccccccttatgccaggctctgtgctagtgcctcctgtgcacctgtggacatgcccatcaatcctgccatttatgagtgagcagacggaggccacgtcccccaaaggggagggcaagtccaagtaggagggcaaggtttgggagtgtcaaggacggcttctgaaaggggaagagagtggccaaattatatcccggttgagctacagggctcattgggacatctgagtggggaagagcacgtcacccctggaaggggaaggtgtgggagactgcctgcacttctcttctggcccagcagtgtccctccataggggaaggaagtcagagctaattcctgtgggaaagcagcagcccagagatgagcagacacaaggaaatgggtcaggcagggagcagcccctggatagtgggctcaggaggcctcaagtccagagtggagaaggtggggatgccaggagagccctgctctgtgccccacagtactgcaggagccccttggaggtgcactattgtaggaaagacaggcagcaaaaggatccagacaggctggggtgggaggacaggtaggtgagaaaggcttgggatggaactacagaggaatgagtgagtgaggagaggagtgagtgagtgaggagaggagtgagtgagtgaggaggggagtgagtgagtgaggaggggagtgagtgagtgaggaggggagtgagtgagtgaggaggggagtgagtgagtgaggaggggagtgagtgagtgaggaggggagtgagtgagtgaggaggggagtcagtgagtgaggaggggagtcagtgag

SEQ ID NO: 35327 - DNA, 1876 bp, Artificial sequence
  DNA replication origin
agtccagagtggagaaggtggggatgccaggagagccctgctctgtgccccacagtactgcaggagccccttggaggtgcactattgtaggaaagacaggcagcaaaaggatccagacaggctggggtgggaggacaggtaggtgagaaaggcttgggatggaactacagaggaatgagtgagtgaggagaggagtgagtgagtgaggagaggagtgagtgagtgaggaggggagtgagtgagtgaggaggggagtgagtgagtgaggaggggagtgagtgagtgaggaggggagtgagtgagtgaggaggggagtgagtgagtgaggaggggagtgagtgagtgaggaggggagtcagtgagtgaggaggggagtcagtgagtgaggaggggagtcagtgagtgaggacgggagtgagtgaggaggggagtgagtgaggaggggagtgagtgaggaggggagtgagtgaggaggggagggagtgagtgaggaggggagggagtgagtgaggaggggagggagtgagtgaggaggggagggagtgagtgaggaggggagtgagtgaggaggggagtgagtgagtgaggaggggagtgagtgagtgaggaggggagggagtgagtgaggaggggagtgagtgaggaggggagtgagtgagtgaggaggggagtgagtgagtgaggaggggagtgagtgagtgaggaggggagtacgtgagtgaggaggggagtgcgtgagtgaggaggggagtgagtgagtgcatgggtagaggagtgagtgagtgcatgggtagaggagtgagtgagtgaggagaggagtgagtgagtgcatgggtagaggagtgcgtgagtgaggagaggagtgagtgagtgcatgggtagaggagtgagtgagtgcatgggtagaggagtgagtgagtgaggagaggagtgagtgagtgaggagaggagtgagtgagtgaggagaggagtgcgtgagtgaggaggggagtgagtgagtgcatgggtagaggagtgagtgagtgcatgggtagaggagtgagtgaggagaggagtgagtgagtgaggaggggagtgagtgagtgaggaggggagtgagtgagtgaggaggggagtgagtgagtgaggaggggagtgagtgagtgagtgaggaggggagtgcgtgagtgaggagaggagtgagtgagtgcatgggtagaggagtgagtgagtgaggagaggagtgagtgagtgaggagaggagtgagtgagtgaggagaggagtgagtgagtgaggagaggagtgagtgagtgaggagaggagtgcgtgagtgaggagaggagtgagtgagtgcatgggtagaggagtgagtgagtgcatgggtagaggagtgagtgagtgcatgggtagaggagtgagtgagtgaggagaggagtgagtgagtgaggagaggagtgagtgagtgaggaggggagtgagtgagtgaggaggggagtgagtgaggaggggagtgagtgagtgaggaggggagtgagtgagtgaggaggggagtgagtgagtgaggaggggagtgagtgcatgggtagaggagtgagtgagtgaggagaggagtgagtgcatgggtagaggagtgagtgaatgagccgcctccctcgcttctctgccggcccacacctcagccaccctctaaacccagctccttgatcccccttcctgccctttgggaattccatccaccctgagatcccagagtcatcctgctgccacactcacgaggtcctggttgaccccaaaaccatttctgttttgggggttgtggaaagtactgaaggcggcggcagttgtcatagaaggcataggtccaggccaggaagccggccaggagccgggaggccc

SEQ ID NO: 35328 - DNA, 802 bp, Artificial sequence
  DNA replication origin
gggagtgagtgagtgaggaggggagtgagtgagtgaggaggggagtgagtgagtgaggaggggagtgagtgcatgggtagaggagtgagtgagtgaggagaggagtgagtgcatgggtagaggagtgagtgaatgagccgcctccctcgcttctctgccggcccacacctcagccaccctctaaacccagctccttgatcccccttcctgccctttgggaattccatccaccctgagatcccagagtcatcctgctgccacactcacgaggtcctggttgaccccaaaaccatttctgttttgggggttgtggaaagtactgaaggcggcggcagttgtcatagaaggcataggtccaggccaggaagccggccaggagccgggaggccccagccagcagcaggagcagccacgggaatgctgccacctgcccgaggcccagccaggacaggctcagctgcggcatcctgcagggcagacaggatggagggtgagatcctgaggcccagggaaagtctcagggagctccagggacagtggagagaagcagggaaggggtgggtggaggcaggaaagggagggctctgggatgaataaacaaggactgagagctaaattccagaaagccccagccaaatccaatagccaagtggcctctagttgcctagtaaccacccagaaaggagaagagagagagagactgattagagtccagaaaggcccagcctgaatcactgggaggttgccaggggtccggttaccaggaaaccaccagtctcccaggccagcagcctggagacac

SEQ ID NO: 35329 - DNA, 892 bp, Artificial sequence
  DNA replication origin
ggtgatgcccatcaaggtgtctccttccggagactggggacctttgggcttcaggtaaatgacggaggcaaagccatagtgcacgaccaccacagtgaggtgagaggcacaggtggagaaggccttgttccgaccttcagcagaagggatcttcaagatggcggccacgatgaaggcataggagaggaggatgaggagaaaacagcccagcagggccgtgatacacaccaagcccacgcctttggccaccaccagcacatcatctccacaggccaacttcaacagaggtggcacgtggcagaagaaatggtggatctccttgtgtccacagaaggcgaggtggaaaatggccgaggtcaccaccatccccatgaccaagccaccagcccaggagcagcccacccggcaggtgcagccccgcaggctcatgagcacgttgtaacgcagggggtggcagatggccacgtagcggtcgtagcccatgacagtgagcaggaaggagtgggtgaagccgaagctgaaggagaagaacatctgactggcacaggccaggaaggcgatggagcgctgggtggacagcaggtcggccagcatgcgcgggatgatggccacggtgtagaggatctcggtgatggagagggcacacaggaagaggtacatgggcatgtggaggctgcgctcgctccagacagtggccatgatgagcaggttgcccagcagcgtgaacaggtacatcagcaggaacagcaggaagagcatcagctggaggtgggggaaggcagagaagccaacgaggatgaattcagacacggaggtgtggtttagcccctgcatggcggccacccctagttggtggagagaggaaagaagacccagtggttaggagcacagg

SEQ ID NO: 35330 - DNA, 1000 bp, Artificial sequence
  DNA replication origin
ctacaaatacaaaaattagccaggcatggtggtgtgtgcctgtaatcccagctagtcgggaggctgaggcaggagaatcgcttgaacccaggaggtggaggttgcagtgagccgagattgtgccaacgcactccaacctgggtgacagaacgagactcagtcaaaacaaaaacaaaaacaaaaacaaaagaacaaggagggagaaagagagtgacagagacagagaggtatagaaacagaaagagacagagagaagggaaagagggaagtaggcagagaagaaggaagggggagggagggagggaggaaggatggaaggaaggcaaggaggaggggggagggagggtggactgtaggtcagagaaggagggaggaaaggagggagggaggaaggaaagaaggaaggaagggagggagggaggaaaggagggagggaggaaaggaaaagaaataaaggaggaagactaaagtgttcccattcgctacatctcttgagagaaagtcagccatttcagcagttctgtggaaagagtttggtgaagcaagtcttcttcatggcgaccttcagctccttgttcctgaggctgaagatgatggggctgaggaagggtgtgaggaccgtgtaggtgatgcccatcaaggtgtctccttccggagactggggacctttgggcttcaggtaaatgacggaggcaaagccatagtgcacgaccaccacagtgaggtgagaggcacaggtggagaaggccttgttccgaccttcagcagaagggatcttcaagatggcggccacgatgaaggcataggagaggaggatgaggagaaaacagcccagcagggccgtgatacacaccaagcccacgcctttggccaccaccagcacatcatctccacaggccaacttcaacagaggtggcacgtggcagaagaaatggtggatctccttgtgtccacagaaggcgaggtggaaaatggccgaggtcaccaccatccccatgac

SEQ ID NO: 35331 - DNA, 818 bp, Artificial sequence
  DNA replication origin
tgcttggctggaacgtaattttctttttttctttctttctttcttctttgagacagtctcactctgtcgcccaggctggagtgcagtggtgtgatctcagctcactgcaacctccacctaccgggtcaagcgattcttatgcctcagcctcccaagtagctagggttacaggcatgtgccaacatgcctggctaatttttgtatttttagtagagatggggtttcgccatgttagccatgctggtctcaaactcctgacctcaggtgatccgcctgcctcggcctcccaaagtgctgggattacaggcatgagtcaccacggaacgtaatttttaacaatagccttcggtaatccaatttagttgttcccagtgaatttctcctacatcattacatttttttctgggtagagtttactgaagaaggtcttcttcatggcgaccttcagctccttgttcctgaggctgaagatgatggggctgaggaagggtgtgaggaccgtgtaggtgatgcccatcaaggtgtctccttccagagactggggacttttgggcttcaggtaaatgacggaggcaaagccatagtgcacgaccaccacagtgaggtgagaggcacaggtggagaaggccttgttccgaccttcagcagaagggatcttcaagatggcggccacgatgaaggcataggagaggaggatgaggagaaaacagcccagcagggccgtgatacacaccaagcccacgcctttggccaccaccagcacatcgtctccacaggccaacttcaacagaggtggcacatggcaagcaaaatggtgg

SEQ ID NO: 35332 - DNA, 898 bp, Artificial sequence
  DNA replication origin
aagccatagtgcacgaccaccacagtgaggtgagaggcacaggtggagaaggccttgttccgaccttcagcagaagggatcttcaagatggcggccacgatgaaggcataggagaggaggatgaggagaaaacagcccagcagggccgtgatacacaccaagcccacgcctttggccaccaccagcacatcgtctccacaggccaacttcaacagaggtggcacatggcaagcaaaatggtggatctccttgtgtccacagaaggcgaggtggaaaatggccgaggtcaccaccatccccatgaccaagccaccagcccaggagcagcccaccaggcaggcgcagccccgcgggctcatgagcacgttgtagcgcagggggtggcagatggccacgtagcggtcgtagcccatgacggtgagcaggaaggagtgggtgaagccgaagctgaaggagaagaacatctgactggcacaggccaggaaggcgatggagcgctgggtggacagcaggtcggccagcatgcgcgggatgatggccacggtgtagaggatctcggagacggagagggcgcacaggaagaggtacatgggcgtgtggaggctgcgctcgctccagacggtggccatgatgagcaggttgcccagcagcgtgaacaggtacatcagcaggaacagcaggaagagcatcagctggaggtgggggaagacagagaagccgacgaggatgaattgggtcactgtggagtgattggctctctgcatggaggctgtgcctggggtgagatgtgacagggagatgtcagttactgcatgaagaaaagttctcagccttccccatacctggatttgcccaagggactgctcttgataaatggtttggttccattcccactctg

SEQ ID NO: 35333 - DNA, 923 bp, Artificial sequence
  DNA replication origin
agtctgaagtgggggcccagggtctgagcttaggtctgattgatctcaaagcctgtcttttcctaacctcttgttatactcaccagttgctggtggctgtttcaaaggccactaggagatgctgcttccccatgactgaccgtctacacactcttgttcatatcaattcagatcacaagaatcgacagcgagtgagtgaacaaggtggggggagagagagagagagaaaaggaggaggaggaggaggaggaaaagaaagaaaaaagggaggaagaaagagagggagggagggaggaaggaaagaaggataaaaggaaggaaggatggggactgcaggaggaaggaaggagggagggagggaaggaggaaggaaggaacgaaggaaggaaggaaggagagtgagggaggaaaggaggagagtgaggaaggaagaaaggagggagggaggcaggaaggaaggagagtgagggaggaaagaaggagagtgaggaaggaaggaagaaagggagggagggaggcaggaaggaaggaaggagagtgagggaggaaagaaggagagtgagataggaagaaacgagggagggaggaatggagggaggaaggaagggagggagggagaaaccttgagaggacaggagccgatcacgtctgtaggaggtagctgagggctgcatgtaacaccgtctggaatgatgggatgcagaatgcagctaaaagggtagtccagtcattctggaaaaatcaaaaccatggagacagcaaaagatcagtggcttccaggggaccagtgggtgagagggagggatgaatgggtggggcacagagggtttttaagacagtgtaactatgttgtgtgatactgtcatggtagatacaggacattgtgcatttgtcaaaacccagagaatgtacagccccaagag

SEQ ID NO: 35334 - DNA, 1106 bp, Artificial sequence
  DNA replication origin
caccgtctggaatgatgggatgcagaatgcagctaaaagggtagtccagtcattctggaaaaatcaaaaccatggagacagcaaaagatcagtggcttccaggggaccagtgggtgagagggagggatgaatgggtggggcacagagggtttttaagacagtgtaactatgttgtgtgatactgtcatggtagatacaggacattgtgcatttgtcaaaacccagagaatgtacagccccaagagtgaactctaatgtaactgtggatttcagtcaatgacaatgtgtcaacactggttcatcagttgtaacagattaatggtaaaaaaaaaaaaaaatcccagttgctaattataggggaaattgtgtgcaggcggagagagggtatatggagattctctgcagtatctatctgctctatgttctgtaaatctgaaactgctcttaaaataaagtctattaattttaaaaagtaaaacaaaaccaaacccatggtggatgtgggactaggatagcagcgaggaggatttagagcttctgggcattgattcaccagcagaacatccagtgggttcctctgtaggtaaaacagagagagagaaaggtaggaagagaaagagagagatggggatagagagagaggcaggggaagagagagagagagagagagagagaggaggcgagggagaaacagagagagagaggtggggagagaaagaaagagaggtggggagagagaaagagagagacagagaggtggagacacagagagatgtggggaaagagcacacacagagagagagagagatggagggagagagagaagtggggagatagagagtgggaggtggggggagagagagagagaaggacagggagaaagacacagagagaggtggggagagagaagtggggagagagacacagagagtgtgggaggtggggagagagagggttggggaaagagagagagagacagagagaagggtggggagagagagagaagtggagagagagggaggtgggaagagaaacagagagaggaaagagaggtagggagaaagagaggacagaggggaaagagaagaaaaaggtgagaagaaaga

SEQ ID NO: 35335 - DNA, 1182 bp, Artificial sequence
  DNA replication origin
attaaatatttttcaaagttttattaactttttgatatcgacttaattttttttagttttgggaaggaaaagagttctacttaaaatatgtagcacaaaggtaccacctacaacggaatgtgatccaatagggttgtgtggaacccaggcatctgcattttagcaaactcgctgcattcatctgacaggctgcagaggacccactgtattttgcagcacactgatgtggtgatttaaagtggaggctccggtcagaggtagatttacagcagacacctgtaatcccagcacttttggaggccaaagtggaaggatcgcttgagcccaggaatgtgagacaaggctgggcaacatagtccagggaaagaggaggggagggaaggggagggggagggggaagggaggaggagggagaggggaggggagggagagggggagggggaggggaagaagaaggggaggggaagggggaagggaggggagggaaaaagaaaagaggaggctctgaatcctgacaatgactcttgagaatgacactgctcatttccccccgattctgcagctgagggaactgaggctgagagaggttaaaggggctgtccccgcggttgcacacagccacacctgcagagcaggtctcactgtcctcaaagccttacttttctggtatcccttcactatccgttggtctgaccatgtcacctcaactttctccatgttccgctagcactaaaaagacccaagaatcccccgggcattgggctgcctttccgagatccctgctacaggaagcccccgtcaccagtgccgaaaggagcagagtccccgcccttcccccacctccctttccccactcctcaccattgcgtgcctggacaacctttatttgcctgaacatttcaccccgaatgaagtcccggtcatgtccggtgtctgccagccccggtgtcactgagagacccaaagagaacgcgctggtaaaggtcttggcagagttgcgggttgggagatgtgattaagggtcggggggcggggcatctccttggacgcccactcacctttttcatcccgcacatccttcgtcatcctcaagactggggagagacgccagcagcatgttctagacgctcccctcactcaaagaacctccctggggtttctctgtgttcccccaactcccag

SEQ ID NO: 35336 - DNA, 1430 bp, Artificial sequence
  DNA replication origin
cgcagccccggttcgtactcgcgcctctccctccatacctccctgcaagctgagggagccggctctggccttggccagcctagaaaggggctcctacacctataagtgagaatatgcggtgtttggttttttgttcttgcgatagtttactgagaatgatgatttccaatttcatccatgtccctacacaatgagaacatatggacacaggaaggggaacatcacactctggggactgttgtggggtggggggaggggggagggatagcattgggagatatacctaatgctagatgacgagttagtgggtgcagcgcaccagcatggcacatgtatacatatgtaactaacctgcacattgtgcgcatgtaccctaaaacttaaagtataataataataataaaaaaatccaaaaaaaaagaaaagaagagaaaagaaaggggctcccacagtgcagcggtgggctgaagggctcctcaagtgccgccaaagtgggagcccaggcagaggaggcgccgagagcgagtgagggctgtgaggactgccagcatgctgtcacctctcagtgggagcaggtgtgacaagagttgggcaaatcagacctttaatccaccctgataggctggagtgtgggcttatggcatttctcctttgacccaattaacctccactcccaatgtatctctgtgcagaaggctcagctaggtgtatcagccattgtaaatcctcaacataaattataatttaacctagaatacagagactaggtagcaggaggagaggaaatgtagagatactaatctcttctcccttatcagaaagaaacctagcataagaaatttcacgcttaatgggccaaagagtaaatcagaaaactccatgggtgatggtatgctcatggtggtggtggtggtgatggggaattatttgccctcctgtgacctcccttggattaatttctccccaggacaatgggaaaaatcatttaatccttggagttttttttttttttttttttttttttttttttttttttgcttgagagtgactctgatcctgtttctgatggtcatgttcctcagcatcatactgagtaagtcactggccttgtagcatctggagtgattggagtgatccaagatccctagttcccatgtcacaaatgaggatcccacatatctgggacagagatggaacattatttctgggtgtgtctatctaatctattcatcctatctatctaatttctcatctatatatatatttgcctacccatccatccatcaatccatcttagctgtacgtttatccattccatctatttatcctattatctatgtatctatctatcatctattaatagctatctatccatctgtctaatatatccattatctatatctactttatctatctacctaatgtatcca

SEQ ID NO: 35337 - DNA, 1751 bp, Artificial sequence
  DNA replication origin
gcggggagaggaatgagtgagtgaggagaggaatgagtgagtgaggagaggaatgagtgagtgaggagaagaatgagtgagtgaggagaagaatgagtgagtgaggagaggaatgagtgagtgaggagaggaatgagtgagtgaggagaggaatgagtgagtgaggagaggaatgagtgagtgaggagaggaatgagtgagtgaggagaggaatgagtgagtgaggagaggaatgagtgagtgaggagaggaatgagtgagtgaggagaggaatgagtgagtgaggagaggaatgagtgagtgaggagaggaatgagtgagtgaggagaggaatgagtgagtgaggagaggaatgagtgagtgaggagaggaatgagtgagtgaggagaggaatgagtgagtgaggagaggaatgagtgagtgaggagaggaatgagtgagtgaggagaggaatgagtgagtgaggagaggaatgagtgagtgaggagaagaatgagtgagtgaggagaggaatgagtgagtgaggagaggaatgagtgagtgaggagaggaatgagtgagtgaggagaggaatgagtgagtgaggagaggaatgagtgagtgaggagaggaatgagtgagtgaggagaagaatgagtgagtgaggagaggaatgagtgagcgaggagaggaatgagtgagcggggagaggaatgagtgagtggggagaggaatgagtgagtgaggagaggaatgagtgagtgaggagaggaatgagtgagtgaggagaggaatgagtgagcggggagaggaatgagtgagcgaggagaggaatgagtgagtgaggagaggaatgagtgagtgaggagaggaatgagtgagtgaggagaagaatgagtgagtgaggagaagaatgagtgagtgaggagaggaatgagtgagtgaggagaggaatgagtgagtgaggagaggaatgagtgagtgaggagaagaatgagtgagtgaggagaggaatgagtgagtgaggagaagaatgagtgagtgaggagaggaatgagtgagtgaggagaagaatgagtgagtgaggagaggaatgagtgagtgaggagaagaatgagtgagtgaggagaggaatgagtgagtgaggagaagaatgagtgagtgaggagaagaatgagtgagtgaggagaggaatgagtgagtgaggagaagaatgagtgagtgaggagaggaatgagtgagtgaggagaagaatgagtgagtgaggagaagaatgagtgagtgaggagaggaatgagtgagtgaggagaagaatgagtgagtgaggagaggaatgagtgagtgagcagaggaatgagtgagtgaggagaagaatgagtgagtgaggagaagaatgagtgagtgaggagaggaatgagtgagtgagcagaggaatgagtgagcgagaagaggaatgagtgagtgggcagaggaatgagtgagcggggagaggaatgagtgagcggggagaggaatgagtgagcggggagaggaatgagtgagcggggagaggaatgagtgagtgggcagaggaatgagtgagtgggcagaggaatgagtgagcggggagaggaatgagtgagtgggcagaggaatgagtgagctgcctccctctcttctctgtgttcccacaccccagccaccctcaaaacccagctccctgagccccattcctgcccctcaggaactccatgcatcctgagaccccagacccgtcctgctgacaaactcac

SEQ ID NO: 35338 - DNA, 921 bp, Artificial sequence
  DNA replication origin
gaggaatgagtgagcggggagaggaatgagtgagcggggagaggaatgagtgagcggggagaggaatgagtgagtgggcagaggaatgagtgagtgggcagaggaatgagtgagcggggagaggaatgagtgagtgggcagaggaatgagtgagctgcctccctctcttctctgtgttcccacaccccagccaccctcaaaacccagctccctgagccccattcctgcccctcaggaactccatgcatcctgagaccccagacccgtcctgctgacaaactcaccaggccctggtgtccccaaaaccagttctgtttcgggggttgaggaaaacactggaggcggcggcagttgtcatagaaggtgtaggtccaggccaggacgcgggccaggagccaggagcctccaaccagcagcagaagcagccacggggatgctgccacgggcccgaggcccagccaggacaggctcagctgcggcatcctgcagggcagacgggatggagggtgggatcctgaggcccagggaagggcccaggaagctccaaggacagtggaaaggggcaaggatgggcagtgctggaggcagatcagggaaggctctgagatgggtaaacaagagctgagatctaaagtccagaaatgcccaatgaaaaccagcagccaagtggcctccagttacacagaaagggaaagagagagagaggctgattagaatccaaaaaggcccagcctgaatcactgggaggttgccaggggtccagttaccaggaaatcaccagtctcccaggccagcagccttgacccaccccaaccttgggcagtcccctccccatcccaggccaggaccctccagccctgccactgccagcctggctcctatcagaagcagcttgtcccacataccctcctctccccctct

SEQ ID NO: 35339 - DNA, 1810 bp, Artificial sequence
  DNA replication origin
ctccaaggaaaggagactccctttcgcagtctgctaagtaacgggcgccttcccagacactggcgttaccgcttgaccaaggagccctcaagctgcccttatgcacgcgttgacagagggctcacctcttgccttctaggtcacttctaacaatgtcccttcagcacctgaccctctacccgccagttattcctaggttatgttagtaacgcaacaaagagtaatattaaaagctaatgattaataatgtttataataatgattgataattgtccatgatcatctctatatctaatttgtattatgactattcttattctaactattttctttattatactgaaacagtttgtgtcttcagtctctcacctcggcacctgggtaatcctccgcccacagtcaataggggtctgcagctggggcaaggtcagcggggatctgatcagtgagacctagtcaggtctcactgactgactaggccctgggggttggggcctggccagcaagagtccagtagttggggcgtgtttggcgagggtctcatggttggggtctggccagcgggggtcccacagttggggcctggtgagcagagatctggcagttgcagcctcgtccatgggggtctggcagttggggcctggtcagcggggtcttatagttggggcctgtttggagggggtccagcagttggggcctggtcagaggggatacggcagctgggggttatttggcagggatgcagcagctgggacctggtaggtggggtctggcggttggggcctggtcagtgaggatcagatcagtgcggtctaggcagtgaggtctggacgctgggccttcatctgcatgggtctcgcagttgggacctggtcagcaggggtctaccagttggggcctggttggcggaatcaggcagttgggacctggttgtcgggggtccaacagttggggcctggtcaaaggggatccagcagttggaacctggtcagcagggctctggcagttggggcctggtcattggggtctggcagttggggcctggtcaacaggggtccaggagctgaggcctggttggtgggccgtctagcagttgaggcctggtcatctgggcccggcatttggggcctgatcggcggggatcagagcagtgaggcctagtcagtgaggtgtggatgtgggggcctggtaagcaggggcccagcagttggggtctggtcagcaggggtctcataagaagaggcctggttggcaagggtctggcagttggggctcagtcaggaggggtctaggagttggggcccagtcagtggggtctggcagtttgggcttgatcagtgcagtccagcagttgttggggcctggtcagtgggggtccagtagctgggacatggtcagtggagtccagcgtccggggcctggttggcaggggtctgacagttggcgcctggttggtggggatcccatagttggggcctgtcagcagggatccagcatttggggcccagtcagtggggttcagcttttggggcctggtgagtggggttcagcatttggggcctggccagcaggggtccagcagttgttagggcctggtcagcgggggtctgattagtgagatctatttggtggggtccatcagttgggacctagtcagtgagggccgtgagggccttgtcagttgcagccttgttattgtggcctttgtcagtggtgtctgatgagccagggcctggtctgtggggcccagtcagcaggacctggtcagtccacatctggtcagtgggacctggtcattgtgggggtggtc

SEQ ID NO: 35340 - DNA, 1394 bp, Artificial sequence
  DNA replication origin
cccgaccatcaccaaactcacctcagaggatgagttttgtttttagaaaagcctctctgaggcaggacacgtcttcccagcttgggccagcctcctttccagggtaggaatgccagctggctaccctgcaggtggtctgcagcaggccagagctgcgaggctcatctagggatcttgggggagcaggtggggatggagaggctctcagcagagcagtctcaaaggcagcatgagagtagggaacagcctgagggtctggccctgtcaccctgggccctgccccagtgagacccgcaggctgtggccacagggcaagggggtgcctggcccagcctgtgggcagttgtccagcaggtctctgaggattcagggggcccagctgagccaccctacagggaggggcgtggggggcagtgagggccatacccctgggagggcggaggggaagacgggcagggtgtcagccagggcatgtcagggtgagggcagggatgcagcagaacttgcagctgaaggcaacctgccttggtgctgagagggagcctgggtcctgggaaggggagcccagcctggagcctgcccctcaggagtcacaggacagagagagggaggagcctgggggaggttggttggggacgatcccacgggaggtgccacttctgggacgcacctgaatggagccagcctagggtggagctgatggcctggggtgaacaacacatgaggtggggctttagcagaggggcctcagtcagtccccagggctctgcatggccctccggagaccctggctccccgctggatccgtcagcacaaaggcagagggaggagcaggaaggccgagtaggggcaggcaagacagtgggggaacaaccaggggcccagtgcatggctgccacagtggctcagaggagggcaaggactgatggatggacgacagccccgagagccagctgagtttggagacggggctgtgtggccatcccggctgcccgcggggctcttgctcaccctcgtcacctctggcatctccccggcagcacttagcagcccagtgagagagcggtcaaggcaggcgtgtggatggatccagggccctctctcaagggttctgacagatgagggtcgaagaagggccaggctgtccagtctctgggccagagaggatgggcaaagtcaaggaacaggcagggtcagcagccggggtgcagggagaggcaggtgtatgctggaaggtcaggccccacgagggcccttgggggcatcaagtgggacagggccccggcgcaccctcagtgccctgggcaggcctcgggccagtgatgtggtcactccctcgggaaatgctgttgggaccggaccacccaccctgggccacacccatcccgcctcag

SEQ ID NO: 35341 - DNA, 921 bp, Artificial sequence
  DNA replication origin
acgccaggacttaactctgccaactctggaggttttgtgccttcggtacatgctagccatccagaacgtagctgcctggcaagcccaaagagagtctttcggaacaacaggagtgggaggacctgacccttcttagctgggggctggtggcttgagcagggcccattggggtttcagtgccctggagcaccagggacccctccccatgggatgagatcccccaccccactcccctgtgaggctggatcagaagaggtcctgtagttcctcatggaggagactcatttcagtggggatgtggctcctggaaggagaggctccccaagggcttggggcttccctgggctctcccaggttgagtcctggccctgtctgcccatgaggctgggctgagccccggcctctgctgtgggatgtcccctctggggcattgcctggcttatgtgccctgcagggacacgcctgtgcctcctgccaggtgggggtgagccaggtcctcctcgggagccagatctcagggctgggggatccgggggatctggggagtatggggcaggagggtccctgggctggagggctgggggatgcagggagtgtgggcaggaggggatgcagggactgtggggcaggagggtccctgggctgggggctccctgcttacttcactgatgtatgactgtacctgcttacttcattgatgaggcactggaggagtcagcgtaaacgtggaattatgggcacgcagctcatctttgtcctaatgggagcagcagaggtccttggggctcccaggcctgcccccaaacctccccattccaggcccctctgcagacccttccctgagggacagaacaccaggtggtggctggggcacccctgacacctgccccctgcatggacccccgggacatacttccctta

SEQ ID NO: 35342 - DNA, 1162 bp, Artificial sequence
  DNA replication origin
agcgggggccttgtcagtgggacctgaacattgtggtctggtcagtgggggcctgatctgtgggacctggacattgtggcctgctcagcggggcctgatcaatgggacctaaacaatgtgtcctagtcaatgggggcccggtcagcggaggctttgtgaatggggacacggtccttggggacatagtcagaaaacacctagtaaatgggggtgttgtcagcagggacctgctcggtgaggatctggtctgtgggaggcctggtcagctgtggcctggtcagaggggactgatcatgggtcctcgagttaaggacttagtcacttggcacctcatcagtgaggacctggtcagtgggcgcctggtcagcggaagctgggtcagtgtgatctgattattgggggtctggtctatggggacctagtcattggaaacctggccactggagcctgttcaatagaaaggtggtcagtggaagcctggcagtgagggcctggtcgttgggctcctgggtagtggggcctagtcagtaaaggtctattcagtaaggacatggtcagttggaattttcttagttggggcccagtcagtggggacctggtcagcgagggcctagtcagtgggacttggtcagtagggacctgggcactggagtcctgggtagtggggcctagtcagtaaaggtctggtcattcagggcctggtcagccagaacctcatctgttggggccgtgtcagtgagctctagtcagtggggacctggcaatggaagcctcatcagtgggtcttggatagtgaggcctagtcactggaggactggtcagtggggacttgggtaagggggcctggtccctaaaggtctggtcattaaggacctggtcagttggaaccttgtcactttgggcccggtcagtgggacctggtctgagggggtcttgtcagttgggcccaagtcagtgggagtctcatcagtggggcctggctagtggggcctggtcagtggaggtttggtcagtggggtcctggtaagttggagcctcatcagtggggacctagtcagtggggacttgtcaatgggacctggtcaggggacccttgttagaaggagcctggtcagtggggcctaggtagtgaaacctggccactgggggcctggagagctgg

SEQ ID NO: 35343 - DNA, 1766 bp, Artificial sequence
  DNA replication origin
gcctccatcacccttcccttcccacatcagccaattcacctcccattcatccttcatattttagctcagtgttaccacttcaggaaaaccttccctggtcccaagggacaagatactgtttgtcttcacctggaacatcctaagggctcaataacgaatgaatgaatgaatgaatgaatgaatgaatgaatgaatgaatgaacacaggtgcataagcatgataggcttgtccttgtagggccttcccatgccactcaaaatacatatgacctcattgcaaaaatatgaatactggctcacaaagtcatcctgcaaaatcaggcacattcaacaacagccctgtgctgagccgtgtcggggcagtagagaaagctcaacccaaaaccctactcttgagaggctcctctctgggggttggagcacagagccagacacagacatcactggcctgtgtgttcaatgaaggaagggagggagggaaggagagaggccgggatgaatggttggatgggtggatggatgaagggatggaaggatgaatgagtggatggatggatggatggatggatggatggatggatggatgaatggaggaatggagggatggatggatgaatgggtagatggatgaatggatgcagggagggatggagggatggatgggtggatggatgaagggatggagggatgaatgggtggaggatagatgaataaacgaatggatggagggatgaagggatgaatgggtagatggatgaatggagggagggaggaaaggaggggtggatgggtgggtggatggatggatggatggatggatgaatgggtggaggatggatgaataaacgaatggatggagggatgaagggatgaatgggtagatggatgggtggatggatggaggaatggagggagggatggatgaatgggtagatggatgaatggatggagggagggatggagggatggatgggtggatggatgaagggatggagggatgaatgggcagaggatggatgaataaatgagtggatggagggatggatgatgaatgggtagatggatgaatggatgaagggatgaagggagggataaagggatgaatgactgggtggatggatggatgaatgaaggaatggagggatgggtagatggataaagggatgaaaggagggatggagagatgaatgggtgaatggatgtttagggatgggccagagcaagggcccggaaatggggagtagtgacaggaatatgtcccatagaaggtgcttgggcttggtatggaaagcagggtatgaggaatcgtctgtaggaacagggacattccaagcagaggaaactgcagaggcaaaggccctgcagctcaagaaaacctggtttcaggatacagtagggagtgggaaatgactacagaggagactggcaaggacaagtggagccaggttgtgagggacccatccacgacccttaaccatgaattttgccccaaggcatgcatcaaagtactggctattcttagtatcagtattaagatggtatgacacacccaagagtttattatatgctaatagcttcccctgttaatttcagtttggaaaacatgttttatagtgttcacactactctggtggtgcaatatttagtttttaaatcaatatgcctgtacaaaactgttacacaatggcccacaactgtaaccccagtgccttgggaggccaaggcaggaggatccattgagaccaggagtttgagaccagcctgag

SEQ ID NO: 35344 - DNA, 1131 bp, Artificial sequence
  DNA replication origin
cattttaacaaacactttcctatcttctaggggccaggtactcagaagaccacagacaagacccagccccatggcctgccccaaagagttcacatctcataaatgatgcttgaataataacaataatagtaacagctcccacatgctgagtgtgcgctgctaggacacagcatgtgacaggaattcagtgcctgaatgaatgagccaataaattaaactttctctttaaaaaaaaaaattctttttgttttattcttttagctctactatctaaggaaggaaaaagctttctggagtcagcaaatcctgcccttgattgctggaggggagaacggaggcatagtagggtcaaggagatggacggcacaaaggcctgggggtgggaaaactggagtacaggggtccagtgtggagagagttgggggcagagtcttaagcggggagctaaggcactaaggccgtctcctgttctttgggaactggggagccacaccttgattcccagcacaagagggaggaaaggaagacctgagatctagagaggacagcaggagcctgccctgggctccaagagtttcagagatggcccagatcagttgattgagtggccttctccctgtcatgagccacaagcagtagaagccacaggggggcagaagagatggagagatggagagagacacagcgacagtcaccagaagagagacaggggcatggcagaaagaggtgggagaaatccaggaaggctccctgggggtggtggccggaaatagggtggaggcctaatccctgatactagagaggcaggacctagaggggaggagaaagcttgatgctaggcaggaagtccaaaagtctgtctaggaatccaggacggcttcctgaaggaggggccattggatctgggccttgaaagataaatagacgtttcctacatttcctaggcagagaaaagtgtgtgtgtgggcggtgggggaggggggaaacggggaattgctcattttacttaacaagtactttcccatttttaggggaccaggtactcagtgggccacagacaagaccaaggcagaaaagacaggcgcctccccacattgcagcaccgggaccccgagcccacccacagccctc

SEQ ID NO: 35345 - DNA, 938 bp, Artificial sequence
  DNA replication origin
ctaggtccaaataaggcgagggctgccgggagcacggtgagctggccaagtcctcctgagcaagcgagtggcggctggcccggccggcctgggcttgggcctcctccaagactcgcctggcaggagggcggaggcaccccgggaggctataaggccctctcctccaccctgccaggctcactctgccccacagccacagcccctgactgccgcagcccccacagagcccgccgcgcaccccacgtcccccacgccagcgcccagccatggaggccatcaagaagaaaatgcagatgctgaagttggacaaggagaatgccatcgaccgcgcggagcaggcggaggcggataagaaagccgctgaggacaagtgcaagcaggtgaggtgccctccgctgggccgctccgggctgctgggagtcctctctgtgcggaaggccggggtctggagcccagttgggggtcgcagacacctgcgggaggataggaggctgatgctttggcggaggaagagcgaggggaccattgccttccttggatggggtcctgggctggaagaggggtgacgatcggacccacccccagcagggccagtgcgaacaaagtgagtttgacagagagagagttggcgggggagggagagtgagaacgttcgtgagcgaggtgtcgtttgcgctgggaggttgtgtactagatagggcggttggggacatgctgtgtgtgtgtatttgcgtgtgtttgagcgtatgtgtgtgtacgtgtgtgtgtacgtgtgtgcgtgtttgcctctggtgtgtgtgtgcatgtgtgcgtgtgtgtgtgtgtgtgtgtgtgtttgagacagagtctcgctctgtggcccaggctggagtgcagtggcccaatctcggatcactgcaacctccgcctcctgcgttcaggcgattctcctgcctcag

SEQ ID NO: 35346 - DNA, 1424 bp, Artificial sequence
  DNA replication origin
tgagtttgacagagagagagttggcgggggagggagagtgagaacgttcgtgagcgaggtgtcgtttgcgctgggaggttgtgtactagatagggcggttggggacatgctgtgtgtgtgtatttgcgtgtgtttgagcgtatgtgtgtgtacgtgtgtgtgtacgtgtgtgcgtgtttgcctctggtgtgtgtgtgcatgtgtgcgtgtgtgtgtgtgtgtgtgtgtgtttgagacagagtctcgctctgtggcccaggctggagtgcagtggcccaatctcggatcactgcaacctccgcctcctgcgttcaggcgattctcctgcctcagcctccgagtagctgggattacaggcacccaccatcacacccggctaattttgtatttttagtagagaccggatttcgccatgttggccggactggtctcaaactcctgacctcaagtgatccgcccgcgtctgcctcccaaagtgctgggattacaggcatgagccactgcgcccggccatttgtgtgtgtttgagcaattctctgtgtgtgtgcgtgagcatttctgtgtgtgtctgtgtgtgtatctgcatgtttgagcatttgtgtctgtgtgtacatgtattgtgtatgtttgagcgtgtgtctgtgtgtatctatgtgtttaagcatttctgcacatgtctgtgtgtgtacacatatttgtgtgtttgagcaattctctgtgcgtgtatctgtatgtgtttaagcatttctgcgtgtgtgtgtacacatatttgtgtgtgtgagagcagttctgtgtgtgtgtgagtgtatctgtgtgtgtttgagcctttctgtgtgtgcacatgtgttgtatgtgtctgttttacgtgtctatctgtacatgcacatatgtttcagctgaaaagagtgcggaggggtaaaggtgactgtgagaatgagtgtgtactaggagagctgtgtgtgggacgctgcgtgcggctgttggaaagtaggtgtgaaagagtgtgggtgtgtttgtgagcctgtgtgtagatggtgggggtctgtgagggtagcgggacaggctgactgtgtgtgtgcttgagcaaacgctggtatgacagtgattgaaagtacatgttgatgtggctatgtttgtgttggcatctgtgtatcagggtgatgggtttctgatggcgtgtgtgtgtgcacccacgcacatgtttggatgtgtgtttctgttgtgtgtattggtgactgtgcttctgttggggtgtgtgtgcatgtttagatgagtgtgtgtttctgttggtgtgtttatgtgtatgagtgtgtttctgttggtgtgtgtgaatgtgtatggatgagtgtgtgtttctgatggggtgtgtgtatggttgtgtgtttctattggtgtgtatgtgtgtggatgagtgtgtgtttcta

SEQ ID NO: 35347 - DNA, 1445 bp, Artificial sequence
  DNA replication origin
ctgtctgcccaccctgggagcaggaacaagatcagtgtcaaaccatctaaggcaaaagtcagatccaagccaggtgtggcgactcacgcctgcaatcccagcaatttgggaggccgaggcgggcagatcacttgaggtcaggagtttgagacctgcctggccaatattgcaaaaccctgtctctactgaaaatacaaaaattagtcagtcgtggtggtgtgcacctgtagtaccagctaccggggaggttgaggcaggagaatcacttgaacccaggaggcggaggttgcagtgagctgagatcgtgccactgcactccagccttggtgacagagcgagactctcaaaaaaaaaagtcagatccaggcatgagctggatatgatcaccctaatccagagttgggggcccagggagggagtttcagcctggaggtgacagaaaagtcttcttgagccaactctagaccggtgtggtggggggtgacaaagagaggtgatggggtctgtggtttgtaatccataggcctgagcttctcaaactaggagtgatgggaggataggactcttgggataaacagaggactgaaaatttagggaaagtaggggacatttttattaaaatgaacatggcctatatgcaaaaattttaaagatttaacccgagccttcaaagaaagtgatcctgtaggggcgagtctcttctagccaagctccccaaagcccagaaatgagggactaggtctgagcccttcagcccttcagagtattttggtaagacagtctaagaaccactgccttgggccatagggagccatagcaggttctaggcagaaagagggcaggcgtatttgttagaaagtttctctgaccccgtgttggggtcagaaccagagggagaaaggctggggacagggatgggcggagggatccacgcgcagagaatgagattgcttaactccagatcatggtgaggctgcacctctgaaactggaatgtgtgtatttctggaaaacatttggagtcttcagtttcccaaaagctgccattgatctccctagagtactggggaccccaataagcccaaaacagctggtcctcaggacgagggaaagatgtgaaaatcccactatcaggtagcatggatggcgtggtgcatgctatcgcaacccctgttctacagataaggaaactgatgcccagagagagacggaggactcttgtgaatattgggggggaccgcccctgcacctcggggacgtgaccccccccccaggctgacccgttcctcgctctgtcgtccccaggtggaggaggagctgacgcacctccagaagaaactaaaagggacagaggacgagctggataaatattccgaggacctgaaggacgcgcaggagaagctggagctcacggagaagaaggcctccgacgtacgtgtgcaggga

SEQ ID NO: 35348 - DNA, 747 bp, Artificial sequence
  DNA replication origin
ggagccgagcccagccgagcgtccgccgctgcccgtgcgcctctgcgcctccgcgccatggccggcctcaactccctggaggcggtgaaacgcaagatccaggccctgcagcagcaggcggacgaggcggaagaccgcgcgcagggcctgcagcgggagctggacggcgagcgcgagcggcgcgagaaagtgagcgccccggcctcgggccccgcacccgcagcctcctcccccgcgcgccctcctttcttcccggcttcccgcgctgcccgcccgcgcgcagtcctcgggccgcctttttacgccctcggacgccgatcgccgacccacatccctgcgcccgcagccaggaccccctacttcctccgccgtcctccttcctgggcctgggacaggggagggggcgccgcctccgggtcgggcggggccggccaagcgggaaatggggggatggggcggagggggtgagcgatctccgggtggagaagtggagcggcgggagggggcgtatcgtgcaggctccgactccggggctggcgccggggtcccgggccgaggggaacccgcgaccggacttgtgggggagaatgaggatgaaaacgtggagcttccattgtctagggtttgaccggccgacagggatttcgacgggggaccggggatctggggagggggtcgcactttctcgcctctttcgcggcttcccggcttctgcttgcttccctgaccgttcccaggggcgcggcg

SEQ ID NO: 35349 - DNA, 988 bp, Artificial sequence
  DNA replication origin
cccacaggcttcatgacttggtatttgctctctaggagcttttttcccatctgcgagtaggactgataagaatcccgaccccccagagtagcagggagggtcccaggagtaaatctcaggcgtggagcctggcgctttgtaaataatcaattgtgttgttgttttttgttgttttgtttttgaggcagtctcactctgtcgcccaggctggagtgcagtggtgcgatctcggctcgctgcaacctccaccccccgagttcaagagattctcctgcttcagcctcccgagtagctgggattacaggtgcccgccaccacgcccagctaatttttttttttttattttggatttttagtagagacagtgtctcaccatgctggccaggctggtctcgaactcctgacctcgtgatctgcccaccttggcctcccaaagttctgggattacaagcgtgagccacggcgcccagcctcaattgtgttttctctgccctgggaagagctcatagacaaatggaggcaggggagctgactcactgatggagcgaggtctgcattccacgggttttctgtgcagttatgggagcatgacaggggaggctccaaaatggaggttgagctgggtcttatagaataaataagtttgctgggaccagagacatgggtgtgcacagactcagaggcaagaaagttgtatgatgagggtgggggggtgtgcggatagaggttgaagcccaaaagccctgaaagttcagtgttgaggctcagggtggggaccctagagaggcaaaagatgcccagccagatggaattggtggtgtgaattgccaggactggaaagagcccagatgggggctgcagcatgggccttggttgaagcctctaatcctgtaagggctgctttggcccaagaggccttagaaacccggtgtaagcctcaatcggtagccggtctggcctctttctcacacttaaccgacacagctct

SEQ ID NO: 35350 - DNA, 853 bp, Artificial sequence
  DNA replication origin
agactctgtctcaaaagaataaaaaaataaaaaagaggccaggtgtggtggctcatgcctataatcccagcactctgggaggccgaggtaggtggatcaggaggtcaggaattcgagaccagcctggccactacggtgaaaccccatctcgactgaaaatacaaaaattagctgggcgtggtggcacgcgcctgtagtcccagctacttggaaggctgaggcaggagaatcgcttgaacccaggaggtggaggttgcagtgagccgagactgtgccactgcactccagcctgggcaacagagggagactccgtccccctgcaaaaaaaagaaacaccagaaaaacccatgttgcagctggtctaggggtctgggtggggcatcattgggggctgtctgcagtggatgggagaggacacggctggtggggatcgggctcagctgggcctttctgtctctgcaggtagctcgtaagctggtcatcctggagggtgagctggagagggcagaggagcgtgcggaggtgtctgaactgtgagtggcagaacaggactgagcgaggctggctcgattcctggggcggagtgggaaggagctggctgtgttgggaattggctctgaccggggtctctgctcaagtggacgggcgtcaggggctcatggctcatcttttctcttggcttctgtgacaaagaggtggtgacttgttcttactgccatgggaagcactgcccacgtgttgaccctttctgcaaagatatgaggaaataggagtgagacaggaggcagcagggaagcccagaagtcccattttcccagagaggatatctcagggggctgtgccatcttaacag

SEQ ID NO: 35351 - DNA, 1263 bp, Artificial sequence
  DNA replication origin
ggagctgtatactcgaaaagtgacccaagccggacgcggtggttcacgcctttaattcccacactttgggaagccgaggcgcgtggatcacgaggtcaggagttcaagaccagcctggccaagatggtgaaaccccgtttctactaaaaatacaaaaattagccgggcgtggtggcgggcgcctgtaatcccagccactcgggaggctgaggcagagaattgcttgaatctgggaggcggagcttgcagtgagccgagatcgcgccattgcactgcagcgtgggcgacagagagagactccgtctcaaaaaaaataaataaaagtgacccaagacgagctccgaggtctgcggcctagcgatctgcttagagatacccaaggcctccgccatctgagcggcttcaccgccacaagctgtgcccggaagcgcgcgccggcctcctcagggcccgccctcggccaccttaggggttgtccgggccagcccggggatggtggggggggaggggttagagcagtgaggatgctgggtcctatctaggggccagggctctcaacgttgaaaaaactggccggggcgttggctcccgtctgtgatcccagtgctttgggaagccaggaggttgagggtgcagtaagccgtgatcgccccactgcaattcggcctgggcgacagagcaagaccctatcaaaagaaaaaaaggctgggcgcggtggctcaggcctgtaatcccgcactttgggaggccgaggcgggcggatcaggaggtcaggagatcgagaccatcctggctaacgcggtgaaaccccgtctctactaaaaacacaaaaaattacccgggagtagtggcgggcgcctgtagtcccagctactcgggaggctgaggcaggagaatggtgtgaacccgggaggcggagcctgcagtgaaccgagatcgcgccactgcactccagtctgggcgacagaatgagactacgtctcaaaaaaaaaaaaaaaaaaaaaaagaaagagaaaaacagaggagagatacatttggaaaatcgggcttgcagctgggtgtggtggctcaggcctgtaatcccagcactttgggagtcagcactttgggaggcaggaggattgcttgagcttaggaggtcaagaccagcccggacaagatagggagatccccatctctacaacaaataaaattagctgggcgtcatggtgcacgcttgtaatcccagcactttgggaggctgaggtggaggttcattggagg

SEQ ID NO: 35352 - DNA, 990 bp, Artificial sequence
  DNA replication origin
ggccaccagcaccgtccatcagcaccgagcccgccccttattggctccaggcccgctgcgcgtcaccgcggccgacgcccgcccctgcgtcccgccagtcgcggggagaccttgggagggggcgagcggagcgcggagccggaagcagcccgagcgcacctcccattggccggcactagggagagcacgggctctgattgaccagcagtgaagagtcgcggggcttcaaatggggacgaggcgggggcgtggcattatgtggcccccgccttccacccccgactcgggcggcccggccccgccccactgtaggagagggaaggcagggagcggcgccaaccgctcgcgcgccggcagcctggcggggcgtggcttggggtgcgtgcgcacgcgcgcccggagttccgttaggcgacagcagagggcgcacgccagtagttggggcgggtgtctctgggtcccgccctcacagctcgcgcaggcgcagtaggcaccgaggcgagcgcgggaaagcaaggtagcgctctcagccttgtctgcggcctgcgagtcggggcagtgggggcctagggaggaaggagagaggaggagctgtatactcgaaaagtgacccaagccggacgcggtggttcacgcctttaattcccacactttgggaagccgaggcgcgtggatcacgaggtcaggagttcaagaccagcctggccaagatggtgaaaccccgtttctactaaaaatacaaaaattagccgggcgtggtggcgggcgcctgtaatcccagccactcgggaggctgaggcagagaattgcttgaatctgggaggcggagcttgcagtgagccgagatcgcgccattgcactgcagcgtgggcgacagagagagactccgtctcaaaaaaaataaataaaagtgacccaagacgagctccgaggtctgcggcctagcgatctgcttagagatacccaaggcctccgccatctgagcggctt

SEQ ID NO: 35353 - DNA, 742 bp, Artificial sequence
  DNA replication origin
tgagagcgctaccttgctttcccgcgctcgcctcggtgcctactgcgcctgcgcgagctgtgagggcgggacccagagacacccgccccaactactggcgtgcgccctctgctgtcgcctaacggaactccgggcgcgcgtgcgcacgcaccccaagccacgccccgccaggctgccggcgcgcgagcggttggcgccgctccctgccttccctctcctacagtggggcggggccgggccgcccgagtcgggggtggaaggcgggggccacataatgccacgcccccgcctcgtccccatttgaagccccgcgactcttcactgctggtcaatcagagcccgtgctctccctagtgccggccaatgggaggtgcgctcgggctgcttccggctccgcgctccgctcgccccctcccaaggtctccccgcgactggcgggacgcaggggcgggcgtcggccgcggtgacgcgcagcgggcctggagccaataaggggcgggctcggtgctgatggacggtgctggtggccagtggagaggcgctggccgcacttcccgtcggggagagagtgtaatatggcgaagacctacgattacctgttcaagctgctgctgatcggggactcgggggtggggaagacctgtgtcctgttccgcttctccgaggacgccttcaactccacttttatctccaccataggtaacgggaccggggaatggctgggggcgccggaggcccgggc

SEQ ID NO: 35354 - DNA, 1142 bp, Artificial sequence
  DNA replication origin
cgcgactcttcactgctggtcaatcagagcccgtgctctccctagtgccggccaatgggaggtgcgctcgggctgcttccggctccgcgctccgctcgccccctcccaaggtctccccgcgactggcgggacgcaggggcgggcgtcggccgcggtgacgcgcagcgggcctggagccaataaggggcgggctcggtgctgatggacggtgctggtggccagtggagaggcgctggccgcacttcccgtcggggagagagtgtaatatggcgaagacctacgattacctgttcaagctgctgctgatcggggactcgggggtggggaagacctgtgtcctgttccgcttctccgaggacgccttcaactccacttttatctccaccataggtaacgggaccggggaatggctgggggcgccggaggcccgggctgggcgcgcccctgaggggctggggctgagggatctacagggctggacgggccgagggcgctgagagggtcgagggggcctaaagggagaagagcagtcgcctgcaccgccgttcgggggttcctgggccgtggtgggggagaccaggtgcccattttgcagatagggagactgaggctccgaccctcagcccgctcgttagggcgtgttatgtcttgggctggggtcttcgcgcccgtcctctcgatctgtcctagcagcagccctcgaagcggttcttttgaggctcttgccttacagaagtggaaactgagtcatggggaattggccatgggaaaaagacagtggcatctcaccttaatgagcatttactatgtgccaagtgcttcacgtgcattttcacactcttcagttcttggtgttaagtgctgttatgagcccgtctgacaagatgaggaatctgaggctcagggagggcatggaacttgcccaaggccacacagtctgcacgtggtgagaatgggatttgatggaatttgaacctggctgtgtctcaacccaaaactcgaggcttagctctcctagagagatgccactgcacactcccagctgatgacaagctcagctaatgcaccttggagccgggactctaacccacaccattcctgctcttttctctggagcgttcagaggttgagcccctctccct

SEQ ID NO: 35355 - DNA, 1293 bp, Artificial sequence
  DNA replication origin
caccacgcccagctaatttttgtatttttagtagagacgaggcttcaccatgttggtcaggctggtcttgaactcctgacctcaggtgatccacctgcctcggcctcccaaagtgttgggattacaggtgtgggccaccccgcctggccattttttcttttttaagaggcaggatctcacttgttacccaggctggactcaaactcctgggctcaagcagttcttctgcctcagcctcccaaagtgctgggaagggtatgatggggtgggcagataagtgagagagtggttggaaggggtggtatatagcagatggaaaatagatctgtttctgaaaaacgaattatcagttgtaagagaattggatggatgggtagaagataatggatggatggttggttgaaagggaataaatcgatggttgatttgttggaaggagatggttggatagatagatgattggtttgttggttggttggaaggggatggatgaatggttggttggaaggaggtggttgcttggaaggggatggatggatggttgattggtcagaaggggtggttagaaggagatggttagttggaagagggtggatggggggaaggagatggatgggtggatggatggttggaaagggatggatggatggttggttggatgaggtggttagaaggggatggatggttggttggttggttggaaggggatggatggttggaagaagatggatggttggaaagggatggatgagtggatggttcttggttggaagggatggatggttggttgattggtttgttggttggaagcaggtggatagacggatggaagggaatgggtgagtggatggatggatggttgaaagggtatagatggatggttggttggttggttggttggttggttggttggttggttggttggatggttggaaggggacagctggacggactggcagatgatggatggatggtttgatggctgattggttggttggatggctggaatggtaatggatggatgacctggcagatgatggatggatggttggatggctcgttggttagttggttggtttggctggtttgattggtttggttgtttggttggttggttggttggttggttggatggttggatggatggttaggtggatggttaggtggatggctggttgattgtgagacgtagtgctgattctcagtgataacctcagaaaacctcttgtgatttcaggaaggcaacagcccccaggggagcaaccagggagtcaaaatcacaccggaccagca

SEQ ID NO: 35356 - DNA, 1018 bp, Artificial sequence
  DNA replication origin
ggggctcataagccggttacctagcaacagggtgggtccccgcgggcggaggcccctgccggttgcctggcaacagggagggtggggagccctcagtaccttgcccttcaggtccagcacgtagacggcgctggcggacatgatggctgcaggaggcctcggcagcggccgagggcggtggcggcggcagcgacggtggggactgctgggcgttgagcaaggccgggcgccgcccgcgacagctcacctccacttccggttcggggagccgcgcggggaccgttatgtccggtccgggaggtgctgtcaggaatgcgcaggcgcaggacggactgtgcgcaggcgcattacgtcgtatgtaaccatgtttcttgctcccgccagaagcatcccggaagtaaggcccggtggggcggggccgaccaaatcagggcacccagtggccgctgccaggctgagctatggagccagagcagctggaaacggcctcccgtgggccgagttaggcgagagagcctggtggtgaaaccgacctggggcccagccctatggagctcacagtctggtggggaagtctatgaaacaagtgtacagtcaccaattgtgataagctcaaaagagagaggtaaggtcgtggttacttggaaagaggtcaaacaaactttctgaatggcaatcaaaccttatcaacagtcaccacctgtcattgtcaacatttatcaatgaatgagtgtgcctgtttattgcctggaatgttatgaaaaccagcctcactgaaccttgacccaacataccgtgtttcatttctgcaaagttagtaatcagtaatgcaactggtggcccttgattaatccattgagtcatatttaatttgcttttatgaactcttgggctttggagaaatgcctgcattctgttccagttagccatcatagtaccctggggatcccaaccctgcaataccagagtgatttacccaggatgcctgcctctcacatcttttattttctgtcttatc

SEQ ID NO: 35357 - DNA, 1598 bp, Artificial sequence
  DNA replication origin
accgccctcggccgctgccgaggcctcctgcagccatcatgtccgccagcgccgtctacgtgctggacctgaagggcaaggtactgagggctccccaccctccctgttgccaggcaaccggcaggggcctccgcccgcggggacccaccctgttgctaggtaaccggcttatgagccccatcctggtgtgaggcagagaggccggtagacctcacctgagagccccatcctgtttctgggtaaccgggcgggggtcttaagtgggtaatccccgccctgttgctacgtaacgcggtgggctgcagccaccgcgttgccaggtaactgactgcaccgccctctgctccccggcgccggggccgggggctcgggcctcggtggaggacccagaagcggggccgcagccggcctcggagccaggcagggcgtccaggggctgcgcgacccttggccgggggtggcgaggcgtggcggggactgggtgctctcgagccagtcccgccttctcagggcgttacagcttctgtttatcgtgcactttctctcagtaggaatttctccacgttcattgtgatagtgagttacaaggattaggtgaggtgagtggtgatcacgagtgccgttttatagagggagaaactgaggcatggagaggtgaagcaacctgaccaaggtcacaatggtcacagagaagtagcaagtctaggagtccgatccagaatcattcgtttattcagctgatatctggggagcacctactaatgccgggcagggtactaagcctggggtcgatttgtgtttagcaaaaaacagtccctttttttttgttttgtttttgagatagtgtcatgctcagtcgtccagtctggagtgtagtggtgcaatctccactcactgcaacctccgcctcccgggttcaagcaattttcctgcctcagcctcccaagtagctgggattacaggcacctgccactacgccgagctaaattttgtatttttagtagaggcagggtttcaccatgttgaccaggctggtctcgaactcttgacctcgagtgatccacctgtcttagcctcccaaagtgctgggattacaggtgtgagtcatgtgccagggctcaacaatctgtgttcttacggtgttcacaggctggtaggggagatggatacccatctccaaaaacacaaataaatgtcaattgcagtggtgttgaggggcgagtgtgttatacagacagtcagcctcagcccgaggatgagagagggtttccctgaggaggggtgacaaatggaccagagacaccagggagctggacataaactagaacccaggcatcttccccagaggatctgagaaaactttaagaagggattgtccccaccttttagaaatggtcctctgccttctcctaagtccatcccaggtgcaaggcaggtggctgcctggcctgttgcatgtggaagcaacaagaaccggtccaacaatgtgaagcccaacattgatcagtgagagaaacaaacatgggtgtcaggtcctaggtgaggcgggcaggggtgagccctaaagcagctgagagtgaagaggtgaaatggctgcc

SEQ ID NO: 35358 - DNA, 840 bp, Artificial sequence
  DNA replication origin
gtcagaggtggagcacttcatgcccatcctgatggagaaggaggaggaggggatgctgtcgcccatcctggcccacgggggggtccgtttcatgtggatcaaacacaacaacctgtatcgtatccctttgctgggggtgctcccaggggactcctgtgtgggtgttggtgtgtgtgcatatccacacgcctgcaagcagggctggtttgtgcacagcgcaagcattggacacagccatgccctcctggagctccctgctgcctgcggagacaggcagacaatgcacgatgacatgtgtgatgggtgtggggagaggagcaggtgtgacttgaacctcttcagcccaggggcccaggaagggaaatgacaccctggaggaagcctgcagggaggcctggcttctgccagctggaggggtgggcaggcactaggcgtgggtgaaggctctgcagggaagagcctcattccaacagctgcactcggggtggctggagagggggcgtgtagggcagcgaggctggagtggtcagcggggtctggggtctcaaagaacatcatctgaaatgtgacaggaagtctctggaggcttttagatgtgtgtcttctggaggtttctggctgctgagtggggcaagactgtggggacaggagaggacatgggtaggtggggagtaggctggggccatcgtgcaggtgggaggggaagtggcctggaccacggaggggtggtggggtacagccccgcccagatctcagagccccccacccttcctgtccttgggcccatggggagacttggccaagccagtttctatccaggaggtctaactggccacccca

SEQ ID NO: 35359 - DNA, 1293 bp, Artificial sequence
  DNA replication origin
ggtacttacacagccgggccctgagcaagcatcccttcagcacccgccctgggaagggcaccggctctgcgtggctggtcacacctcagctgagaaggttctgattgctgcccgcagggccgagatcagcctcgtgggctgggcagcttttcagctccactccctgggcctgctctcgcggcattcacgacctcatgtgttcagttacagctggctgccagggccagtcccaactccctgagggggaggcagcacccaaggggaattaggggccgtcacagtggagtggagggccctccgagaaagaggcaggcaaaatcccaatgctcgggctcctggagccccggccagtgagggtcccgagctcctgagcctccgcttgcccactgagcacctcctgccacacacgctgtttctggtgctggacacggcagcgcgcagccccacgtggcttcccccagcagggagagagagagagagacaagcaggcagacgcagggaagctgttgtgcaccatgggatcagggagccgcttgcgagatgaggacaggacagcacgaggaggtgaggctggggaaggtgacagaaccggagcccttggggccatgtccggttccctgcccctcccagggctgtcatttgcttggcacctcagttttcccaattccctcagaggcggcaagctggtgaggggcttttgtttgtctacccagtgctttttggacatcatgcataagactgcacagactctcctgccactctgcagacaggaaatgcaggccctgcacatgttagcctggctggagccagcatctgggcccaggtatccaagtcggtggcctttggcccacttgctggtgtgagcatggcctcgtgcagcatagcagtgtgcagtggtggccagggctgcagccccagcgattcttctgccagtcactctgtgccctcagcacggggcctctgatctgtgcctgtttcctcacctctaaaatggatgcaagaagagatgctccagcatcttggctcacgcaggacaggctagggggtgcaggaccgtcgccccggtgtggattttcagttgcactttcagatgcatctcggcatgcgcagtgggttacagcccctcaggtcatctccccacagtccctgccccagaggttgtcgaggcgtgtgtggagcaatgcctggcgcagtggaaatgctgtcagtgttagccactgtgactggatttaagttgattattttggatcaagtgttatcacacttcagggtggccctgagaagcaagaaggg

SEQ ID NO: 35360 - DNA, 1068 bp, Artificial sequence
  DNA replication origin
gcgcagtggaaatgctgtcagtgttagccactgtgactggatttaagttgattattttggatcaagtgttatcacacttcagggtggccctgagaagcaagaaggggtcaggactcaggaagcaccatctctcataagccctggggggtgaggggccagtggcctccctgggaggccaagaggagaaacagctttcaagaaaagcaagtctggcctggttcaagagaccccagcccagcccagcccatcggctgagcagggaccacagggtcctggcccaggtccagccgagctcatggactctcaaagctgactcagcgtggggaccagctgccgggccggcccggagcattcagggggctcctgggagggagggactggtacctgatagagaaccctcagagggggctccaggcacgcatcatcaggtcccagtgtggcctgaggcctagagggcaggacccacagtgtccacctcatgtccacagggcctcggcatgaaggctggaggggtgagcctggggaccctcagccaggcgtgggttggtgtgggttaggggtagaccttagccacagctgggactctcccagctcaggggatgcccaggagagggatgggcttggaggtgagaagggcgttgagagtggggtggccagagggtcacatgatgtggtaggaggcagtggctggtgagttggggacctcccctcacgcccacaccgccacccccaggtcagcgccaacggcaatgtcctgcgcagcgagatcgtgggctccatcaagatgcgagtcttcctctcgggcatgcccgagctgcgcctgggcctcaacgacaaggtcctctttgacaacacgggccgtgagtacccttgccaagggccctgcccatgaggatggcctcaccaggcacacacattacagcctagggcagggttgggccaggcggaggaacgagctggtttcaagcacttggttgagcagcacttcacactgcttgagacagctgtgtagagtattcatccttccctggacatagaaggtgcaggggagtgaagatcctccagtcc

SEQ ID NO: 35361 - DNA, 1050 bp, Artificial sequence
  DNA replication origin
ctgaggggcagaggtgctccacctgggggcaacacctctgggagtgtcctggatgcctggctacaggcccctccccacaagtggcaccatctaggagcaggccccaggcggtgtcccctcagtgtcaggtcactcctgcatctgaggccacagtgagggtgcacggatggcagccctacggcacccccagccctcggttaggctcctgggacgggccagagacaccagaaggccctcagtgggtggcctcggcccacgcaccttgatcatgtactcgatgcggctgtgggagtgcttctcgatcaccgactcgatccatatcaaaggcttgacctgccaaggagggcaaagagggtgctcacacctggccttgtttgacaaaggcccatttcagaggggaaaccaaggcccagggcaagggaccatctgcccaggtgtgggcccagagccctgcagggagcgtacagccagcgtcagggagggccagggcagacaggccgaggtagccgggagctaccggggaggccttggggcaaatgcagaaaacatgaccagggcctgctctgggggctgcctgggaaaggggtggtggtggccaaaggggtctgtgcccctcagaaagctcggagtcccaagtcctcagactccatctctgcagagccaggcagctcatggagcgtggggtggggctggccctggcgcctgcctgggcttcacctcctggaggtgaaggggaggaggagtctgccgacagcccagccccagggtggcgcactcacgtgggtgttgagacggtaggacatgagctcgaactcgccgtcgggtgggatgaaggagatggtgcggtcattctcgaagcgtgatagccgcacacactggtggaacttcacatcctccagctccacggatttgcttttgccgcctggggtcaggggtgagggtaggacagatctgggccctccgggtcactatctcagcagtactcctaccacctgcaacccaccccggcagagcagggcccccagtccacgcactgagagcagcctgggc

SEQ ID NO: 35362 - DNA, 1292 bp, Artificial sequence
  DNA replication origin
ctccctgacgctggctgtacgctccctgcagggctctgggcccacacctgggcagatggtcccttgccctgggccttggtttcccctctgaaatgggcctttgtcaaacaaggccaggtgtgagcaccctctttgccctccttggcaggtcaagcctttgatatggatcgagtcggtgatcgagaagcactcccacagccgcatcgagtacatgatcaaggtgcgtgggccgaggccacccactgagggccttctggtgtctctggcccgtcccaggagcctaaccgagggctgggggtgccgtagggctgccatccgtgcaccctcactgtggcctcagatgcaggagtgacctgacactgaggggacaccgcctggggcctgctcctagatggtgccacttgtggggaggggcctgtagccaggcatccaggacactcccagaggtgttgcccccaggtggagcacctctgcccctcagcgaccctgtccagcgcagcctggccctgggacatagacattgtcctaggagggcagggcagagggagggatgaggagccttggaagctgagcagacaggaggatgaagatgaaactcctgaaattaggtcttgggagagtctcgagggcaggagaaggggtgggtagtgcctggagaagtggggccaggggcggggctagggaggatcccccgggccaggctgaggggcatgtgtcctggagaggctggccagctcaccttggcctccataaccccgggccgcattggcctggcctgcaggccaaaagccagttcaagcggcggtcaacagccaacaacgtggagatccacattcccgtgcccaatgatgccgactcacccaagttcaagacgacggtggggagcgttaagtgggtccccgagaacagcgagatcgtgtggtccatcaagtccttcccggtgagcactctgtccagacatccacgtgccccctgcgcctgtctctgcaaggcagcctgggtgcctcaggaccccctgcacctcaagatggggtgacagtggccactgtgtcttccacacctggggcttctgaaagggtggacggagagctgaggactggagtgggaggaagcagaggctgactcggcccctgggcccctttctgccttcctcttgtttgtgaaccagcctctgtcttcacctcagggcagtgccctctccctccctctctgtgatgcccctgagtactgatgtgagatggggctcctgtccatgcaggccctgaaggagccccgtccacactggcaggtcc

SEQ ID NO: 35363 - DNA, 1201 bp, Artificial sequence
  DNA replication origin
gctgctggggacaggggccacacgcccagtctcagaacagcatgtgaaagaaaagagagtgtccaggtgagaaccatgaccagggagaggcgacaaaaggaagaaaccaaggagcatgcactgagtgacgattcagccctgggtcctgctcctgagggtgagcagggggtggctgtggctctgactggaacccgagtcctggctgtgaccttcaccctctctctgccttgaggagcaacaggttgcagcctggtcacccccagcgcctggtctcgccctgagcagtcgggggcacgatctcagctctggctgtgcctgggaccccacagtctctgctccccagggctcaggccgaggttccgtgggagctactgccgcctagggctgtttctgcctcacagcaggggcggtccccgtgcacctggggcagggccgagtggttcatctctgcctactgccaccagggcagcgtgagagtgaggactctgcctgacttggtgacatgtgctgagtacagactccaggaggatgacggggggaagatgcgacatcagcaactggtaaagcaggcagcgagggaacaaacccgctcggtgactagcctgtgccccaaacactcagccagaccccaaatctgaaccttagcaaagaccaaatggaaaacacaaacaaagaaaatgcagggaagcagacgccaggggcgatggaggcctgcacacccagcctgtgtcgtcacgttgagccgagtgggtttaattctgctctcgatgagagctgtaggctggcgccggctcacacaccaaaacccactcgacgccacaaaggcacagtgagaagggctccccgggtaggaagaacaggcattgacaggcgtgctgccaaaggcagacaaaagaggacagggctgccatcatcacaagggagaaaggtgcacaggaggacaggccacaatcctagaggctgccgtcccataagccacagggacaacacaatagtcacaggtacccacgcatgaagtaacatggcagcaacttctgtgaagcaggtgctataggagatgcagagagagccaggagaaggcctggacgcaaggcccggcccagatctccatccaggtggacagtgtcatgtgccatggccacccatgggcacatatcaaattccctaacctggtaacagacagcagtagggacaggactga

SEQ ID NO: 35364 - DNA, 1529 bp, Artificial sequence
  DNA replication origin
gaccagttctctttctttggtgctcacccttttgtccaacaccccagagacgcttctgagacccatggtgcttgctgaaagcatctgggcaccttctcagtgctcagcccttgtccaggcccacaggcagctctctgcccagtctgagtgtcccctgaactctccagccccactcctgaccctcattcattcattcgtttgagtatttatggagcacctgctgtgtatgtacagagactcaactgacacagacagacaaaaccccagtcccggggagtcatgggatgggagacagatgaccttgactgtcaccacatggcacatgggttgtcgggcgggcaggcgcaggaggggaggcgaggacacagcaggatggagaccccaagtccctggagacggggccctgtactgggggctggggctgtgaggagggcacgggggagccacagcgggttctgggcgtcaaggccacctctggccgccgatgggagagggaggaacccgggcaggagggaggtcagggcgccagggcgggagcagggagcgatggtggggccccactggagagcgggtggggagggaattgtgggatttgggtgcagccagagagagtggaagaggctgaggccagcagggttgtgggggtggggaggtcatggggtgagggtggcgtggaggggcccccacaccctttgggcagcatacacatctgaccaaagattcagttcctcaaaaatgccacattggcgcgtgtgtgcacatgggcagagcatgcacacggacacgcacgacacacacaggcacacacacctgcacacagagacacacgatatacagagaggtatacagacaacacacacaacacagacacacacacacaacacatggatgcacacacacacagacacacaacacacagagacagagacacagagacaccacacaccacacacatacaacacagagacacacacataacatatgcacatcaaacacaactacgctcaacatagagacagacacacacagagacatgcaacacacagagacacacacagagacacacatacaacacacacagacacatacgcagagacacacaacacacagacacacagaaactgacaacagacacacatacaacacacacgtacaacacagagacaaacgcataacacagatgcacacatacaacactcacacacatcaaatacaactacacacaacacagagagacatacagcatacagacacacatataacacacacaacacatgtgcaacacagatataacacatagatgcacaccaagcacacacaacacacacagacacacaaaacaaaactacacacacaacacacagacacacaacatgcacagagacacaagcatacaacagccacagagacacacagacaccatgcatacaacacagacatacacatacatcgcttgaacccggaaggcggaggttgcagtgagccaagatcgtgccactgcactccagcctgggtgacagagcgagaca

SEQ ID NO: 35365 - DNA, 1559 bp, Artificial sequence
  DNA replication origin
gtgggggctgcagaggggaccctgcagagtgcatttctgcagaggctgagagtccaagcttccagggcaggagctgcctgcatccctcaccacctggctccaagttcctccttgggatgctcttcctcccatacccacatggtccccaatgactttttcacattagctcacatttcaccccctgggtgagattcagaatttccccattttctccttcccactccctcatctcacactcactttctagtcccttctactgctccatttttctttttaaacccctatcagtaaggccaggcgcaatggctcacacctgtaatcccagcactttgggaggccgaggcgggtggatcgcctgagcccaggacttcaagaccagcctgggcaacatagtgagaccccgtctctacaaaaaaatacaaaaaaaaaaatttagccaggcatggtggtgtgcaccttgtaatcccagctacttgggaggctaaggcaggaggatctcttgagcgcaggagttcgaggctgcagtgagctgtgattgcactactacactccagactgggcaacagagggagaccctgtctcaaaaaaactcaaatgaataaacctctatccttccctccttcactaaagtggaggtcccctagggcagggatcttgtctatctcttggttactgtgtccccagtgcctacccagggctggcagacagttgtaacaggagtgacagtccctggccagcagggatatggtgtgggggacagaggtggagcattgaagggacccattgggcagcattgtcctctgatgcccccgatgctggagctgtattgggggaatgactgtcatcaccgtcctctgagttacttaattcatttatggaagtcagtaaaggaacccagcctgcctgtgcctgccgcaactccaacttctcccagccacctctgcctcagtttccctgcacttgacgggcttattgaggttggggaggagggggtgggtgtctcaaatgtcaaagatttaatgtgtcttgatgttaccacacaaaagttttgttttgtttgtttttttgagacagtctcctctgtcacccaggctggagtgtagtggtgtgattgtatctcactgcagcctcgacctcctgggctcaagcgatcctcccacctcagcctcccactacacccagctaattttttttattttttaagagatgggggccactgtgttgcccaggctggtcttgaactcctggcctcgagtgatcctcctgtctcagcctcccaaagcggtgggattacagatgtgacccactgcaccaggtctacacaaggtgtttttttttacagggtgatgtgcacacggtgggtccctctgggtggtcccacaacagatgaggggcccagcctcacccatccatgaatcctggagactccagacttcccatccatccagggttctgcagccctctctgaggctggagccaatctccccttccgtcaagggatccggggagaccgccaagcccggtgctcccctgagagtctctgagaggccccgacaccg

SEQ ID NO: 35366 - DNA, 694 bp, Artificial sequence
  DNA replication origin
gaaggaggcgcgcggaccgggcgcgggcaggcgcgcggggccgtcggggctgagcggcggtgtgtcgggcggcggcggggggcggcccccgggacctcgcatgcacgaagccgccgggcccggggcgccctcgcgcttgaggccgcgcggtccacgggtcagcccgggggcgcagccgtagccgccgccgccgtccgcttcagggggctcggccttgaccaggcggccgggcggcgccagcagaaagcggccgtgcagtgcgggccccagcggcgcatccagctcgggtcgcagcagctcagacaccaggccacccgcgggggcgctgtagggcgggggcgcgccgggttcggggtaatagaacgcaggcggcgggggcggcggcggcggctccggggcggcctcggcgcccaggccatccagccccatggacaggatgaagtccagcacgctgttgaggtcgtcgtcggtgccgccggactcgggttcggcgcgcggccagcgctgcgggcgacagggcaatgggcgtgagcgggcggcggggctcggggggcgctgcttgccttttaccaccctaagtccgcgatccccgtggcccgcatcctcctctcctgagtctgcagtccccgccttcgcgtcctgtcaccccgcagcccacgttctactaccccgagcccgccgcccacggtcccgg

SEQ ID NO: 35367 - DNA, 1443 bp, Artificial sequence
  DNA replication origin
gcgcccccgggctgacccgtggaccgcgcggcctcaagcgcgagggcgccccgggcccggcggcttcgtgcatgcgaggtcccgggggccgccccccgccgccgcccgacacaccgccgctcagccccgacggccccgcgcgcctgcccgcgcccggtccgcgcgcctccttcccgccgcctttcggtggccctggtttcggcgcgcccgggcccggcctgcattacgcgccgcctgcgcccccagccttcggtctcttcgacgacgcggccgccgccgcggcagccctgggcctggcgccccccgccgcccgcggtctcctcacgccgcctgcgtccccgctggagctgctggaggccaagccaaagcgcggccgccgctcttggccccgcaaacgcaccgccactcacacctgcagctacgcgggctgcggcaagacctacaccaagagttcgcatctgaaggcgcatctgcgcacgcacacaggtgggcggcacgcacgagccaggagcgcaggcggggggacgcgggaggagaggtcggattcccagcgcgcgccagaaaatgaatttaggacctcccttggggcgtggctcagggggatctggcaggtggtgcacgcttaggactccccaggaggcgtggctcgggaggttggttgggggggcacacaggaacactccctaaggaagtgtgatccgagaggttggggtgggggcttgcacgcttaggacgaggggggcctccggaggttgggaagagcacttagaaaacctcctggaggcgtggctagggagacagtctcagaaagttggggagggggagcaggtttaggagccgctgggcacttggctcagaatccccggggctgaggctcaggtagttggggagtaggtgcgcgtttaggaaccccggggagatgctgcgtctcaggaagttggggagggcgctcaggcttgggactcctctggggacaaggctcaggaccttggggagggagtgttcgctgggaaaccttgagagattccgtgtcttagaatgctggagagagggtgcatgcttaggacccgtcggggagcgtggctgacaacagtggggagtggaccttgcgctcctccgaccccctgggggtgaggatccggattgtggggggagttggggatgtagggcaaggatccctcaggggcgcaacactaccgcggggagcgcgtcaaggccctggttagggataggttgcgctcgccggggtagccatacgtgccctgtcctgggaggggaactgacgcttactctcgccccctccctgcaggtgagaagccctaccactgcaactgggacggctgcggctggaagtttgcgcgctcagacgagctcacgcgccactaccgaaagcacacgggccaccggccattccagtgccatctgtgcgatcgtgccttctcg

SEQ ID NO: 35368 - DNA, 965 bp, Artificial sequence
  DNA replication origin
tgcttagggattcaaaggattcccttattaatgtctctctgcgatgcactgcctctgaccagctctctgctcaacactggagtaacaccaaagataacatgcgcagtggctcttccccaggcacccttgggagcagaaatatacaaacaatcccagaacgatccaggacccaaggacccaggctctcgaggagggccctgcagactaacccaggaaggtgggggaaagaagcacacaggaacactcacggcctctccaccacacgcagcactaggtctgcgtgacaacctgggggtgggcccgctgtcatctcatccctctgacagctggggacactgaggccagggaaggggtggctcacactctagactttttcccccccaggcctgtggggagcaggatactaggtgaaactgacagggaggatgcgtccctgcgaggttctgggtgtgaggctcagtgcccgaccttggggtagccaggatgaagcgtggggtgggataagccagactgaggaggggctcgtgggccccaggaaggagctgggatttccccgtggaggctccttgggcgagcgagttgggtgatcagattggcagcgtctggatatttcacggcttgatggtggcatgagcgggaagcaggagagaggagggccagatggcagggctggggggactgggcaaggtgcaggagcagataaatgcaaggaacctggttgggaggcagatgtggcagtgagggggatgcggggccctggaggcctccctctagctggcctcaggacccagatgggggacaggcggagtgtcagtatcaagaaaagatgtccctgggaggaagggctgagtcttgacttcttaaagaggcactgcccagctaaacacttgggggtctgatgagtctccaggtcggactccctccccgccattgtgtcactgccaggggcacagataagcatcccc

SEQ ID NO: 35369 - DNA, 2176 bp, Artificial sequence
  DNA replication origin
gcatagccaggaaagaagccctgggtttgggggttcctggggaaggaggtgccacctggacaagactggggtgtcatccccaagcgggagaagccctcaagcagtctgggcagggtgctggggcccacctgtgttgaggccactttgctgggtgggtttggctcacagggaagggagccgagctggtgggcggccgatagggagatgaggcttctagggacgggagggtggaggtgaggggccctcgcccaccctccatcctgctcaggagccctagggagccccttctgctccagtggacagcctggggctcacaggaggctgggcaggcctcacttgacccccgcccgccagagctgcctgcccgtcccttaggagagggaacggggcaactccgggagacctggcagcgaggccttggcttaccattggctcatgcctgggaccaggagtggccctgcatgggaggccgtctcaaggtgggggtgtgaggcagttcctcaaggccagcggaaccagcccggggtctgcgggctgggccagatcaccctgctctctgcagccccggggaggtcggggtaggaggaggccgcagtagagctgaaggtgggagggacatctggggatagaaaaagggagacacctagaaagctcgggtgtggggactgccctgagagggcaggcgctgtcggaaggagaggggccacattcctgtcctgcccgcgtgggctgggcactgcccctctagggaagggtctccagcatggcttgcccacaagttttggcaaagataggccccttccagattgcagggccccctctgctaactgggccttgggtctgacagtgaattgatttgaggccacaggaggagactgataccaggcctcgacctcccctctttctcatccatgtgagtcctaatagagcccaggacagctcgccctccaaccctgaggaggagcctcttagatggactcacacagacaaggagtctggaaggatctcccgcagctggtggccagaggtcagctaaggatgcaacggcgaccccggtggaaccctgtgggacgggcagaggcggacaggcaggccgcaagggtgggctgcaggggagtttgtctccgagtccttctgtgcaaaccgtgggaaggaagactgtttttccttgaatatgcaaaaagaaagcagcagtccttatgctggcccagaactgccggttgagagaaaagtgaatttccatttccagaagtagggctacaggcaagggggggctacgggccaggttctcactggcctatgctgggcacggcggtgcaggacactgagtgggaggagactcctggaccccaggaatgtcaccttgtttggcgccctccttctcatttccacttcacagataaggaaacggaggccagctgggaggaggcactttcccttgccgaggcccagagctaaaggtggcagatgggggctgtagccccggagcccacaaggacacctggggcctcaaaaatgaggcctgggatggctgatctgctgggggaacagagggaaaggctttagatctgggcatggagagggaccgaggctggcctgtgtgggctcgttctaccggatgaggaaggcaggtgtcccaggctcaggtggtgggcggggcaggtgtggctgggagccagggtgctctctggaggtgcagccagagatccaaggtcaaccctggagggacaggcagttcctggttttttctaaacattagcttcgaaacttccagagttaacacgccggaatcgtgttgcatattattgagcttccagtctggggtgctgcgtggaccacgttgaatgcccagggactccgttgggcagatagaggggtgtcaggagcatggagtcagcccggctggcctgcaaactgcagatgctggaaggcccgtcaggtgggacctcccgtcaccaagcagatcttaacaggcctctgcttcttggtggaatgttctggtacattggcaggatgcactgggaaaagctaccatcctcaggccatgtcccccacacagtgtcattttcctccatttctgaacacttctctctcacctccctgtcaagatataccttgctgggaccgggcatcctggagttccctgcttggcagaagcccagaaaggcccagataa

SEQ ID NO: 35370 - DNA, 1141 bp, Artificial sequence
  DNA replication origin
tgcccattccttttgtttcctgtcgcagtgttatctctttgtcctataatttcctagttattttgcatttttgtaacaatgtgtttcctctgttagtaaaaatgtagttattttctattttattacagacttaattattttctgttttagtaagagtggttactcatccttcttctgcccatagaaagtgattttctccctcctgggacaccccagccccttccctcagacgcctgagatatgctggcccttctgtggctgatggagaccctggctcccctgtgcctcaccggcgctccaagtgagggacaagcatccccccaggtggcggcgcttagtatctgctcatcacaggcctggaggcagcaggtgccggggagaggactgtgcttgccctccaggtgggagaggcctggaagcgtgtctctgtggctcagtgagcagtgcaggcgtgggtggcaggaagcagccccagggagagccctgggagagctctgggggacggcagtggggtccagccaggctctgagcaaggagaggggttcctggtggacgaggtgggccgagttccccagcaggagacctgagtgttgcaggacttggaaacaggaggctgagtcagcggctggggggtcagtgggttctggggactaaggaggcattgtgaggggaggggtgacttcagaggtgagcctgaaaaatcaggcagctggggcagcgatgaagtccctgcatgccttaatgagagcttggagcttccctataggaagtgcctacctacctacctacctgcaagacgtcgccacatatctgcctccctgtctaccacccacccgcctccctgtctctacctgcccatccatccatccatccacccacccgccattcattcgtccattaatccacatatatgtctatccattcatccaactaccattccatccatctgcccacccaccatccattcatctatccaattgttataactatctctgactgtctctctctttaagctggaggatatggtccgatttgggtttgagacagcaggtgtggggtggaggatgtggatgggtgtgatggaggctgaccgagggtccgggccagaggtggtcagagcccagtggaggtggcgtgggca

SEQ ID NO: 35371 - DNA, 1460 bp, Artificial sequence
  DNA replication origin
ctgtctacggccccgccctctcccgggacaggcggcctgcgcaccgccctcccgtcgtcccagtgcgcacgcgtggctgcagccccgcccccgttcccccggcgctcggagcccgagtccgcgggaagatggcggcgccgctcatccccctctcccagcaggtacgggccgggcgggcctgggggcggcgccggggtgcggggcgcgaggcgagcggtgcggcgaggctgaggcgctgggagactcagccaggcggcggcgggggcggcgcgtgctgaagggcttgcggcgggcgggtgggcaggcggccctgaaggtgacaggccgggacccgcggcctcccgtgcccgagcgaccctcgcgggcaccggcgaggcgaggaggtgcgcagcgcgtgtcctctccgcccagggcccggaccctgccgccgctgaagctcccaggccggggacccgcggaggcgctgggctgcatcccggaggggtgggcgaggggtgcgagcgtttctgtcggcgcggcggcccagcgagtctttgtctccctccggtcccggcgcccgggcgggcagggtcccgccggagcccggacccgtcagcagcagtgcgatctcagactgatcccctgcctccttggaagctgcttccgccacccctgcaccgggcgcagatcgtacgtctccgggcgcctctctgtgtcctcaaattcgcctgatgcgcttatgaaggggcagtatcgatagcgcgacacagacatgcgaaaaagagccatgcgtaggcagctctgttatttgggagagactttcattcattcattttctatccatccctcaaatgtgcgttgggtcaggtgctgggagcgctgcattcttccagacagacaaggtcgctgctttcctggaggtgacactcgtgggaactagaaactacctgtgttatgctaatcacagctgcctttatttgctgaatacctgtgttgtgcaaagcaccatataagcattttgctagaatgatctagcacagcatggtgattaagagtgaggacacagggtcagatcatgtgttcaaatcttggctccagccccgatttctctgtgcctttggttgaagctcttagccattccacccatcagttgcttcctttggaaaatggagatataaaaatgtgttgggattatgtgaaaattaagcacgtgaaaaagcgcttagaacagtgcctagcatatgagaggcactcagtgatcctataattactgtcatcatttaatctctgccagatttggacgtttgggagtagagaccgcagcaattaagaattccaaacccaaagagagttgataggccggttgcatgcttgcatgactggttagctgatccaaggagagagaagtgcacagctagccaatttgcaacactgtcactaagttaacagtgctaaaacccggtgattattaattagcaagt

SEQ ID NO: 35372 - DNA, 1635 bp, Artificial sequence
  DNA replication origin
cctccgggatgcagcccagcgcctccgcgggtccccggcctgggagcttcagcggcggcagggtccgggccctgggcggagaggacacgcgctgcgcacctcctcgcctcgccggtgcccgcgagggtcgctcgggcacgggaggccgcgggtcccggcctgtcaccttcagggccgcctgcccacccgcccgccgcaagcccttcagcacgcgccgcccccgccgccgcctggctgagtctcccagcgcctcagcctcgccgcaccgctcgcctcgcgccccgcaccccggcgccgcccccaggcccgcccggcccgtacctgctgggagagggggatgagcggcgccgccatcttcccgcggactcgggctccgagcgccgggggaacgggggcggggctgcagccacgcgtgcgcactgggacgacgggagggcggtgcgcaggccgcctgtcccgggagagggcggggccgtagacagggccacgcatgtgcagtcaggccgggaggggcgggggcaggggcggggccgcccacacgcagcctggaggggctgggcctgaggcatctgcgtcttccgtgctctcttgcccgttcccctactcctccttccaacgttgttcggactctcatgccgctggccgctgtccgagtcgaccatgctgtgtcatccctccagcccatgccgaggcctggttctctgttagggatgccgtccccctgccagtgcgcctggggaggcggtcgcccaccccgcggagggtcgggaccctcaccctgccccgcaaagcgccctgttcctaggatcgcagtgtgtgtgtgtgtgtgtgtgtgtgtgtgtgcgcgctaatttgggggacccgcaccctgcccccctcaccctgccccgcaaggcgtcctcctggctgtggtggcgggcacctgaaatccaagctactcaggagactgaggcaggagaattgcttgagcccaggaagcagaggtttcagtgagccaagatcacaccattgcaatccagcctgggcaacagaagcgaaactctgtctcaaaaataaataaataaataagacaagaacccacttgttgccaggtacagtggcttacacctgtaatcccagcactttgggaggccgaggtgggagggtcatgaggtcaggagttggagaccagcctggccagtatggtgaaacatcaatatggtgaaaccccatctctactaaaaaaaatacaaaaattagcaggtgtggtggtgcatgcctgtagtcccagctactcaggaggctgaggccagagaatcacttgaacccgggaggtggaggttgcggtgagccaagattgcaccactgcactccagcctgggtgacagagtgagactctgtctcaaaacaaagtcaaaaacaaaaagaacccacttgtaactgttgctaatcaaagcatacattcagggcaacttgaatctgtgtctcctggactgcggtcctcaaccttggcccaaactctctacttatattaactttgcctcagcttcttttgttacatcaatagagtaatgaaggtttttaacagtcttgagtgctttatcagtacgtattccataaggaaaagagaagtccttctaggtacttcaaacagag

SEQ ID NO: 35373 - DNA, 1136 bp, Artificial sequence
  DNA replication origin
cgttgaagccatgggggggagggccgaagtcagggtgctggggtccagcccaaggcgggtgctcgttgatgccaggatgaggcatgcggtggccagggtggtggtgagggggccccatttctgcaaaacagagacttgcctcaggaccacaggccagtcaggatctcccaggcgacaagtgctggaggggaggggctcagtgaagggccaggagacgaacccctcctgggagcctgtccagcatcttctctcactgcttaagaccaggcagcaaggcaccgaggagccaggctccgaggggcctgtcccgcacccataggcacagccgagggagcttgaggctgagagaagagaaccccaaaaccccaaaactgcacggtgagggctaagttgtgaccctccgaatccatacgctgaggtcccagcccccagtagctcaggacggaactgtatttggagacagagccttcaaagacacaaatgagttaaaatgaagccatagtggcccgaatccaacgtgactgttgccgttataataagagattaggacacagacatgtagagagaagacggtcacctatgagccaaggagacaggcctccaagacactaacctgaacccgccacacctccaccttggacctccagcccccagatccttaagacaatacattccagctgttgaagccgtccaggctgtgggacttatcatgtcagcccaagccaaaaagtaaaagcaataaatgtgccaagcggtcttcaagctgcatttataatcagaaatgtatttaaagagagaaggctgggcatggtggctcacgcctgtaatctcagcactttgggaggccaaggcgggtagatcacttgaggcccagagtttgagaccagcctggccaacatggcgaaaccccatctactaaaaatacaaaaattagctgggcatagtgactgatgcctgtaatcccagctactgaggaggccaaggtggaagaatcacttgaacccaagaggaggctgcagtgagccgagactgtgccactgcactccagcctgcgtgacagtgaggctcagtctcaaaaaaacaacaaacaacaacaacaaaaggccaagcgaggtggctcacacctttcatcccgg

SEQ ID NO: 35374 - DNA, 1399 bp, Artificial sequence
  DNA replication origin
cccatgaccctgtgtctgtcactgtgcactcaggagcatggcagggccacaagcagcgccaccagcctgctcggcaggcgagccgtggatgcctccgccaggccctacccaggcgcccgtacactcaccggcagggaagtccccctgggggtagtcgaagcggtggggatagggcggccgctcgaaggggtgccgtggcgggaagtcgtcctgcatgaagcggggcgggaagcggttgaagttgtgggggtgcggaggctggttgaactgcgggtgctgctggtggggcgggaagggcccccggaagtgtgggggccgctgcatgcggaagggtggctcgcgctggcccccgccccagggcggctgctcgtgctggctgttccaggggccctcgaactggctgttccaggcggcgtcgggctggttgttccagggcgcgtcgcgctggccgttccagccggggtcaccgcgctgctcgccccacatgccctcatggctgttgttccagggggggcagtggggtgggccgccctggtggtgcgggtagggtggctgctctggcggctgcaagggaagggacaggcttgagccctgcgtggtctaggccctagtgctcggcagcatcacagcgctcggcagcatcacagcgctggctcagaccatggaggcgctgccctggccacgttgaggcgcctcctacgctgacgcctgcgaggatgctgggcacctgctctcagcccgcaccacatgctgctgcaaaatgaccagacacccaaccgctgcacccgcatctcagtcccggggctgtttctgccgctggggcgcgctgcacccgcacacaggccgcccgcgccacaaggtgctccccgctaccactgccagacaaacgccagctccctcgcccctcaggggcaggtgcagaggcacagacggtatcgcttctcagggcaccccaggcacccatggggcggggctcactctgacaccccctgccctgcctcactccccctctccccaaaagccgtctgctgggcagatacactgcggcacacacatccttgtcctggggtctgcttctggggactttcaaaccaagccagcatcttcctgtagactgaagacgggaggctcttccctcatcagcttctgctctggagacttaaagccaggagggcaaactccagcttgggcaggggaggggaggagcacagaggccaatgagaaggccggtgtctagggtcacagctgggtaactgcgctgacccctactaaggggaggctggcccaggctgccacattcaccaggcttccaagagaagccagagagccagatattaaatatcaggaactacttgtttttctttttcttaatttgagacagtctcgctctgttgcccag

SEQ ID NO: 35375 - DNA, 1490 bp, Artificial sequence
  DNA replication origin
cttggcctcccaaagtgctgggattacaagcgtaagccaccatgcctagccaattatattttcagtctgtgcattgtccttcctgcctgatgtaatagttaccctagtcttggggaatgatctgggtacctttcctctatttcttttctctgggaacaggaaacagatcttctgctgttcaggaatgggatggttgtagttttactctaggatcacctggctcgtgcttgtaaatggatgaaaacctgggcctaggagcaggcctgggacgagggaacaagaactgagtctgagggtggcagactgctttctgactacactcggtgcccagcctctgggggctgtttcctgggggcaggctgagctgagggagccccgtaccaggctgggtggtgggcgggatggcaggggcaggtgctggggccgggggtggagcaggcggtggaggcgtggccttgacttcagcctccatctgcggcatctggagctgctgctgctgctgttgctgctgctgctgctgctgggccaggctggtgacaaactcctcgtgctgcgtcttgagggtctggatctgctgctggaaggccagctgcaccggctggaccactgaggagtactcgttgatgagggtggcctgagagagagaagagcacccgctgctcagtatgcggccttggggctcgctgcctggcgccagaggacaaacgcctggaaagcagcagagcctgggggacctggggcaggtggacagggaaccgtcacgtgaaacagccaacacagtctgggcaatcagtgtgcgctgggatctggccagagatttggggatgaggatgttcgctgcagcgtgttttacgactccctgataacagaacgagcaacgacagccgtgtcctggccgcttcgtggctgctcagcgaacactgcccaccaacattctgggacacgctcatgggctctgcctcccactcgccatgtggctctcagcaagaggggctgccacagcctaagccacgtctgggcttcctcatgcttccaccacaccggaacatgcctgaccaccagagcaaatgggccatgtgcaatgactccgaaaggccgcctggttctagtgttccaggaaagtcagggagacacacctaaggcctgggaaatgtcacctgggactctctggtcaacacacactggctactcctagcacaggcaggggacatgggctctctggctgctggggtggcagctgctgtccccacactcccaaaccctcctggggaacccgccccagctctagggtgaggtgtgggtgggcagggacactcacctggtactgaccaagccccagggctgggctctgtagctgctgaatgatggagtcatcgaagtagccgtttttctcccagagctgcaggagctggcggtgggaggagagagaggccgggtcagtggggaggggaaaggcctgtgtgtcccggtcttgcccaacccccggcccg

SEQ ID NO: 35376 - DNA, 894 bp, Artificial sequence
  DNA replication origin
gcaggggacatgggctctctggctgctggggtggcagctgctgtccccacactcccaaaccctcctggggaacccgccccagctctagggtgaggtgtgggtgggcagggacactcacctggtactgaccaagccccagggctgggctctgtagctgctgaatgatggagtcatcgaagtagccgtttttctcccagagctgcaggagctggcggtgggaggagagagaggccgggtcagtggggaggggaaaggcctgtgtgtcccggtcttgcccaacccccggcccggggcccacgcacccgggcgatcttctgctgcttgtcttcctccacggccaagaagctggtgcagtagatgggcaccacgaccttctgcagggcggccagcagctcccgggcctgcttgcgctggctgtgagggagagactttccgcgcgtcagggccctggggcgggacccggccacgcgcccgttaccatcgcggctccagcctcagcgccctctgccttctcgggaatcgggtccccaacccggtcagggcgatggctgggctcccacgagacctgtgctggtgcctgggctcgaggaagggacagatggaaaaacagcaagcaggggagggagagaacgtggcctggggccgttctgagcaaggccttttggtccagtccccttgataggaaataaccttccctccttccctcttgggtggcgctgcgggtgaagggatatgggccggcgggagcccctgcctgtgtatgatgggcgggatgggactgctgcggagtgggggtcttgtccttgtcactcactatgcacaaggaaacctcggcccaggccaggcctcttgggagaaggagggagggtgcccagtccctcaggaacctagaac

SEQ ID NO: 35377 - DNA, 903 bp, Artificial sequence
  DNA replication origin
gggcctgggctgggcgagcagcacttggcttcggacagagtagagctagagaggcgcgtggctggagaatgcgggaaactgtgcatccgtgcaaggcacccgactcagaggcagggagaaatggaggcatgaggaggagcagaagggcagagctggtgccgagccgcaactcacttcccagcaggagagaaacagggactgaggtggggaggcaagagggactcaggcagtgctgcatgtgatagatggggcgagatgggtgctggcagcctggcccactgtagaggcacacgaggcgccaggccaggactgctgcccgctaggctcagtagcaatgcttgtctcctcccgcacgtgcgggcctttggcctggggttctattgttttttttttcttttttgctaatttttgtgagaagggccccagtgaccctgtagaaggaaatacccacccaaccttggggagggtggagacagcaacagtgggaagggtgagggctgggtggggacagagggtcggcagatgtggctctgttgaagcctgagagatgggtcagggctggagaaggggatcccaaaggagggtcctgatggctgagcaaagtcaggtgaccgcgtgtgtgtgcgtgcaaatcagtgacgagggcaggagacagacacagaggccaaggaggccgtggctgagaaggcaacaaggagacgccaagaagctgccccatgagaggaaggagtgcaggggacagtggcccccaggagacagcaatgtgacaggtgaggccggggtctaggggagaggacagggcatgcagcgaaggtgcacaggacacctagacctcgcagtcctggagacagaagcctggtggctcacagagaccccccacccggggtccccggacaagtgccc

SEQ ID NO: 35378 - DNA, 1010 bp, Artificial sequence
  DNA replication origin
aaggggatcccaaaggagggtcctgatggctgagcaaagtcaggtgaccgcgtgtgtgtgcgtgcaaatcagtgacgagggcaggagacagacacagaggccaaggaggccgtggctgagaaggcaacaaggagacgccaagaagctgccccatgagaggaaggagtgcaggggacagtggcccccaggagacagcaatgtgacaggtgaggccggggtctaggggagaggacagggcatgcagcgaaggtgcacaggacacctagacctcgcagtcctggagacagaagcctggtggctcacagagaccccccacccggggtccccggacaagtgccccctagtctcgggacaggccaagccaagctaccgaccggagcaagcggccacccaggagggttgaggaggagcgcgaggaagtggcgctctgggcacggggtggcggcgctcaccagtggtgcagcacgtcattgatcaggtagatgaggtgcagccgcagctcgaagtgtgccccatcagccgtgatgcggttccggaggtggccggccatcagctcacagtgcggcggggacttggcattgctgaacatccagttcttcccggcctgcaacaaccgagccaatgacgagtgagcagggccgcggctcccccaggcacccactgcatccctgagagcgcgtcaccatcagctcagggaaggacacaccatgagcgtggggggcacagggtcccacagcctcaggagctccaggcgggagggaagggcacccattgtaacagcccttagcccagattggctacgacaggccctgcctcagggagggaccaagggaaagctgggctctgggaagtgctggcccctcaccgagatggcgtccttggtgcacgtgtcgatgatgggctgcaggaggttgtcaaactcgttcatgtctagctgggtctcctccagaagcttctgcatctgctgctccaccgcgtgggccacggccgctgtcacttgctcctgcggg

SEQ ID NO: 35379 - DNA, 1865 bp, Artificial sequence
  DNA replication origin
cattgctgaacatccagttcttcccggcctgcaacaaccgagccaatgacgagtgagcagggccgcggctcccccaggcacccactgcatccctgagagcgcgtcaccatcagctcagggaaggacacaccatgagcgtggggggcacagggtcccacagcctcaggagctccaggcgggagggaagggcacccattgtaacagcccttagcccagattggctacgacaggccctgcctcagggagggaccaagggaaagctgggctctgggaagtgctggcccctcaccgagatggcgtccttggtgcacgtgtcgatgatgggctgcaggaggttgtcaaactcgttcatgtctagctgggtctcctccagaagcttctgcatctgctgctccaccgcgtgggccacggccgctgtcacttgctcctgcgggcgggggtcggtggggtcgagaacacatgaggagggacccgcagcctgagccctccggcctggctcagcaggggcggggtggggacatggtggcgatgcccggactctgggctgctctggccatcagctcccttgcttgtccccagcaggaggagattctgtctctcatgcctgccgtgaatctgtgacagtccctcctggagtgggcagggcactgacaggacataccaggagacaacacctgccctccaggtaaccaaggaaaacactgcagcccagaggaacaaacaacctctgcaaaccaactcaacaaaaaacaaaggcggggcgcggtggctcatgcctgtaatcccagcactttgggaggctgaggcgggaggatcgcttgagcccaggagctccagaccacctgggcaacgtagcgaaacctcatctctacaaaaaataaaatacaaattagttgagcatggtagtgtgtgcctgtgttcccaactacttgggaggctgaggcggaaggattgctggaacccaggagttcaaagttaaacagtgagctgtgactgtaccactgcactccagcctgagtgacacagcaagaccttgtctctaacaacaacaaaacaacaacaacaacaacaacaaaaagaaaagaaaagaaaaaaaaagacaaatgaggcatggtgtgaacgacaggcaatagaagaagaggatacacccatggcctctagtgaagcaagaagggggcaatctcattcctcaagaggaaacaccggttaaagtgcgactggtaaaaacagagctgccatgcggaccagcggtcagttacggctggtcaaggcaggcctcccactccatgatgaacagaagctgagggtgagcattctggaactttcttttcttttcttttttttttttttgagatggaatctcgctctgtcgcccaggctgaagtgcaatggcataatctcagctcactgcaaccgccacttcccgggttcaagcaattctgcctcagtctcccgcgtagctgggactacagacacctgtcactgcacccagctaatttttgtattttttactagagacagggtttcaccatattggccatgctggtctcaaactcctgaccctgtgatccgcctgccttggcctcccagagtgctgggattataggctgagccactgtgcccagctggaattttctgagagcaatatgacagtgtgattttatgccctgaacctagtactgagcgtggggttggtgttttggaggtttggtattctattcctctcatttttctggcaatgcacttgtagtattttatttatttattttttctgagactgagtcttgctcagtcacccaggctggagtgcagtggtgcaatctcagctcatgcaaccttttcctcccaggttgaagcaattctcc

SEQ ID NO: 35380 - DNA, 2571 bp, Artificial sequence
  DNA replication origin
agtcggggacctggcttggagaggagtgaggagtgtatcctggaagcgtgggagagactcgtggaaggtttaggtctgtgttgtgaagctgggttagccacagtacagccagttctgcaccccacgccttaaagcctgggcctcaactgttgtagaatggagcttcacgaactctgtggtgaaggaccatttctggtgttgtgttttaagtttctaacctgttgtgtgtggaccaaaacttctgcaaagcacagtaacaatgtggaccgtgaaccatcacgctgctagaaaggttttgaaatgctccctttctggttccataaccgtctgtcaccgctgggtagcccagggaccactccataagtggcaataccatgactgccatgtcaaaaagaggtagagggatgggacctgatgcaggaagaccggttctggggtgacgcaggtgacagcagatccatggtggtgacagcggggacatagactgattggagtgatgtctcggaggccgccttgacactatgtggctcgtcactgggaggcacatgctacttctggcctgggtttctgggcagatggtggtgccaaccatggtgcggggagcacaggaggggacataggtgtagggggtgagaggaaacacaggccccttggaaacacagtgggccgtgcagttggtggttagggccaaagctcaggaatccagaatggagatgatggatttaggaatcacaccatgcacaatcgcagccacaggaatgagtagctcatgttgcccggcggttgcgtagagcggaggacagggctcagaacacaggccgcgcaccccagcatgtgagggtccaacgggagaggggttggtaaagggggagaaagggactgagggggcgaacacatggaggccaagggaggcaagcacctgcgacaggcccggggggctgagttgagtgagggtgtcctcagctgcctgggggaaggaggggggtgcggggagtggcaagcaggcaccaggctgagataaaggggaggtgaagatctggagtgagtcttgtctgagaaatcgtttagagagggatcatggggtaaagggagaagtttccaacccagaatattctgatgtgtttatttatttccttttttattttttgagatggagtctcactctgtcacccacactggagtgcagtggcgccatctcggctcactgcaacctccaccttgcaagctcaagcaattctcctgcctcagcctctcaggtagctgggattacaggtgcccgccaccacgcccgactaattttttgcattttcagtagagacagggccatgttggccaggctggtctcgaactcctgacctcaggtgatcacccgccttgtcctcccaaagtgctgggattataggcgtgagccatcatgcccagcccaatgtgtttagatgctgctggggagggacgggtaaagagggaggagttggagaaataagagatagaagaaatatcaataagcagtgtccctcagacagtgggaggggtgggattcagtgcagaagttgggggtcatcctgtagggtggctttgggtgcacaaactggagggcacagtcagccccgagacttgacttgagcgcccagtgaggggcgacaccttccacctgacaccccacctcccttatctttggctttgtcctggtccccttggagtggggctctggagggctccaggggtacctggtcacatttagaccaggcggccccaagacggagagagaggcaggtcatcttgtccagggcctccttatgagccgggtcccttcctcagagacctcaccacctgccccatctggccagagttgggacctgcgcccaccctgacccaggcttctgccggcagaatgggtgtctcactgctgcctcaaactggatgcacccctgaatgcagaggggtctctgtccccaagggctggagaagcaaggagagtcagtagaaggacaaggcaggtgtgggggaggccgcagtgtgcgctcgggggtgcggcttcgtgcctttctggccagatgtgcagaggcccggtggctgtgacatcttaacagtcaatgggtagcttaagtggcagaggtcagggagtggccgaggaggtcggaggatgagaggtactgaggcctgggttctgcatcaggtggggcctaggtgggtgaggaggtgggcaggcaagcttagcttgcaccggaaggacactgcgcaaggactggatggtgctggcgagagagcggccaggggacttcctaggttctccgaggaggggacggcccgaagatggaatgctgaggctgggatcctgtgagagggagggcaggacccgagactaggaggagctggtttgcgtgggcatgaggctatgaacaggccctcgtggatggtgagtccctggggagggggaggcccctgtggctgagaggtggccaaggggacacctagacccccatctgcattctcatggggcacccctcctcctctccctccagtcatctgcaagcagcagaccccggagctggagccagccgccaccatgcc

SEQ ID NO: 35381 - DNA, 867 bp, Artificial sequence
  DNA replication origin
acggtgctttggcttgggtgactgagctaagggctgctttccctttctggggcgggggggtggccacttggaagctggtgccattatgaggaaggagagggtgcttatgcttatagcccaggaagattgaagccaagaagtgctttcttttttttttggagatggagtcttgctcttgttgcccaggctggagtacagtggcaagatcttggctcactgcaacctctgcctcccagattcaagcgattctcctgcctcagcctcccaagtagctgggactacaggcgtgcgccaccacacccagctaatttttgtatttttagtagagatgtggtttcaccatgttggccaggatggtcttgatctcttgaactcatgatccgcccaccttggcttcccaaagtgctgggattacaggcgtgagccatcgtacccagccaagaagtgctttctgtgggtgatgatatcttggctagatgtaaagggtgtgttggagttggccaggtgaaaacaaggggagaaaagtgttccgggcagaggaaggagcccttggagggaatggggaacccagagcttagggtggctgaagcccagagtaggaggggttcttggagtggccagaggtgggggtgcagaattgggagcctggcttggggaggagttggaggcctggcttggggaggagtcggggacctggcttggagaggagtgaggagtgtatcctggaagcgtgggagagactcgtggaaggtttaggtctgtgttgtgaagctgggttagccacagtacagccagttctgcaccccacgccttaaagcctgggcctcaactgttgtagaatggagcttcacgaactctgtggtgaag

SEQ ID NO: 35382 - DNA, 934 bp, Artificial sequence
  DNA replication origin
ttaggtttgagatgcgggggtggggtggagagagatcagctgcctgaaatcgtaagcaaaatattgtatgtgcttatgtgtttctagagcgatccttccttagccccagcacaccaagtttaaaaccgttgctaggccgggcgcggtggctcacgcctgtaatcccagcactttgggaggccgaggcgggcggatcacgaggtcaggagatcgagaccatcctggctaacacggtgaaaccccgtctctactaaaaatacaaaaaattagccaggcgtggtagcgggcgcctgtagtcccagctacttgggaggctgaggcaggagaatggcgtgaacctgggaggcagagcttgcagtgagccgagatcgcaccactgcactccagcctgggcgacagagcgagactccgtctcaaaaaaaaaaaaaaaaaaaccgtttctaaaggcagcgggaagccacaagagttttaaacaagggagagggtggcttgggttgtgtggccggtggtgtaggacaagctacagggaccagcctggggagcagtgaggcctgcaggggagcaaacagggcagttgtttaggtgagagatggtggggtctgaattaagtcagtaggttgagcctgagggagggagcatggggggcaggtggggtgaaggggtagaatccatgaacttgggcgccagttgcatattgacgacctgatggtgtaatgagcaggggaggaagacacctcagacggtgctttggcttgggtgactgagctaagggctgctttccctttctggggcgggggggtggccacttggaagctggtgccattatgaggaaggagagggtgcttatgcttatagcccaggaagattgaagccaagaagtgctttcttttttttttggagatggagtcttgctcttgttgcccaggctggagta

SEQ ID NO: 35383 - DNA, 1024 bp, Artificial sequence
  DNA replication origin
gccctagaagcccgccgtaaacggctccctcgcgccacttccggccggcttccgcagacggcgctggtggtcgatcgtgtggcgccggaggacgttccccgcggccggagccatggagatgccgctgccccccgatggtgagacccaaaccggccgagagaccgtttctctctccccggaacctcctattggccggccccgcctcccggagtccccgggtctgggagggggcggggctcggcctcgcggcttcgcctgcggcctctcccgtgggtccccgcattcccggcgagcgtgtggcccctatcgggacccgtacaagggcggcctcttcggggcccacccccttggggtccccggcaaggcggacgggggctggggcgccgagtcccccggctttgggcggtcctcgctgacgccccgcgtggccttttctccgtcctccagaccaggagcttcgaaatgtcatcgacaagctcgcccagttcgtggctcgcaatgggcccgagtttgagaagatgactatggagaagcagaaggacaaccccaaattctcgtttcttttcggaggcgaattctacagttactacaagtgcaagctggcgctggagcagcagcagcgtgagtcccctccggcactcaggccgtcccatcgagcgcttcctttctcggattccagtccgggctctgccacaaacctctttctttcgggtcgtttattctttgaagtggagcagctcggtccacacgatccctgttccgctgttcccacggccctgcacagagcggctgctgggtgccactgtaatggagaacaacgaggttttcgatcctcccccctgggctctggatcagggattttgctgttgttttgcagactgatgacggagattagcaggagtagcgtgattgttttagtgttttctagggaggaagtgatagaggccggatgggagtccatgggacaggcactgtccagccccctttgccgtctccctgtgggtccagcaaggttttgtgcatt

SEQ ID NO: 35384 - DNA, 1140 bp, Artificial sequence
  DNA replication origin
ggcggggccggccaataggaggttccggggagagagaaacggtctctcggccggtttgggtctcaccatcggggggcagcggcatctccatggctccggccgcggggaacgtcctccggcgccacacgatcgaccaccagcgccgtctgcggaagccggccggaagtggcgcgagggagccgtttacggcgggcttctagggccgcttccgcccgccacttacggccgtcgctgggaaactccggaagtgagagcgggaggcaggcgggaagaagccgcgcgatgcctggcgcgcgggaggggctagcgacgcgcacgcgcagaagtttcctgacactttcgcagagtgggtccccgtcgcgcggcgccgcggaaaggctggaacggcgcgggtgggtgttagtcgagaccggggggcgcggggcgtgccccttggtcggcgtcgcagcccgatgggctggctggttgctacctccgggcgaccaggggcctggggacttcgtgcctgggccagggtctctttcctttcgcgggcacagtgaggagactgcgaggtgaggtgcgtccgggtggatcccgggctgcggcgactgtcacattctccccggccagaccggaggtggagcagaactgggggcgacgagcttgactgggattgcagctggacgtatttaggttcaaaacatcctcctcctggctttcttccgctccactctttggtcaggaagactggggcggggtaccccccaacccatgccctcaaattgctggcctagagggcacagcgcctttctaaaagctgcagttgggttgcctctaaaataatgaagctaacccttgctaattgtggggaaaagatagccagaagcagcaaatttctgctgtggacgtccgatataaactgatcctcttgagatggttaatgcttagttggctatacctgccccccgcccccgccgcttttttttcctttatccgtttttttttttcttttttcttgagacaaggtcttgctctgtggcccacgctggagtgcagtgtcatgatcatagctcactagccctgaactcctgtgctcaagtaatcctcccgcctcggcctcccaaagtgctaggattataggcatgagctactttaccc

SEQ ID NO: 35385 - DNA, 1389 bp, Artificial sequence
  DNA replication origin
gcggtgggcgcgggccacggcgcggggggcccgggcgcagcgagcagcagtggtggggcgcgcgagggcgcgcgggtggcggcgctgtgcctgctgtggtacgcgctgagcgcgggcggcaacgtggtcaacaaggtgatcctgagcgccttcccgttcccggtgaccgtgtcgctgtgccacatcctggctctgtgcgctgggctcccgccgctgctgcgcgcctggcgcgtgccccccgcgccgcccgtctcgggccccggacccagtccgcatccgtcgtccggcccgctgctgccgccgcgcttctacccgcgctacgtgctaccgctcgccttcggcaagtacttcgcgtccgtgtcagcgcacgtcagcatctggaaggtgcccgtgtcctatgcacacaccggtaggttccgcgcccggcctcgggggcggcggccgggcccgccgcttcgggtttgggcgcatggataggagtgcgccgcccggggcgcgtcccgccggactgagaagtcagcagaggggctgccaagggtttggtaggggagggacacgcacggggttctcagggagaagaggagctgagaagagagctgagaggtaagcaggacagaccacaacagccgtggcaggaggaagccctaccgaaagagaaggggcgaagaggtgtgaggggctgccaggccctcccatcccgccgtggaggtggaacaggttgggccctgaaattcaggcagccccctgagtgcccatccctctctttgcagtcaaggccaccatgcccatctgggtggtcctcctgtcccggatcattatgaaggagaagcagagcaccaaggtaaccccgggcagggactctgggcagatgggagctccagggggttcctccctgttgccaactggtgacgtggtcaggatcctggtctgcaggctgcctggcttcccgtcaaatagggaagtcagtgtagaggtctccagtggccttttactactcaagttctagaatcaccctgtgagcagtggtgtgtggagtatgtgtccctctgtgatctctgctgtgtggtcttaggaacactgttgtccctttcagatccaattttcctccccgttttgattccctacctgggtttgctggtaggtgatgggttggtcacatcttggccatacaccccatgtgtggcctttccagtgggactagggatggatggatcagaacgctgtcggttaggtgttcacttttttttttttttttttgagacggagttttactcttgcccagcctgaagtccagtgacacaatctcagctcactgcaacctccgcctcccaggttcaagcagttctcctgcctcagcctctcaagtagttgggactacagacgtgcact

SEQ ID NO: 35386 - DNA, 2132 bp, Artificial sequence
  DNA replication origin
cgcgccaggcgcgcagcagcggcgggagcccagcgcacagagccaggatgtggcacagcgacacggtcaccgggaacgggaaggcgctcaggatcaccttgttgaccacgttgccgcccgcgctcagcgcgtaccacagcaggcacagcgccgccacccgcgcgccctcgcgcgccccaccactgctgctcgctgcgcccgggccccccgcgccgtggcccgcgcccaccgcggccgccgccatcctgcccgagcggccgccccttccagcccgtccgacggcccgacgccgggcgggggcggggctgggcgggggggcaggcgccccggtctacgccgtttcccattggtcgctgcctcctcgcgtcatccctccgcgccggccgacgcgccagccaccacgtctcgagtgcaggcccagtccactgtagatgcgcttccggcggagccgaggccggaagcggaagaaggggacacagacctgcgtccaagctgtgccacctgagacgtgggcggtcccagtgaccgggagccggagctcgaacgggacgggcgaacagaagcgcggagggcttcgcagcgtcggcgtctgtgcgtgggccaaacatcagggcctcgaccagggatacaagggcaaccgctaactagattcctgattcctgatggctggcggcggctgacaccaaaggtaaaaggccttttagggaaagaaaccatttgtgaaaagctcttgggctaaactcgctctgcaaactgggggcgcacgctcgtggccaaactctggcagtgggactatcccggagcacccgatccctggaatcatgttctggaaaccaccgcgacgtgcgcagttctcgggcgtggccctggtatcatcccactgaatcctaggaacgcggtgcggtaggtatcactgtccgcatttcacagaccgaagtccagaatggggaagcgacttgtcttaggcttcctggccacactggggaccgtggtcatggtagcgtccttggacacctgtctccaaggctctgcagaagggggaggtgccgggccctgacggctgatgtccaaggaccagccgggatggaccagccccaggaggccccagtggaggaaaacaggacgaggttttcagtaagatgatcttatactaattcaagggctataatttgttctccacatcgtgtgcctccaactttttcggggaaagggtgttaaaattccgttacagtgtttttacttgtcaaattagaagcagcaaccggctgggtgcagtgagtcaagcttggaatcccagcactttgggaggccaaggtgggcggattgcttgagctcaggagttggagatcgtggcatcgataacatggcagaacctcatctttgcaaaaaatacaaaaattagccaggcgtggtggcgcacgcctgtggtacccactactagggagactgaggtgggtggatcggcttgagcccaggtcaaggttccagtgagctatgatggcgccactgcactgcagcctgggtgacagagcgagacccagtctcaaagaaaagtagaaagcagcaacccaacttggctccccaaatgttggaaggtatcttagcttatccttgcattctcaaaggccctaggcccttctggatacatggacacaggcatggtagtccctgcaggcaggggtagtggggagctgcaacctatcccaaaactctagagatgctgataggaggccaagctctgcaccctaatatcctccagctgtaccctctgtggatcagagtaaagtcacatccttgggacaccatgtctcagcagagctgttaaacataggcacagtgaaattaggaaagtataactataggcaccctacagcacagctgagtgtcagatacttccactgacacactgacatgctttgtgttttagttctcacaactctggggtattctcaccccccaaatggggacatgtgcacaggagtgaagagatgagctcagagccacacagctggtgggtggtaggcctgggttcaacctcatcctgccttcaaagccactttgcccatggccttttgttggggaggggagtgtgttctgcaccaagcttttgccaggaatccctgctagctctc

SEQ ID NO: 35387 - DNA, 1228 bp, Artificial sequence
  DNA replication origin
ggcctgacagtggctgggtagggagcaaacagaggcagtggcatggcccactgtctcaagacactcagggccaaattaaagaacagaaaatgcaagagagatgagatgcgtgcttctgttgctgtgttaaaggtgacctctcccacaggttttctgtgcctgcctgcaactgaggccccagctttcaggtgctggaaagtgtccgcacctctttgggggtgagggactaacgctttttatagctggtttgctatagagttctgaactcactttgccgtccttccttccacgcggtccttcttcgcaattttgttagtaaactggtagcagcatttcacaaaaagagttttgagggaagagcgcagagagaccgcgtgactcccgccccctccctcccgcctgggccggactccccgagttcccagcgcaggaggcagctgggccccggccacctgcccacctgcctgcccgcccacccggcttctgcaagatgggaatgcactttgtggctgacaggccggtcagtccaagcagacataaggcagaatgttcaagcgcccgtcgtcgccgtgcggatcgagcgatatgcactgcgtccagtcataccagttaccctgtgtgtcctgacacccgttcacccccggccactggctggcctggattctgtcgagatcgtcctgtgtgacctcccgggtcagaccagggaggtccgtgggcgggctttgaggcaccagcacatgcagctgcctggccccttgccgggtgctctcctcctgcttcaggtactcagacatgaagtggtgagcccctggggtctgcgcgcccgatgatgagagcaggctgctctgccggctcaggtaggactggatgatctcgttgcgtgacagctccttccagttcgtctgttcgaaggggctctggaggctggccttggcctcctgcttgtccagctctgtcctggactgctgctccatgtgcacagggctgtctgcccgcactggctctttctgggtcagaggtttgatctgtctcgtcatggggtcaaaggtgagcttccgctcttttaaccggacaggcttgacgcccgcctcagccacctgcccgtccaagttaaccgtatagtctcgaggtcggtacctcttcttctttttactgtccgagccccctgaggaggcagcatcactgtccgccttggaggagtctggggaaaagcctgcccgggacagga

SEQ ID NO: 35388 - DNA, 924 bp, Artificial sequence
  DNA replication origin
ccagttcgtctgttcgaaggggctctggaggctggccttggcctcctgcttgtccagctctgtcctggactgctgctccatgtgcacagggctgtctgcccgcactggctctttctgggtcagaggtttgatctgtctcgtcatggggtcaaaggtgagcttccgctcttttaaccggacaggcttgacgcccgcctcagccacctgcccgtccaagttaaccgtatagtctcgaggtcggtacctcttcttctttttactgtccgagccccctgaggaggcagcatcactgtccgccttggaggagtctggggaaaagcctgcccgggacaggaggggctcggctggggacagccctgccttgcagcccggccccgccagccgctggtggctctcaggctgctcaagccagcacactgggctttccgcactgggcagcagctcgagccgccgtacggggggtgtggacggctgtgccagtggaagcggtgacggcacctgtgtggcatcgagtgcctggggccgcggtgaggggctgggcacggagcccttgggtgcatacaagctctgctgccgggcaaaggagccctcatgccgtgagttccgaggactgaaagagcagcgagggggtcccttgggatggggaggccccggagtctcgtccaccctgtccagctgctgcagcaccgaagcctttggctgcaagcagggtccagggggcttgcccaggcccggggagctggtgtgcggtcgcacggcgttgacggggatcttgccactgtgcttgtcattctcgtcacgctccaggcggctgccctctgggcctgcatgcccactgccatccagggagctggcgaagctctctggactcccactgatcccgttggtggggaggggggatgagttggggaccagggggtcgtg

SEQ ID NO: 35389 - DNA, 1867 bp, Artificial sequence
  DNA replication origin
caccctgtccagctgctgcagcaccgaagcctttggctgcaagcagggtccagggggcttgcccaggcccggggagctggtgtgcggtcgcacggcgttgacggggatcttgccactgtgcttgtcattctcgtcacgctccaggcggctgccctctgggcctgcatgcccactgccatccagggagctggcgaagctctctggactcccactgatcccgttggtggggaggggggatgagttggggaccagggggtcgtggctagctttggagaccttgggtggcggccctgggtggccgaggtcacgctggtcaccccggcgcttgcggctgcccagcctgtccagccgctgcccgggcagcctctggaggtcattgcggctcttcaggtcatggatgctcctgggtgggccagccgcccccacctccggccggcagttgtgtgcgcccccgttggcagagccggtggcccccgccagcccccgcagcgccgcctcatgctggtgtgccggctcgatgagcttctgccagctccgcagcagcttcttggcccgcttggcgagctcctcgttcttggttttcttgcggacgtcgttgatgagcttcccaagtcgtgtttcctacaaccagagggagatgatgacatactttcgggacaggaacttctccatgagctgagccagaaatggtgggaagtggccctgacagtgaaatgacccggttcccactgagccctaaactgccagcttccctgacacaaaacttctggggatttccggtcctttgtgacaatataaattctcaaacctagttcccagaccttcagggtcccaggtggcttctcagcagtgctgtcacccaggctcctggtgtcagggggctgtggaccatcaaggccactgtaaggacactgccagagaggcttcctgggtgagagggtgctgtggccgaggcgacagcacagagggtccgcttcaagtggagggttggggatggtgcctctcactggagcctcctccaagcacacctctcctgatgtccccacgtgcccacgaagtgtgctgggcatgtaggatgggagtaacaccacttggtctctgcagtgcccgtgggagagcaagatcgcgaggcacgagctgtgagggcacaccgcctctcttggtcctccgaagcaaagacactgatgctcccagaagctgcggaaggacctggttggtaccatcccctgccccccgttctgccctcccaaatgctggggtctgggatactcacctcaagtgcctctttggtaatagggtatttctccaggctggagatgacttccagcaccgccaccatgttccggatctgtggaaataaaaagccatttgtcaggtccctgtccttctccactgggaggctggaacaccctgccccagcctgctccagtctctccccaaccccagagcaagaggagccagcagcactgaagcccccactccatgtcgtctcctacctgctccctgggccaacctggcacccagtgctcatcctcacctgccgtctgacctcctccagtgtgtggtgtgcgggctgccccaagccctccagtgtacatggtacatacccacccacctgctgaaacccaggatgcctgtggaacaagagctgctcctgatacttaagatgacctctactctgccatctgatgggagtgggagaggagacacggaagaattcatcgaataaaatccacaaagcttaaaagatcaatacacaggccaggcgcggtggctgacacctgtaatcccagcactttgggaggctgacgaaggcggatcagaaggtcaggagtttgagaccagcctggccaacacagtgaaaccc

SEQ ID NO: 35390 - DNA, 1052 bp, Artificial sequence
  DNA replication origin
cgagcggcggcggctccggcggctcctcctcctcctttggtggcggcggcggcccgggaccgagacccggccccggctcccctctccgccaccccgcgcgcccccaaccccccggcgccgcggggaacatgcggctccggctcccggaggccggcgagtgagtgacccccgtcccccgcctcagcccgcccgcccgctggcccggccgcaaccccccgcctcgcccaggcaatgacagcggctccggcgtctccgcagcagatcagggaccggctgctgcaggccatcgacccccagagcaacgtaagtacccgccgcgcgagctgggacggaggccgcatgggcccgggaccctccccctctcctgtacccctcgcccaccgggcttcgggggacccgtctggcgcccacctcccctcgagggccgctgccatccctgcctctcgcttctcgggcccgggccgggggcaggtcgggcagcccggcagcgctcggtacgtgaggccgaggcttccgtgcggcctgggcggaggaagcagacgggggagctgaggctagagtttttcctccctttctgctccagctctacgaccctcactgctctggacgaagcttctctgcctcgccctccctccgggacccgagacccccgggaagccctcccggagcgggaaggggagggagaagggctgtgaagcaactggtgtccggggtatgactcggggaacctatgtctcccatgtcttggcctcctgggtgatcagggaagtccttcttccccctcctctcggctggcagcaccttcctggcttcggagagaacccccagtctgttttgcccctggccgggtacctagggtacgtggagagtctgtctcccttctgtgactagacacgcctttgccaaaaccctcttggggtcgctgccgacgatagatgatctcggggagggtgggatccttcctgttgcctttctgggcctcagtacccattgcgtctctgaccaagccagagctccattttttaggtagtgaattaaagaggacttttctc

SEQ ID NO: 35391 - DNA, 1741 bp, Artificial sequence
  DNA replication origin
gtcactcactcgccggcctccgggagccggagccgcatgttccccgcggcgccggggggttgggggcgcgcggggtggcggagaggggagccggggccgggtctcggtcccgggccgccgccgccaccaaaggaggaggaggagccgccggagccgccgccgctcgctgccgccgcctcgagaaccaaactccagtgagctgcccccgcgcggagtactctgggtagtccgcgccgcacgcagcgtcggcgccacgctgaggaggttgggagatggggcgggcggagacgccaggcctgggcggggctgcccgtgtgccacgccccgcgcctccgcgcaagcgcgcgcaggcgcactcgtccgcccgtgacgccccgcccagccgcccggcctaggcagccgttgggaggaggttgggcggggcaacggcccccgtccaggtcacggggcggggctttctgacggaagcgcgcgcgcaaagagtccttgaacccggacgctcgcagcggctacctcggggcggggagggcggcgggaaaatccttcctctgggagagccttcccggcgcgtgactgggggacgggagtcgcaggctgagcagctgccgagttttttgtgagggcgagggaaccagacgtccacgttgtgattctgcgcgcagaagggtcatcggagtccgggggtgtcgccgcggcccccccgcccctcagagggtgtgggaatgggtgtggtggcagggcgggggtctgcaccgccacgcgcgaccccgatcgcgaaaacgtgaggcggcaaagcgcctctggcagaagccgcccgccgtagctgggaaagccggaggttgcaaatctgcgtctacgcggcggcttctccacctcggcaccactggcatttgggcgggatcgctctgtcttcggggcgggtcccccgatctgtcggaagttgagcggcatctctggcctccgaagcgccccctcccccaatctgcagtcattgccgccgtcccttgtgggggcacagtccccccgcccccccaccggcagagaaccccgtgattgaaagacccttctacccgcctctgccttgagattctgtaaaactgagatgctcattctcttaaccaaacacgtcacagaggaggaaacggaggcccaaggtcacctagacttcggggttaagcccagaaccgcagatgtcaagtttaagggcgcccctcctccctccaccctgtttattgccttggtaattgctcccctctctctgggagctctgttggaaatgctcttgtgagacgggatggaaaggcaagctcggcggcctcgggagaaatcttttttttcccactgttacaggaagacctagatttaaaacaggaggaagacagctgatgagaaccacatgtgtgccttggagctgcccgacacctgttagtcttgtatttgttgtgcttctgggaaatattttcatttgcaaaaacggctgcttctgcacgtggctatggttgcgtgcttctgcacatgtgaaaagttttacatcacacttggaggagaaaagaaacacgggcaaaacacttgtcatttactgctcccaacctcgcccctcccagaatgcggtgcattgtgtacatggtgtacatggtccaagttggaaactggcccattcggagataattctctcatttctgataagcaaaataagcaaagccttcctcaggcatattctggtcttgcctctctcttaatt

SEQ ID NO: 35392 - DNA, 2075 bp, Artificial sequence
  DNA replication origin
gcagacattagccagatgacagcaaacataacagaacattataacggtaggaagtgatgtgagtgctcacatcagggaggtctggtaggagaaagaaatagatgacagaggtaggcagaaaggctagcacattctcagtcatctcccactcacacacacgctcaattaaagagaaaacttgtggctcacgcctgtaatcccagctcttcgggaggccaaggcagggatcacttgaacccaggagttcgagaccggcctgggcaacgtggagaaaccccatctctacaaaaaatacaaaatttagcctggcatggtggcacacacctgtaatcccagctactaagggggctgaggtggaaggatcactttagctcaggaggtcgagtctgcagtgagccatgatcgcaccactgcactccaacctggacaacagagcaagaccttgtgtcaaaaaaaaaaaaaaaaaaaaaagagaaagaaagaaaacgaaggtagggcttggcgaaacagaactgtcctctgaagtggaccatgcaattccaggatccaattagaccttacctgtgctgggctccctggactcctccccaaagccctgcgtgtccttctttttcctacaaagaggagcagacagtgtccactttcaatgggacatagagtcctcagccccctgacccccagctcagaaggccacaaacactaagtttcagccctggccctgccgcaaacttgctgtgtgacctctgacgttcaatacccttctctgggcccccactgcccggacaatcacagccaggtcagcagccaccgaccgtttacaaagtggcccgacagtgcgggtgcagggcggaaggtccgcggtggggctatttcttgggggatggggcttaagctctccaggaaggtgaacagagggacaaccaaggaacggagagtatgggtttaaggtctctcggggggtggggggcgaggaagataaaccaggctggaggcgtgcccagagggcggatagggcggggcctgcggcttgggggcggggcctgagaagtgcgccgagatcacgcttatgagggcggggctacgggttccccggatggagccgcagtccggccgcgacctactcacagcttaaagttcagcaccgccccggcattcatcagcaacgtcctgcagagggagaattacagttactaggggcgcccccgcgtcctgcctggctctctcttcccagcctctggtccccctaattacccgaacagcaggatgtctccgatcatcgttacggccgaagcgtccgtcagaaccggaagcggaagccccagggagggaggggagaggagcacaagccgaccaatcctaaagcaacagtggcgagggctgggccaatcgaaggtcaaggctgggagggtcccgccctctgcaggccagacccccttaggggagcgcgagcgccccacctcgctggggaggccccgagagccagaatgggaggagcggggtctcctgggggcgggattgggtcacgcgttcgaagcgtgccgcgcatgcgtgaggtctcgatgccgtagggttagctgggcagcaattcctactcactttctggggtcccaaattgggcttctggacaaaaggaatcctttgactcctgagctgcacagggtgcggggtcctgacgcagtggggtccctagaaacgggtgccccaaccaactgggctctaaaatgagatcctcctgggccccatggggaacgggggttcccactgagctgccccccacaagacgtcctgatttgcagagccccaccggagacggggttcctgatcgaacggaccctatggggcagaaaagtcttgacggggctccacagaggaccgaggtcctaacctatctccacggggaacaggggttctgattcatggggtcccaccatggcgtaggggtcctcactgggctccaccgaagatcggggtcctaattgagcccacggggacaaagtcctggccgatccggccccctgggaacgggcgtcccgcgtgggtgggctccgtgagggacgggcccccagaacaggcag

SEQ ID NO: 35393 - DNA, 1239 bp, Artificial sequence
  DNA replication origin
catggggtcccaccatggcgtaggggtcctcactgggctccaccgaagatcggggtcctaattgagcccacggggacaaagtcctggccgatccggccccctgggaacgggcgtcccgcgtgggtgggctccgtgagggacgggcccccagaacaggcagctccccagcctccctcgccttgcacgggtgccccgcaccccgcctcgctgggcggaacggggtagcgatggcaggagggtcaacgcctgggacgcccgaccgtccagctgcgtccgtggtgctgggcgtccccaccacctgtcccggggtgggccgtcgcccctcctctcccgcgggggccgggcctggggtggcgcctggcgggcgggggcgggcccagctgcgggggcgcagtcgccgggccgcgggcggcgggacggacgaggccggggccccgggtggcacccggcaggcgggcaggcgggcgccatggagctgctctcggcgctgagcctgggcgaactggcgctcagcttctcgcgggtgccgctcttccccgtcttcgacctcagttacttcatcgtctccatcctctacctcaagtatgagccaggtgagccggggcggggggctggaggggaccggcagcgggtggcgcgggccggggcagctcgggggtcgcagagaggggaagcccgtgcgtggtggagggagcgagggacaggttcaaggattgcatcgtgggagtaggcaggcgctagaatcgtggggttctctcacgccggggtgagcccgggggagaagcccccaggacgatgaagctgggggaggggaaggagaggcgtgcgcgggtttagaggagggggaacaggtgcttggggtcggggctcctggttgggtcagagctgcaggaacttgggcaaggggcgccggctgtggcgagggtgcaggtgggggtcggtgcatctgttctggccgcgcgcaggtgtgacctccctccttgaccttggcacgcggattgagagcgccagcggagtgtctataagggccactgcgctgggggctgcggtcaggttcagcgaaagtgacaccggttctcctccccactgcaactgcccagcaccctccactcccctcccttcccccacggtgctgaatctccgagcccccacgggaattcttccagccctggctccagatcctttccacttacggagcagaaccggccccaaggctgggtgacttggggtcagtgtcct

SEQ ID NO: 35394 - DNA, 1005 bp, Artificial sequence
  DNA replication origin
cacgtctaggtctcttaaaggactccatgagctgtgcccattgccctgacaccgcctgagcgtgccaacctgcctctgagcccccatccataccctgcaccttacctgagactgtggaactgatgaagatggtcacaccgctgggtggaggtgctgggagggggccggcttcaccccgcagaagccgccggcgggtactcgggctgagagggcccacgctcattgccgcccacccaccaagatgacccttcccctggaaagggcgtggggctcagagacctcacgccagcagccaggcagccttcctggtaggccagccgggcagggccatcaggaacggggagccagtttcaccttccgaggctcccccagtgacctgcagcccccaccacctccagtgcctctggggagctgaaccagctcctctccactgctttccttggtctgcaagcactcatggagggatattagacagtggcctccccgccaagacctctggatgttggctcctctaggcacgggagtcctcttcccagctcctcgtcctcagagcgcagtagtcaccatagcaactatggtttcccagtgctgggcattggggcccggggaccagccaacctcttgaacacctgggtcccctggggcctacccgtgtaagttgagcctgagcccaggtgtgcagaggagaggctgggagccatgcccagccccacagcccagacaagaaagacaaccgcttgacgaaagtcccaccccattctgcccttcccaccccctcccacgaggcaaagtccttccacgtccaggcaccgcacatactatttcaaccagcagttctcacttggggaccattcagcccccaggggacacttgcaatgtctggagacctttccagttgccacgactggaggatgctactggcatcacgtgggtggagaccagggatgctgctcaacatctaacaatgcccaggaagcccccacaaagaatgatctgttcccagtt

SEQ ID NO: 35395 - DNA, 986 bp, Artificial sequence
  DNA replication origin
actgtatccaccttctggaacgtcgccagggagcagtgcatggtgcaggaatgagaaactggatgctggtgggaacatggccgctctcagctagcgggtcctcttcagggcagaccctgcctcgtggaagatgacagctggcttggacagagacagagataaccccttaacgtgcagctcctaacttaagcagcccctcgacattcaaagggagccccctggctgttctctgggggaagtcccgctagttgtcaacaagtcgattcttgtgtttgtatcttcttggctcatggagcaggcggtgaccccttctccgagccaggccctggggtttattcagaggccctgctttcagggttcctgcacagtcaaggtggggggtccgatgagaaacagatgggcagatgcgggtggcgcatgggagagggcagagagaggatggagcaggccagggaagggtgggaggaggttgctgtgggcaggacctgtttcatgagggactgttcctggtggggagtgatggcctgaggtgagagtgagtgggtgtgcttgaggaacagccaaggagaacggcagggtcaggagctgaaggagagaagggggagagggagccaggagcgtgagaaccactggatggttctgggaggcggttctgctgctgtgctgagaatgaggggtcaggaggcccctgggagaccagggaggggccccaagtgatggaggcggggtagacagtgatggaaacagagtggatggtgacaaggaccagagagggtcccaagtgatgggaacagagaggatggtgacaaggaccagagacaattcccaagtgatgaggacagaatggatggtaacaaggagtagggaaggcctcccgagtgatggggacagaggtggacagcaatggcgacagagtggatggtgacaaggaccagagacagtccccaagtgatggggactgagtagacagtgatgaggacagagtg

SEQ ID NO: 35396 - DNA, 829 bp, Artificial sequence
  DNA replication origin
cctccctggggctggggctgacaaagggaggggcaccaaggttcatatgcagatctctgcacatgcaggtccttgatgaattccaaagtcagaaccccattccatcacgtgatttacaaagcatggttacagatcatggacatggggaccctgcttcagaggggactgtaaaggaattttcagagtgtttatggcataaatgagacctgggggacttaggaagcagtcagagggcgatggtcacactgaagagcccagagcagggctgagcgtgcagactcctaggaaccaggtcagtgtgcttggccctaccagcctctaagccgccttgcaggggaggaggaagggaaacctcaggctgctaggagacccggtccttccctcgggagcctgcagagatggcatccacgctcattttccccaagagccctgctgcgtctgcctccctgccttggactgagggggttggggctgcccagcagaggccctgggtgccaggacagtggtgtgggaggctggaggaaggggtgattgtctaatggtgtgagggaatgaaagtcatgatctagataaagaccaaggggaggggtgagcctgggacagggttttccagggagtgagagcagatgggcatgtgcaaaggccctgcacacgcaggagggagcttggcgcggtgaggctggaggagctgtggaggggcacatcaggggccggcgtcttctgagcagcctgggaaagcctgaagggcattagttggggtgaccatgctcctgtgggccaagtcaccctggacccagtgaggagagtggttggagcaggctggtgggag

SEQ ID NO: 35397 - DNA, 2224 bp, Artificial sequence
  DNA replication origin
tctggcctttgtcgacttcctctgtgggtgaggtggggactcccgcaggaggcggggtggccgcaccacctgctttcctcccgccagctgcaccacctcgtgagcgatgacgtctgcctgaaggtggtggagctctacctgaacgagaagaagcggggtgccgctggtgggaacctgtcctcccgctgcgtccgcgctgctagggagaccagctaccagtggaaggctgagcgctgcatggccgacgagaactgcttcaaggtgagaggaggcctggggctgggaacacgccgggaggcccggccgctcactccgctctggactcagtcctgggtggaccctggttcagcggctgggacaccggccctgctgcagagcccatgaggtacctttgacctgcaggaagcatcagggctttgggagggtggcaaaggcgggaggcgggtggccttgcgagcctgcgctgtgccggctgggctgtgccggcagtggaggctgtcagcgttcctgctccgcaggtgatgttcctgcagcgcaaagggcaggtgatcatgaccatcgagctcctggacaccgaggaggcccagacggaggaccctgtggaggtccaggtgaggccctggccccagtctgtgccacgcataccagggagcgcctgagggcagcagcatggggctcccaccagccaagcgcaggccgcgcagcatccagagaccctccctctgcaggccacaggctctccttgaggcctggtgggtggggttgcctccctccctgctcccccaccaggctctcttctgtgccccctctccaaagagcagaccactcctcctgagcaagcggttgtgtcccagggcaggaggggaaccaagccacctctccctggcccccgactcccactcagggcatcccgtggctgtgacctctgcacctcttgtgtcagggctgcatcctgttcctaatccccagcagaggagccacctgggcccagctcccagtcacaatttttgcggggacagatgtttcctgctcacctcccgcatcctggtgacagtgaggcattgacccgtgtgtgtccccagggtggtcattggggcctgcagctcccggcacctgccaacaggtccagtgtgtgtgcacattactcagctaggccaaccccattcatttcctggggctaccaccacaatgaccacaaaccacgtggcttcaaacaacagaagtctattccctcaacgtcctggaggtcagcagtccacaaccacagtgtgggccgggcggtgctcctgccaaaggctctggggcggatccttcctgctcttccagcttccgggggcttctggcgctcctcagctgtggcctggttgtgtgagtcccgctgtcactgggtcctctgtcaagagctatagtctgttggggtctccgtcagggatcagagtcctctgcagcggctctcctcatgctctggcagtggggggcacagaacccctgtgagctcctgaactcagagtccagagtaagagtggccatagccctgctgtaggggcatcacgggctgtgtctctccctgtccccagcacctggctcggtacgtggagcagtatgtggggaccgagggcgcgtccagctcgcccactgagggcttcctcctgaaacctgtgttcctgcagaggtaagaggccctgagatgcatgctctgttccttccttcctgggcccagggagtgtcccctttgtcctgacgggggctggaccatggcacactgtctgggagcacttagtaggtgcctgctgtgtgctgaggcaggccctgcccttttgaggcttgtggtttgcagtggagggattagtaaccccaggacggtgaggtgtaggaggggcaaggccaaccccacgatgcgtcagtgggtgaagagtgaatgcccggactggagggagacgctgccagagctggtggggccaggccagaggcgggtggctgtggcaggaccctggaccacctcaggtcgggctaggatggcacctatgggaccagtgggggctgctggtgggtgttcagatctgggggcatttcttgttgcttccatttgctttctgtggacccctgggaggtagcacatcttctgatggtcccaggcctgggggtttcccagcctgcaaatcctcctcccacaatgccgagagccagagtccattccacctcctttcgcccccaggaacctcaa

SEQ ID NO: 35398 - DNA, 1443 bp, Artificial sequence
  DNA replication origin
ttgcaggatggcaagggtggcggttattctgggcctactggtgtgcaggggccagggccaggggctctcatggtcggggagagaggcctggagaagtggtccccagccccagtcacttgggattcttggcacagaaagccttggatgcctccatgggacagtcgcctcagcccctcacaaaaggacaacaatgatccctggagtggccgcgtgggtcccagggtgggtgggcggatggggctccttgggtggcggctgggactgtcagggcggctctcggagttccacaaagggagatctcagccccagggagccgcaggacttggctgctacagaaataacaaccactaaaagcgaaaggaataaatatctgtgcgtgtatacacatacgcctagggtgcccactgcaggaacacgactgggcccgccgccccacagcagggtcgtgccggctctgagggaatactggctggggtccctccccttgtgggcccagagtccagctgctggagttggggttgggtgtcttatccagagcggggtctcccagggcactgcccgcctgctccagctctggacttcaaaatgggatcccaaaggtttggctgaagggttcttctcacttccaaagtgactgagggcctgaacaccagccaggcagagctgatgcccaaaccctcagatgatgtttctggcagctctgagaatattctggaaggactcacttttcaagcaagcctacccagggctcaactccttccttgtcagggtctcttggacatggaccccctccaaagtgtgggcctcaggagggctgtcacctgtgacttttccaagacacggcaagaatatggggcaggagccatctgcctgccagggatttggcacatgtgacggacggggacgcaaacatgattgcttgttcctcggccagcacgtccacccgcccctgtggtggggctgagccccagggctcgggtgcaggtagctcaggtttggcacacagcaggcccacaggagaccgggagccacgggggcggcgtcctgccctggagtgcgctgtccggcagcagaggggctgggagatgcctctcacgtcgttcaagaaaacggccccgacacgaccaaggccgagggcacgtctgtgctctgtgaggcgcctgcccggtgcccatgagggcgggtcagggcgaggccgggcggcggctgtactgcacgcggtagcgggtcacgggcaggccgtgcacgtgcactgtctcacacagcgtcttgcagggtaccatgtcctcgtcctcctcacccatcagccagtcctgcaccaggctagccgcctccaccgtcacattgtcctccagccagcggctgtgccactcctcaaagtgctggtggtggcggagcaggaccaggggctgcacctgttgaagaggccgggtgtcagggcag

SEQ ID NO: 35399 - DNA, 1063 bp, Artificial sequence
  DNA replication origin
tagaagacactcccatgtcgtggcggggcaggtgcagggtgtgagatgatcttggttcaaggaggggcttcgactcccctggtcccaggtaggcacacccagccaccccttgctctcatgggtccagcccactgacctggtggcaggaagtcagcaaggctctcacaggaagaccaacacaccctcacggcttgatgtcaatattcaattattaactttaatgtgcaaataaatagaaaaggaaaactacattcaaaacagctgcaaaggaaggacaagccccagaacagaaattcctcaagaacggaaaagaggcgctccctagaagcatgcggggatgggaatactgggaggaggggctcggcggggtctccggctgcacccggggcccaggtggctctgcccgagacggccgtgggcctggtacaggaatcttgatggcaagttcccttcttagaaaaccaggatgtgtacaaagtgcctgtgtgacacttggggagcgggggtggggagcccaggaggacgggtcagcatcggaatcgcccagcctggagtcaaaggcatcaggagcctccaggttccacaggaaacttctagaaacacatctccacttcctggaaacttgagtccagctgttgcaggatggcaagggtggcggttattctgggcctactggtgtgcaggggccagggccaggggctctcatggtcggggagagaggcctggagaagtggtccccagccccagtcacttgggattcttggcacagaaagccttggatgcctccatgggacagtcgcctcagcccctcacaaaaggacaacaatgatccctggagtggccgcgtgggtcccagggtgggtgggcggatggggctccttgggtggcggctgggactgtcagggcggctctcggagttccacaaagggagatctcagccccagggagccgcaggacttggctgctacagaaataacaaccactaaaagcgaaaggaataaatatctgtgcgtgtatacacatacgcctagggtgcccactgcaggaacacgactgggcccgc

SEQ ID NO: 35400 - DNA, 867 bp, Artificial sequence
  DNA replication origin
acctctctcaactcatgtcatatcacctcatcaaggccatgggccctacttgagggcaggggacccctcagggcagggccacctcggagatctgctctttgtctgctctcctgggaccagcacagcctttcccagcccctgcagcacttctgaccaaggaaagccagtctgggggcccacagaggaccctgggcatccccagccatgggatcaaggcagaaggaaacagggcggcctccggtctggcttgccacgctccctgggagccctgaccctccggtgggggtgtggtcagaactgccagagacgcttgggtgtacagggagcacatgggtcactgggaggaagctatggcccctcccctacagaggatggaggagcccatactgagggggaggggctggccacttctgccttggaaccctccaggtatgtcagccaggggacacagcagagctggggcttctgctacccggaagcaggtgtggagcttgggatgcagacagggggcaggagatgaggagaaaatgatggtgaaagccaggaagtgggtggggccccaaggagtacagagggtggtcgtgtggggtgggtgggcaggcatgggcctggacggataggttgggcatgggaagcttagaacaaacaccttagagcaaacaccatgatctttaaattgggttctgcatgagagacactcgggcgaaggagacgcttctaattcccactaaatgtgcaaatggaatggggaaagaatattctagaagacactcccatgtcgtggcggggcaggtgcagggtgtgagatgatcttggttcaaggaggggcttcgactcccctggtcccaggtaggcacacccagccac

SEQ ID NO: 35401 - DNA, 1442 bp, Artificial sequence
  DNA replication origin
ctgtcacccgggtgggagtgcagtggtgcaatcacagctcactgcagcctcgacctcctgggctcaagcaatcttcccacctcattttttgattttttgtagagacaagatttcactatgttgcccaggctggtcttgaactcctgagcccaagcgatccctctacctcggcctcccaaagcactgggattacaggcatgagccaccactctgaaacagcccggcctggctgtctgccctttttaagaaaataagattttggccgggcgtggtggctcacgcctgtaatcccagcacttcgggaggctgaggcgggtggatcacctgaggtcaggagtttgagacctgcctggccaacatgatgaaacctcgtttctaccaaaaatacaaaaattagccaggcatggtggcgggtgcctataatcccagctgctcgggaggctgaagcaggagaatcgcttgaatccaggaagcagaggttgcagtgagccgaaatggcaccattgcaccttcagcctgggcaacaagagcgaacctccatctctaaataaaaaatattttggccaggtgcagtggctcatgcctataatcctagtgctttgggaggctgaggcaggtgggtcacctgaggtcaggagtttgagaccagcctggccaacacgacgaaactccgcctctactaaaaatacacaaaattagccgggcatagtggcaggcgcctgtaatccctgctgctggggaggctgaggcaggagaattgcttgaatccaggaagcagaggttgcagtgagctgagattgcgccattgcactccagcctgggcgactgatcgagactccatcttaaaaaaaaaaaaagtttttatggaaagtaacacagtgcacagaaaactccaacagtacaaaacagacacatggtttcctctcctccaaagctgtcgcgcccagcgtcctccgggaagtacctgggcagtgtcgcctgggtacagcttgtgcctgacaggggcaatgtcatcgtcacctctgcttgctggggttcccccgacagcctgtgctgccgtgttgttcccggggaggggctgttggcgggcacctccctgctttgtgctgctgtgtggatatcctcccaaggacatcttcctgtgcgtgtgtctggcagaaattcctagacatggaacccttgagtataagggcatgtgcgtcactatgttttttttttttttttgagacgcgtttcactcttgttgcccaggctggagtgaggctggagtgcaatgatgcaatctcggctcactgcaacctttgcctcccatgttcaagtgattctcctgcctcgcctcccgagcagctgggattacaggcatatgtcaccatgcctagctaattttgtatttttactagagatggggtttctccatgttagtcaggctggtctcgaactcc

SEQ ID NO: 35402 - DNA, 1794 bp, Artificial sequence
  DNA replication origin
tgcagccagcacccccggtccctgaccagcccaggaagcatctgcggttcaagtggccacttcctgccagccgctcacatctgcagccactgttctcacgacagccctgtcctcaccccaatccccacgcccatcacgggctctgggcctttcctgaagtcaccccccgacttcctatctctggtgagcaggataagaagagccctgctaggccaggcacggtggctcacggctgtaatcccaacattttgggaggccaaggcaggcaaatcacctgaggttgggagtttgagaccggcctgaccaacatggagaaaccccatctctcataaaaatacaaaaattagctgggcttggtggcagatgcctgtggtcccagctactcaggaggctgaggtgggagaattgcttgaacccaggaggtggaggttgcagtgagccgagatcttgccactgcactccagcctgggcaacagagcgagactcggcaaaaaaaaaaaaaaaaaccaaggatgggcgcctcccagagggtaatagcgagggtcccttcagacccccagagcagcacgagcccagcgtcagggactctggctgaacctcgagagcccctcagcatcctcggctgaccccatactcacaaggcacccctgtatgagtgcctcacttcactcttgcccaggggacacacgggcatctgtaggggagacagtgatgctggggacagcacctgccgaggaccggggggacttcggggtgtgtggctcgcctgctctgacctctgaccctgagtgaggtggccaggttgaagggtccccaagccagcctccagggggcctccctcctctagccccagcacatccccactcctgggtaccattggatgggggctcatcgggcagatgaagaaactgaagctcgggggggtaccccttccctcttctgcacaaggcccctcagtgttgtccctccctgcctcagagaggcctcaacccgtcgtgccctgggggagtctggtatgggtggttctggccccagtgtgctcagcgctgggctacaggggatgggggacagggcttgggggggtctgggagcaggagggcctagttgggagccatgaggattggggaaaataaaatgaactagggatgggggagggaggggtccaatgtggccgtttcctgcctgggggagccctaatctcatcacacacttgagcactcggggatcagccaggaagtgactgagcagagtcttggacagagtcaacacccagctccaggaggagacactgaagcctggagagagagtctagctggggcagggtctcagaggccctgctcccatttctgggcagtttccatggccaccaatgagaaaatcagcttcacgtcaatgacttggggaaaaaggtggctgaggacaccctcagcacacggaaaacccacgcctgggctcccccctccaccgtcttctctgtgagcagagtgggaagctgtgcaggggaggctgggcacaccggcagtccagtgatgctggggcagggtggtttgaagatgatgcatcaaaatagtgatgcacgaccgggcgcaatggctcacgcctgtaatcccagcactttgggaggccaggtgggtggatcacgaggtcaagagatcgagaccgtcctggccaacatggtgaaaacccgtctctactaaaaatacaaaaattagccagacatggtggcgcacgtctgtagtcctagctcctcaggaggctgaggcaggaaaatctcttgaacccaggacgcagggg

SEQ ID NO: 35403 - DNA, 1868 bp, Artificial sequence
  DNA replication origin
aaggccacggcggaggccagcaccactgcggtcagcctcagcgcgtggccgtagcgccggccgctggccgccagcgtgtgcagggtggccccgtagcacagcagcatggccagcaggggcaggaaacagcccaacagcgccaggcaggtgaaggccggttgccagtgggaggcctgtgcgtccaggggcagcgcgtcatggcagagcacgcgatcggagcgcgccagccggaaggtctgccgctgcagtgtcaggggcagtgccagggcggccgccatgagccaagcagccatgcagagtccaagggccaggcgccggccacgcagggcgcgggcccgcagcgggtgcaccagggccaggtagcgatccaggctgacggcggccagcagcagcactgagccatacatgtgaccatagagtgcggccgtggccaggcggcaggcggcctccccgaagggccagcgctggccacgcaggtggtaggcgatccgcgggggcagcgccagggccagcaggaggtcagcagccgcgaggttcatcagcagcatggtggagggcagccgaggtgcctgcgtggccagcacccacagcgccagcccattggccggcagccccaccaccaggaccagcccatagagggcgggcaccagcctggtgggcacccagcccagaagcagtgcccgtgagctgtccgggagctccagggtgtcactgtcattggcacagacttggcctgggtagccgcggggggcaggcaggattgagggcgtgctgtctgggagagagaggggacctcagtcagcccctgcctcggcaggtgacgagaagcagcagggagggaggtgctcagagcctggggtctgccctggtgggaaacagctggacatgacactcaagggaatagcccagccctatggggtcagagacgggatacagagtgggctgggctgaagcccgcaacttcccggcctccccctccccagctccgggcccccagctccatctctgatgtaaccccatctctgcaccccaaagccaggaccactcaccatcaccacctccggtgctcccgctctcgtcgtagacgctgggggtctgggtgccgccagacaggctgaaccccagcaccaggggccacaggagcagtcgcccccacatgactgcactcaggctgctctgggctgtggcctcaggcttcctgcctcgccggaccctgagccccagcttctggagccgaggcggacgagcagatcgcgccggtagagataaaccaggaaggctgcccctgcccccgcagacccaccagggccgcttgccagccagcccgtgggaggactggagtgtgggttatggagaccgggctgccccacgtggctatatccagtgtggcgcctcccagggacccaggtgccaggccagcaagatgcaggggggggggtcccagctgcagccagcacccccggtccctgaccagcccaggaagcatctgcggttcaagtggccacttcctgccagccgctcacatctgcagccactgttctcacgacagccctgtcctcaccccaatccccacgcccatcacgggctctgggcctttcctgaagtcaccccccgacttcctatctctggtgagcaggataagaagagccctgctaggccaggcacggtggctcacggctgtaatcccaacattttgggaggccaaggcaggcaaatcacctgaggttgggagtttgagaccggcctgaccaacatggagaaaccccatctctcataaaaatacaaaaattagctgggcttggtggcagatgcctgtggtcccagctactcaggaggctgaggtgggagaattgcttgaacccaggagg

SEQ ID NO: 35404 - DNA, 2166 bp, Artificial sequence
  DNA replication origin
tgcaccccagaacatgtgagtaagatcagtaacgtgtattcttgtcaatatcctggagtgatcatttaccagagttttctgagatgttaaccacaggcacaagctgggtgtgtgggtatgaatggtccccaggaccaaactgcggtcccacaactgcatgtggttgtaggattatctcaaggtgcaggtgtttgacatccataaaccctcctccccaccactctgaaaggctgggctgtagacgaagacagggctcagaagccctggcctgtgggcccccaccacccggccactatgtctctgaggggccggagtctggccccatctgtggaacgggctggcgctctgggtgctgctttccaggttcccgctgctcacaggaggccgaggcccggctgtgaccctggagatgaggttttatcttacaacatcctctacagcaagtgggcacggggcctcgggctgaggaaggagccacagggcctgtcgcttgtagggtgccaggggtggggaacccaccggccagggcagcctcagaccttgatctcacaggcagcgaggggcctccgtgctggcagagatcagggctgagcggtgttggctgaaataaataccaccccggagaagatgggcaaatgcagacataagcaggtgccaggggtcacaaaggggaatcaaagtctgctggtactggtggcaggcagctggtagggccccccaaggcaggcaggttctgggcctgggggccctgggagtgggctggtcctctgggcacgaggacatcaggaactcacggtgaggaagcaccggggtcacccagccccggcagccggaagctgaaagtgcatttgctgagagccatctgcttccccgcagggccttgtgatgtgagcccgaggtccccggggggcgaaggcagagggtgcgagagctgggacagtcttagggcaatttggggtcctgggtgccccaaagggaggccggggctttgtgtttcagagaaacgcagcctgttccgttttgaagttgcccaccggctggatgttttgctaatttagtccacatcgtgtttgctcagaaagaggcttttggccacacgagtgctttctgggaatgtttcttctcccgggaacagaatgtcaggctgtgggagctgccgtggccccaggaaaatgatgcccagctccaaggctggggggttggggtgcttggagctccagctgtagctaggaaggtgggggatctcccaagggacctccagctgtcccccctgcaccacaccggtgactgctgagcccacacctgggtcccaagagtctcatcctagggacgggcagatctctgtcattctgttccttgggttcatttagaggcaggtgtcacctgggctgaggtctgcccacccaccatacagagtcacaggctgatagggacaggatgcagccagatggtgtcgtcctgctctcagcagggcagccgttaggaagagaagccgctctgactggccaggagaggagaaagattcctatggggccgccaggacttcgggatgggaccccacacccctttcctgaacccaactccacggggctcaggccagctgccacctcctcatttagatggcagaaccccaactggatgggggacacatggcccaggcctggcactgtacaactctgcctcctttccccttccagtggaccacagtgatgggctctgggtgtccatgtgcggtaagaggggagtagcttgtgtcagaccaccaaccaaatcgaaaagctacccatagcacactacccagcaatacaaaagaacaaactccaggccgggcacagtggctcacgcctgtaatcccaaagctttgggagactgagatgggaggatcacttgagcccaggaatttgaggctgcagtgcacaatgatcatgtctatgaacagccatggcactccagcttgggcaacatacagagaccccatctctacaacacacacacacacacacacacacacacacacacacacactagctgggcgtggtggtagtgtgtgcctgtggtcccagctactcaggaggctgaggcaagaggatcacttgagctcaggaggtcaaggctgcagtgagccatgaccacgccactacactccagcctgggcaacacagtgag

SEQ ID NO: 35405 - DNA, 826 bp, Artificial sequence
  DNA replication origin
aatttgaggctgcagtgcacaatgatcatgtctatgaacagccatggcactccagcttgggcaacatacagagaccccatctctacaacacacacacacacacacacacacacacacacacacacactagctgggcgtggtggtagtgtgtgcctgtggtcccagctactcaggaggctgaggcaagaggatcacttgagctcaggaggtcaaggctgcagtgagccatgaccacgccactacactccagcctgggcaacacagtgagacctcgtttgaaaaataaaagaataggcctggcatggtggctcatgcctgcaataccagcgctttgggaggccaacgcgggtggatcacctgaggtcaagagttcaagaccagcctggccaacatggtgaaaccccacctctactaaaaatacaaaaaaaattagccgggcatggtggcgggcccctgtaatcccagcttctggggaggctgagacaggagaatcgcttgaacccaggaggcggagattgcagtgagcccagattaaaaaaagaataaactatggatacacgaaacaacacaggtgaatgcaagggaatcatgctccaaagattatccgctctgattccatttacctggcattctcaaaataacaaaattacagacgggtagggggaaaatggcttagtggttgcaggtgttgaggggagagatgaagttatggaagagcagctggaaggatcctgtgcagatgggctgtttgttgactatggttgagattacacaaatctgcccatgaggaaaccgcacactgttaactacaggcaaaacttcccta

SEQ ID NO: 35406 - DNA, 761 bp, Artificial sequence
  DNA replication origin
cagggacatcttccccacccccaggttctgtgggggcgcgggcaaggttcagggtggggggtctgtcgagcctgcctcgtcccccaggctggttccccggcgagtcgggccctgccgtggcccctgaggagggggcggcgatcgcgcgatgcggctgcgaccacgactgcggcgcccaggggaacccggtgtgcggctccgacggggtggtctacgccagcgcctgccgcctgcgggaggccgcctgccgccaggccgcgcccctggagcccgcgcctcccagctgctgcgccctcggtgaggaccctaccccccgcctagcctcggggacaccatcgctgctgctctgggccacggatctcctcccctcggcccttgggtcccctccccgccacgccctcccgaccgaggcccccttccttccagagcagcggctgccggcctcgtcgtcctccacctacggggatgacctggcttctgtggccccggggcctttacagcaggacgtgaagctgaatggagccggccttgaggtggaggactcagaccctgagcctgaaggggaggcggaggacaggtaacagctgggcccaccccagagataagagacataggctcaatatctccccacctccctcccctaccaacctcccccgacgacctgccccgactcctccgccccgccccgaccccccactggcagtgggagtgactcagggtcagaggctcagagttcctggggacaaagtgggacattcatc

SEQ ID NO: 35407 - DNA, 1363 bp, Artificial sequence
  DNA replication origin
tgaaatcagccagttctgggcctgagctcagcgccccgggcctcctggcccgggtcgagcctgcgcccgccgctgccccacagatccccagccggtgcctgacgtgcgtgcggttccgtgctctccgggagtgcgtggtgggcaggacgtcggcgctgccagtctccgtgtacgactactacgaacccggtaggcccgcgcgcccgcacccccggcccggcccggtccctgacccgtcgcgcctgcacttggtcacccgccaccctcgtcccgtagccttcgaggccactcgcttctacaacgtcagcacccacagcccactcgcccgggaactgtgcgccggacccgcgtgcaacgaagtggagcgcgcccctgcccggggcccgggtgagtgcgcggagccactgccgccccccaccgcggcctgccacaccccgactcccaccctcggacgccagggagggctcccctgggggcttggcagaggaggggccaacgtaaagtcaggagaacgcagcatagaggtgggcgggcgctctgcctgtacgggggaggcggggctggaggagcggtcagcggggaggggcgtggctgggggagtggtaagtgcggaagggaagtggctggggaatggtcagtatactgggggcagggccgagccagtgagggtgtggtcactgtggtggggactgggcgcaatgggttgagggtggtcagtgtggtgagggcggggtcgagcggcgagggggaggtgagtgcggagggtgcggggttgagggcgggtgtgttcagtgcggggggcggggccgaacggggtgggtgtggtcagtgcgaaggggacggggttgagagtggatgtggttagtgctgaggggatgaggttgcggtgggtgtggtcagtgcggggggcggggtcgagggtgggtgcggtcagcgctgaggggcgggatttgtggtgggtgtggtcagtgcggagggggcggggttaagagtggtcaggacggagggggcggggttgagggtaggtgtggtcaccgcggagggggcggggttgaggataggagcggtcagtgcggtgggggtggggttggggtgggtgtggtcagtgcggaggaggcgcggcaggggacggggctgttgttgcagggcggcccagacaggacgccctgtctcctttctctcctacaaccgctttttaaaagtctgtttctgtttttgtaagtattaggcaaatacctgcgtgaaattccataaggccagggctcaggacctcccattaactgtcgcgccccaagacccaccgagggggtagtgggcccgggacccagggacatcttccccacccccaggttctgtgggggcg

SEQ ID NO: 35408 - DNA, 1558 bp, Artificial sequence
  DNA replication origin
tgaccactgcccccaggggatgggagaggaagcaagtagagagtctgaggaccctgacttctggcttcctctgcagctgctccttgacaagcacatggggatgaagaggtatgaagtggctggacgccgagtgctcttctactttgatgaggtaccaccagccggggttggtggaggaggcttccctggtgtgcatgttggtgagggtgcaccggtcactgcctggtgtggctccctgcaagtatcttgtaccataaaaaagacactggggccgggcatggtggctcatgcctgtaatcccagcactttgggaagccgaggtgggaggatcacttgagctcaggggttcgagaccagcctgggcaacatggcgagaccccatctttacaaaaaatataaaaaagtgcccaggccctttggcttacgcctgcaatcccatcactttgggagactgaggcaggtggatcacctgagatcaggagttcaagaccagcctggccaacatgacagaaccctgtctctacaaaaaacacaaaaattagccaggtgtgatggcacgctactgtaatcccagctatttgggaggctgaggcaggagagtcgtttgaacctgggaggcggaggttgtggtgacctgagattgtgccactgcactccagcttgggtgacagagcaagacctgcaagaccttgtctaaaaaaaaacaaaaaaaaataagacactgggagaataaattccaggcagagttggccatgctgacagctctgtgccctcggctgatggcagttggtagaaaaagcagggaggggccgcagtggatattatccatctgtaggaaggagcgaagcattgatccatgctacagcatggatgaacctcagaaacatgatgctgagtgaaagaagccagacacaaaaggccacagagtacatgattccattgacatgaaatgcccagaacaggcaaatccgtagagttggaaagatttgtggttgccaggggctgggggagtggggagtgagtgctgatggcgatggggtttctttgggggagaaagaaaccgttctgtaactagacagaggtgatgattgcacagtatcgtgaatgtgctgactcccacccacacatgctcagccatgcgtgcacacacacaaaaaggagtggtgtttcagaggccacctgagacgttttcccagtgggatggaaggacccaaagaataaaaaatgggaccgaggcggatcacttgagggcaggagttggagaccagcctggccaacatggtgaaactccgtcttgatcaaaaatacaaaaaattagcagggtgcggtggtgggcgcctgttatcccagctacttgggaggctgaggcaggagaatcatttgaacccaggaggccgagcttgcagtgagccgagatcacgccactgcactccagcctgggcaacagcgcgagactctgtctcaggaaaaaaaaaaaaaaagaaaagtaaaagaaaaaaagaaaatgggatcacgtttcttctgtgtttcacgcgtcctgggtatccctgaaatcagc

SEQ ID NO: 35409 - DNA, 1097 bp, Artificial sequence
  DNA replication origin
cagtatcagaagatcccgtcatgcaggatgtgagatccaagctcaaccttggagcgaagtggtttgtgtttagatcccactcactcagttttggtggggcatgtacttctgcagctggtgctggactgacaattttacctgcattattatttatttatttatttatttatttgagataggatctcgctctgtcacccaggctggagtgcagtggcgtgatcttggctcactgcaacctccgcctcccgggttcaagcgattctcctgcctcagcctcctgagtagctgggattacaggcgcccgccaccacgcctagctaatttttgtatttttagtagagacggggtttcactatgttggccaggctggtctcgaactcctgaccttaagccatctgcctgccgtggcctcccaaaatgctgggattacaggcatgagccaccacgcctggccaccttcatcattttatcaagctcctgtgtgggccaaggaagaagggtctgtgatggaatcattcaccattaggaagctcaaagaagcattgtcatgggttcaggggcctccagggagtgagtggtggagctgtgtgttagaatcaatgtctacgggtgccgggacagcccagaaaaggggaagtccccctgaacctgagagtctgcaggtgatgtttgagtcaggcatcggggcgggaagggcattcgcaaagagggaacagcatgtacaagcaacagaagcaggaggcagcttgacctttcctgggtcctgcctcagacatagtttggcttggctttggggtctggtcagggaagatggaaaagcaggtgaggagcaagaggacgaggaggtcagaggctcctgccattgtctaggcaagaggcaaggaggcaggaagcaaccaaggcagcggtcacagggtggcttcggtgaggagtaaatgggagatgttagactcagaatggccaggtagtggtgcccagaatcctagcttcagtcccaacctttacaatccatcctttaccgttctttttatatggattatggttgggaggaataggatctcggtttccaaaagaaagcatacacacagactatgccc

SEQ ID NO: 35410 - DNA, 1193 bp, Artificial sequence
  DNA replication origin
acgactcaacaaagataaacaacccaattattaacagtagtggggctgggtgtggtggttacatctgtcatctcaacaccttgggaggctgaggcagagaggatcacttgaggccaggagttcaagaccagcctgggcaacatagtgaaacccctaaaaaccaagtacatacacatgggtgagcatgcacacacactcacacaaatgcacatgcacactcatgtgtagtcacacatgtgtgatacaatcatgcagtcacatatgcatgcaaacaaacactaaatgtaaattacatttttagggtacccattgaaaatctgaatattgcctatgaattagacaatataatttggtgaatgtaattttcttaggtgtgacctaagaaaatggccttgaggtcaggtaaaataatgcctttttttaagtatacattatggtcaagtatttaagagtgaagcactatcatgtttgtaacttgctttcaaatgctgcagccaaaaaatgtgtagagaaatagatggatgcgtgaattggcagatggatggatggatgaagggagggatagagggagaatggatgaagggagagtggatgaatggatggatgaagggtgcatgtatggatggatggatgaagggtggatgaatggatgaagggcggatggatggatggatggatggagggtagataaataggtaagtgtagtgggtggatggatgggtggaggaaagaaagaaaggaggaaaagaaggagggagagagggtagatggatggatggatggatggatgaagggtggatgaagggcagacggaaggatggatggatggatgataaatggataggggtagtgggtggatagatgggtggagaaaggaaggaagggaaggaagaaaggagggagggagagtaaatggatggatggatgatggatggatgaagggaggcgcagagggagggtggatggatggatgaatagatagatggaggatggatggatggatgaagggtggatggatggagggaagatgagtggataaagggtagtaggtggatggatgggtggagggagggaggaagggtgaatgaatggagggagagaggatagatggatggagggatgaagagagggacagatggagggatggagagagagatggagggtggatggagggatgaatgaaaggatatagg

SEQ ID NO: 35411 - DNA, 1647 bp, Artificial sequence
  DNA replication origin
taccctctcaggggtgatagtgaaacttaaatgtctgtatgtcactcctgatgcagagggaatgctggtggatggggaacaggagcaaaatgagagagtgcaggctgggcatggtggcttatgcctgtaatcccagcactttgggaggccaaggtgggcagatcacttgaggtcaggagttcgagaccagcctggccaacatggtgaaactctgtctctactaaaaatacaaaaattagttgggtgtggtggcacatgcttgtgatcccagctactaggagaagctgaggcaggagaatcaattgagcccggtaggcagaggttgcagagagctgagactgtcactacactccagcctgggcgacagagtaagactccgtctgaaaaaaaaaaaaaaaaaaaaaaaacaaggatcaacccctctcgggtcagcacactggcgggggtgctgttggatgccagggaggcctgcagagggcggggagcagccttgggggagaggggaacatggtggggttgggagggtcacaccctggggggtagggcattctttggggaggggagacccttggggagggaagaacttagagtggaagggcaggacttgaggaaggaatacacagcgggagaggggcatgctttggagagacaggggcgtgctcataggggtgaggacaccagcatggaaacaaagacaggcagtgggtagagtgcaagagactcatgtggcagggagacaccgagtactagggagggagcggggcacagggcacccttgtgggagcagggaggccatggaagaagtgtctgcctgtaggaggagggggaagcccggttgttgggggagatggaaggggagggcagaggaggggcccagggggaggaagatgctctagggaaaggggtacactccagggagggggtgcccccaggggaggggcacgggaaaggatgatgctctagcgggtggccacatcctggggaggggaacccacaggggaggagcccagcagggagggagatactttagagggaggaggacaccccagggaggaggcgcccacaggggaggagcctggtggggagggagatactctagggggaggggcacctcctgaggagggggcgcctactggagagagtcacaggaagggagatgcactaggggaggggcacaccccagggaggagggaaccaggaagggaggggcacacccatgtgggagggagggaggcagcagaggaggggaacgaccttgagggagcagcgtgatggttggggaaggggaagggcccccccagtgtgccccaggggtccctctttctcacctggcccgcacagtgcctgtctcacaggcgtccaggtcttggatataccggggcgggtcaatcagaagctcaaacttgggcaacactgaagaaagcaagcagagaggaggggctggcttctgtccctaaggtggcctcaggagccctgacaccggtgcaaggtgtctgaggaccacagcacctggccaccaccgaggttgacactgtacccatccacaccactctgctgagcagccctggggattttgtgggctgcatctatttctcatctttgggggactaggaccccattttcctcaaggggcctcccctgtcactt

SEQ ID NO: 35412 - DNA, 1744 bp, Artificial sequence
  DNA replication origin
gacacacatccccgaatgtcctgtaaccatcaaaggcccactttgcctgaatatgagggggaaaaagccattttagccatcacatcttctgactccaatgtgattgagagaagccgtgggcgccgctatgggttttcggttctgtcgtgagacccaggggaaccactctccctgtcccttccctgtatggccctccccatatgatcattggggacgagtggagcgtgtcacactcaggagtggaagatcccctggcactgcctagagtcaatgtgccctttccaactcctccatggctcccagtgaaaacagctgcggacggggctcagaggcacaggcgcaaagcaaatgacagctcccatgtcagcggctgatggtgtttctggggggatgtttggggagagagtgctctgttctaaagtgtgtgcgtgctctagttcagttggggggtggttctcatggaggggtggggggtcggacaggcgattctgcccccaggggacatggcaatgtctggggacattttggcttgtcaggacttttgtggaggacaaggggtgcaactggcatctggtgagtggaggccagggaagatgctcagcacccctcagtgctctgggatttccaccaaggggtgactttgccccctaggggcgatattggcaatgtctgggggacttttttaggttgttatattgtagagggcattggtactactgacctttggtgagtggaggccagggatgatggtcagcacccctcagtttacaggatgcccccacaccacaatgaatgatctggccctaaatgtcagtagtgctgaggctgagaaaccctatcctggcaggagaccctgtctgtcttgtctgtttctctctctctctctctctgtctgtctctctctctctctgggatttccacccaggggtgattttgccccctaggggcgatattggcagtatctgggggacttttttaggtcgttatattgtggggggcattggtactactggcatctgttgggtggaggccaggggtgctgctcagcatcctacagctcacaggacacctccaccccagagagccacgtggccccaggtgtcagtagtgcccaggctggaaatgactcgggtggcgggggatggagtgaatgagccgggctggctcatttccctcgtttgtccagctcactgcctgcccctggccctggctgcaaggctgtcccgggaaccgcgggtccagtcccttcctgcatcccttcgaagcccgccggggtgtcaaacctgctccgctggcctgatcctacagggtgctgctctgcacagaccccgccagcttctctgtggtctccagttctcctggggggctgctcagggaaggagaaggagcagggtcctggctccctcttcccgtacctcaccgtgtctgtggctctctgaaaaagcccttgccctctctcttcacacaggcatcaccaacatgagcttccccttgtccgaccagcctgtgttgggagaatggttcatttttgttgaaatgcaaggccacgcgtacaacaagtcttttgaagttcagaagtatggtaagttggagaatctcagggtcttgggatttcagatctgggagaaaccttagaaactggtgaagaaggccgggtgcaagggctctcgcctgtaatcccagcactttcggaggcccaggtgggcggatcacttgaggtcaggagtttgagaccagcctggcc

SEQ ID NO: 35413 - DNA, 783 bp, Artificial sequence
  DNA replication origin
tttttctagaggtttgcttgcaggcttctggtgggttgacagcggggagaaggtgaattaactaactgctggggagtactgctaagttggcttcacagagaatatttctaaacctggcaagttcgggtgagctctgcagggctgcgggttcaggggggctgccctggtctgcacaagaccagccttttagtccagctgggcgtttagaaggcggcttgttcaagcagcccttgtttaggagtttccagaaaactggtaagcagtgagactaggtgggtgtcgttatttgcagtgagtagttggtccttgctggtcacagttttaaaagcaagacagtctactgcgctctgagcatccagacttccctctcctaggcttcgtgaaatcggaaccctacaaattttcatcctaatgcttctttcaaagctggcatcccttagaatagtggttctcagccctgggggggatttttgtctccctgaggccgctgggaaatgtctggaggtatttttggttgtcacaaatagggagaggcatttggtgttggcattaagtgggtgcaggccaggaatgctggtaaacagctttcgatgtgcaggtcagcttccactgcaaggaatgacgcggccccacatgacagaccttggctccaatgagagaccctgccttatacagaggtttttgtttgttgtttgttgtttttggggtttgtttttgtttttgttttgagatggagttttactcttgttgcccaggctggagtgcaatggcacgatcttggct

SEQ ID NO: 35414 - DNA, 1299 bp, Artificial sequence
  DNA replication origin
tcgggcagggcccgggtgggtccggtgagtaagtgaggggacgatccccggaagggatcggggcgggtcggggtccggagatgggcggagcaggcgtcccgggagggtgcgcccaggagcggggcgagcggggcgagcggggcggtcccggagacgaggcgggtccggggagggggctggcccggggctgccccagcttggccgggcgcggagcggggcgcatggcgccgggcgcactgcgcgggggctgcgaacaaagggcccccggcggcggcgcgaggacggccgcgctcggaccctggccctggcccagccctggcccggccccctccccaggcgcggcgccccccaggagccgaaaaatgagcggcgccctgctctggccgttgctcccgctcctgctcctgctgctgtcggcgcgggacggcgtgcgcgccgcgcagcctcaggccccgtgagtatcctccggcgacagaggaggtcggtcgccttctggggtgggggtcgcgggtactggctcagagtgttgcagcgacctgcccaaggccacacagcctccgcgctgggctggacctggcctcttgttcccgaatcgtcttgaggagggggcgccctaaagtttccgaagtggctctgtggaggtacagggactcccaaaagctaaaggtgctgaggtcagctccccccgccccacctcgcccccttcgtgtgacccgggctgtcatcatgggtggcgatttccagttgtccaaggtatgaaggtaagaggagcgtcttggctgagaagtgggaggagagtgcgaaggggcactttcccgtgggtgggcgtggtgagggaggaggaagtgtttgttttgcttctacatttttctagaggtttgcttgcaggcttctggtgggttgacagcggggagaaggtgaattaactaactgctggggagtactgctaagttggcttcacagagaatatttctaaacctggcaagttcgggtgagctctgcagggctgcgggttcaggggggctgccctggtctgcacaagaccagccttttagtccagctgggcgtttagaaggcggcttgttcaagcagcccttgtttaggagtttccagaaaactggtaagcagtgagactaggtgggtgtcgttatttgcagtgagtagttggtccttgctggtcacagttttaaaagcaagacagtctactgcgctctgagcatccagacttccctctcctaggcttcgtgaaatcggaaccctacaaattttcatcctaatgcttctttcaaagctggcatc

SEQ ID NO: 35415 - DNA, 2323 bp, Artificial sequence
  DNA replication origin
acactgtgtgaggccacacaggggttgcactcgggagcacaatgaacaagcaggggctgtgggaagcaggctttgtagtaataagagggtgaggcagcccctggttctcctgggaggatgtgattggtttctttctttctttttttttttttttttttttgagacggagtctcactctgtcacccaggctggagtgcagtggcgcaatctcggctcactgcaaactccacctcctgggttcaagtgattcacctgcctcagcctcccgagtagctgggattacaggtgtgcaccaccacacctggctaatttttgtatttttagtagagatgaggtttcaccatgttggccaggctggtcttgaactcctggcctcaggtgatccacctgcctcggcctcccaaagtactgggattacaggcatgagccaccacgactgggcatggcttgtttcaataacttctcagcagctagggaagtgaagtctgtggctgatgggtggggtgcagctggtctggttgcttggtgagacagccaggtggagagcagcttctcttgccaggcagggggcatatttggcaagagtagctgaacggtcggtcaggacatcgtggtcctgtgtggctcaaccatgccaaggcagcactgacattttagaccttacaaaccaggcaggcagggaaggcacctccgggctaaccctgaaggtggaggagagcagccggtcttgtgatgccacggggaagtgcatcccaggcagaggggacagctggcaccttggcccaagatggtggtggtgggtgggggtctgatgtatctcaggagcaaatgtggccagagcccaatggtcaagggggaggcggagggctcaaaggctggcctggaggctgaggagtggaggttggcttaggtaggagtcagagttggcctggaggggcccggaggggtggcatggggcaaacttcgatgatgagggtgagatcagatgctgcttcttggtgctagatttttgcacctccatgtgagtttagcagcctgtttggggttggcctggtctgagcttggaggcaggcagctcctcctcttctccaggcaggagagacggctactcaatctactccggcccctgcgcgcgtgcacgcacacacacacaccaacacaccatcatcagttacgtcccctctgggttgtgtgctcagtggcagcaggtcctgtatgtcccagggtcctcattgcccagcccagggcttggtgctgcctgggtgatcagtgttgggtccaaaggctgttgacagggctgagaagcccccagaggacccacatccctaggggcagggagggggcaagagaagcttcccttgagtttcctggaaggatcaggagttggactggcaaaggaggcaggtagaggaagacagagattaggcagaagcaggcagtggagtaagaacagggtgttggaggaactaggctgaggtctctgccatcaaagccagagtttagatttggtctcaataaacgggaagccctggctggatgtggtggctcacacctgtaatcccagcactttgggaggctgaggagggaggatcatttgagcccagtgctcaagaccagcctgggcaacacagtgcgactccgtttctaaaaaaaaatatataaaaattagctgggtgcgggcttgcacctgtagtcccagctactctccaggagtctgaagctgcagtgagctgtgactgcaccactaaattcctgcctgggcaacagagcaaaactctggtctcaaaacataaaaataaaatgtaaaataaacagggagccccgaggattccgggcaggagggggtgtggtcagcactggaattttagaagaagggcagttggtagctgggggaagggggttccacactggaaggagggggtccaggacttggacatggtataggatgtgccgcctgccagtgggacctaggacagcaggaccatcactgaggtggccacacggggaggggcaggaggggacaccctgctcttggagagaaagggggtgcccatccacccctgctgtatgaaggggaaagggggactctgaggcccagcgagagaggggacgggcccaagggatttgtggacagtgggggtgggggagaggggagcagagagcacagatagggacctggggcagatgtgagtctgggaggttcgacccctggctagactgtttccccaaagggtcctctgctccttgggctgtacgcactgcactgggcactagatacaggccagggcttagggcacggcggcgcctgtgggatcggggttgc

SEQ ID NO: 35416 - DNA, 806 bp, Artificial sequence
  DNA replication origin
gccactacgcctggcctagaatcattcatttgacatattatcgagtgcctaccccgtaccaggtggtggaacatagcagcgagcgaaggagacaaaaatcctgggcccctggggctctagggaggaggtgggcattgcatgagaaccgtaaggaggctgtggggttgctagatgatgacagatgctgtgacgaaatggcaggcagagacaagtgtgctgtggtctgaactgagcagagccttgagagagggaggtgcctgcagggggatgcacagcaagggggtccacgcggcagagcggctgaatagagcaagtgagaggtgacaaagtgataaggttagaggcaagttgttggtggcacagggtccagaaggttcccggaggcacttaggcttcctgagcccatggacccagcacgccagcctgtctcagccctgaagggcagttggaggctgatggaaggtttcaggaagcagggaacgagcagtggttgtgcctggtggttcagatgaccaggactgagaatggactgctgggctcaggagcaagggaggtcacggtggtcttgtccaaaggtgttctggtgcggtggtgtgtctgcaagctggattgtggggggcgggattcaagggaaggagaaaggagagaaaggggagctggtgaataaagaacttggggtgtttgctgtcaaggggatgggagaaatggggggaggcagagagtgcaggtaggaggaagaatgacctccagcatctggtggagagaggagctgtggggattcaggcagggaggtgggagttgcgggg

SEQ ID NO: 35417 - DNA, 1443 bp, Artificial sequence
  DNA replication origin
gcgcgcgtctggggccgcgctctccacacttagccggcgctgcctcacgcctcgcagccacccctcctgcgtctccacaaatggtccgacccgcaagcaagggggcgggtccggctttgaaaagccggcgggtcgggccttgaggtggaaggcgggaaaatggcggattcctcggggcgaggcgctgggtgagttggggcttccgcaggtctggatttgtagacgccatagggctggagaggatgggcagcggaggtggggagttaggaccctcggggtgagttcgggttcgaccccgccaggaactgcgcgggcccctgaagaccccgatggcgtgctgcctctgcgcatgctccggagcgctgacacccgaccggccctgagttccgcgtcctcggctgggacgctgggcgacctccggcaagcggcctgaccgcccagtgcctcgctttcctccgctacgaaatggggccgatgacgcagctcaacctcgtaggcgtcgcgtgaggctgaaacgcgcttagatcggcgcctgggtctttactgtgatgtcgctcttggaattatcgttatgcagtgaacaagtgttgggcgaccaaagtgtcccctttaatcctcccacgcgctttattctgtgctcccagtttactgaggagatgatggagacccagggaggggaagtgacttgcctagggtaacacaccatgaacaagaaagaagttgaatactgaccgagagctaggcatgaatgatcatgaggctatatttgtctagttttgttaattctgccagtgttgattgtgccaggtgcaaactgaagtgaaattggccagcaagaggaatcactccaccgccccttgccgtaaccgatagattgacagtagcacctcccaggtacaggtgcagtagctgaggctcgcacaggttgtagggacccccctcaggtcgcagcaggttcacccaggagcccattcggtttgaggccacagccctagcacagtccccagagggagtctgtgctcttgtctctttctggctgtgagactgccccgggggtgacctatgtaaaacctgtgcgtctttgttttgcagcgacgaaaaagcaggtgtgaacagttaggaagctgtcgggttaggaggagcctacgggcgagcgcagctgctggcacctggcgaacatttgctaagttgcctctccccacggtggcctggaagtgtccccaacattgtctgggtctcactttggggtcctgggagcctgcttcagaggaggtggccgcagggaccagtggagccgcctttggtgatgggagcaggagttacagtgccctggccttggccctgcccctccacttgcccatccacttgcccctcctgtgttgctggtgtctgttcttggatcccttcttttctcaccagctcaggctgaaaccctgaaacccc

SEQ ID NO: 35418 - DNA, 784 bp, Artificial sequence
  DNA replication origin
tcgcgtcccccatcagccctcagctccgtccctcttctgcgcagcccccaaaggcaggcttcgagctcgagtcgccaacccgaggctgcctggtactcacctggcctcggccgccgcgcgccgccggtcccgggccgggtccccggccggacgaccgcctgccagcccgccgctgctcgagccgctccgccccgccgcgcccgccgctcccccgcgcgctcccgcttccgggttccggagaggcggggacgggggcgtgacgccagcgctcctaggggcggggcatcgcgaaaagccccgcccctactgtccgacagatcaggtcccacccaccgcccctacccactaccgccgatggtgggcgagaccaagtgcgaggggaggacaggcgaagcgcgcgtctggggccgcgctctccacacttagccggcgctgcctcacgcctcgcagccacccctcctgcgtctccacaaatggtccgacccgcaagcaagggggcgggtccggctttgaaaagccggcgggtcgggccttgaggtggaaggcgggaaaatggcggattcctcggggcgaggcgctgggtgagttggggcttccgcaggtctggatttgtagacgccatagggctggagaggatgggcagcggaggtggggagttaggaccctcggggtgagttcgggttcgaccccgccaggaactgcgcgggcccctgaagaccccgatggcgtgctgcctctgcgcatgctccggagcgctgacacccgaccggccctgagttccgcg

SEQ ID NO: 35419 - DNA, 1463 bp, Artificial sequence
  DNA replication origin
ccattttcccgccttccacctcaaggcccgacccgccggcttttcaaagccggacccgcccccttgcttgcgggtcggaccatttgtggagacgcaggaggggtggctgcgaggcgtgaggcagcgccggctaagtgtggagagcgcggccccagacgcgcgcttcgcctgtcctcccctcgcacttggtctcgcccaccatcggcggtagtgggtaggggcggtgggtgggacctgatctgtcggacagtaggggcggggcttttcgcgatgccccgcccctaggagcgctggcgtcacgcccccgtccccgcctctccggaacccggaagcgggagcgcgcgggggagcggcgggcgcggcggggcggagcggctcgagcagcggcgggctggcaggcggtcgtccggccggggacccggcccgggaccggcggcgcgcggcggccgaggccaggtgagtaccaggcagcctcgggttggcgactcgagctcgaagcctgcctttgggggctgcgcagaagagggacggagctgagggctgatgggggacgcgacggcaggggtcgagggggcgggaacgagcctgggggtcttggagagattgctggggatgaggtggaagcgagacggtgaaggagaaagtggatggggatggagctggtgagggagttcgagggcgtggggggggtgagtcttgtggctttgagcagcttctctgaagaggacgtggcttaagtggtaattggggggtcgcaggaaacggcgttgtggggaggcacggaggcgggaacgagaggcccaggctgggggagtgggcaaggccaggggcgggacagccggggtgcggttgaggggaaggggtgcgagaccgatctggggacgtctgcccgcgcgattgaaggaagggtgtctgagaagagggcggcgcctggcccccagtgggcgctcagtaaatgcggggggttctgaactaactgatgcggcagccggctattgggaagcggggaaatgggagctggaagggaagtaaacggagtagaagtcacggtaagaactgagggtaggcttagggagggagggcccggagaggagggaagagaaggaaggggttagagtggccccgtgcagatagatgttgagatgcagcccctggagattccgtccccccaccctcccctcttgattcgtgtccctcctgacttcacacttaacagctgggtgacctgggacgagtcccaacaccctctgtgccagtgtcctcgtcttggaaacttcaccaccctccccttaagacaggactagcaggattctgggattccctggatccaaggaagggacctcagggccggttgtggggccggaactgtgtttcaggagggagtgtgcatgcaccctcatgtacaggactgtcgccacctccgcagagctgcatccttggacttaaatgggtaaaacgacata

SEQ ID NO: 35420 - DNA, 1550 bp, Artificial sequence
  DNA replication origin
gtatcagcatttcattcctttgtatggctggtatgtggttggggttttcctggacccctgccccagccaggccaacctcccccatcagtgtcccccacaagaacaatgttggggagtggggggattgacactcacacagaggatcccctggagactgtcatgagccctgggaaggaggagagcagtcctctccagcaggctgcttcgggcgtgctaatggctggagccaccgagggacaccaggtgggaccaggagccggggtgggaggaagcaagaagggggcaggcgtgcccaggtatagcagggacgtccaggtacagcagggacatccatctgcacgttcttcccagcctgctgagaagccagtggccagagggaggctggcttcagggagcagggcggacgggccggctggcgggggccctggactcgggcaggagcgtttgcacgtggcttcccaagtgcgacagagagggagtcctgggagcaaccccagccgcggggatgtgccagatctgaggctgatagctgaggacggacaggtcccaagggaggaggagagggggtcagagatggctgcaggggaactgcccggaggccagtcctggtgaatttggtttggggtgcttcgttcaagcagctgatggggcatccaagggagaattgtgcaccagccacacaaagaatcccgcagccccagggctcatcaggcctcagaggccatcctgtcgcatgacccagtcagagaggggtcagggacagacagcaagctggggcacctcccagccaggcactcacccagcccttggctgttggccatacagggaggtgagtttgtcaggagaggtaagtgttgagagggggcgtgtggctcccctctcattggggggcatttcagggatgagattcagggcataggccacagaccggaggaggctcagggtcaggacggggccaaggcctcagaaggcagaagtcacccatgtcacgaggagcaaagggaagccagcatttgtttgaggaagagcaatacctgcagtcagcacccgtctgtctgtcaaagggtccaggagcccccactggcttgagttgtgtctatgttacatgaatgcagaggtatttgaggctgagggtctctgagaccacttgtcactttgctgggctgagggagaaggaaggtggggcgtcagtgggcagcagggtgggcagcaagcttgggctcaggagggtccggggcagcagcctggtgcacttcaaagggagattggaaggccagcgtgtccagggccgggttggggaagcagggccagggtcattgggtgcccgtcctcctctcgggtaggcgcactgctgtggtggggaaagaggaggcagaattagggctctcaggagtttcccccctgctcgccctgcgagcggtcaagactcaggctagcccaggccatccgaaaggctaaacagcgggatggttatccacacaaacatctaggtcacccatccacacaggcaggcgtgtgtggaagacagggtggtgcaaggacagaaggag

SEQ ID NO: 35421 - DNA, 1362 bp, Artificial sequence
  DNA replication origin
gtgggtgtggtggctcatgcctgtaattccagcactttggaaggccgggggtggggggtgggggtgggggtgggggtggatcacaaggtcaggagttcgagaccagcctggccaatatggtgaaaccccgtctctattaaaagcacaaaaattagccgggcatggtggtgggcgcctgtagtcccagctacttgggaggctgaggcaggaaatcgcttgaacccgggaggaggaggctgcagtgagctgagatcgcaccactgcattccagcctgggcaacagggcgagactccgtctcaaaaaaaaaaaaaaagaaaaaaaaaagtcaaaagatctcttgatggctgaaattgatgtgaaattcaattttcagcagcagcaaatgacgttttcctggcacacagccacatcggtctgggtctggcttaaggctgcatttgagttacaatagcagagtcaagccattctgacagagactgggtggcccctaggatctgtgtgaaatacagactgtctggttttcgtgagaaaagagtggccaggggccgctgttctggatcctctgttaaatggggttttccggggatccccgacatggttccagcaggatgggtcggcaggaggtgagtgtcaccctgggtgactggtctcccgaggccatggtggggacgtggaggagcaggcctgggaagcacccaggacaaaatgggtccacagggtcacgtgcccaaggagggctgggtgagaagagactccctgggagctgggagcagagggggcggaggccagcaggcagggctggaggcgaggaaatgagaagtttagctgatgctttcaacagagctcagagctgtggtgaaggcggggccgagggaatgaggaggttagtgggggccatgtcggggatgatgccagccaggcacaaggaagaccctgcgaagggggtgggtgtcatggaggtgaggaggcagctatgtggtgcaagacaggactccccacacccccaagcccaagcctgcacaggaggcagctgcaggctcagttggcctgcggatgtgggggcaggaagtggaagagtcaccccaacctcatggctcccctattcgcagaggaggaagtggaggctctccagggcccctagcctagctgctgccgggttctgttcttttctggttgctcaaggggtttggggcaccccggcaggctctcgatagctggttgctggtcagatggacggacggcagggatgtacagagagctgagtgctcccaacgccgtatgtcccagttcacaagagacaccaactgtcagccacagacgcagatggcattacagcaaacactgaaacgcagcaaggactc

SEQ ID NO: 35422 - DNA, 953 bp, Artificial sequence
  DNA replication origin
cgagcaggacatgctaaagaccaagtgaagacaaggcagccagccagggcccaggctgggacctggagccttgaggggtccccagaaggagctgtgctcacacagaaaggccccggccttgagagaggtggctcctcaggtcaaggtccctgctgcccagaaatcttgggccttggtttctaattggtgaacaggactaactgcactcctcggggttaaaggagcaggggcttgctctgcctgagccttagtaagccaagtgtcagtgacttggaatctccagctccctcttccagagggcctgcaggaccaaaggaaagaaatcagggaggagacaggccttccctgcagcaggcctgctcagcctcccactgctcgtattgggggccagatcattctctgcggtgggggctgtcctgtgtatcataagatgttgagcagcatccctggcctccacttaccacatgccaggagtattatcgatagatgatggatggagggagggagggagagagagagagagggaaggatgtgtgggtgggtgggtgggtgggtggatggatggaagatagagatgatggaaggatggatggaaggaagatagagatgatggagggatggatggatggaaaatgatagaggtgatgaatggaagacagatatagatgatggatggatggaagatacacatgatggatgaagggatggatagatagaagacaggtagtaatgatggatagaggcatggatggatggatgatacagatgatggggagatggatggatagaagatgggtagaaattaggctgggcgcgatggctcatgcctgtaatcccagcattttgggaggccaagagtttgagaggagttcgagaccagcctggccaacatagtgaaaccctgtctctactaaaaatacaaaaattagctgggcgtggtggcgcatgcttgt

SEQ ID NO: 35423 - DNA, 974 bp, Artificial sequence
  DNA replication origin
gagagggaaggatgtgtgggtgggtgggtgggtgggtggatggatggaagatagagatgatggaaggatggatggaaggaagatagagatgatggagggatggatggatggaaaatgatagaggtgatgaatggaagacagatatagatgatggatggatggaagatacacatgatggatgaagggatggatagatagaagacaggtagtaatgatggatagaggcatggatggatggatgatacagatgatggggagatggatggatagaagatgggtagaaattaggctgggcgcgatggctcatgcctgtaatcccagcattttgggaggccaagagtttgagaggagttcgagaccagcctggccaacatagtgaaaccctgtctctactaaaaatacaaaaattagctgggcgtggtggcgcatgcttgtaatcccagctacttgggaggctgagacaggagaatcgcttgaacctgggaggcagaggttgcagtgagccgagatcaagtcactgcactccagcctggatgacagagatgagactccgtctcaaaaaaaaaaaaaaagtagagattatggatagaaggaagatagatgccgacgatagatggatggaaggaagataggtaggtagagacaatgaatggagggatggaagataggtagagatgatggatggctgggtgggtggatggatggatggatggacagacagaaggatgggtggatggctggaagatagagatggagagatggaaggaacatagagttgatggatggagggatggatagatgataggtagattatggatgggaggaagatagagatgatggagggacggatgggtagaagataggtagagccgggttcgggggctcacacctataatcccaacactttgagaggctgaggcgggtggatcacctgaggtcaggagtttgagaccatcctggccaacgtggcgaaa

SEQ ID NO: 35424 - DNA, 1770 bp, Artificial sequence
  DNA replication origin
ccccaccaacacgacctgagatgcacaggtgccatccaccctgtggtgcccaggcaagaatggatggctacagaggtgtcctggccccaccccaaactggggacccggtttggctgggccgactgctttgggcctcagtttctcagtttgtgaactgggtggtcctgcctcctgggctggtcacagcgaacgctgtatcctggctgtggccacctgctgccacccgcaccgccatggggctcaccgacggctcggaggaagtcgccgtactgtgcgaaggtcatgaggggctcgggcagctcccgcagccactgcttcagcacccctgtgatggcgtggatggggaagttctccagcttgactgctgcggggtctgtggggtgggtggggtgggtctggtgagcggcgcactggcaggacggctgtgcctggggcctggcactgcacccacctgcccacagcgcccacctgtctgcagcgcctgccggagctcccgagtgcggttggcagcacccgacttgcggtagaggccctcggtgtacaggccgtgcatctccacgtgttccaggagcttctccagcacgatgggcaccgaggccttgtcgctggtcaggctgtctacgcacacgccgaagtggccaggctcaacgcctggctcgccctgcagtgccggggttgggggtcaggtctgggcctggctgtcttcctctccagctgtctctgggggcctctgcctcctggtcccgcacaaggccctcagggcttcctctgctgttctgtccctccctgtctccttctgcgtggttgttgggggtgtggggctgcagaagtcaaggccagcatggcagccactgggcaggggcttcctttgtaggccacccaaggcatgggtggtccttcgtggggagagagctataacctagcccccacagccacctcacagaagtagaccctgactcttgctgcacccccagcacccaggaccccaaccttatgcacagagttggggggcctccctctgcatggctcaggactctctcaggagcaaggatgagcagggctgggggagctgagacacacacacaggcctgggccctgcctgagggcctcaaggagtttgtacagaaccggggacaatggtgtgttctgcagaaccagaggccacagccgccccctactggctgctcaatgcttcgcttggccctcacatcaagcaccacctcctggtgcacctggccgtgagtggagtgtcattgtagaaagttccaggcctcgtacactcaccttcctcccgtaggtgtaggagcagtggctctgaatcttgtgcacgcacttcttgtggcaggtcatcttgcacactaggaggtccacagggtgggagtcacagagggtgctggggaccccagattcctgcagccacccacccagctggccgggggccgccaattgccttcttttttttttttttttgagatggagtctcactcttgttctcaggctagagcgcaatggcgtgatctcggctcactgcaacctccgcctcccgggttcaagtgattctcctgcctcggcctcccgagtagctgggattacaggtgtgcgccaccacgcctggctaattttgtatttttagtagcgacagggtttctccatgctggtcaggctggtctcgaactaccgacctcaggtgatctgcccacctcggcctcccaaagtgttgggattagaggcgtaagccactgcacctggcctggattgccttctttttgg

SEQ ID NO: 35425 - DNA, 1306 bp, Artificial sequence
  DNA replication origin
gtgctgccaaccgcactcgggagctccggcaggcgctgcagacaggtgggcgctgtgggcaggtgggtgcagtgccaggccccaggcacagccgtcctgccagtgcgccgctcaccagacccaccccacccaccccacagaccccgcagcagtcaagctggagaacttccccatccacgccatcacaggggtgctgaagcagtggctgcgggagctgcccgagcccctcatgaccttcgcacagtacggcgacttcctccgagccgtcggtgagccccatggcggtgcgggtggcagcaggtggccacagccaggatacagcgttcgctgtgaccagcccaggaggcaggaccacccagttcacaaactgagaaactgaggcccaaagcagtcggcccagccaaaccgggtccccagtttggggtggggccaggacacctctgtagccatccattcttgcctgggcaccacagggtggatggcacctgtgcatctcaggtcgtgttggtggggacaacaggcaccttggggacccttgggagctgacgtcctcaaaccccactgcctgcagagctgccggagaagcaggagcagctggctgccatctatgccgtcctggagcaccttccagaagccaaccacaactccctggagagactcatcttccaccttgtcaagcaagtgcctccccacctgccctctgtggggttagggtcgcattgggaacccgcgaggcagcatttcccaggaggacccgagctggcgttctgtggtggtttcgaaccaggatgcagaccactgttgggggttctgggagggggccaggctgctgggccgcccgggtcccttgaggtacctctctgtgctgcggaagcatctcccagtgctgggctgtggcactgctttcccaacagccaccccagggctcagaagttcagtctcggggctccctggtacctccctccctcggccctagccatcctctaactgccagtggctgtgcagggtggccctgctcgaggatgtcaaccgcatgtcacctggggcgctggccattatcttcgcaccctgcctcctgcgctgccctgacaactcggacccgctgaccagcatgaaggacgtcctcaagatcaccacgtgagtgcccaccctgccccggaggcatgctcagggcagccccacccaggaccccacgacagctccatccatccctgtgtaaataaatgtgtaagaaaagtccagagccgagtgcagcggttcacacctgtaatcctagctactttgggaggccaaggcaagaggatca

SEQ ID NO: 35426 - DNA, 2483 bp, Artificial sequence
  DNA replication origin
tgggccttctctgtaggtgcgtggagatgctgatcaaggagcagatgaggaaatacaaagtgaagatggaggagatcagccaactggaggctgcagagagtatcgccttccgcaggctttcgctcctgcgacaaaatgctgtgagtaccggtgatcgtgggggcgggacctctttggtggggcggagcctggtgctgggcagggccttgggcgtggctttgttgctgggaaggctggtgagtggggtcttggtgggcggggccttgggtgggcaggacctcccatgccgaggatgggaccgggtagtgggtgtggtctcgggtagcagggcggggcctcccttcccagttccccgcccactcctaccacacccttggccacaaccagcctggctggggccaccaggccctgcaggtaggggcagacttactgccttgaacgaaagacgatggtcctcgctcagcctcactccaattatgttcctctaggtggggcaggtagggggaccagcttcctgcttgctggtggttcaggtcatgcgtccagccttgtcccttctgacctgggccctacccacggggaaatgttcccatagcagaagaatcagccccacagtgcaggggtgtgttagtggggaacgggctctgggctcctgtgggaaccagggaccccctatcttggtaccggtcattggatgtatccccagctcatgcctgtgtctgtcttggcccgtgtggtcaccctgtgttcatctctctcccagccatggcctctcaaactggggttttcgtctccctatgagggggtcctggtatgtacgcgttcggtgggcccgcggtgcatgtctcccggtgcagtgcatgctggggttccctggggccctgggcccctcgtaggatagacagagcctgtcctaaccttccggaagtgcatgctggggaggccccttgcctgctgaccttctgtgctcaggacgactaatcggccacatgaccaccactctgtcccatgggattcctagagaagtctcactaagagcccagcacactcacatcacaactaacctcctgggatctgctcacacctccggcagtaacctcgcccactcagagatgtcagtgggaccccttgcttctttgtttcagaacaagagccccaagacccgggacatccaggaggaggagctggaggtgctgctggaggaggaggcagccggcggcgatgaggaccgggaaaaggagattctcattgaacggatccagtccatcaaggaggagaagcaagtggctcagtcccctccctcagtccttcatgtttagggcaagctggagtgcaggttccatccctggtggtccgcttgacctcgccaggtttggtcctgtcatccctaacactgggcaaacaacactttttttttttttttttttttttttgagacggcgtctcgctctgtcgcccagctggagtgcagtggtgctatctcggctcactgcaacctccatctcccgggttcaagcgattctctgcctcagcctccgagtagctgggattacaggtgcccaccaccatgccctgctaattttgtgtttttaatagagacagggtttcaccacattggccaggctggtcttgaactcctgacctcaagtgatccacccaccttggcctcccaaagtgttgggattacaggcgtgagccaccgcactcggcctttatttctgagacagggtctttctctgtcacccaggctggattgcagtggtgcgatcacggttcactgcagccacaatcccctaggctcacggggtcctcccacctcagcctccccagtagccggaaccacaggtggtgcacaccaccacgcctggctaattttttttactttttgcagaacagggtccgcctatgttgcccaggctgggttcaaactcctgggctcaagcaatcctcctgcttggggtggggggaggttggggacacagagttacatctaggagcaggacagcctgctctgttccacactggcccagcacttccggtggggtggccttggacaccactaccctttttcctccagggaggacatcacctaccggctgccggagctggacccaaggggctcggacgaggagaacctggactcggagacgtcggccagcaccgagagcctgctggaggagcgggccgggcggggggcctcggaaggtcagtattaaggtagcgtctgcttttctccttcccgtccatcccagcaggccccagggcgagggtcctccggctgccggccctgaagctgcagtaaccctgccatctgtctctcaaaagggccccctgcgcctgctctcccttgccccggcgcgcccaccccgagccccctccccaccgtggccgcccctccacgacgaaggccgtcgtccttcgtaacggtcagagtgaagaccccccggcggacccccatcatgcccacggccaacatcaagctc

SEQ ID NO: 35427 - DNA, 1283 bp, Artificial sequence
  DNA replication origin
tcaagcgattctcctgcctcagcctcccgagtagctgggattacaggcacgcacaaccaagcccagctaatttttgtgttttttgatagagacagggtttcaccatgttggccaggctgctctccaaactcctgacctccagtgatccatccacctcaccctcccaaagtgctgggattacaggcgtgagccaccgcacctggccctccatggtattttctttttttttttttttttttgagacggagtcttgctttgttgcccaagctggagtgcagtggcacaatctcggctcactgcaacatccacctcctgggttcaagcgattctcctgcctcagtctcccaagtagctgggattacaggcacccaccatcacgcccggctaatttttgtatttttagtagagacggggtttcaccatgttggccaggctggtctcaaactcctgacctcaggtgatccatctgcctcagcctccctaagtgctgggattacaggtgtgagccaccgcacctacccgtctatgatatttttcaaggacatcaggcccactggtgtaaccaaggtgcagatgacctaaggtgtgggaaaacatgaaggctgcatgccaggccctggttcctgtgaagcccccaccctcatcctgtcactccagaagagaggcactgcaaggcataggggtactcagcttccaggtactgaggtgggctgggaaggggttctccatgggggtctgggcgttaggggggacccagccccaccttgctcactctcaggcagagctgtctcatgtgccccttgaggcaggtactgtcacactgtccatttcccgggggaagaagcggatccagaaaagttaaactctcccagggccgaggatggaatcagagctggagctgtgacctggaaacccataaccacaatacagatgagccctgctgaggtgggggaagccttggattcctgaatcccaggctacagaaatcgggaagggtgtgtggacgtgaaatagctccgactgggaagaatccaggtaggagtggggtgcggggaggtactttgagcaggcaaaacagaacaaaagggcacactgcacgcgggtctgacaccagaagaccccggtcgtcctatcattcccgaagggttaacatgctctcgaggaaaagcaagtgattcgcctaagtaagaatggggtggcgcctctcctatttttttaaaatagagatagagtagcgctatcttgcccgggctggcctcaagcaatcctttcccacctctgcc

SEQ ID NO: 35428 - DNA, 853 bp, Artificial sequence
  DNA replication origin
gaaatgtgggaagataagtcactggaggggcaggtcctggggaccaaagtgagcggtgatgggggctgagggggcaggggcaccccttctcaccagcttctcggcttgcagcatccccttcagaaaatccaccttccaggaatattcattgatcacctcagaggccggtttgctggaaggcaggaagaagaaaaacaaaacctgtccatggtccccagctcagggaagggtcccagctgggatagcggtactgggatgtccagtagcacagccacgtgctgatgtgaaagccctgaggctgcctgcactcacctcgcgtggaccttcagggcctgcaacatgtcctctagggctcccacgtactggggaggaaaagtggattgtcacccgggggtctttcccatgtcctgatcatgggagtcgggggggcggggccgacaaatgggaggggtcaagcgtaaaggaggcggggccagtgggggaggggcggagtcccagggacgggggcggaagctacaggtggacgtggcgggactgaccggaaagggcgctgcccgagaggctactggggccggggagtcgggccaggtggcttccaaccctaggaatcaccccccgggagtcgggctctacgcggcagtgcgagatcccctcaccttctccaggcgccactcgtccgggtcccgtttctccgctgccatcgcctcgcagcgggatagcagccgcaccaggtttagctccagcctcgacgccgccattatcgcccggccctacaccaccccttccgccggctccatgttaagagagggcggaagtgccttcaagtggccttccgggcggatgtttcccccgc

SEQ ID NO: 35429 - DNA, 1230 bp, Artificial sequence
  DNA replication origin
ataagcgctatgtaaatgaactctgacgtcgccgcgcagcctgggaccggctcgagttaacccccgcgctgccggagcctcgacctccagggcgcgcagagcccacagacgaccgcgcccgaggagctcctcgggacctccgccccacctgcaaggccgtccggctcgctaccgccccgggtcacctgtcccagcgtctggagctccgagcctggatctgctgtcggagaggcacttccgtccgggttgtgcatttactgcaggatggacccgactggcggggtcgctcagcagggctgggggcggggtctgacgaaagggggctgggcctgacggcctgggggcggggctgacctggctgggcgtggccacacaccttcgaaacatggtcgactccgacctcgaccctcaagtttgtctgaaaaaacgggatggttttgcaaatttaaacttatttatttttttcagcaattatatgaaaaaaattttttaacaagagtctcacttgcccaggctggaatgcagtggcgtgatctcggctcactgcagcctccgcctcccgggttcaagcggttctcctgcctccggctcccgagtagctgggactacatgcgcacacttccacgcccagctaattttttgctgttgttgttgtttgtatttttagtagagacggggtttcgccacattggccaggctggtctcaaacttctgacgtcaagtgatccgtccgcctcggcctcccaaagtgctgggattacaggtgtgagccaccgcgcccgcccggagtttcgtcattttagccaggctggtcttgaacagcttccgggactcaagcaatccgcttgcctcggcctcccaaagtgctgggttacaggcgtgagccaccgcacccgcccctttctttctttttcttttatttcttttaagggcgagcaggtggtgttagatggcatctttactgaacagtactgttcctggcagagcagagctaacttatagacagtgtgccccaaatcggccttttatatatatatatatagagagagagagagagagaggctgtgttgcccaggctggagggcatgatcatggctcactgtggcctcgacctccttcctagcctcaattgatccttccacctcagcctcccaaatagctggaaccacaggtgacacaacgcctccctaatttttgtgttttttgtagagacgggatctcgccgcgttg

SEQ ID NO: 35430 - DNA, 1048 bp, Artificial sequence
  DNA replication origin
cctcgggcgcggtcgtctgtgggctctgcgcgccctggaggtcgaggctccggcagcgcgggggttaactcgagccggtcccaggctgcgcggcgacgtcagagttcatttacatagcgcttatttgggttgcgcagtcgtgggcggggtctggacgtcgctgcggaccaatcgcgtgcgtctatgcaaatagcggtcgttctggggaactctgctcccgcggggtgagagttggccgctcttcggccgagctgcccgcgcgtcctttctccgtgcgcgtcgtcaggcgtgtcctctccgcgtgtccacccacaggccgcccgcagaccacccccgccgcgcgcgggacacgacgccccccgcaggacccgcccatcagcccggaaacccctgagctgcttctcccggaggccgatgcccacccgggagcccccaaagactcgcggctcccgggggcacctgcatactcacccgcctgggcctgggcccccggtgagcctgaccgggagggggtccccaggccgggcctctaggcaaaagatttagcccctccagtttgagggactccggtttcccgacaccccgatttaactccagaccacgattcctgtggcagctgcagggactggcgccccgaggcctcaaaaccagcgccccccgccctccgtgccagccccagccgggaccccacaaggcaaagaccaagaagattgtgtttgaggatgagttgctctcccaggccctcctgggcgccaagaagcctattggagccatccctaaggggcataagcctaggccccacccagtgcccgactatgagctgtgagtgtcccccatgtgattcttcatgcctgggatcaggagaggggcactgaggctggggctttgatagttgaataagagtttaccaaagagtagaaaggaaaggatcccttgctgatcagtagtgggattgtccctgtgaataagccactgcactccagcctgggcaacacagtgagatcccgtctccgaaaataaataaataaataggcgaggcgcggtggct

SEQ ID NO: 35431 - DNA, 1430 bp, Artificial sequence
  DNA replication origin
ccgcactcgctgcctggtgccgtggccgcctcctcgggcagccccccgggctcggcgctggcggcagtggcgagcggcggagacctcttcccggggcagccggtgtccgaactgatcgcgcagctgctgcgcgctgagccctaccctgcggcggccggacgcttcggcgcagggggcggcgcggcgggcgcggtgctgggcatcgacaacgtgtgcgagctggcggcgcggctgctcttcagcaccgtggagtgggcgcgccacgcgcccttcttccccgagctgccggtggccgaccaggtggcgctgctgcgcctgagctggagcgagctcttcgtgctgaacgcggcgcaggcggcgctgcccctgcacacggcgccgctactggccgccgccggcctccacgccgcgcctatggccgccgagcgcgccgtggctttcatggaccaggtgcgcgccttccaggagcaggtggacaagctgggccgcctgcaggtcgactcggccgagtatggctgcctcaaggccatcgcgctcttcacgcccggtgagccacgctccgaagagggccgcgggatggggggacccaagggaggttaggaggagggcggcctggacccagactccggcccccatagcgccccgctcgctccctaggcctggggccctgcacgcgccgtgagtgaacgctcttgggtggctgtagaggggtgatgtaagcagtgtgacactgtgacacccccactccgtgatcccaggactctcggagaactctgaaccccggaccccagacccaaggctgggccaggaccagggcccagaccccagaaccctcttcctgttcccaggctccctgagacccctactccctcaccaaagggctcttcaggcttagtgagcactgatagcacaaggttggggggacgtgggagggaaggtcctgaccccctggttctggccccctcaggcccccactgggctcccagggcaacctccaggtagccagggttgtagggatctgggtaggggcgtggctcggaggcccctcccgttgaggggcggggcaaccccagaactttcttaaccatcagctatctagcagtggtagcccatcgtattccagcgactggcggtacagccaaattttttttttccactttatttttttatttgtatttccattttttgagactgggtctcaccctgtcacccaggctggagtgcagttgtccgaacacggttcactgcagccttgatctccagggctcaagcaatcctccctcacacttcagcctcttgagtagctgggaccacaggcgtgcaccaccattcccggctaatttttttttaaacgttttctgtagagacgtggtctcaccgtgttgcctaggctggtcttgagcttctgggcgcaaccagtcctgcctcag

SEQ ID NO: 35432 - DNA, 1731 bp, Artificial sequence
  DNA replication origin
cacggtgctgaagagcagccgcgccgccagctcgcacacgttgtcgatgcccagcaccgcgcccgccgcgccgccccctgcgccgaagcgtccggccgccgcagggtagggctcagcgcgcagcagctgcgcgatcagttcggacaccggctgccccgggaagaggtctccgccgctcgccactgccgccagcgccgagcccggggggctgcccgaggaggcggccacggcaccaggcagcgagtgcgggatgcggccgcgctgcaccgctgcgggaggcggggacaggagggacatgggggcgggaggggaggcggggggggggggggcgggcagcaggaaacgggggagggacaggagatgggggaggggagggcggggcacagaaggccgggaggagaggagattggagagacaggaagggaagcgaggggtagagaggagagggccggaagaggggggatgaggggccaagtaggtgcccatagagacatggggtggggggcaggtgggggggggcaggtagggagaataacgggaaagggagacaaaagtcatcaaggggtcactcaggccctcccctccaaagcctccaggcccagcctttcccagaatgcccaaccccaccccatgggcgccaggctggttagaaagtaagagtccaggagtccctgtctaggtccagccaccaccccccacccccagctcctggggacaaggaggagcatctaataaaccttttggagcctcctaacagatagtcatggggttcccagagctgaggatgggccatggaggacttggggaccctggccagcttggtccccaaagcaacagatcaatacccacccagcactggctctctcctatggaacagggatcatttctctaccttccatccccctccccaccagatggtgacccctgagggccggtctgggtccctgcagaggctacagtgcagggaagggttgggggggacctacagtaaggaggggtcccaggggggctgccataggtcctcagtaaacattagccgccatcagtagccttgcttatgaagcggggaggccctgctgctggcttgggcacgtctgcagtgaccaggtgggtgagaaaagggaaactgaggcatgaagaggaagagagttggccatgtgcctgcctggcttgtgccggggtgggcgggatggcagggctgactgggctggttgccagcagactaattaatgagctttaatgagctggcatgccccatctcatcacctccgtgaactccaggtcaactctgtgtagagcaaacaccggaggggaacgcgagcagaagccaggggcgaacagagctaagcggagaagccagggcatgggttgaagcccgctccaaggggtccctgagtctgagtcaactgtcaaatggggataggtggatggggcccaaaagtggttccccggtcctccaggaagcttcctcccgctttgttcactgggttgtgagcaaccaccactccctcacatggccacattcccaccccagggcctttgaactttttctttttcttttttccctccctccctcccttctttcctttcctttcttcctctctctctctctccctctctctctctctctttttgagatagagttctgctctgtcaccaggctggagtgcagtggcacaatctcagctcactgcagcctccgactccggggttcgagtgattctcctgcct

SEQ ID NO: 35433 - DNA, 980 bp, Artificial sequence
  DNA replication origin
tttttttttgagacagagtctcactctgtcaccctggctggaatgcagtgggtcaatcttggctcactgcaacctccacctccccagttcaagcgattctccttcctcagcctgccaagtagctgggattacaggcatgcgccaccacgcccagctcatttttgtatttttagtagagacggggtttcaccatgttggccaggctggtcttgaactgacctcaggtgatccaccctcccccgcctcccaaagtgctgggattacaggcgtgagccactgcagagatgcatctgtttaattcccttaagtggtggttctactctgtgactgtctctgtgtgtcccctgggtgtccagctggaaccccaggggtagttgctccaggcccaggccttggagagcccccagctcctggtggcaagagaccaggggagtccaagggcaggggccaaggggagaaggttctggggacatttgaagaataaggcctggaccttcctgcttgggggctgacccaggatggggagctcaccacctctcagggtggggccacctgtctcatccctgcaagaggcaacggcattcactgagggctgaccaggaaaatctccagcttgcataggggttgggtggtcctctcggaagagcgtaggtgtggggccttcagggctgaggaccagagtgactttgtttacttcctcattccttggggtgggcattgtgcgggtgataatgctggggccccacaatgctatgaccccacagaccactagcccctggcctgacccctagttaattcacaaagtccagctctctgaccatgtcctctttgccttcacatctttttggggacaatgaccctgctcagcctgacagtgaccaaataaaatgaaactctttaggcctccatatttgtgtatttcaacccttttgctctggctgtaccctctctctgggatcaccccgccattcacctggaga

SEQ ID NO: 35434 - DNA, 1105 bp, Artificial sequence
  DNA replication origin
catgcagggtctctgtggagcccgtctagacggtctcagttcccagctgcccaaaacagaggcccaaaggcccagagagaggtcctggtgcctgctttgcgttggacatggagggacgctgcccgagttgggggcactgtgggggaactgtggggctagggtggggaccgctgagttcggatcggagtggccccagggagaacggctgatggaaggcttgttggctgaggccaccaaatagggccccaggtacccgagggtggagtttggccccaggtcccgggtcagggctggcctggtgtggccatgtgtggcagagctgccttgctccctcctccagcacaaagtgggccactagactttggcctcattcttgctgctggaaaaccgcctgctctctggtcatatctttagggagggtaagggaggggggctcaggcagttttggggtcccaggagcttcctgagggtggtgtcagggagcagcaattttgggtggggggggccttgcttggagctgacaggtttgtgctgtgtcagttgtgtgacctggtgaaatcaccattccattctgagcttcaaatggattgagcagggtctcgctggggcccagcctgggtagtttgatgccagcccctccagagagaccccagctccaagtctagctcctgagaagcccccagtctggaggagacacagtgagacagatgccccaagtctgtgggatctggggtcccagggagagagcagaggctctgcctggaggtcagagagggctgcctggaggaggctaggggacatgagccttgaagcatggagttggcaggtggaagaaaggccacagggacatgccagaatgtggtccagacaaaacacttagtggcagactgggggagctgtgctgtaagagggggactgtgcagccatgggagaagtcagagctaggtgggcctgaaatgctggctgagggtaatggggagccatagagggtgtgtgagcaggagagggctctgatcaaattggactggaggccagaagcccagggaggaagctgagttgggccatggggttgggcaaaaaagcttgcactctttaggtgggataa

SEQ ID NO: 35435 - DNA, 1989 bp, Artificial sequence
  DNA replication origin
cggcggccaggccagaggacgccccctgcgcggctcgggccgggccatggcccgcgcgcccccgccggggccccagggcggcgggacgcgagtcctctgggcccccggcccgcgcctctagcgtgcccctcccggccccgggcccggccccgcgcacgcgtgggaaagttggcctggaaccggcccgaccagttccgcccgggcgcgaggaccggccgcaggaagttgctgcaaaacttttttggggggtgcagcccgtgccccccgcgcgccggggccgaatgcgcgccgcgtagggtcccccgggccgagaggggtgcccggagggaagagcgcggtgggggcgccccggccccgctgccctggggctatggccatggtgaccggcggctggggcggccccggcggcgacacgaacggcgtggacaaggcgggcggctacccgcgcgcggccgaggacgactcggcctcgccccccggtgccgccagcgacgccgagccgggcgacgaggagcggccggggctgcaggtggactgcgtggtgtgcggggacaagtcgagcggcaagcattacggtgtcttcacctgcgagggctgcaagagctttttcaagcgaagcatccgccgcaacctcagctacacctgccggtgagccccccatccgcgcgccgccgccgtgcaccccgccccgacctggggcaggcctctgacctgctcggtcaccttgggcctggcgctgaccttccctgggcctccactgccccctctgagataggggcacagcaccctcctcccgcattccatggctgggattgtgtatacagtcggcgctacatcgttgcaggttccccccccatcaggtggtccctggaggcttttgccccagttacttgcttctccttccctccgctttttctctggggaggggtcatctccgcgctggggtgggggtaggggtgctgtcaggggtggtaacccaaccccagggcacccgttctcggggatcccggcgcgcgggatgccctcgagggaatcgaacgtggaacttggaccgtggagctcgcagcgtccaggggccattgtctgcggccgcgcggatcgatacggcgcgcccttggggtcaaatatcacttccaaagtcgctgtggctacggaggcggcagacggagggaggctggggtggcacggggcggccttcttcgcatgaggggcccagcggtgggggtgggggtgggagctgggcttgcccatctcagggaacccctctgggctcactctgggccttgggtcaccggaaatcgccactggaaggccggcagggccaccggaattgactgaaacgtccctctcccccaggggtgggtgcagacctggggctcctggaaaaatccctcaaactttgggtgtctctgagacgggcagggagtgaaacgtttccgagcaggagccttgggctgtcccaggtcggagacctctctggcagggcgtggccttgctagctgttctggcggaaggtccccagggaaagcgatcggggttgtccagcccgggagttcttttctcaccgttcccgggcgagcatccgatctgtccgtttataagcccctactctgcaccccaggaacatgcagggtctctgtggagcccgtctagacggtctcagttcccagctgcccaaaacagaggcccaaaggcccagagagaggtcctggtgcctgctttgcgttggacatggagggacgctgcccgagttgggggcactgtgggggaactgtggggctagggtggggaccgctgagttcggatcggagtggccccagggagaacggctgatggaaggcttgttggctgaggccaccaaatagggccccaggtacccgagggtggagtttggccccaggtcccgggtcagggctggcctggtgtggccatgtgtggcagagctgccttgctccctcctccagcacaaagtgggccactagactttgg

SEQ ID NO: 35436 - DNA, 903 bp, Artificial sequence
  DNA replication origin
gtgcgcagaaggcactgtcctggccagagctctcagaggcccagctgcatgctctggtgtccagctctgggctcagggcggggtgggaccacagtctgggtggctggggctgcaagactccgaggtgaaaggtcactcctggaagggcttgtccagccggttaaaggttaacctgcccagagccagaggctcgccagcccgggcctcgcatacaaagggtgcttaataaatgctggtcgggcgggccccagccccggtactgggggatggggtgagttggaggtggcggcagctgcgaggctccagggcgcctggaagagacatctgcagtccagccggccgccaggccaagccctttctgcaaagcacagaaagaaaaggaaattaaaagggaaaaaggggcaggcccccagacagggcatgcctgtcgcctccagccgcgcggggcgggtgggcgccctgcccccggaggccagaaattctgcagaggggccccctgacctcgcggccccggccagccggtctcagaccacaacatcccttccccctggagattccgggcaccaggtgttaacccgagcagagaaagggtggggtgggggtcagacgcggcgactttctggaagaggaagcaaacacaatctagggtgtgtgtgtgtgtgtgtgtgtgtgtgtgtgtgtgtgtgtctgtctgtctcgcgcgcgcgtgtgtcttgcgcaggggcgtaccccccccccgggtgccactggccccccatcattgctttgccaggaactgtggggtggggagaggttccgaggggcgcctcgagggtgatcgagcgacccaacgtccaaggccagaggtggaggggagggccttggagagacatcttggcgaggctcaaggaagggcagagggca

SEQ ID NO: 35437 - DNA, 1261 bp, Artificial sequence
  DNA replication origin
tggcggccggctggactgcagatgtctcttccaggcgccctggagcctcgcagctgccgccacctccaactcaccccatcccccagtaccggggctggggcccgcccgaccagcatttattaagcaccctttgtatgcgaggcccgggctggcgagcctctggctctgggcaggttaacctttaaccggctggacaagcccttccaggagtgacctttcacctcggagtcttgcagccccagccacccagactgtggtcccaccccgccctgagcccagagctggacaccagagcatgcagctgggcctctgagagctctggccaggacagtgccttctgcgcaccccctcctctgcctcccagagccctgatgagacttgaagaattgccctccctggagtagggggaaagattcttagagatcttacaacacttaaaaagaaactgaggttctgggagagccaggcacacccagccctgggcctctcaacctgctccagggacgttctggctgcctgggaggtggaggaggaggcgttagtaaacacgaaaagcaggaaggactaggattagacatgagcaaggacttcccgaggtctagagtcgggttctgcccacagcctgatgtaatccctgctgggagagaggaaggcgtgggtgggcagagacgaccctttggttctgaggctgcatgggaatgtgactggtaatttgggatgagggcagggatcctaggccccttgcctggacctgctaggatctttggtggggagcattggggtggaggtctcagaagggattgaaaagagatttagatgagagacaggcgctgtggctcacgcctgtaatcccaacactttgggaggccaagtcaggaggatctcttgagaccaggagttcaagaccagccggggcaataaagtgagacccgtcttgagcccaggtgttcaaggctgcagtgggttataatcacgtcacgtcactccactccagcgtgagcaagaccctgtctcaaaaaaaaaaaaaaaaagaagagggagagaagactcaaggaatcttgaggggattgtgaaggggagggagcaaagaactaggtttgggggagacaagtcttgcgaggcagctgagagctgggtgggagatgggggaagaaagaccatcgcagatcccagaaactccagtagttccagtcccaaaggctgccccacccccttccagtagcctggccacccctgtgccccctggggcccgcctgggggt

SEQ ID NO: 35438 - DNA, 1028 bp, Artificial sequence
  DNA replication origin
cagtgagccgagatttcaccactgcactccagcctgggtgacggagtgagactctgtctcaaaaaaaaaaaaaaataataataatgctgggcacggtggctcacgcctgtaatcccagcactttgggaggccgaggcacagatcacgaggtcaggagatcgagaccatcctggctaacacggtgaaaacccgtctctactaaaaatacaaaaaattagccggcgtggtggcgggtgcctgtagtcccagctactccggaggctgaggcaggagaatggcgtgaacccgggaggcggagcttgcagtgagccgagatcccgccattgcactccagcctgggcgacagaagaaaactctttctcaaaaaaaaaaaaaaaagaaagaaagaaagaaagaaaaagaaagaaaactgagggtggtgggagtaggccctggagtggcagcatgactggcctgttcaagaaacccgaaggaggccagtgtggctggaacacagggggcaacagggagagtgtggggagccagaacagaacagagggagaacaaatgcagatcgcgtagggcctcgtgggctgcaaggagacgcttgggctttgcttggattaaggtgagagccctggagggttttgagcagaggaggggcatgctcgacgcaggtgttcacaggcgccctctggtggcggaggtgagggtggactcctggagagccaggaggcgacttcattggtccagacatgcacgatggtggaggttgtagaagtggagagatgcggacggattctgggtgatgtggcagatggaactgacgtgtgagcgtgaaggctagagagaagtcaaggacaacttcaggctttgggacctgctggactagaagggagagatggaggagctacagggtaggcaggtttggctgggggtgaccagatctctttagcccttgataagctcaagtgtccatgagacatccacgtggggtcctcaagggagcagctatatgtctgagtccagggctcagaggagacagcagg

SEQ ID NO: 35439 - DNA, 1385 bp, Artificial sequence
  DNA replication origin
cggcttggggagaccccgccccggacccaggctctatcttaccgagcgttggggtccccgccttggcgcagtagggccccgaggcaacgcaggccgcgcgggtgccgggctccggccgccaagtgcacagccgctgcgccgtcctctagcaccaaattagggtccgcgccgcagcgcagcagctcctctactgccctgcaaacaccgcggtcagagtggaccccggccaaagacccccactcctggcccgcccccggccccgccctcaccacggctcctcctcccgcagcgcatcccgcaacctgcgagccaggcgggcctccgagcacatgccctggctgggtccgaagcgcaccgcctggtcggtcgatttcctacttcccgcggggggcttgtgggcatgcgccgctcctcccctcggctcggggggcccctctccagggccgagcagggttcccagccaggctgccccgcgccgcacgggggtccacatcggggttcgagagctttagtgtcctcaggggcccttgacacccggaggcgctcaagcagggtctgggaccgccgataagagcccgggtgggaggatgccaccgggtgtgccactatctcatttaaaaacgggaaacgcgaaggcacccggctcgagtgggtggagctacgattaagaaagtccggggtgccccaggtcattaagtctcagggaatcttcttcaagggtggcctctggcagggagcacggccttatgagaggcttaggccgggcacggtggctcacacctgtaatcccagcacttcgggaggcccaggcaggagggttgcttgagctctggggttcgagaccagcctgggcaacttggataaacccagtccctacaaaaaaatacaaaaaactagccgggcgtgggtggcttgcacctgtggtcccagctacttgggaggctgagttggtagaatctcttgagcccggaagttcgaggatgcagtgagccatgatcacaccactgcactccagcctgggcaacagagcaaaactctgtctcagaaaataaataaatacataaaatagaggcttcaatttccaacccccaggccgagggcccagctcacgcctttaagcacagtgctttgggaggctgaggagagaagatcgtttgagcctactagtttgttgttgcttttcttttcttttagtgagtgcaggagtttgagaccagcctgggcaacggagtgaggccctatttttttttttttttttttttttttttttgagccggatcttaccctgtcgcccaggctggagtgcagtggcgcaatctgggctcactgcaacatttgcctcccaggttcaagctattctgcctcggcctcccaagtagctggga

SEQ ID NO: 35440 - DNA, 886 bp, Artificial sequence
  DNA replication origin
gggaaccctgctcggccctggagaggggccccccgagccgaggggaggagcggcgcatgcccacaagccccccgcgggaagtaggaaatcgaccgaccaggcggtgcgcttcggacccagccagggcatgtgctcggaggcccgcctggctcgcaggttgcgggatgcgctgcgggaggaggagccgtggtgagggcggggccgggggcgggccaggagtgggggtctttggccggggtccactctgaccgcggtgtttgcagggcagtagaggagctgctgcgctgcggcgcggaccctaatttggtgctagaggacggcgcagcggctgtgcacttggcggccggagcccggcacccgcgcggcctgcgttgcctcggggccctactgcgccaaggcggggaccccaacgctcggtaagatagagcctgggtccggggcggggtctccccaagccgaagtctgggaatccgggaaggggcgccccatcatcccgggccaggcctcggggctcgagggtggggtttaggggatcttggggagggaacttgggggtccaagggcaggggctagggctcgagggaggcgctggggtcccagaccgagggcgtggaatggggctgcgctaggaccaaagtggggatcaagggttcggatattggagtggaggcaccagggtcagacggcagaggtttgggtcctggcctgaggtcatagcatctaggttccaagggcagtgtaccagggtggacggcggagatccgggaggccgagaacgaaggctccaggtccccagagcggagatcggggttcctgccgggaggctgagtccgcaatgacccctcttgcgctgccgccccagatctgtcgaggcactgacgccgct

SEQ ID NO: 35441 - DNA, 1634 bp, Artificial sequence
  DNA replication origin
ggccaacatggtgaaacctcgtctctactaaaaatacaaaaattagtcgggcgtggtggcaggtgcttgtaatcccagctacttgagaggctgagacaagaggattgtttgaacctgggaggtggaggttgcagtgagccgagacggcaccattgtactcctgccttggcaacaagagtgaaactccgtcttaaaaaaataaaaaaaaagaagaagaagcagctgatgattctagggccagtccctttcttaagggcacacagcaaataaaaaccaatccccaaattttctagtttctatttctggggctttcctgccctgagtacctggggtccagcagcagataggtgaagctagacttcacgaccccctcccgccacctcctggcaggatctggctgctcaaactgctgggccagcgcgtcttcatctgcctggacatctggaatacagcccgtccgcagggctgcagccagttctaggctgtgccctgaaaactctgggcctggaagtcaagggagatggaggaagggatgattctgagatggggaggaaagtggggctgagagctggggttctccgggagattcctggaggctccctggactccatgtgccctgggaagactaaccaggagcaatctgggcttcttccagctgctggtggtacaactgcctggtgaagggtgtgatggggtgaggattctcaccaagtgctcggagtcccttcagcaactccaagtcagacacagtggagactggcaggtgccggcaagggccgacaggttccctgccacctgtagagcttgcctcatcctctgtcagccagagcgtggccatgtcactatcaatggatgtctggtgctcccacaggcagtggcagtcagaagctccaggggttggtgtccgtggggggctatgagctggactcctgtccaggagaggcatggaggaaggggaggactggaagccagcagcatttggtggggtcagagtcagggcctgcagacgggcattcagttctgcctccgtgccctgagacctaggtaccctctggttggcatggacaacatgcagaagtccctgcctggtcggtggcaatgacccagcccaggggggagtgtccgaggctgggtcctcagctccagagacctcaaccgctgtgacgaaagaggcgtctgagctgtaatcccagtgccctggaggggacgccgagctcccatgtttgtccacagtttcaaggggaacagggaggctggggggtcctgggtcagcctccaagccaatgtccctgttgtcacctctgcatggctgcttttggagtgctatggagtccagcgtctcatcggtaggtccagagaggcctggggctgcaggtgagagtgggggccagagaggagaggaggagggatgagacagcgatgagaataggatcaaacagaaaaaggagatcagagtgtctgaggccgaaagagctggccacaaatagtggatgtgagacggtcagaaccaatgggtggggtggggaagaccctggatgtcagggactggtccagaagtcaagccccagcagccctgcaggccctactcactgccaggtgcaggctcgggctcctgagtctctgccccgatccgg

SEQ ID NO: 35442 - DNA, 1742 bp, Artificial sequence
  DNA replication origin
ttgagacagcacctgaactggctgctgtcctcactcacaggacacaccatgctgaccggggtgaccgacggtatcttctgttgcctgctgggcacgccccccaacgccgtggggccactggagagcgtcgagtccagcgatggctacacctttgtagaggtcaagcccggccgcgtgctgcgggtgaagcatgcaggacccgccccagccgctgccccacctccaccatcatccgcatcctcggatgcagcccagggggacctctccggcttggtccgctgtcagcgccggatcaccgtgtaccgcaatgggcggttgctggtggaaaacctgggccgagcccctcgagccgacctcctacacgggcagaatggctctggggagccgccggccgccctggaggtggagctggcagatccggcgggcagcgatggccgcttggcccccggcagcgcaggcagcggcagcggcagtggcagtggtgggcggcggcggcgagccaggcgccccaagaggaccatccatattgactgtgagaagcgcatcactagctgcaaaggcgcccaggccgacgtggtgctctttttcatccatggtgtcggcggttccctggccatctggaaggagcagctggacttctttgtgcgcctaggctatgaggtggtggctcctgacctggccggccacggggccagctctgcgccccaggtggccgcagcctacaccttctatgcgctggctgaggacatgcgagcaatcttcaagcgctatgccaagaagcgaaatgtgctcattggccattcctacgggtaagtgaaccctggcatgtggggtgggggtgagggatggggtcagcagggactacagtcacaaaatactgagtttttggctgagccccgtggctcacgcctgtaatcccagcactttgggaggccgaggcaggcggatcacctgaggttgggagttcgggaacagtctggccaaggtggtgaaaccccgtctctaccaaaaatacaaaaattagccagacgtggtggcacgcgcctgtagtcccagctactcgggaggctgaggcagaggaatcacttgaaccgaggaggtggaggttgcagtgagccgagattgtgtcactgcactccagcctgggcgacagagggagactctgagatgccactgacacctgtaatcccagtgctttcgggggccaaggcgggaggatatcttgaggcaaggagtttgagaccagcctgggcaacatagggagaaccccctagctctacaaaaagtacaaacattagctaggtgaggaggtgcacgcatatagttccacctacttaagggctgaggcaggagattgcttgagtctgggaggtcgaggctgcagtgaactgtgatcacaccactgcactccagcctgggcagcatggcaagaacctgtcgctctttaaaaaagaaaaaaaaatccgggcgcggtggctcacgcctgtaatcccagcactttgggaggctgaggcgggcggatcacgaggtcagaagattgagaccatcctggctaacacggtgaaaccctgtctctactaaaaatacaaaaaattagctgggtgtggtggtgggcacctatagtcccagctactcgggaggctgaggcaggagaatggcatgagcacgggagacggagcttgcagtgagccaagatcatattgtgccactgcactccagcctgggcgacagaaggagactcc

SEQ ID NO: 35443 - DNA, 2251 bp, Artificial sequence
  DNA replication origin
caccccacatgccagggttcacttacccgtaggaatggccaatgagcacatttcgcttcttggcatagcgcttgaagattgctcgcatgtcctcagccagcgcatagaaggtgtaggctgcggccacctggggcgcagagctggccccgtggccggccaggtcaggagccaccacctcatagcctaggcgcacaaagaagtccagctgctccttccagatggccagggaaccgccgacaccatggatgaaaaagagcaccacgtcggcctgggcgcctttgcagctagtgatgcgcttctcacagtcaatatggatggtcctcttggggcgcctggctcgccgccgccgcccaccactgccactgccgctgccgctgcctgcgctgccgggggccaagcggccatcgctgcccgccggatctgccagctccacctccagggcggccggcggctccccagagccattctgcccgtgtaggaggtcggctcgaggggctcggcccaggttttccaccagcaaccgcccattgcggtacacggtgatccggcgctgacagcggaccaagccggagaggtccccctgggctgcatccgaggatgcggatgatggtggaggtggggcagcggctggggcgggtcctgcatgcttcacccgcagcacgcggccgggcttgacctctacaaaggtgtagccatcgctggactcgacgctctccagtggccccacggcgttggggggcgtgcccagcaggcaacagaagataccgtcggtcaccccggtcagcatggtgtgtcctgtgagtgaggacagcagccagttcaggtgctgtctcaatgagaaccctgcaccgtgcagcaggcactccctgagccttgggagaactgttttagactccagtttggggagcgccagatcaagtgagccacggcactgagatttttttgtttgtgtgtgtgtgtgtgtgtgtgtgtgtgtgtgtttttgagacagtctcgctttgtcatccaggctggagggcagtggccggatttcggcttactgcaacctccccctcctgggttcaagcgattctcttgcctcagcctcctgagtagctgggattataggcaggtgccaccatgtctagctaatttttgtattttttgtagagatggggtttcaccatgttggccaggctggtcttgaactcctgacctcaaattttcctcctgcttcggcctcccaaagtgctgggattataggtgtgagccaccgtgcactgacatgttttgtctgagcagtgcctttgtggtagttaccctcctgggtcaccctagtctatcctcagagagaaagacttggctatggcttaccccacagggtgtccacagggaaggtggtggcgtcttgtgtggggatgttcctggagaaggggacattgtggcaaatgtggaccagccggaagacaccccctccccccagctggagtttataccatttatggcctcctaactcattcattcaggtatacactaactcatccattcaggtatacactaactcattcattcaggtatacactaactcactaactcatccaggtatgcactcactaactcacatatccccagggcctcctaaggcatctaaaatatgcaaatctttggtgagcccccagtgaggctcctggctctgaatttgactcctgaaaggtgaggccctaggagagggggatggggactgagccacagaaagccttgctcagctcccctagaccggggtgagccggggtctgtttcatagagggccaagctgaggcccagacactctgagaggaagctagactctgaacttcctccttggcaccctggattctggggatctgctatacaagtccccagaggtggcgaagaggatgggagaggcagggccctggctgggggcctccaagcctccatcccactccttgggccacccccgcccccgtgtccatggcaaccacaggcggttacataacctaagggggggatacccgagcagtgcacccccattgtcgaggtgtctagggcctggagatgggaccagctgcctgcctgccccctaccccaggttgggcgccgctaaggtaacgcacgcccgagactgagccgcagtggccccagacatactggaggggaagcaggccatgccccccacctcgagtggggccctaatcccggattgtggagggcaacgcacaggcgccaccccagccccgcttccccgcccccg

SEQ ID NO: 35444 - DNA, 1707 bp, Artificial sequence
  DNA replication origin
gccatgccccccacctcgagtggggccctaatcccggattgtggagggcaacgcacaggcgccaccccagccccgcttccccgcccccggcccccgccttccaggtgttcgtcatccctgcagcggggtcgagcccactggggctccgtggcttcctacgagcccaaacgcggggttggtggacaccactcctccgaagtggaggccccggggcttcgatctctccttttggggcccgttccccgctcacctcatcgagggccgcggggcccgggtcggggcggaggggtcccaggcggagaagccagcgtccgcctgctggcgccgtttacatggtggcgcggggtcaggccgggtgcgtctacgcgggcgggcacctgcccctggcggtcagcgcaggggcatcccgcggccgccgaaacagccggccctttaagttcctcccccgagtaggcggagccacgtgccgacgggcgggcacttcggcctatcgcagctgcggactgacctggcctagttaggagcccaatgagaggcggcaattccgtagtggaggcgggctctgggagcaacggccccgccccttttgggggttcaccgaggttgggggagggatggggcctggctcaaggcggagaagggggttgcagtctagggtctgcgggacgcctgggagtgtgcggccggggccctctctctgcaaatgggtctcccaagcccttgccccccagcccctgcctcccaattgccctgttcctctccaaacgaggcccccatactcttctctctgtattgacctttccattctagaagcagagactccaagatctttttccaatctccggtggggaaactgaggctcataaagggcacaagagcataaatcaagcaaggagcaaagctgggacttgaacccaaggctgtgtgattccaaaccctgggaaccattatttgctaacctcccccctacgccccccccttttcttttggtagggacgaggtctcgctatcttgcccagactggtctcgaactctgggcatcaagcaatcctctcgtctacggcctcccaaagggctgagatcactggcgtgagccatcgtgacgggcttctctaaagctttcaaggaaagtcttggagctgtgggtaattagagagtttgaatttcataatcagccgatttaacccatggctgccatggttctgagaagggctgatagcaagaggcaggcatcccagctctgtggtaccggcggggccatggtaggccctcaggagagctcaggtctcaaatccagcctctgccctttgctgatgtgtgacctcgggcaagttacttcactttcctgagcctccgtttatttctctatgaaattaatcctctcataagtttgctacgcaggtaaagcactcatcatagtgtcgtgcatataacaaatgctccatatattatgggcattattatagtggtgatgttttgctaaacgatgctacaggtaggatgggcttcggaggacgaggggttaaatgctccttgctgcttggccactcacatcccctggaatttgctgccagagctggattccgtccagacacctactcttgcccactaagggcacttctgggagactatacagtttattcatttagcaaacacctctctgcatgaaccccaagctggcacttgtagggatacagccccaggccc

SEQ ID NO: 35445 - DNA, 796 bp, Artificial sequence
  DNA replication origin
tcaaccttccaacagccaggtggggacgatccacacttcataatgaggggacagctagaagagaacgtcactggcctcgagtcacccagctcatctgttgagcattcactatcctgagtcctttacgacgtcagttacctaaattgtcaccaccctaagaggttcagactactgctaccctcatttcacagggacaatccatgcggatcggagataaaagtttttcattcttagaggcgggtaagggcccagaatggtggaggtggggtcagggcccggggaaccgggacaatcggcgatgtcgcacttcctttggcgacaaagccctgcatatcgcggtgccaagccccctcccccgccccggggcccaggccggcctcccaaattctcctgaactgaagagatccaggtccggcgtgctgagaacgaggccagaccagggggtcttacgggaccccatccccaccccagacgatttccggggggagccgcaacccggaaatgaatgagttgtcagggcttggtatcctggatggggtcaggggtcggagaaggagtggcagtgggatcagcaggaagctctcggtagggtccgggggtcgaaggtcacaggtgagtgggaggggcgggccggacctgaggggaccgggcagaacggagaggggcctagggggatactagaggtgggtgggaccacagcgccattttgtctagcagagggggagtgggggcctggaggccatcctcaccatcttctgtttcctccgtcgccgcctcggccgccgcctcagcctcc

SEQ ID NO: 35446 - DNA, 1340 bp, Artificial sequence
  DNA replication origin
cccaacgtgcgtgcacgctgagtgaggcctgggcatgggaaagttccgggcgaagcgtgggacaagaccgagtctcaatggcctggaccggtgttgggggggagaaggccactcggctgtcctggtaggtcaggccaccccgggcccgcccctgtcgcccggccacagtaaagcccccgctagagactctcacagacacactctggttctctggagaactgggggcaggaatcggggaactggcccgatggaaggcgggggtcggggggacaatgttgttttttttaaaaagcatctaccaacatcacactactgggtctgatgtcccctttaaccaacgcttgatacaggttacagcataaataaaaactcaaggaaaataaatacatcggctcctatgaggttggaagtggtgtggacgcagggtgtggatgggccggcagggaggcgggcgggcggggtgcttacacatggcgggcaggcgggtgggcgaccgaggagcagacctggcaggaggcgcctgtggagttgagagtcttaagtgtcctcgtgcatgtctgggctgtcggtccgcgccaccttgcggggaggtgcggagctctcgccttccagctccacttgctcctggtctctcttcttggcagcgttctgggggacagggaaaagagaggggctgtgagtcttttttttcggacagcctcaaccttctgggctcaagcaatcctcccagctcagcctctggagtagctaggactacaggcacataccaccacgcttaatatttttacttttggtagacatgggggtttcactatgttgcccagctggaggctgtgagtcttcacgtgggtgaagctcccagagtcataatgccagcccaggcccctgcagcagcatcacagaggtaggcctggagtacagtggggggccccagggtccctggctaggcagcccctcctaccaccaggacctgccccactaagccctgcccagagcactttctggacccatgcctggtgatagacaggtgtttcctggcacccggagtcacccccaccacatgcaatgacccacacagggctggtttctcaagcactcagaggagcaacccacccagcctgggaataaagggcctttggaagccactggggatgccgcacatcaacgcaagacagaagcacacgcctccttccccgctgtggaaaccaagtcctggggggcaggagaaggggtgggggtgggcccagcagcttggattttcagaagcagtcactttgccacacagtcccccgaccttccaactttgcgcagggtaggcagccacccactgttcaatgtta

SEQ ID NO: 35447 - DNA, 2478 bp, Artificial sequence
  DNA replication origin
gggagcgcgggcagggttgccagcccggcggggtccggcgggggcggcatccccccggaacggcccctctcgcctccgcagggacagcgctggcccccgtgggcgcccctgccctccgcacccgccgcagccggagccccgcgccgccgccgccaatgccgctgccccggcccccgacaccgcccgcaggctgctggcagtgggacgggccctggggctgcgggggcgagggtgccgccccccgccaggccctggccgctgccgagtgcccaccctgtgccatggccgggcccccacccgccccccagcccctgccgggagacgccagcttttacagcctcccgcccccaccgctaccgcccacctcggatcccctcgagaccccagcgccctcccctagccccagccccagcccccaggccgtgtgctggcccagcggctggcattagctctacccgccctgccttctcttctcatatgcaatatcagtcattcacaggggcggccggtctccaaaatgcaaaatgcgcttcagcccccgagggcccccagtattggtcggtgccccccatctgccgttttcctttccaaacgaaaggaaacccacaaatccaacagaaaacacacacacacacacacacacacacacacacagaacaggcgattatttatttgtttttaatttattttgtcatatttttgtaaaacggcagaaatgcaataaaaactatatttcaacagtgcccgaggtcagagcagtggaaaagggagtgggggtgggggagtctgggtggctggggcctaggttgggaaccccctccccccatcctggtacaggctggcttgacccatgagggcctcctcccaaaaactgggtcttggccacagatggaaaactccaggctgcgccgcctctgagacggcccagatttggaggccaacttcagccctggcttcagccactagacaaaggaaggaatctctaagtgctgaaaagaggcgacaatgtgtgcacaggccccagtcctgagtaagactccttctcaaagaggacagcgcggtggtttgcaagacgtggccccttctggcacacccgcctcctggaacatcgtctggggagccagagacagtgggaagagcttgtggcatgaacatcagaaggcacctggcacctgagcctcctgcagtccccgacttgtgatactgagagaatggcacatttgggtgtccccaggacacggggtggcattgggatgcagcagggatgtcccactgtgggacagacatcagacccaagtcactgggactctgtcgtatgactcaggaacaggaacgtggcctctcagaccctcacatttttcaggaagaggacaaatgtgtccacatccaaaggcttaaggctcagagaccaacatggccatgctgcagggctgggccagtgtgagcaaggggccctttgggaggctgtggagaagtcagagttcactggaggcaggagaacagcctgtgcaaaggcggagaaggtggaaggcagtttgggggaacagtggggtaaaggggaccccaaaggcaggaggggtagacagaggccggctcaggggcccagcgtcctcccacaggcagtgggagctacacagggtgtgtgtgccaggtggggcatgtcccgacagacccaggggttctagggggaggccacagggaggcaagctggggcacagccctcagaccccaaaggagggagctgaggtaggggaggggaaggaggtgcccgcccagcagccctgcagagcgacgggcagacagcacaggcaggagacagcccccagccactcaaagcagaaactgggagccagagaggtctagacaggccgaggggaaaggcgggagtgccccctgctcccactctggcccctggccttggaagctgaagtcccaccatctcagtcattcacagatggacaccgcaggcctgcccaggtcacaccaaccctggggactgggactccccagctggcctgggagcctccagggcattcagccggacccggcaccatcgaccgcagtcaagtgtgcatttcctgaccacctgtcctgtgaccacatggcccctgtagcaccatcactgtggtgtagacactgccgggagctgggaggtacagcagggtggctgtgctgtgcctgggcctggtcagccactccttgtgtaggacgggagcccaccctggcactctccgtccttgggagagatgggccgcctaggcccgagggtctgacacaggcagggccctccacagtggaatctggggcaggcggaccctccatagcccggagtgtctgctagctctgtggcccaaccctacaccatcccaacgccctcagactcagctctcaaaacagagacctctgccaggcacggtggttcacgtctgtaaccccagcactttgggaggctgaggaaggtggatgacttgagcccag

SEQ ID NO: 35448 - DNA, 2864 bp, Artificial sequence
  DNA replication origin
tagagctaatgccagccgctgggccagcacacggcctgggggctggggctggggctaggggagggcgctggggtctcgaggggatccgaggtgggcggtagcggtgggggcgggaggctgtaaaagctggcgtctcccggcaggggctggggggcgggtgggggcccggccatggcacagggtgggcactcggcagcggccagggcctggcggggggcggcaccctcgcccccgcagccccagggcccgtcccactgccagcagcctgcgggcggtgtcgggggccggggcagcggcattggcggcggcggcgcggggctccggctgcggcgggtgcggagggcaggggcgcccacgggggccagcgctgtccctgcggaggcgagaggggccgttccggggggatgccgcccccgccggaccccgccgggctggcaaccctgcccgcgctccctcccgggcatccaggcacataaaggccttattgcttctgatcagagactgaggtggggcggccccctgggcggcttccggtgcataccctgcctctgggcacggccctgccggtcacagggggaggacagtttgaggaagtccctctggcttctgacctatggcccttgtgctgcagctgccacctgttgggctccctgggaatggggttgctggagcccaggctgggattggggcaggggaggtggtgggggtgggagggtaggggtgaggcctgcacctctgctcagcacatgtgggagctccctgggtgggcagccccagccccacctcgaggaaggccttcctgaacagctgggctgcagggtgtggatttgcatagaggcctggggggtcaagtcccccccaagagtgagctggagcaggagaagggtgggctggttgggaaacaggcctccctcatctctcctggcaccggagcatggtgggggtccctgggtgcagtcctgggacaaggggctttggcatccctccctggggagggtcaggcacggggctccaggctaacaaaggccctggagatactaagcaggctttaactgagaggctccacgtaccactgacccaggtccccaccaggacctaagaccgggcttcccctgtccccttcagcccctctccccaggcctggccaccctaccctatccccaaagccggcccggcgtccccacccccgagttaaagcttgtgacctgagccttcctcttcgggccggggggcttccagctcctcagccagggcctcgtccaccggcccactcctctgaacccggctgctgccactgctgggggtcccatctggccgggcctgcccgcccgccccgttggacccaggctcagcccgggtgccaccaaaggggaagagcttgccagcatggaaggctttgggcggtgagtggctgcgctcagagtcccgccgggtctcgggtgacttgaggaacttgaagctgaggaaggcaggcaggcgggtgtcgctgcctgtgggtgactgggcagggggaggccgggtggtggctccggcccctgcagcagccagtgaggatgtggcccctgacgagaggaatttgccctgcagtgggatgatctgcttcaacttcatgacgttgttgggtgccagcagggaccctgggcgcttgggccgttcaggcccgtggccacccgcagtgctgcccttggccttggcagaggccttctcggaggaggtggcagggtccagcccagagccctcggccctcgcctcctctcggccaccagaatcatgctcccgccgggcatggtgctctgcatggcgctgtcgctcctcctcctcccgccgcctgcgctgctgctgctggtagcgatgctgggcctggcgctcgtgtctctgcaggtagagccaagccgttacaggactaagaagaaagggtgttagcgggtgccagctgaggctggtgcatgccagggctctctgcaaaagtgggggagacttaaatgcttattaggctccaactgtatccctgcacccacaatgggggctccctgcagaagtgggagagagccaatcacttattgggtgcaaacggcattcccagatacatgatcagcctctctgtggaaatgagggaggcttaaatgcttattggggctgggcgcagtggcttgcgcctgtaatcccagcactttgggaggctgagatgggaggatcacttgaggccaggagttcgagaccagcctggacaaaatggcaaaaccctgtctctaccaaaaatataaaaattagctgagcatggtggcacacgcctgtaattccagctactcggaaggctgaggcaggagaatcgcttgaacccgggagacggaggttgcagtgagctgagattgtgccattgcactccagcctggggacaaagcgagactgtctcaaaaaagagaaaaagaaaaaaagcgtattgggcgccagcttcatctctgggcccacactgaggttctctggggaactggagagagattccgaggcttattgggtgcaactgaatgaatccctggacccacgccggtactttctgggaattgaaaagaaaacaaacattcactggccatcaactctgtccccggctgtgtgccagacagcgtcttaggaattggtaaagtggaaaccaatcctgagcctcaaccgatcccctgcttcccagagaacaggcaagagacagaaccgtggctgcaggctgggtacggtggctcacgcctataatcccagcactttgggaggtgggcagattgcttgaggttaggagttggagaccagcctggccaacatggtgaaaccccatctctattaaaaatagaaaaattagccaggcgtggtgggacatg

SEQ ID NO: 35449 - DNA, 2346 bp, Artificial sequence
  DNA replication origin
ggcggcggcagcgggggcgggggccgcaggtgcctcagcgggggctgcggggcgccggaggaggaggaggaggcggcgctggtggagcggcggcgggcgggggaaggcggggaggagggggacgggcctccagggggcaaggaggaggacgaggacgacgaggaggaggaggacgaggaggaagaggaggacgaggaggagggcgaggaagggggcctcctggactgcgggctccggctgaagaaggtcagcttcgctgagcgcggcgcggggcggcgtcggcccggcccaagcccggaggccctcctggaggaagggagccccactatggtggagaaggggctggagccgggagtgttcaccctggccgaggaggacgacgaggcggagggggctcccggcagccctgaacgggagcccccggccatcttgttccgccgggccgggggcgagggccgagaccaggggcccgacgggggcccggacccggaacccggctccaacagcgattcgacccgtaggcagagacggcagaaccggtcgtcttggattgacccgccggaggaggaacactcgccccagctcacccaggcagagctggagagctgtatgaagaagtacgaggtgaggagggggcggggcctcgcagggggcggggcctcgccggggacgggacacaccgtccgagggtgaaggccgtgggggtgggagtggtgataacagggccattgatgttgggatgctgcaggagaggaaggcctagccagatacaggaagcctctgggctggctgaggatggggacaggccctgggtccacatgggataatctgagggaggcgggctcaatgggagaaagattgtcccagggaagaggcttccaggtctgaggcccgcccactcgcaggacacgttccaggactaccaggagatgttcgtgcagttcggctacgttgtgctcttctcgtccgccttccccctggcggcgctgtgcgccctggtcaacaacctcattgagatccgcagcgacgccttcaagctgtgcaccgggctgcagcggcccttcggccagcgcgtggaaagcatcggccagtggcaggtggggggaagccaagagatccgagctgaggcccagagggagcccaggtgcagctgggaggagcctggggtctggggaggccggctggaccccgcctgagccctcctgccgccctgcagaaggtgatggaggccatgggtgtcctagcgattgtggtcaactgctacttaatcggccagtgcgggcagctgcagcgcctcttcccctggctgagcccggaggcagccatcgtgtcggtggtagtgctcgaggtggggccggcgacaggggcgggggcagctgggaggcgagagggcggccccagcgtctgcagcctgcagcctcctctctgccacccctgcagcacttcgctctgctcctcaagtacctcatccacgtggccatccccgatatcccgggctgggtggccgaggaaatggccaagctggagtaccagcgccgcgaggcctttaaggtaggggggccaggctgggctcggttttctcattggtggggctgctggtggatctctgatcttggtggccaattccttagcgtaagggcaaatgcagagactgcacagagctgggtataataattagtgctccctggctgggtgcagtggctcactcctatgatcccagcgctttgggaggccaaagtgggaggatcgcttgagcccaggagtttgaggctgcagctagctatgattgcgccactgcactccagcctgggtgatggagcaagaccctgtctctaaaaagagtaataataagcaataataactagtgttcacaacgggtccagtcgcttctggaatcctggcagcatccagcacgaggctggcccttcagaaccttcagccatccaccagcttgcccgattgcatcctgttagggggccagggacacagcggaggcttcctagaagcgcagcttcttccgcattcctcagaaagctacagaatgggccaaggagctccccagtgcctgcacagggaacattcctcgaggatgacaatgtcctttgtctgcactgtccctgcagcctttagctacaggtgataagtgagcacgttgaagtgcagctgctgcgaccgagaaactgaatttttattttattgaacagagcctcgcgtggctacctgggtatagtctgctgcagccatagtcctttttgtttttgtttttgttttttctttgagacagaatctctctcactctgtcatccaggctggagtgcatggagtgcagtggcacaatctcggctc

SEQ ID NO: 35450 - DNA, 2886 bp, Artificial sequence
  DNA replication origin
aaggggaaggagagaggcgcgtggggggcaagcggggcgccgggatcgggggactcaccctccctgggcgccccgccggagcaccgtgcccagacacacgccgaatccggttcctaactccgctgctttggacgcgcctcgacgcgaggcccccagcgctcagccacaaaatacagcctggcacgcgcagcgctcctcgcccacctcacgggcaggcccagcgcgtctccaccccaccgcgggctctgtcggtgcactgggccgcgtgcgcccccagccgcctgcacctgcttgctggccgcccccgaccccagattccctccgcgcatgcgccctcagctcggcgcgccaggcccccagcacagccacgctgcccaccccggcgaggacccacgggctcgccacctgcccgtactttggcccgggccgcgagcaggaggccccggagggagaggaggagcaggcggaaccgcagggccgcgagcgggaccagcaccgcctgcagctgccgctcgaggctctgggacagggacaggacgagcaggagctgtgaagggaccgacggacagatggacggacagatggggggacgacaggcagagagaggacgcacagacgacggacaacggacggacagacaggagagaaggatggaggaggggagggaggggctggagagcccttggaccccttgtgccgggtctggcccctcgctggccgccatgggggcaggggggactgccgctggggcgggggtctcacctctttcaagcgctccatgtccttgaggtagaaaccgatgtagaagaggctcaggtacgagttgacaaactggaactgcaggaaggaggcaggcggtggtcatcctgcacccccacccgactccttggagccttccttgtgccccatacagacggcacagcttccccgttgtccccctgcctgtccgatggtggtgactcaccaggacaactttgatgatgaggtgcttctcataggcgctctccagccggtaattttctaggggccaagggggggagtgagggggcagccgcggtccccccaagggtggcagggatcccaaggggcagtggagaccttcctcccagagaccccctggcaggtcgtacccatgtcattgagccagatggctagcttcttgtagccctcggcactcacactgacaagcagggccagcatgaccttaggcaggaatcgggcgagacggggcaaccccttcacgctcagcaccagctcctgcgggagaagggggttcagggctcatcccagctgcagggctcagcccaaggtggagctaggtaccaaggacagggcgggtgagggtatggggggtcacctgcagctggaagcagccaagcatgagcaagaagacacagacgaggcacgccaggcacagggggaggctcacaagcagctggaagagcagccgcttccagggcgggtagtagaactcctcggcccgcgtgatggggctgatacgtcgcacgccctgatggtgggcaaagaccgggcccagcatgagctcagaggggccacctctgccttctgcacccctccctatcctcagaactcaatttccctccatcatgcggaggtgaccctctcaggtcacccacctagggcactgttcccagtccctcaaatccaacttccacctctccccctggggagcacacagagcccgcctcggtttggcataccctctttgatgaaacaatcctgtttcacacctctctgcctttgctcctgcagtgccccccaccatttacctttgtcctgtctccatgaccctggactcagcccccaactgaccctgaactgggggcgtggctcctccacggcttccccaggtgagtccagcgtcccccacttatatgccagctcagcccctctccgcttccattcctctaggaacagcgtcgaccagatcacgttgaagagggcaaagaccacgcaggaaacatcccggcttgtctgtgagtggcagagaagagttgagtcattgtttgtgccagtccagaaaggagggcgcctctggatcccccagaccttgcagggtccctgcccagtacctgatcagcctctgtgaatgtgtacaggacagacccgaagacagctgggtataccatagccgacgtgtagaagcccagccaggcgaagtacatggcaattttcacaccaaagtaatcacagatgtcatctgccaggggacaagtgggtctcagtcaccccctgcctgtctgctgggactccctcccaccccccagcccaggcagcacctagaggctggttttcacacacggcctgcacccatgacttcatgaggcggttcagaatacgctgctcgtggacagggaacacctgctggatgatcccacgtgctgccagctccgggactgtggagggaggagcacaggtgatccccgcccctccacctgtgcctagcctggctagcccctctttgtctgaaacccaagtcacagctttttgcctgctcttaaacctctagagctctttccaggggagaagttctagacggatagaagatctgattctccttcagaaattgtaggtgcaggggcaggcggggagaatgtaaaggaactgggagagtggggttctggtgaggaaccatgtttttttttttttttgagacagtctcactctgtcgcccaggctggagtgcagtggcgtgatctccgctcaccgcaaccttcaagcgattatcgtgcctcagcctccggagtagctgggattataggcgcccaccaccacgcccagctaatttttgtattttagtagagacggggtttcgccatgttggccaggctggtctcaaactcctgacctcaagtgatccacctg

SEQ ID NO: 35451 - DNA, 2581 bp, Artificial sequence
  DNA replication origin
gaccgaggccggcgcgggcgggcgcggcctttgtctcctcctcccgcgcgctccgcggctgcaccggccccatgagcccgcggctccccgtcgcccgggccgtccgtagcccctgacctgacctgtcctcgccatggccgaggccgcctccggcgccgggggcacgtccctggagggcgagcgtggcaagaggcccccgccggagggcgagcctgcagccccggcgtccggagttctgggtatgtgtgcggcggctggaccagacagggttgcaggtgcctggggagcccgcgtcaactacacggggaggaggatcagggtcaaacgtaacctggcgtggtgtctggacgaggggccggctcctcccggcactgcggctgcggcccggcgggcggggctgggacggtgcttcgggctggggtcccggcgcggagacgcggacacgcccctccgagagccccaggcttgggctgcgccctgccacccccgggctgcgggatcgcggcgggccagggatgtgcttgagagagcctctccgcgaagaatacagaatcatacggtcctgggttcaaatcccagcttgactgtgtgaccttgggcgcgtgacttaaacgctctgggcctcagtttcctcacctgtgaaatgggggtaagaaccgcacctagtccctggggctgctgcaaggacggcgctgtcataatgtggtgaagcgctcagggctgctagtgagcgccccatcgattgtggttttggaggcggagctgggcctcaagaatgagtaagatttgtaagggaggatctggggggaagggcatttctggaggaaggcctggctggtacaaggacgtggagggaggaaaataagccaagcccagagctcccggggccttgaatgccaggtggagtggtgaggagccctggcgggggcaggaggagccaagactggaggccgggtccggatcccagagtggcctgacccgggcctgctacgccgccccctagataagcttttcggaaagcggctcctgcaggctggtcgctacctggtgtcccacaaggcgtggatgaagacggtgcctacagagaactgcgacgtgctgatgaccttcccaggtacccaagcccgcccgcccgcccgcccagtgcccagatgcggctctcctgagctcggcttcccagaacgggaatacgtaggaggccttgggccccctcgtggcaggagccatcggtccctgtgccccttggcagacacgaccgatgaccacacgctgctatggctgctgaaccacatccgcgtgggcattcccgagctcatcgtgcaagtccgccaccaccgccacacgcgtgcctacgccttctttgtcaccgccacgtatgagaggcgagtcccctgtccctggcctctcgctgagcctgccacccgactccccgctctaccaagtgccaaccatgctatccagccgccctgcgtttgtcccaaaggctgccaggtgcaccatcctcagctccaggatggtgggccggggcctccctgtgagcccacctcctccgccttcttcacagcctactccgaggggccgacgagctgggtctgcgcaaagcagtgaaggccgagtttggcgggggcacccgcggcttctcctgcgaggaggactttatctatgagaatgtggagagcgagctacgcttcttcacctcccaggtgaggccggctctgggcccccgcatgcatcctgtgcctatgagttccctgagctcacgccctcttcctcgcaggaacgccagagcatcatccgcttctggctgcagaatttgcgtgccaagcagggagaagcactccacaacgtgcgcttcctggaggaccagccaatcagtgagcagggcggggtcaacaccaatcacaggcagagagttgggtggagctcttcaaagacagcttataggagcaggagggcggggcccagatccaaccagtcaggggttggcaaagagttaggaaaccaatgagctaaaggggtgtggccttagcaaaagggtggagcttatctcctgagttgggtggagctctgagaggacagcttatcaggacaggaggtcagggcttatgtccaaccagttaggggttggcaaagggttgggaaccaatgagctgagggggcgaggctttggccaaagggtggggcttatttctgggaggtgggtccaggagaggcccttttctgggtttgggataaagtggaggcaggaaccatggacagcactccacttacagagtggtgcggctctgggcgttggattcccctccaggaaactaggcacccaagttcaccttccgacagcaagtttttaccattcctcagacgttcgggtccacaaactgagctttatttaaagcaggggaacaggcgcagtggctcccagtactttgggaggtccaggcggtagcatcacttgagcccaggagttcgaggttgcagtgagccatggtagcgccactgcattctgtccagcctgggtgacagagcgagaccctgtctcaaacaaataaataaataaagtaaaaaataaggccgggcgcgg

SEQ ID NO: 35452 - DNA, 1111 bp, Artificial sequence
  DNA replication origin
ggcgcagcccaagcctggggctctcggaggggcgtgtccgcgtctccgcgccgggaccccagcccgaagcaccgtcccagccccgcccgccgggccgcagccgcagtgccgggaggagccggcccctcgtccagacaccacgccaggttacgtttgaccctgatcctcctccccgtgtagttgacgcgggctccccaggcacctgcaaccctgtctggtccagccgccgcacacatacccagaactccggacgccggggctgcaggctcgccctccggcgggggcctcttgccacgctcgccctccagggacgtgcccccggcgccggaggcggcctcggccatggcgaggacaggtcaggtcaggggctacggacggcccgggcgacggggagccgcgggctcatggggccggtgcagccgcggagcgcgcgggaggaggagacaaaggccgcgcccgcccgcgccggcctcggtcctcgctcgcccgagcgctgcttctcgtccccgcccgagccgaacctcgattctccttcccggcccgatgcacgtcactctagggttctcagctgagttcgcccgcctagttctttggttcgcgtctccgcccgtgttgttttctgggtttccttctcgcccgcctacctcgctccctgctgctggtccccgcccgcactgatggtgcattctccaacttgtccccacccatgctttcttctggtccccgcctcggagcctcagtttccccatctgcaaactccggaccctggagacgctgtttggaatgtgagatgggcgtaagttgactaagggaggacgtgggaggggcgggccggttggggaagattcctggtgacaataacttcaaccaccccagtagggctgtgatacataattacagcaagccctgcttaggaactttgcacgcaccatttggctgcctagaacactcctcatgcactcttcgtccggttaacaccgactcccttcaggatgtaacctcggagaggatcccatagagttgtcaagtttagcaaataaaaatacagtccgtctagttaaatgtaaatttcagataaaagaataaatgttagctgggcggggcgcacctg

SEQ ID NO: 35453 - DNA, 1058 bp, Artificial sequence
  DNA replication origin
aagttagactggcatggtggctcgcgcctgtggttccagctactcaggaggctgaggcgggcggatcccttgagcccaaaagttggaggttgcaagagccgtgatcgcgccactgcactccagcctgggcgacagagtgagaccctgtctcaaaaataaaataaaataaaataataaagtaaataaaaatattgagcagggcgaggtaagggggtattagaactctattctgtcagacagatttttcttaacacgcaagtgcgccgcccgcccgctctgatccagaaccagagaatccgccatgcgaaggcgctcccggagaccccgcccagccagtgcctggaattccaccatcagcgctttattccgagtttcagtgctgtcctgggttaacctgaaagcaatctccgaggctcccctttctggctttcggggagccagagactgaccggacacttggctctgcaggtgcagacctggaccagagagacagagagccaaggaagtccacagtggagagagggctgtgctgggggttccaggaagacttcctggaggaggggatcttggagctaggccttgaagacgagtttgtcaaatgaggaagggcatccgaagccgagggaacggcagaagggaacgctggggaggggagagaatctggagagttccggaaaaagcaagtaggactctttccagaagttcgggcaagattttccctggatcagggcgtgggttctccagtactcgtccctcccggtcaccgagatgctctgagtttccggtctgaacctgaacgtaaagaggtgtagtccctcctttcttgaacgggaaaactgaacgcacataggtccttgccacgcctaaggctgcggagtgagcagatggaaaatgcgggactcaaaacctcccctcgctgtaatttgcactgccctgtgccaaactctgtcctttcttccattccttattcctattgtcagcctcgctgcgctaggaccctaaaaatttggtctcatgttgcccggggaacaacatttcgctacacctacctccatacc

SEQ ID NO: 35454 - DNA, 844 bp, Artificial sequence
  DNA replication origin
ggcccattgggaggaccaagcatctcacccaacgctgcaactcacccaaggcctgcaggacgccgctcaccactgccgggcctccatgcacgtggaactccacgcagtcctcaccggtgaaactctggggacctaatgtgacagacaggtgacaggaggacagcacagccagtgcaaacccttggaagggggaaactgagtcatgggacctacaggaggctcggaacctggggaccctcacctgggaaccagagcaccagtgcgcggtccagaggctccccggagcggggatcgctgagcaggcgcaggctggcgtggcgagcaaggggcaggtctcggggtgctgtgagaattcggagggcgtggccgctggcggggccgctggtccggatcactgcgatgccgcagcggccttggccagagcttagcgcgaagatggtggcgccggagccgggggctggtgcgccgctgctccggcgcgtgcacaatctggaaccggaggggaggcgaatcagcgcacctgggaggctcagcctcagtgtcaagtagaccgagggctcgatgatcgcgagatgctccaggtgggggggttctgcggctgggggatgcacaaattggatgttctgaaggccgaagggtgaccggattagggactgtgaggccagaaggagacccagatatgggctctgccgcaagggtcatgaacgattgaggcacggaagaacgcgaatgattgctctgccgcagggaattgggcccctaaaacccagggagtgggtctggggtccaagcagcaccccaagctgtcgcaccccttcccctgtagccccacctgcgaggccca

SEQ ID NO: 35455 - DNA, 1227 bp, Artificial sequence
  DNA replication origin
ggagcatctcgcgatcatcgagccctcggtctacttgacactgaggctgagcctcccaggtgcgctgattcgcctcccctccggttccagattgtgcacgcgccggagcagcggcgcaccagcccccggctccggcgccaccatcttcgcgctaagctctggccaaggccgctgcggcatcgcagtgatccggaccagcggccccgccagcggccacgccctccgaattctcacagcaccccgagacctgccccttgctcgccacgccagcctgcgcctgctcagcgatccccgctccggggagcctctggaccgcgcactggtgctctggttcccaggtgagggtccccaggttccgagcctcctgtaggtcccatgactcagtttcccccttccaagggtttgcactggctgtgctgtcctcctgtcacctgtctgtcacattaggtccccagagtttcaccggtgaggactgcgtggagttccacgtgcatggaggcccggcagtggtgagcggcgtcctgcaggccttgggtgagttgcagcgttgggtgagatgcttggtcctcccaatgggcctgggtggggaccagggggtgtcagactgggaccttcctgcaggcagcgtgccagggcttcgaccggcggaggcaggcgagttcaccagacgggcgttcgccaatgggaagctgaacctgaccgaagtggaggggctggcggaccttatccacgcggaaacagaggcgcagcggcggcaggccctcaggcagctggacggagagctgggccacctctgccgtggctgggccgagaccctcaccaaagcaagtcccccatttgtccattctctccctcagagaccccatctgtgcaacccctgcatgagaccccctctcaatcccgcattcattccctgcgtgaaagcttccggcctatgagccgccattctggcccctgaagtcgggctggacaaattgggtgtgggaaggtgggtttctgggtgcacacaccacctctgctctccctgccccgccaggctctggcccacgtggaggcctatatcgatttcggcgaggatgacaacctggaggagggggtcctggagcaaggtgggtctacctggtggtgggggaggaagacacctcatatcagccctcaaaggctcccctcactgtctctctctgcctgccttctctcacccacagccgacatcgaagtacgggcact

SEQ ID NO: 35456 - DNA, 1605 bp, Artificial sequence
  DNA replication origin
tcctggaagatgatgtccaggatctcctcggtaccccctccacctgtgagccgggtcaggtgaccccgggccacccgcagcgcctctgccgccagggccaggtcttttgactgcttgtagtggccgagggcatccaggcaaccctggaggtggtgctggtgccttgctcgggtcagcagcgggggatctgtggacgggtccccacacctggaagagacaagagacatggtctctcccgaccttttacaaccatcccttgaaggggaaatggttgtacccattttgtaggttcagaaattgaagttgagggacccacacttaaactgtgggtcaggggaggctgggagtgggagggggctcacactgcagctagctccttcctcagcgcctccaggaggccgtccagcccctctcccgtcagacaggacagcagcaggtgcgggggcaggtcaggaccgggacctgggccctccggggacagcaggtccgacttgttcagcaccaggaggaggcgctggctgctgtcactggggctctgggctcccacagaggctacgacggtggccaggaagttgcaactggagggagaggccaggtcagaagcatccagcatggccagaatgaggtcagcctgctctagcctgcgggagcaaggtcaactgagcggggatcccaggttgagcaattgaaggcactgggtggagggacagttagaggggccaggcagagcactgggggagctgcgaagcgtgaggtcgggagggaggagtagagtaccaggggaccggcagaatgttgggggcccaagccgagcacagggggtggggcagagcaagaggggcggggcacagtgcagggggaagggcagagcaagaggagcggtcacggtgcgggagcggggcagagcaggaggggctgggcacagtgcagtgagtagggcagggcaggaggggcggggcacagcacaggagggcggggcagagcaagaggggcagagcactgtgcagggggaagagcagagcaagagggacagggcacagcacaggggctgggacagagcaaaaggggccgggtacagcactggagtggggcgaccatgagtggcggggcagagcaagaaggaccagacacaccacagggtaaggggtagagagcaccaggggtggggcagaatgtagggggtggacagagcacaggggatgggatagaccgcaaggggcagagcggagtgccagggcgggacagagcacgagagggcggggcagaacgtgagggctgggcggagggcttagggatgagaaacatgtccggagggccgggggcaggacttaatcagaactaaatcactggccgggcacagtggctaacgcctgtaatcccagcactttgggaggccgaggcaggcgggtcacctgagatcaggagttcgagaccagcctggccaacatggtgaaacccccatctctactaaaaatacaaaaaattagcctggcattgtggtgggcgcctctaatcccagctactcgggaggcccaggcagaagaatcacttgaacccgagaggcggaggttgcagtgagccgagattgtaccactgcacactcca

SEQ ID NO: 35457 - DNA, 828 bp, Artificial sequence
  DNA replication origin
tccacctcccgggttcaagagattctcctccttcagcctcccgagtagctgggattacaggcgtgcatcaccacgcccagctaatttttgtattttaagtagagatgtggtttcaccatgttggctaggctggtctcgaactcctgacctcaagtgatcctcccgccttggcctcccaaagtgttgggattacaggcgtgagccagcatgcccagaaaccatgtggtacctttaaaagcagaaatcacgcttctggagtctttgaaggatttactaatatttattaagtgccaccaacatttcaacgggccacaggcagggctgggagttgggggagaaggagtggctcccctcccgacaacaggtgaccctcacccccggctcagggccccgagggggtcctggaaacactcacgctcaaggagcggaggtgaatggcttcctgttctcacctccgggtccaggcactgggggtgaggaagtggctgggaggccaggaggctggaggaggggaggtgctggggcccagggctgtgcgggaggggatgggatcctgtgggtaccttggcccgtgtgccagggtcgggggaacgtgacactaggtgagaattgggtagaaagtgtgtgtgaaagggcatgcgtgcatgtgatgttggtgccatatctataggtgtcgttgtcatggtgtgtgttgtcactgtgtctgtgtgtgacatcatcaccgtctgtgtgatgccatcgccgcgtctgtgtgacattaatatgtgtgacgtcgacatggcccgtgacgtcgttgctgcatctcggtgtgacgtcatgccaagttcc

SEQ ID NO: 35458 - DNA, 1260 bp, Artificial sequence
  DNA replication origin
tagtagagacggcgtttcgccatgttggccaggctggtcttaaactcctgacctcaggtgatccgcccacctccgtctcccaaagtgctaggattacaggtatgagccactgcgcctggcattattttcttaatcttttttattttttgagagagtcttgctgtgttgcccaggctgcagtgcagtggtgtgatcttggctcactgcaactcccacctcctgggttcaagcaattctcatgcctcagcctcccaagtagctgggattacagacatgcatcaccaggcccggctaacttttgtatttatagtagaaatgagttttcaccacattggccaggctggttttgaactcctagcctcaaatgatccctccacctcggcctcccaaagtgctgggattacaggcatgagccaccgcgcccggccgtatgggcttaagatgggagtccagccctggctctgagctggacacgtggttaatgttgttcaagttcactgttaacgcctctgatgattcgtgtgtccattcgagccgtatttattgagcagctgctggtaaccgggcatggtgctgggtgctgggaacaaggcacagaaacccgctgccctcatggggctcacagtctagtgggagagatggataataaattagatgaacgggtcactcaagggtcctttggtgatgggcgagacagagaaaggggcaggaagcgtaagaaggttggaactttctaccagagacagggcaggctacaccgaggaggtgatattgaagcagagacccagaggaggtgagggaggagccatggggggatcccaggaagggtgcaccagacagaggacacagccagggcaaaggccccaaggtgggaccgtgccttgtgtgtttgagggaagaggccggtgtggctggagtggagtgatggaggggaacgggaggaggaggtgagggcagggaagtgatgggagctgatcaagccctgcctgtggctgctgtgaggacctgagcagacgggggatgtgcatgacccagttcaagcatccacaagttcctctggtcactgttggggaacagactacgggacaaagagctggggaccaggacagagggatgtgcattgacccagttcaagcaaagatggagccttgcaggctggcagcagggacaagagctgggtaaatgctggttgaggatggagtctggggccagggccagggcccagagccaaccaaggaacgtgaggccactcgggcccca

SEQ ID NO: 35459 - DNA, 1181 bp, Artificial sequence
  DNA replication origin
agaccagcctggccaacatggtgaaaccctgtttctactaataatacaaaaattagccaggcttggtggcagacacctgttatcccagctgcttcttgggaggctgaggcatgagaatcgccggaacccaggaggcagaggttgcagcgagcccagatcgcaccactgcaactctagcctgggtgacacagcaagactccgtctcaaaaaaaagaaacccaaacctctgcatcatgcaatatacccagtgtaacaaactggcacacatccccactgaatctaaaataaaataaaatctgctcccaattctaaaaacgaaaaatgaaagaatcgaggctgagtttgagcgtagggagctggtgggttcttttacggctgggatgaggattggggttagggtcggagttaaaatcctgtatttgagttgtgttgaggaaccggggagttggtttagtgttgggagtgatactggggtgaggatgcctagaggaagagttgatgtgaaggttgaactcgtgtttaagttgggctgagatgagtttttggtcactgctgtatctggagctgatttgagttaaggttaggatttcacttaggatttcactgattttagaactggggttgaatttggaatttggatggtgagaaaagcttgcaaattgagtcagggatgcttgtagggggtgaggttgggtgaagaatgatctaggatctcagttgcttcgggactgagttgaagcactgaagctggattggaggctctggtagctggaggtggctggtcggtatagagatgcttagaggttgcagccaagggtgaattttggatttcactggcattgacatagggattggtattgacaatgggttaggagttgaggttcggttggtttagggtgactggtggaaggttgagtgggcttggagttgagttgaaggattgggtgaccctgggttatggctggggacattggggttgagtgacgatcagggctgggttgagaggaaaatttggggtagatgccaatctcggggtggaagtgggttgaggtggatttggggtaactgaccagcttaggactgtttcgggttaacatcaggggctccatagggccttaggattggagtgaagtttgggttgggattggaactgagggtgggtttaggatgggagctgggca

SEQ ID NO: 35460 - DNA, 994 bp, Artificial sequence
  DNA replication origin
tgaatcagaaggtgaagacgctggaggtggagatagccaaggagaagaccatttgcactaaggataaggaaagcgtgctgctgaacaaacgcgtggcggaggaacagctggttgaatgcgtgaaaacccgggagctgcagcaccaagagcgccagctggccaaggagcaactgcaaaaggtgcaagccctctgcctgcccctggacaaggacaagtttgagatggaccttcgtaacctgtggagggactccattatcccacgcagcctggacaacctgggttacaacctctaccatcccctgggctcggaattggcctccatccgcagagcctgcgaccacatgcccagcctcatgagctccaaggtggaggagctggcccggagcctccgggcggatatcgaacgcgtggcccgcgagaactcagacctccaacgccagaagctggaagcccagcagggcctgcgggccagtcaggaggcgaaacagaaggtggagaaggaggctcaggcccgggaggccaagctccaagctgaatgctcccggcagacccagctagcgctggaggagaaggcggtgctgcggaaggaacgagacaacctggccaaggagctggaagagaagaagagggaggcggagcagctcaggatggagctggccatcagaaactcagccctggacacctgcatcaagaccaaggtgggcttgcaggccccagagggaggctgcagtggagttaggtccagatgccaagagggtggtggcgatttgaacttggagttggctttgaggatggcttcctggtctaggttgggtgagttacaactctctaggatcaggcattaggatcaggatagagcttggaatggggatggcattgagaagagtgtagggttaagaatggaattagagtgccgtgcgcagtggctcatgccaataatcccaacactttgggaggccaaggtgggtggatcgcctgaggtcaggagttcgaa

SEQ ID NO: 35461 - DNA, 939 bp, Artificial sequence
  DNA replication origin
ttttagtagagacggggtttcactgtgttagccagcatggtctcgatctcctgacctagtgatccacccacctcggcctcccgaagtgttgggattataggtgtgagccactgcacccggccaataatttttttttaaatgaaaagacaggccaggtgcagtggctcacacctgtaatcccagcactgggaggccaaggcgggcggatcacgaggtcaggaaattgaggccatcctggttaacatagtgaaaccccgtctctactaaaaatacaaaaaaaaaattagcagggcatgttggcgggcacctgtagacccagctactcgggaggctaaggcaggggaattgcttgaacccaggaggcagaggttgcagtgagtggataccgcgccattgcaccccagccttggcgacagagctagactctgtctcaaaaaaaaaaaaaaaaaaaaaaaaaaaagaaagaaaagacaccagttagccaggttcaggtctgagaggggaggcagggctctaatctgaggatctaaggggcaggcaggaccctattgggagggtctgagggaggggcacagttatgccctggggactgaggggtgttccaccccatcttggggggctgaggtgagacctaccatactctgggcatctggggagacggtgctttgccccggggttttggcggatagagacagggccctacccctggggctctgggcgaggggttgaggtggaggtagggccccgccattaggggtctgaggtgaggagactgagttctgccttgagcaggactgagggggctgagcttaccttcctgcccagtgcggacggctgggtggtctgaggtcctatgggaggtctgtctttgccactgcctgggccctggccagccaggtcacctccttggaagaccctgaagctgcctcttcagccttc

SEQ ID NO: 35462 - DNA, 855 bp, Artificial sequence
  DNA replication origin
caggatccagcgtcggtgggagccccgagagggacggggaacggaagagaagggagcaaggaaaagggagtatcgagggagaggctggtggtagggggacagagcttctggggatgtagctgggagtctctagggaggcgtcccgggaatggctgggggtcgagaacggatgccggatcctggggagcgggaaaccctgggagatggggatctctggggatggagttcccagcaaagggacgctctggcggatgagggctggcgatgtctggggacaggggtccagaggctgacagcccccttcccccttcccggcagtaacgtcctggaagccgagatgagcccacagcgcagagtgccccggccgcgtccccgctcggggtcccgaccccggcccagccctcgctcgcgctctcgctccggaccctccgggggctgccggcggccggcgcggcgcgcacgagggtgagtcggccccctgccggaagggggcgtcggcctggaggacacatatggggggggggtctgcggggacgtgtatagaggcacccccacgctggatgcgacactcagctttagaccctggagacgtcctgaacggaaactgcacagaaaggtgcctcagccctctctcccccaccatgtaaagtgcttattctacagacagggaaactgaggcccaagtgatcatgcagtgagctagtgcttagctgggatttgaagtcccctctaacaacaatgttgccgtcatcccacagatatgaggactggaggtctagccctggctcaggaaaaaccggaaagggtcactttccctctttgggtttcagtttaccctatctgtaaaatgggtga

SEQ ID NO: 35463 - DNA, 1029 bp, Artificial sequence
  DNA replication origin
aaacgcaaaaacttatgaaaagaatgcaaacaacatgcagaggccatgcaaatgtcacaaaaacaaggcaaatgccacaaaacatgcaaactccttgtaaacgactcacgaaagcaatgcaaacctatgaaaagctatgcaaatggcacgtggaagccatgcaatggtacacactaatttaattcaaataaaggaaagcgtgcaaacggcatgcagactatcaacttggattccggcgtgcgtggggcgggtgggcgcgggagtctccagcctgacccggctccctgcgcccccagaggccctggcgcgctgggaggcggcggccacggagtctacgcggcggctggacgaggctctgcggcgcgcaggcgtggcggaggccgagggcgaagcctgtgcggcccgggaggcggcgctgcgcgaacgcctgtgagtgaggggctggcccgagggcggggtcggatggacggggagggcgcgaccaatgcttgcgcagggctgcattctttcggccaatcattactttgggcgtggaattgtggtggggggggggcattgttgatttaatagggggatcctggaattggaacctaaggatggagaagggagtggactctcttgggattccaggctggggcgggcattctagaaacttaggtccccaggatccagcgtcggtgggagccccgagagggacggggaacggaagagaagggagcaaggaaaagggagtatcgagggagaggctggtggtagggggacagagcttctggggatgtagctgggagtctctagggaggcgtcccgggaatggctgggggtcgagaacggatgccggatcctggggagcgggaaaccctgggagatggggatctctggggatggagttcccagcaaagggacgctctggcggatgagggctggcgatgtctggggacaggggtccagaggctgacagcccccttcccccttcccggcagtaacgtcctggaagccgagatgagcccacagcgcagagtgccccggccg

SEQ ID NO: 35464 - DNA, 2002 bp, Artificial sequence
  DNA replication origin
cttgattcctaccaagccctaccaagcaggagttaatactctccccatttcacaaagggggaaattgaggcacagagggcagcacgtgggatgcaggaacccagaacccctagtcctttcttgggctcgacgggatggaccagcccctggagggggtccaacccctcccaacggcctgggaagccacggccaggctgggcggaaccgtgggtgtccctggcgccccaaggtgccaattaaatattcgtggccgtctggggccagagctgtggaccgcggcatggccgagccggggccggagcccgggcgtgcctggcgggtgctcgccctgtgcggggtggccgtgttcctggctgcggcagcagccggcggggccctggtagcctggaatctggccgcctcggctgctcggggacctcgctgcccggagccaggggccaatgccacggcgccgcccggggacccgccgcctggggtcgacgacctgcggcgccggctggcagaggctgccgagcgggaggaggccctagccaggcagctggaccaggcggaaagtatccggcacgagttggagaaggcattaaaggcctgtgaaggccgccaggtaggtgggccgggtagagggggagctcgggaatccagaatgttgagataagagacggcctgcccacacaactccagggttccctccctgtgcctcggtttccccagttcctcgaattgagagggtattgagaatagcgccctaatgccttccaacccttagatgtcagctcaccatggagtctaccttctgatcagaaaggtggatcacctgaggtcaggagttcgagaccagcctggccaatatggtgaaaccctgtctctactaaaaatacaaaaattagcctggcgtgatggtgaacgcctgtaatcccagctcctcaggaggctaacgcgggagaatcgcttgaacccggaaggtggaggttgcagtgagctgagaccgcgccactgcactccagcctgggtgacacagcgagactccatctgaaaaaaaaaaaaaaaaaaaaaaaaaaaaaagtctcactgtcctttgctatttgccagataaatggtgtctggagaaacgccagaccactggaggccctcctccatgtgccaactcagccccactccagccagtttccagcagccctattttgagagagggacatacatgtcacctgtaattaggaggctaaagttggcctcttgggggaggtacctgctgggtcctccttttcctctgactaacccttcagactttttcttaaccttttccagccctgagcctgccaaaagaactgtccttaaaatcccagccatttccatttatggagtgactactgtatacctctgtgcacaccccccattccaccccaacctcccagcccagccgaggtagtgcagcatctgaatattaaaaatcaaaatggggccgggcgcagtggctcacgcctgtaatcctagcacttttggaagccagggcgagtgtatcagttgaggtcaagagttcgagaccagcctggccaatgtggtgaaaacccgtctctactaaaaatacaaaaattagccaggtgtgatggcgcatgcttgtaatcccaggcggaggttgcagtgagctgagatcccaccactgcactcccgcctgggcgacagagcaagaccccatctcaaaataaataaataaatccaaataaacccctaccccttttctgccccctggaccaagagaagggactggggcagtcgaggttaagaggatcctactccaagtacaggttctggctctgcccccttgctgtaagacgcactgaggaagccgaaccagtcgttttgcagaatgtcctacacaggcaaccgacacataccccaaaaattcaatcattgtcaaccatcaaattgccctgtgttggtttttgttgttgctgggtttgtttgttctgagacggagtcatgctcttttgtccaggctggagtg

SEQ ID NO: 35465 - DNA, 1264 bp, Artificial sequence
  DNA replication origin
caggctggtctgaaactcccgggctaaagtgatcctcccacctctgcctcatttctcctattaatcttccttttgtgagttgatttttcaaggaaccttcagagggtgaaggggaagatcacccagtttgatgggaaaggcgggggtgggggggagaatcagtcacacgcataaatatataattacttttttttttttttgagacagagtctcactctgtcacccaggctggagtgcagtggcacgatctctgctcactgcaacctccacctcccgagttcaagagattatcctgcctcaccctcctgagtagctgggattaaaggcgccagccaccacacctggctaattttttttttttttaagacagagtcttgctcttgtcgcccaggctggagtgcaatggcatgatttcagctcactgcaacctccccctcctgggttgaacccattctcctgcctcagcctcccaggtagctgggattacaggcgcccgccaccacacccgactaatttttgtgtttttaaaagagatgaggtttcatcatgttggccaggctggtctcgaactcctgacttcaggtgatccacccgcctcggcatcccaaagtgctgggattacagacgtgacccattgcgcccggcctgccattacctttttaatgttagggccctaggagctgatcaaaaggaggtagtgttgaagagggggactttctgtaggaggggacctgttagcagagcagcaattagccaggcagaggaggagaaggtgtaaaggccctgcgatgggaatgcacttggtggaagaaccttggggaggctacaggaaggagtgaaaagaaaatgaccttaaaggtgtgatcaggtccttgaaggtgtaaggagggagagaaggggcagggggagatagagaaggagaaacaggaagaggagggaggagggggaggagggagagtaggaggaaggaaggggaggggagaacgggttgtattctaagagggaaggggagccagagcccaattgtaatcacgttgtaagatcgccctctggctgcccagtggcgagcaggcgggaagacggggccggtccaccctgttgtctaccctccggtcctcttcacagccggcgtggcagcctaaactctgccaaccgtaagtcagtggagtatcctcccatctcccaatgcggttaccccgtcaacagaatgggaaccacaggccggatgcggtggctcacgcctttaatcccagcactttgggag

SEQ ID NO: 35466 - DNA, 2100 bp, Artificial sequence
  DNA replication origin
tggtcccagctactcaagaggctgaggtgtgaggattgctggagcccaggggattgaggctgcagtgatccaaggtcgcaccactgcacttaagcctgggtgacagagagaggccctgtctcaaaaaaaaaaaaagaaagaaatcagagctcagagaggtcgagtcccagagcagggacactcagcagtggctggtcactgccaaattcccactggggactgcagaaccccacagccgtcagcttctcaacccctgggtgggtcacagccttggagtcaggtctctcaggaaaaggacaaaatagggagggaagatgggacattttaggaagtagggaaatttacacccaggccattgtgtggggggattgggagttgaatccacaatattgggctaatcttatcagcaaaatacagcccaggcaggatgggggtgggggttgtggggggagagtgggggagggagtgtgagtaggggtgggggtgggtggagcagcagcatagtctggggacctttccatggcccaagtcgggagtggtgagtggaggaggtcacgtggggagcgtttgtttcctgggcaaaaggaaatccacagaatgtggagggttaattgcccaacgagctttgaaaccctgaacaaggccaggcatggtggctcacgcctgtaatcccagcactttgggaggctgaggcgggcggatcacgaggtcaggagatcaagaccatcctggctaacacggtgacaccccgtctctactaaaaatacaaaaaaaattagcccagcgtggtggtgggcgcctgtagtcccagctacttgggaggctgaggcaggagaatcacttgaatccaggaggtggaggttgcaatgagctgagatcgcaccattgcactccagcctgggcaacagagcaagactccatctcaaaaaacaaacaaaccaaccacaaaaaaaacaaaaacccctgaaaaagtccagtaattaccctaggcctcaccggggctgttggtgaggatgaaatagcttagtagttgcaaagcggctttggcttttttgcaagccagggccacagaagtgaaggcccaccctgctcccggggacacttagcaacatatagagactttttttttcttttgagacagagtctggctctgttgcccaggctggagttgcatcatcttggctcactgcagccttgacatcccaggctcaagcgatcctcctgcctcagcctcccaagtagctgcgactacaggcgtgtgccaccatgcccagctaattattaaattttttgtagagatggaggtctccctatgttgcccaggctggtcttgacctcctgggctgaagcaatcctcccccttcgacctcccaaagtgctgggattacaggcatgagccaccatgcccagcctggaaacatttttaattgtcacaacttgggagggtgttacttgcatttatgggtgggggccagggatgccgtttaatatcctacaatgcagctgggcgccgtgtctcatgtctgtaattccagcactttgggaggccgaggcgggtggatttcttcaggtcaggagttcaagaccagcctgaacaacatggtgaaacaccgtttctactaaaaatacaaaaattagccggacatgatggcgggtgcctgtaatcccagctactcgggaggctgaggcaggataatcacttgaacccgggagacggagtttgcagtgagctgaaatcgcaccactgcactccagcctgggagacagagtgagactccatctcaaaaaaacaaacaaaaaaaacccaaaacaaaaaacaaaatcctacaatgcacaggatggtccccacccagagaaccatccagcccaaaccaccaatgctgctgaggctgagaccctgccctagaccttgggagtgaggaacgggtgctccaggcagcaggcagagcttgggcaaaggccttgaggcaaaaaggaacttgggatcagtaaaggtggaggtggtgagcaaggggaagtgagggggcaagagggccagggggtctgtggcaggggaggtatttggggacccttccctgggacagcagtaggaaccatgga

SEQ ID NO: 35467 - DNA, 998 bp, Artificial sequence
  DNA replication origin
gcggtgcggggggaactcccgggggcggtgggcttacagggagggcggcaggagccaggacgagcagatgcctgatttgccatctgtaccgcagaagagaaaaccaggtcttaagcgtgagaatcgcggacaagaagtactaccccagctcccaggactccagctccgctgcggcgccccagctgctgattgtgctgctgggcctcagcgctctgctgcagtgagatcccaggaagctggtcagtgaggagggggcggccccgggagggagaagaaagctggggaagcggggcggggaagcagaggctccgaagtctagagagagaggctgcaggggaagggactgggcgcagaggtgaggggccttggggaaggagggagaatccagtgagaaggatgccctggatcggggacgggctgatagctgtatggggcggggctatcaatgggggcgggtctatcgatggaggggaggggcttatggatgggtggggcgggtctagcgatgggggcggggcttggggccgggcttggagcggggccagtgtctgctgcctccagtctgccctgagtccctcttctggtcctttaggcacatcttggaaggtccgtcctgctcggcttttcgcttgaacattcccttgatctcatcagttctgagcgggtcatggggcaacacggttagcggggagagcacggggtagccggagaagggcctctggagcaggtctggaggggccatggggaagtcctgggtgtggggacacagtcgggttgacccagggctgtctccctccagagcctccctccggacaatgagtcccccctcttgtctcccaccctgagattgggcatggggtgcggtgtggggggcatgtgctgcctgttgttatgggttttttttgcggggggggttgcttttttctggggtctttgagctccaaaaaataaacacttcctttgagggagagcacacctgactctcgagttcctggagt

SEQ ID NO: 35468 - DNA, 1325 bp, Artificial sequence
  DNA replication origin
ggcctggtttcatacagctgatgtgttaagagtgatttttacatttttaaggaattgtaaaaaaattgaatatgcaaaacacatcatctgccctgtaaagcctaaaatatttactataaggccctttacataaaagtttgccaactctaagaaaaaataaagaaaaaaagtttggccgggtgcggtggctcacgcctgtaatcccagcactttgggaggcccaggcaggtggatcacctgaggtcacgagttcgaaaccagcctgaccaacatggagaaaccccgtctctactaaaaatacaaaattagccaggcgtggtggcgcatgcctgtaatcccagctactctggaggatgaggcaggagaatcgcttgaacccgggagtcggaggttgtggtgagctgagatcgcgccattgcactccagcctgggcaacaagagcgaaactccgtctgaagaaaaaaaaaaaaaaaaaggtttgccaactctagtatgaatgaatatagcctgagtcaaataaaaatgacaagaaagggtgggaaagttcaggtggggctgggagggctgcactagggttgtgggcccagaagaggaggggtagggaagggtgaaggtgacatctgacggaggacggagaatgagctacaaaaaggagagaaaaagtgccccaggcagaggaagcggcgtgtgcaaagcctggaaatgaaaaagaaaactgcgcagtggttttgcttggctatggtgtaaaaagacacaagtagcacaacagtagtgaaacaggtggcgtggactgaacacttaactcgaggatgcaggctgtgccaatcatatcacacattttgaatcaggacaggggatgtcggtccaccctagggcagggctctgagtcctcagccaaccctgtcatcaccccgtgtgccagggggcagccgaggctcagataccgcgcgcccgtcgtccctcctcccccgctcctccctgcaagggacccggacaactctcgcctccgaagcagcccttactggaatccatggggtcgcagacgggggagaagcccagcggcagggggctcttgtccaccacgatctggatatcggccaccacgttctcctgcgggttctgggggtggaagggggacacggcgagggtggctagcagcggggacagcgcacctggcatagggcaccgtgaatgggcaggggaggtgggcagaccctggtggttccgaaggtgggcacctcttacctctaggctgcccagagaactaaggcacaggaagtagccagatttctgcgcgaagctcttgccaaagctggcgggtgccc

SEQ ID NO: 35469 - DNA, 1029 bp, Artificial sequence
  DNA replication origin
ttgcagtgagccgagatcgtgccaccgtaccccagcctgggacacagagggagacccccgtctcagaaaaaaacaaacaaacaacaacaacaacaacaacaacaaacgggagacccagcagcaccgcctccctgccatgatttcacccacttgcccggtgcaagagtgcctagtgtggacaggcggcaggatcaggactccagagggcgagaaccgggtagtgtttattgccaggaggacacccgcacagcctccggaccccagagggttttgacacaaatgacttaaaggcactggcttctgtccagctccagccctgcccggcagggcgtgggggcggagaccccatcaccacgcagcctcgacccgccccctcctccagggctgcagctccgcccagtggctgaagatagcaaacgccttgcagggcgaaggttcccaggatgcagtgagtgggggtggccccaggatgcagtgagggggggtggccccaggctggcggggaggtggagtaagggggctctttccgcggaagggtgagggactatgagacgctggggggcaggcgggcagccgcggtcttctccaccacgaagccgtagttatactgggggatggggagagagagagtgaacaggtgccagagtaaagagagggccaaagggggagtgactgaggaatggcagagtgggtacttagggacttgagtggtcttctgccctggagagatggtgtgtgtctggggcaaagcggggatggggaaaactgggacagcctggggcggacgaggggcgggtgccggcccctcaggcacctcctccctagccctgcacccacctcctccctagccctgcacccacctcctcctcaatgtccgccagagacttgatggtcaggtccccaaaagcagagaaggcctggcgggcagaggtgggtcagccttgggcccgatctcaacctgaaaccccctttccttcgtcttcaaggggtcctgccctccccccaacactccccgaatattccctcgga

SEQ ID NO: 35470 - DNA, 1488 bp, Artificial sequence
  DNA replication origin
gcgacccccagcccagtccccgaactttcagacactccctgcggccccgccccctcggggaccccctgaggaccctcggattccccccaactcccctgccctctaaaaccacttcaattcctcaactcttcccccggcccgcaggaacccccgccatggcccgttcttacggcggccgggtgctggctgcaatgaccctgctgggcatcgcggcggccgtgctggcggcgctgggcgcgcagctgctgtttcagctgcaggcgggccgcgccgagctgcgggggctgcgcgccgaggggctgggccaggagctgggcgccggccccgggctgccagaggacgcggccgggacgctgctgccgctggccgccgcgctggccgcgctggtgctcgtgctggggttcacctgcttgctgctcgccgcgctctgtggccacctgggcgccgagctggcgcgggggcctggccccaggaggtaggaggactggcctcaccgcctcggaggcccggctgggggctgggtgagcctggttgagcctcttcccctcttttggcctcaggctggggggacagcttccctccccacttccctctccccaccactccatgtctctctgcctccctcctttcctctcctcctccctccttccctccctccattctatatttgttcaattttgcagcaggtgcaaccactgctgtgtctcgcattttgcagatgaggaaactgaggctcaaagagggtccaggatcagcttgcctggatctcaaacaggggaggctgagctctcaggctgtctggcttggaagtgggtgggaggcgggacagtgctggacttgaacttggttctgggtagagccagccagagcctgtgtcctggtctgaaattgagttccttcctcagggacctgaactcagtcagggatgtggtcattgagggacccctatcaggggcagtggttgtggaaggaggaaccctccttgagctgaggactccgctgtcccacatggtagtgtttctctccagaatgtcgggggagaggagcccaaattctagtccagaattctgtgaaattgagcagatgagaactcccaccattgaggtagatcctatccagaccatgcaccttccacccaagggacaatgaaatgcatgggtcccacgggtcagcaaacatctgttgggtgcctgcctgcaggggaatggatctggctcagggcatcagagacagcggggaccaagtggacccagacctgctctcatggggtcacagaaaataaggaaacataacaaggacaaggcatggtggttcacacctgcaatcccagccctttgggaggcagaggcaggaggatcatttgaggccaggaatttttttttctttttttttttttgagacagagtcttgctctgtcacccaggctggagtgcagtggcgctatctcggttcactgcagcctccacctcttgggttcaagcgattctc

SEQ ID NO: 35471 - DNA, 1188 bp, Artificial sequence
  DNA replication origin
aggagggaggaggagaggaaaggagggaggcagagagacatggagtggtggggagagggaagtggggagggaagctgtccccccagcctgaggccaaaagaggggaagaggctcaaccaggctcacccagcccccagccgggcctccgaggcggtgaggccagtcctcctacctcctggggccaggcccccgcgccagctcggcgcccaggtggccacagagcgcggcgagcagcaagcaggtgaaccccagcacgagcaccagcgcggccagcgcggcggccagcggcagcagcgtcccggccgcgtcctctggcagcccggggccggcgcccagctcctggcccagcccctcggcgcgcagcccccgcagctcggcgcggcccgcctgcagctgaaacagcagctgcgcgcccagcgccgccagcacggccgccgcgatgcccagcagggtcattgcagccagcacccggccgccgtaagaacgggccatggcgggggttcctgcgggccgggggaagagttgaggaattgaagtggttttagagggcaggggagttggggggaatccgagggtcctcagggggtccccgagggggcggggccgcagggagtgtctgaaagttcggggactgggctgggggtcgccagacggacgggggctccggggtgctggtcgcagccgggacgccgaatctccgcgaaaacttgggacaaagtcttttctcctccctcccggggccccgcgggcgccccctcttggtccgctgggcctggcggggcggggcctggcaccgggcgcagggcggggaggccccactagggactggatcgcgggaaccccacagctcgctaagttcagaaaagggcaccaccccgccccctgccgccctaagcatcgattgtattgtggtttaaaacaagaaaaaggaggccgggggcggtggctctcgcctgtaatcccagcaccttgggaggccgaggcgggcggatcacaaggtcaagagttccagaccagcctggccaatatggtgaaaccccgtctctactaaaaatacaaaaattagccgggcgtggtggccggagcctgtaatcccagctactcgggaggctgatgcaggagaattgcttgaacccaggaggcggaggtttcagtgagctgagattacgccattgcactgcagcctgg

SEQ ID NO: 35472 - DNA, 1262 bp, Artificial sequence
  DNA replication origin
aggcgggaggatcgcttgagcccagaggttcgagatcaacctgggcaagagagtgagaccctgactctacgaaaattaaaagttagcccggtgtggtggcgcgcacctgtggcttagctaccctgaaggctgaggtgggagaatggattgagtccgggaggtcaaggctgcagcgaaccgtgatcgcaccacttgcacactgcactccaacctgagcgacagagggagaccctgtccccaaaaacacaaaaggaaaccctccttccccgccccgcccccgtaagagagcgggatgggggtgggggggtgggggtgccagggcggagggcagggccaagggcggatgttatgaccccctagggtggaggagttggggtttggtgatgaacccctccactccggaggtggagagctgggagggagtgggggagggatgtggggtgggggtgccccggcggagggttgggggggggttgccaaggcggagggtggggccgaggggggctgttctgactccatagttggggaagactggtggaggggtgaccggtctatgaaaagcctgccccccactgcggagagagagggctggatggaagtcggaaggctgttctgagtcctcctctgccccaggtgggcaggccgcgggaggggaatctgtaatgagcctcttggaagccgaggagaggggaggggaggggattgtcagagatctgcgcaggagtagggcgggacggagctcactgtgggagcacgaggtaggggactgtctgggttctgagcactcctctgggggcaggaggggctggggggctgttctgagctcccatgatgaagaggggtggaggcgaagtggggatgggtaggggtgatgtctgttttgagcccatccccaggaggggtcagggcagagggagtgtaataagatccacagggagaagcaggacaggacctggggagtctgttctgatccccatgcagggaagggtgggagctaggatggagcgagtggcaggggattctctcttctgagacatcccctcacacccagggatctgttctggtcttccaggtgcgcatctgagcctccctggccaggagataaagtagggagagcttttcaaggatctctataaatatttctgagacctggctgagggggagtaattaatggctccaaaaatgagaaaatctaaactaaaatagaacaaacgtgctgaaaacgccaagcccatcctacattaaatgagttgccccccccc

SEQ ID NO: 35473 - DNA, 858 bp, Artificial sequence
  DNA replication origin
ggagacaaagcgcggggaccaaagtgtctggccctgtcccggtcctcgtgtgcacctacccagtgcccggcaagaggcagtgcacacagaaggcgctgcctaagtactgggaggagggatgtggggctctctggttcagcatcagggatgtggatccgtccagactgacctgcccgctccgcagggacctcgggcgccagttctcagtggagcgcctgccggcggtcgtggtgctcaagccggacggggacgtgctcactcgcgacggcgccgacgagatccagcgcctgggcaccgcctgcttcgccaactggcaggaggcggccgaggtgctggaccgcaacttccagctgccagaggacctggaggaccaggagccacggagcctcaccgagtgcctgcgccgccacaagtaccgcgtggaaaaggcggcgcgaggcgggcgcgaccccgggggagggggtggggaggagggcggggccggggggctgttctgacccgctagggtggaggagaggagtggggtttgttgatgaacctccacccccaccccacccccgcacgcctgtaatcccagcacttggggaggccaaggcgggaggatcgcttgagcccagaggttcgagatcaacctgggcaagagagtgagaccctgactctacgaaaattaaaagttagcccggtgtggtggcgcgcacctgtggcttagctaccctgaaggctgaggtgggagaatggattgagtccgggaggtcaaggctgcagcgaaccgtgatcgcaccacttgcacactgcactccaacctgagcgacagagggagaccctgtccccaaaaacacaaaaggaaaccctccttcc

SEQ ID NO: 35474 - DNA, 1139 bp, Artificial sequence
  DNA replication origin
ggcggtgtttacagttagagacttctgaggccccaatggtgtgagttgagcactcccccgggccctggaacgtgtttttaagaccgaaagaggctttggggcttggatttaggacaagctggagcaagaatacagcccgcgcgggccgtgggtgtggactgggatatttttggtcccccggggtagagatcctgcacgccaactagggctcgggtcctgatatcttgcgagccacgccccaaggctgcaggacacgtgtgtttcctaaaaggagagggggtggggcaaggcttggttgtcatggagacagcggacgaccctggcgggccgttctagcacccatgtctctttggccgtcgcctctccggtccggttgcctctctatggtcgtggcttctggaagacggccggcctcggctctgcgggctgaggggcttcgaagtagacaggagggaagaggggcggggcctaggtcctaggggggccggagtgaaacccaggaggtggcgaccgagccaaagcctgagggcggggcccgtggccaggatagaacctgagcctgggaacttgggctaggcccggaactggggtggggcttgaacggattggggagggctctagtttcgggagggtggggcgtgtgcttattgcgggggggtggggaggcatatgtctaacctagggggtggggcctggctgagaggggcgggactcggggagagggcttgtacctgtgggctgggctagaagcataacctaagggcggggcccagtgagtggtgaaaaggccacggggtagaggcaggaccaggaggaaaggggacaggacgtgaagggtaattcggggatcgaggatagaggctagatgaaggcatgtggcgaggcctgacagtgaccgacaaggtggacatgctggctctgggggcggggactgttgtaagattggcagggaaggatgggctcaaaaatatggaatagagcggacccagggtccgggggcggagcctggccaggacctggccaatcccaggcctggggccctggtctggttcctagttagcgggcgggtgtaaaagcctggaaaggggcgatgcctggcctgaggagttgaccaatcccaggcctgggggcggagtctg

SEQ ID NO: 35475 - DNA, 1937 bp, Artificial sequence
  DNA replication origin
gaggcctgacagtgaccgacaaggtggacatgctggctctgggggcggggactgttgtaagattggcagggaaggatgggctcaaaaatatggaatagagcggacccagggtccgggggcggagcctggccaggacctggccaatcccaggcctggggccctggtctggttcctagttagcgggcgggtgtaaaagcctggaaaggggcgatgcctggcctgaggagttgaccaatcccaggcctgggggcggagtctgactcggagcgcgttcccggactcgcggggggcgcagagccgaggcctgggggcgcggctcgctgtagaggcgggggcggtcgtggggcggagcgggtcgtggggcggggctggagcggcccgcggcctcagctctctctgcttccccaggatgcgggctccgggtgcgggcgcggcctcggtggtctcgctggcgctgttgtggctgctggggctgccgtggacctggagcgcggcagcggcgctcggcgtgtacgtgggcagcggcggctggcgcttcctgcgcatcgtctgcaagaccgcgaggcgagacctcttgtgagtgttgccgggatccgtccagggctgggggcggggctgagggctctgggggcgcacggtgcagggctgggttgcggggacggcttggagggtccggagagctgagggtgctttgtaggttgggggcggggctgggccgagggctgggcgggggcggggcctgagagggtgaccagttgggggtctctgagggggctacaggggacactttaaggatttctcgaggaagatgagtagcctctaaggtgcttcgggcgttgcaggctgcttaggagatgatctcaggggatttggggggcaatttgggggtctttgggcaactggtggaaattccagggagctggggctgactggaaatccgtggcggtgtgggggtctttttggagccgtgataactgtgagagacttcagggggctctccagtaggtcaccggggctcacagggacgacccaatagatagtctctggggggttgccaagacactttgggtctatctagggctttctctgagggatgagcgagctgctctataaaggacttcccgggtttctgaaggtgtgagtttcctcgggatcgtttacagctggggcactgtttgagattttggggtctgtgtgggactttgggtttgggagttgttcggagtgtgtcgggaggctgctgtgtattccaggacttgtttggggggtctcttctggagactgggacactggattcatgctaggggggcagattctggtgtcctgtgcaaggatccttggagggtttttgcggtgtctctgagggacttgctcaaacgagccgttgggggtccttctgggatgaaacaggcattgctgggggcttctatcagagcagacctcaggaacagcaccacgtgggagcaggtgagcgccggctagcggggcagggctcaacaccttcacagctccttgtaagatggagtagcaagagggactgaacccattgtaaggagggcacagagggtgtggagatgggaaagatcccaccgtaagttgactggttctgaactttctaaaactcaccccttctgcatgccatggccccctgcccccggctccttggttgttctgatgtggaaatctgactgtgccctctgctcagacaccttccatggccagcccatccttggcagaaggaagactcagcccctagctgggcactcaaggtcctaccatctgttccctgcccacctgccactccccccatccatatgttcacctggtcttcagaaagacttgcagtgtcaagctcaagctgcccagaacatactggaccccttttagccagggcaggctctccctctgggaacctttgctgaattttcctgctcagc

SEQ ID NO: 35476 - DNA, 1100 bp, Artificial sequence
  DNA replication origin
gaatgaatgaaagagggagtaaatgataaatggagggaaagaataaaggagggaatgaatgatggagggaataaatgcatgaaagaggtaataaatgaacaaaggagggaatgaaagagtgaaggagataataaataaggatggaatgagaccagatgcggtggcccacgcctgtaatcccagcacattgggaggccaagggaggaccacctgagtccagtagttcgagaccagcctggccaacatggtgaaaccctgtctctacaaaaaatacaaaaattttgctggccctggtgacgtgcacctgtagtctcagctactagggaggctgaggtgggaggattgcttgagcctgggaggtctgcagtaagccatgatcatggactctagtctgggcgacagagtgagaccctgtctcaaaaaaaaagtactgaatgagtgaaggggggaaagaatgaatgacggagggagggaaagagtgagtgaagtagggaatgagtgaatgaagatggaatgaatgatggaatgaatgaaggagagaatgagggagggaatgaaagagggaaagaacgaagaagagcatgaatgaatgaccgagaggatgaatgaatataggtgctgaagtccactgtgaacattttggggggtgtgagcagccattgcagggatctggggaggcctgggaaaggcaggggagatccaaaggatggatttggtgattttgatgcagaagctggagggaggcagtggccgggccaggctgaaacaggggcaggtgggtggagcccctgccctgtgttggtcagggctgggcagggccaggtactacaacaaacacaccccacattccagtggcttaccccagtacaaggttattggttcccagagccaggggcgcagggtggtggggcagggagccaggaaggggtggggaccactcatttctccagcttctcaaccaagaaaatctgaatttccagcttctgtgatctaaacttttcctttcctttccatttcctttttgtttccttttttttttttttttttgatggagtcttgctctttggcccaggctggagtgaatttgcgtgatctcggct

SEQ ID NO: 35477 - DNA, 1575 bp, Artificial sequence
  DNA replication origin
cccgcccacctgatgcccacgcctggcctcacccgccaccatttctcctccaaagatcagggccttagcgcccgaggtgcccaggcagaaggccaggggctcgcgccgcaggttcacgttgagcagcgcggcctccatgcccgccttggccaggcccagccacagccccacgaactccggccggccctccaggaagatggccaccacgtcgcccggcgcgaagcccagctggcggaagaggttggctaccgcattggagtaggcgtccagctgcgcaaaggtccagcactcgccggtcccggcatccaccagcgccaggcgctcgggctgtcgctgcactaccgcctgaaagatgcgcgggatggtgtggccggcacgctggtgccgccgcagctccaggcgcacgcggatcagcacagagagaccgctgggagggaggacggaggggacagcgtcactggtgccctgccccgcctggcctctgggagcctcagcctccccgctggaggaccccagggcagccaggggctttgatgaggtctatggtgaaacttttggtggctggatctctcagtggaccaagggcaagggccatttaccaaccagccaggaagaaggtagattctcaaagcgtaataaaccagtcaccctgtcctcccccataccccagctggcttggtggccctgggggagctggggcctgaacccatcctcctttctgtcccctgcgacgtctggagcacctgacaccatcccccagcacctccagcctggactcttcatgctcagaccaccctaaccaggacccccagggtccagccccgagctgggcagctgttctgcccccaggtcactgggtggcaccagggacagatggctgaagcatctagcacgtgtgcccccaactggggagggattgcccctgccccaggtagggccaggagatgtgccagtggatggggggtgtaaggaccaatgccaagcccagatggagggttccaagttccccttccccactcgctagtagatataacgggcagaggccccagggaactgcagagcccccagtgaaaggagccgggttcctgaatgattgtgtggaggcaggcgggccaccacttgctgttagatgaatgagaatgaactgtttttttgttttttttttgagacggagtctcactctgtcgcccaggccagagtacagtggtgcaatctcggctcaccctccgcctcctgggtttaagcaattctcctgcctcagcctccacagtagctgggattacaggtgcccaccaccacacccgactaatttttgtatttttagtagagacggggtttcatcatattggtcaggctggtctcaaactcctgacctcaggtaatccaccagccctggcctcccaaagtattggaattacaggtgtgagccaccatgcccagccaagaatgaactttaaaaacaaacaaacaaacaaacaaacaaacaaacaagaaatgctttaggccaggcgtggtggctcacacctgtaatcctagcactttgggaggccgaggcgggtggatcatgaggtcagc

SEQ ID NO: 35478 - DNA, 1610 bp, Artificial sequence
  DNA replication origin
aatagggtcaaggggcatagaggggctgatggtaatgcagccaggggggttgggggatcctgtctagggaggtgaagtgtgatccgagacctagcaagaaagagctgtgggggcgagctatggaagagtgcccaggcacagcacatgtgagggccctgaggccggaaggagtgtatgggtttgaagagtttggggggctgaggaggagtgagtacggggtgaaggggaggaaaatgacatcagggaagtggcagaagccacccaaactgagagagggtttttgtttgttatttgtttctttttttgagagggagtcttgctgtatcatccaggctggagtgcagtggcgggatctcagctcactgcaacctccgcctctgggttcaagcgattctcctgcctcagcctcccgagtagctgggattacagtcatgtgccaccacgcccagctaatttttgtatttttagtagagacagggtttcgccacgttggccaggacggtctcgaactcctgacgtcaagtgacccgcctgcctcagcctcccaaagtgttggggttacaggcgtaagccaccacgcctagcccgagagagggttttattctgagggtcacggtagatgcagggaggtctgggacaggggaggtctgatttaggattttcaaacctcctgtagctgctgacaggagctgggccatcgtgggtggaggagagagtggggggagcaggaggagcccgaggaggggctggcacaggtccagatggggggcatggaaaaaagtagacagatggagaggacgggttttgctggtgggatggatgtggtgaacaggtggggggatgagaggggccccagagtagtgggcacagggcaaccgggtcccaagatgggtgtgaaaatgggtgtgatgcctttgtccagccccaagcagttatgagggttgcaatgagtttacacgtggagggcttggccctggtctggacacagagcaagtgctcaggaaacaccagctgccctctctgtccccagggtaacatggagatgcccacaggagctgaggggcaggtcaggctggcaagatagcctgggtcactctcagcggctgagggcattatgcctgtgggcccctcacctgctgtgcacgacaatggcagccttgggcagcccggtggtccccgacgtgtagatgtagaaaagacgatctgcaggagatacaggtgttaggggtggggcctgagcattggggggtggggcctggaagttgggggcggggcctgggcgggtaggaaaccagttgatagagcaggggtcccacccttgactcaccgtccatgcccttgctggggatctgtgccaagggggcagtagaggcctccttcagcagcgggtccaggaggtgggtgtccggcaagatgccctcgggccccaagtctccagagcagaacttgatcaaacttttccccagatgcccgctcacttcggccaccgctgtggtccccaacacatgggtcatggtcaccgccggacaggccccctcccgaggcctgggatgcaccaactccctgcccggggcatacccagaccgtgcacctcatgcccacgtccaggg

SEQ ID NO: 35479 - DNA, 1049 bp, Artificial sequence
  DNA replication origin
gtggacaggagggcgcacataagggagttaagggaatagagcctggtcggggggcggggcctggctgggagaggacgggacctgaccaggaggaggtggggctttgctgggaggtacggggcctcaccgggaggaggtggggcctgattgggagggggtgaggcctggctgggaggggcggggtctagacagaacagggcagggcctgaccgtgcagttgtacttgatgcagtcgtcccagaagcggctggccgagaatttcttgcggaggacgactgtcagcccatagatgagacactgccccacgccgatgatgtttcctgcagagggtggccttggtaaggggtcccccgcccccacccaccattccctacccaggccgtagtacctgccgagtggtacaggggcaggcagtcatagagcacgtcagccgcctgcatgcggtaggcgtggtggccgaaggctgccatgcggtagtacctgcagggggagggggagccgggagggcagaggctgggacctaaatcccccagggtacaggcatggggaagcatgctgcatgtggacccaggcaaagccagcccagttcgcatgagttcacaggctggcaggaaggaaacacgcaaccaacaattgttggtggtgttaggtgtcacgagggatataatagggtcaaggggcatagaggggctgatggtaatgcagccaggggggttgggggatcctgtctagggaggtgaagtgtgatccgagacctagcaagaaagagctgtgggggcgagctatggaagagtgcccaggcacagcacatgtgagggccctgaggccggaaggagtgtatgggtttgaagagtttggggggctgaggaggagtgagtacggggtgaaggggaggaaaatgacatcagggaagtggcagaagccacccaaactgagagagggtttttgtttgttatttgtttctttttttgagagggagtcttgctgtatcatccaggctggagtgcagtggcgggatctcagctcactgcaacctccgcctctgggtt

SEQ ID NO: 35480 - DNA, 839 bp, Artificial sequence
  DNA replication origin
cctctgcctgctctcctctccgggacagcagatgcctccacctccgcctcacgcgttcctcacctggaagccccagactcatcgcccttcccatcccagggtctcaattccctacagtcagcagcagggaagacccacagggcacaaggcatggggaaggcattgccttaaggagctcaggcaccctgggcccaatcctagccgcattacaagccttagtttccccagctgcaaaatgggtccaccctccaaagttataggattgcattgagtttacacgtggagggtttagctctggtctggacacagagcaggtactcaggaaacactacttgccctctctgtccccatcctgaacagccattccttaagccccgctccccaccccacccctagagacgggggagcaggttgcgccagcaggtggacaggagggcgcacataagggagttaagggaatagagcctggtcggggggcggggcctggctgggagaggacgggacctgaccaggaggaggtggggctttgctgggaggtacggggcctcaccgggaggaggtggggcctgattgggagggggtgaggcctggctgggaggggcggggtctagacagaacagggcagggcctgaccgtgcagttgtacttgatgcagtcgtcccagaagcggctggccgagaatttcttgcggaggacgactgtcagcccatagatgagacactgccccacgccgatgatgtttcctgcagagggtggccttggtaaggggtcccccgcccccacccaccattccctacccaggccgtagtacctgccgagtggtacaggggcaggcagtc

SEQ ID NO: 35481 - DNA, 985 bp, Artificial sequence
  DNA replication origin
ctgcctcagcctcccgagtagctgggattacaggagtgtgccaccacgcccggctaattttttgtattttttagtagagacggggtttcaccatgttagccaggatggtctcgatctcctgacctcgtgatccacctgctttggcctcccaaagtgctgggattacaggcttgagccaccccgcctggccgtgcccattcttaagccagtcatattggctgaggaggggctgggctgattggccaggttctctcctagagatggtgtgggctgtaccacacctaaggcagtggcccaagtctgagaatggagggagaggaccctcccccttagggacctgctgttggtcagcagccagtgatcttgggtgcactgcatttcctctctgggcctcagtgccttcatctccaagctcagctcagagcatggcggtggtgtctgctgatcatattggtttagtcatcagctatttagtcagtaccttctcaggggcacagctgggggcacaggggatgcctctcagtgacgtttgagctgagactgaagagttcaggcaaatgcatctgggggaagactgcttcaggcaaaaggctagcatgtgcaaagtccctgaggaggcagagtgttcagcggagatggagggagaggaggcagcaggggcggcagggccagatccagttggccacaggaagaaatgtgggtttcatcctgtgtgtgagcgggaagccccgagcacatttgcagctgttatgatccatctggtgggtaatccctggcatgcaactgttttattcccactctggggccgggatgcctgggttcaaatcaaattctgccacttcccagctctgtgatctcgttccagttccttaccatctgtgagcctcggtttctccatctgtaaagtggcggggggggagtcattccgaagcccaactggagatgagaactcttaaaggcaccgtggggcacctggtggatgacc

SEQ ID NO: 35482 - DNA, 1147 bp, Artificial sequence
  DNA replication origin
tgggtttcatcctgtgtgtgagcgggaagccccgagcacatttgcagctgttatgatccatctggtgggtaatccctggcatgcaactgttttattcccactctggggccgggatgcctgggttcaaatcaaattctgccacttcccagctctgtgatctcgttccagttccttaccatctgtgagcctcggtttctccatctgtaaagtggcggggggggagtcattccgaagcccaactggagatgagaactcttaaaggcaccgtggggcacctggtggatgaccccaggaagctcttgcggggcttgagaatgtgtggcagggagggaagatgtcctgcagggggagcccatgagcaggtggctccgtgggcacctggggctcagtccagacgcagcgcagcctagtgggtgcacctgggagtggtctgcccaggggtgacgctccggccagcccaggctcagccagggggctctgggtgacagtgtaggctccaggctgagggttgccctgcggggtgccagctctcctgctagtcctgccctgtgtgcctgctgaggctcagacagggatgtggtatctccaggaagctgcttggcagaatcgagggaccacgaaggggtgcgggtagggggaggaggaaagacactgcatctgcttggatagaagttgcatccggccaggcacaagtggctcacacctggaatctcacactttgggaggctgaggcaggaggattgcttgaggccaggagttcaagaccagcctgggcaacagagcgagatcccccatctctacaaaaaaatctgtagtcccagctactcgggaggctaaggctggaagatcacttgaacccaggagttagaggctgcagtgagctgtgatcatgccactgcactccagcctgggcggcacagggagacccccaaccaaaaaacaacaaaaaaagctgcatcctagaccctttgcaagagactgaacgagtcctaggagtcaatgtggtccctaatggagtgtggacgattctgcagccatcatcatccttaggctgttccgctcataggattagctccctgggtggggcggtctcggggtctctcctctgatccgggctccccaccgcctgccggtcccatcacccact

SEQ ID NO: 35483 - DNA, 1033 bp, Artificial sequence
  DNA replication origin
gcatgatacccagtggcccccgtagccgaggtgcagacagtgggcgcggccctttcggcatggcccccggcggcctccgtagccggggtgtaggcggtggctgtggccctctcggcgtgatccccggcggcccccgtagctctcacccggtagaggccgtacgtgctctcggcgtgatcgaagggcacgaggcgctcgtcgcagaagcccagcgtccagcgcgctaagctagctggcccggcaggggcgacggcggcgggtagctcgcgggctagcatcgagacgaggctcccgcccgacaggccgagcgcgaaacgggcgcgggcccctgccaggcagcatgctgcgcgctgggccaccagctgcgctagcgccgcacccagctcctgggaactcgagaacaccgagatgaggcccggggccggcgcggccatggcgagggcggcggcggggaggaggaagcgctccctacggccgtcgctagtacgcctgcgcaagggccggccctgccgcttggtttcgagtactttgggtgattgtctttggcacatgcgcagtgaggcaagtgaagcaccgcgaaggtcgggcagtcggtccggccctacccattgaatctttgcctgctgtgcctgagtcgaagtgagttcgggaagccagtgcccgaatgctcaaccttgctgtatcagggagggccggagaggggagctcaagaagaggacgtcctatcgaggtggcagggattttctgaaggagggcgtattttggtgagttttaaaattcctgcaccgccgggcgcggtggctgacgcctgtaatcccaacactttgggaggccgaggcgggcggatcacgaggtcaggagatcgagaccatcctggctaacacggtgaaaccccgtctctactgaaaacacaaaaaattaaccgggcgtagtggcgggcgcctgtagtcccagctactcgggaggctgaggcaggagaatcgcttgaaccggggtggcggaggttgcagtgagccgagatcgtgccactgca

SEQ ID NO: 35484 - DNA, 1017 bp, Artificial sequence
  DNA replication origin
catgccgagatggtcacgcccactgcctgcacctcgactacgggggccgctgggggtctagccgacagggctcgcccgcctcctgaaccccgcctacagtgggtcccgcaggacctcactgcgccctctgcctttatctaggcagggctagaaatggtctacttgcagtccgtcttcctgcttcatccggtggccaggcagagggaacggcacgggcaagggcctggaagggaatccgagtggcccatgtcaaacgatgcccataactcagccccgtagcggacgggggcacgaggaatcaggtgtagagcctgaatctcagggtcctgatctctaaccccagcgagttctcggggatccctgggcagctttgccgctctgatggctctgcttccaggctgttcatctttggctttgagcctcaggattctatagaatcagaggagcgcgctcttttaaagacagggtaactgaggcttggaggagccttggcctggccgagggaagagtgggaggggcgggctcaaaggccaggaacctcaagtcacttgagtctggcagcgtcaagggacaccccatgctgggtgtgccgtcttctctttgcatagaatcttgagctgatgatggttttgtgggttttttattaagagaaaaggcttactgaacgctttatatgcatcaattcatgagtccgtaccacagcctatgagatgttacactcatttcacagatggagaaactgaggccagaagaggtgagcttacctgcccaaggcatctagtgaccagaggggcagccagggtgtgatcctgcctcatctgacttcgtagttgggtacacatttaacttccgccttcctgtgtgtgttttccaagagcatcattaaaaagttttggccgggtgcggtggctcacgcgtgtaatcccagcactttgggaggccgacgtgagtagatcacctgaggtcaggatttcgagaccagcctggccaacatggcaaaactctgtctctactaaa

SEQ ID NO: 35485 - DNA, 1471 bp, Artificial sequence
  DNA replication origin
actcagtcttcacccctttggtagacaggtctttgactgatgaggaaactgaggcacagagaggccaaatggccttctcgaggtcacactacagaggtgtgatttcaacctgggatccacgcttattactaatgcttggtcccacgctccagttggggctgagattttttgcctctccggaatgccccacttcccagctgtgcccacccagggcggggggctccaggagctgtggacacagagccccttcctgcctaggactctctctgtccagcctggggcatcacgggaccttagcgtcaccccaggatacagcgggtgtctgggtggtcgggccacagggacatcagcccacagccccctgacacccactgctccctctttctgcagaagctgccccgagtccgtgagcaccgaggacccctgacccagcttcggggccacccaccccggtggcagccgatcttctgtgttctgcgtggggacggccgcctagagtggttcagccacaaggaggtgcgtgattggcacgtggcctttctacttctgggtccctccttcccacccccgtcagcctcaaggtttgtgggatccatatctcagcatagccccacctctatcaatcacccaggatgaatcttgtgcccctatgtgtttggcctgttgtaggcaaccatctcgtcccatcccctgctgtgctgggtgggtaaactgaggcccaggccagggatagggtcgtggtcagtatcagagctgtggtttcaacctcttggggcctttgcaagtcacacctctggccgctctgctttctggctggggagcttggagcgatcactacctttctgaaactcagtttccacttctgtgaaatgggatgtttcacaccatgtagggctttgagggttcaacaagagggtcctcagacagcacttgggaccggaccggcacgtggggagcccgtgggtgctgggagctcagggactgagggaggaagggagggaaaggggaaagggaaggagggagagagagggcaagaacaggagggaggaagggagaaagttatgggggcagaggtaggatggatggagggagagaggaggaaaaaaaaagggagggagagccgggcctcgtggctcacgcctataatcccagccctttgggaggctgaggcaaatagatcccttcagcccaggagttcaagaacagcctggccaacatggtgaaactccgtctctactaaaaatacaaaacctagggccaggcacggtggctcaggcctgtaatgccaacactttgggagaccaaggcaagtggatcacctgaggtcaggagttcaagaccagcctgggcaacatggcgaaaccccgtctcaattaaaaatacaaaaattagcctgctgtggtggcgggtgcctgtaatcccagctactcgggaggctgaggtggaagaatcacttgaacttgggaggtgg

SEQ ID NO: 35486 - DNA, 1210 bp, Artificial sequence
  DNA replication origin
ttcgggctggaaggcgcagagcccggcggaggccccggccaggacagctgcgtgaacggcgtctagaagctgcccagaccggtcgaggggggacaaagccgagacacggggcggggatgggggtcagagagatcgggagagggtttaggcgacagtcgtgggaggggaacccgaacgcccgcatcccgccccctatcccggatccggacgccgtgcatacctcggtccaggcccaggcgcgggcgcggcctgccccccgcaggccaggaagggtctgggctcgcagcgcgggaagttgctcccgcatcagcaccgcggtcagcacctgcaggagagggggccatgggcgccgcggtcggccgggagggtcctgggggtcccgggtgcggcctcgcggggcactaacctcggcgtctgagcctagggtcacgtcgtcgtcgccaaagtggccttggtgctgccggtagagtcggacggcgtccaggaaggcccgggcagcaggggcctggcttcgctgcaggactgagaggggctgctcctcagtgcctgctggtagctcccctgcctggctcccgatggcccggggaggaagccctccgcctggccaggtccccaacacccaagtctcacccatctctggaactttgcataggcaatgccctccacagggaacacagtcccccaagaccatcatgtttattcaacttagaaggaaccctctactggcagccacagccccgtgaccagcagttcaggccatacatactgcagccactagctgttcctctagttgcatcgtttgtgcagtcaacaacctgcccaactgtgtgtgtcagtcctgctgctcccctacttttttctttctctctttcccttcctccctttcttccttcctttccctccctccctctctttctttctttctctttctttctttcttgctttctttcttctttctttctcctttcttttctttttctttcctttctttttccttcttttctttcttctgttctcttctctcctcttttcttttcttttctctctctttctcagggggtctctctgttgctcaggctgaagtgcggtagcatgatcattgcttactgcagcctccaagtcctgggctcaagtgatcctcccacctaagcctcctgagtagctgagaccacaagctcatgccaccacgccactgtgcctgacctattcc

SEQ ID NO: 35487 - DNA, 1115 bp, Artificial sequence
  DNA replication origin
acgccgaggttagtgccccgcgaggccgcacccgggacccccaggaccctcccggccgaccgcggcgcccatggccccctctcctgcaggtgctgaccgcggtgctgatgcgggagcaacttcccgcgctgcgagcccagacccttcctggcctgcggggggcaggccgcgcccgcgcctgggcctggaccgaggtatgcacggcgtccggatccgggatagggggcgggatgcgggcgttcgggttcccctcccacgactgtcgcctaaaccctctcccgatctctctgacccccatccccgccccgtgtctcggctttgtcccccctcgaccggtctgggcagcttctagacgccgttcacgcagctgtcctggccggggcctccgccgggctctgcgccttccagcccgaaaaggacgagctgcttgcgtcgctggagaagacgatccgcccggacgtggaccagctgctgcggcagcgggcgcgtgtggcggggcggctgaggagtgaggccctggggcggagcctgggctgggaggggcgaggcgatgctggggaaaaaggggcgtgacctaagcgaagaatgggcttgaagttatgtaaaatgggggcgtggtcagagaggggcggggccaagcataggatgtgcaagggaacgggtggggaaggggcggggccaaagcgaggcggtgggcgtggtcttgtggtcgaggcactgggggcggggcctagagtctgtccggaggaaaccaggtcctaagggggctgcttggatacaaaaagggcggggcctcagcgggggataggcgtggccttgaggctgaggctcgaggagttgaggcccagagccgggccaatgcgggtgggcgggcctgggaagtagaacagcggaggaggggcgggggtaaaggctgatacatgggcagcggtgggccaaggtggcccctacaaagacccaggtgggaatcctgactgggcccgcccctccgaggctcagttttctcatcattacaatgggtagaagagggcgctcagcgtccctgctcgcgtccccctcgcgagggcccctgcacatccccatctgtgaggcaccttgcggaggggactccagac

SEQ ID NO: 35488 - DNA, 790 bp, Artificial sequence
  DNA replication origin
tgaggctcgaggagttgaggcccagagccgggccaatgcgggtgggcgggcctgggaagtagaacagcggaggaggggcgggggtaaaggctgatacatgggcagcggtgggccaaggtggcccctacaaagacccaggtgggaatcctgactgggcccgcccctccgaggctcagttttctcatcattacaatgggtagaagagggcgctcagcgtccctgctcgcgtccccctcgcgagggcccctgcacatccccatctgtgaggcaccttgcggaggggactccagaccagtgtcttccactcccagcggatatcaggggaccgctcgagtcgtgcctgcgccgggaggtggacccgcagctgccccgggtcgtgcagaccctgctgcgcaccgtggaagcctcgctcgaggcggtgcggaccctcctggctcaaggcatggaccgactgtcccaccgcctgcgccagagcccctcaggcacgcggctgcgcagggaggtgagctcccgtgggtaggggttcagtgagccagagggtgatgtgttaacttgagtctttcctgtggagaatcttcactgaatttgttctaggctgctttttacttattgtggacccatcaccatgctatggtcagtggagcacagtttttgtttgttttttgtttttgagacaggggtgtcgctctgtcaccctggctgaagtgtagtggcacaatcttaactcactgcagcctcgacctcccgggcttaatcaatcctcttactttagcatcccaagtagctggaa

SEQ ID NO: 35489 - DNA, 1763 bp, Artificial sequence
  DNA replication origin
gtgtgagccaccatgcctggcccaccactattgtattatgagtttctttggtgacagctgagacgggatgtattttcatttgtgtttctcctttggtgaattggtaatggggtccctggccctttgcaatcagctgacagcatttttcccccaaaactgcttccgggagcacaggtttactcatttggggagatgccgtgggacttggcgctgatgcagacatgctaccgtgaggccgagcggagccgggggcgcttggggcagctggcagcaccgtttggctttctggggatgcagagcctcgtgtttggggcccaagatcttgcacagcaggtgagggtgagaggaggctgggatgaggccaggctgtgaagacagcctccactgacctcctgctaagtgtgccctggagagaccacgatgatcgagacaactccgcggggctgccagtctcatggggacatgagcccgtgaccaggcagcagccacatgtggtggacagagctggggcagggtgtacagggagcgccaaggatgttcctgatccacctctggggttgacaggactttcaggaggaggggacttccaacatgggagagcaatgggaggaatggcgttgccaccagtcccgagtgaatagtgttgagagtgcttgtctgcatttggggaacgtggagcaatttttcagaaatggggaagataggccggcgacatggacgggcagatcgcgcagtgccttgagcgtggggctaaggggtgagctctttcctgagggcaatggggagccagagcaggtatgtgagcagggggagggcatggctggatttaaggtttaggaagctttgcctgccatagggagcacaggctgttggggacaggaaaagaggaggcagggaggaggcctgcaccaggatgggggatgtcagtggggagaagcaataagtgttttgaagtctgagatgggacctgctgatggacatggtgacagaagaagacagagagtgagatgatccagcactacctggcacagttgttcagtttgtgcactgcacaaaagcactcagtggaggaggctgaactctggctggctccctactccccattctgggcatcctggcaccatctcccagagggaaggggctttctgtcagtttgcacatagtcccccacagactagacaatccccaggtcctgagaggaggggaaaggtgtttcctgggacaaggaggaggaggttgggcagaggtggctggttggaacaggttggatgctgagaaggggtcagctgggcaggagtggggcccgggaggctggagcacagattctggggtcatcatagcatctcctcccacagctcatggctgacgccgtggccaccttcctgcagctggctgaccagtgtctgacgacggccctcaactgtgaccaggctgcccagaggctggagagagtcagggggcgcgtgctgaaggtgtgttctgtgggtacggggtggcatggggtggcagtgggcctgggtgctcagatggttgctggacgcaccgctgggtgtgttgtgcagaaattcaaatcggacagcgggttggcgcagaggaggttcatccgaggctggggtctctgcatctttttaccttttgtgctgagccaactcgagccaggctgcaaaaaggtgagttaatgggaagtgtgcaagagggtctgacagcatcaccatgcatccacttaaagtgggcaagaatgctctttgaggctgggcgcagtg

SEQ ID NO: 35490 - DNA, 1351 bp, Artificial sequence
  DNA replication origin
cctgggtagggctgcaggtgacgtcactccgggccttgggactcggagagcgtctggaggcggggcctggacttcacgcccggcgcgctcctcccctttaaggcgcgcggccgggcggggcccctatgacccctttaaggcgcggccagagtcctcccgcagaaaaacgacttaaaggagacgcgtggcgcgatggcggcggccccacgcgcgggccggcggcgcgggcagccgctcctggcgctgctgcttctgctgctggcgccactgccgccgggggccccgccgggcgccgacgcctacttccccgaggagcgctggagcccggagtcgcccctgcaggcgccgcgcgtgctcatcgcgctgttggcgcgaaacgcggcccacgcgttgcccaccacgctgggcgcactcgagcggctgcggcacccgcgggagcgcacggcgctatggtgagtcgagcccgctgtccccatcaggcgggtcacgcgagcccctgcttgctgtccccataggggtgggtccacgcgagcccctgcccgctgtcctcttctgggcgggtccgcgcgtgcttcctgctcgctacccccatcgggacggttctacgcatgcccctgcccgctgcccccatcgggacgggtccacgcgtgccccctgcctgctgtcctcccatggggccagacacagccctccccacaacacaagcgggaccgagttcctcctgctggctcctttggggtgggctgggcaccgcttctgcctgctggaccctactagggcagctccggcctcactaactggggctctaactccctctggggcacgtacacctccaaaggacggagcccagagcccccactggggcgttgccagaggccacatctaacagcaagcctttctgtgccggctgctgcccttaagcttgaactcagcctggctccaggccccagtcaaacccctgccctcagaccggcgtgggtggagtccaggaccagatggcccaggaggaagtggatgctttcttggtagggaatggggcagagctctgaagaaacctttgactggtgacttctcactccctgcctcagttttctcaaatggaaaatgggtccgggtgcagtggctcacgcagtaatcctagcaatttgggaggccaaggtaagcgggtcacttgagctcaggagttcgacaccagccttgccaacatggcaaaaccccgtctctagaaaaaaaatacaaaaattagccaggtgcggtggtgtgtgcctgtagtcccagctattcaggaggctgacgcaggagaatcgcttgagcccaggagttcgaggctgcagtgacctatgattgcacc

SEQ ID NO: 35491 - DNA, 947 bp, Artificial sequence
  DNA replication origin
ggaaggaaggaagctcagtggggtccagtgcagtggcccacgcctgcgatcccagcactttgggaggcagaggtgggaggatcgcttgaggccagcactttgagaccagcctgggcaacacagtgagaccctatctctacaaaaaatacaaaaacattagctaggcatggttacatgtgcctgtagtcccagctactcaggaggctgaggcgggaggatggcttgagcccaggagttaaaggctgcagtaagctgtgttcactccactgcactccagcctgggtgagggagtgagaccctgtctcaaaaaaaaaacaaaaacccagaaaggaactgggtgggggcagggagtccatgctgcccagggctttagggagtagataaacagcaaagccagtgctgggaccaagactgagtcagtgagccagggaacaaagcagtgggcgtccccagaagaaaaagggagtgaaagaattctaggtacagggaacggcttgggcaaaggtctgagaagaggattatggcctatttgtaaagctgagggaggctcagagtagcttaatgctgcctggctgggctggaggcagggactgagggcctgtaattgttctggggcaatggggagccatagagggtgtgtgagcagaggcaaagcccaatcagactaggagcaggggaaagatgctcacctgggctcctctgctggccgccactccacggaatggtacaaactcttcacggccaccagccactcccgcagcacagttgacgtgttatccatgttgtggtccgtagccaccctgcagggagaggggacaggcagcgtacttggggagactgaggcaggaccaggcagcagtgaggcaagtcaaggaccaccatccccaactggcctcccaccagctatgtatccctggacaggacacttctccctttcctttgttttt

SEQ ID NO: 35492 - DNA, 1674 bp, Artificial sequence
  DNA replication origin
ggagtgcagtgtcaccatcatagctcgctgcagccttgaactcctgggcaatccttctgcctcagcctcccaaggagctacagatttccccttttaaaagcacacaagccatgtggattagggcccaccctaatgacctcattttaactcgatgacctctgtacacaaccctgtgtccaaataggatcatatcctggggtactggtggttggcactggggagacacagttcaccccatgacatagtgcatgatctcatgacatctctttgtgaaacctctcagtggcttattggcccattttatagatgaggaaagctgaggcccaggccaatcaagaatatacagcatgccatcatttcttggttcattctacaagcaattactgagtgcctgctgtgtgccaagcccctgtgttgggcactaggggcccagtgtgagcagacatacctggtgtccttcccaaagggctcacaacagacaggcacagggccagggggttagggcagcaaggatgcgagctttggtggtgcaagtccaggtgctgctggggcccagaggaggtgcctggctcagcctagggaggtgggagtggggagggtgacccccatgcccagggcatcatagctgagaagtaacgttacagagcagggaaaggaagggtatttcaagcagggatccagcatgtgcaaaggccctgaggtaggaatgggggttctttgggttggcaggggcatagaggtggggctggggggtagagtgaagctggagcatggggcgtggccagggcttagaggcagggttgggggcggagtgaagctggagcccagggcgtggccacggctgagagtcggggctgggagcagggtgaagctggggcctggggtgtgaccaggacttagaagcggggctgggggtcggagcgaagctgttgcatggccagggtttaaaggtggggctgggggggtgcagggtgaagttggagcctggggcatggccagggcttagaggcaaggctgggggaggctgtggggtgaagctggggcctggggcgtggccagggctgagtggtgcggctggggggcaggttgaagctgtagcctggggtgtggccagggcttagaggcggggctaagggcagggtgaggctgggacctggggcgagtccagggttgagtagcggggccttgggcgcggtgaagctggggcctggggtgtggccagggctgagaggcaggactgggggcggggtgaagctggggcctggggtgtggccagggctttgggctgctgtgcagggttcaaatgacatgggaggggctcctagagggcagcgctgatgtgggcggagccaggtcgactttgtgggccgagccagtctgactgggagccatggagtgggtggggaaagcgtgttggagagaggctggaggctccttaccccagcgactcctcaacgtctgtgccccacagtgaagcacccgcccgcagagccctcccgcttcatctcggctcccaccaagacaccggacaagatgggcttcgacgaggtgagctgggccttccctggaggcggggcgggggctggagggcccttgtttgcaggggctgatctggctggggactctccgggctgcaggtcttcatgatcaacctgaggcggcggcaggaccggc

SEQ ID NO: 35493 - DNA, 1360 bp, Artificial sequence
  DNA replication origin
tgggaggggctcctagagggcagcgctgatgtgggcggagccaggtcgactttgtgggccgagccagtctgactgggagccatggagtgggtggggaaagcgtgttggagagaggctggaggctccttaccccagcgactcctcaacgtctgtgccccacagtgaagcacccgcccgcagagccctcccgcttcatctcggctcccaccaagacaccggacaagatgggcttcgacgaggtgagctgggccttccctggaggcggggcgggggctggagggcccttgtttgcaggggctgatctggctggggactctccgggctgcaggtcttcatgatcaacctgaggcggcggcaggaccggcgggagcgcatgctgcgggcgctgcaggcacaggagatcgagtgccggctggtggaggccgtggacggcaagtgagtccgaggcctgggggtgggggggcgggtccgcacgtggatgtgggtgtagacctcgctggtagacggcaagtgattcagatgggggcgggcgtggtgtccaaacagatgtagacctcgtcagtgggcgtcctgaaggggaagtgaatgggaccctggggaaggggcagatcctcacagttgtagaccatggaaggcaagtgagtcctgacccaggggaatgggtaggtttgcatgctgccagtgtagactggtggggactgtggaggggtaagtcagtcagaccccaggagaggaggagagcaggtttgcccgcgagtgtataccatgtgcaggtgagtgaggccccatgtgcccggaaggggtgccagtgctacaagaggtggaccagctgctcaacgccgcagggggtggtggaatggccggggatggcagaatggcaggcagggtgaaccttcttcgtgaccctctcctcctcctctccagagccatgaacaccagccaggtggaggcgctggggatccagatgctgcctggctaccgggacccctaccacggccggcccctcaccaagggtgagctgggctgcttcctgagccactacaacatctggaaggaggtgtgtcctgagtgatgggcggggccagagttatgactctagatctcatcggagatttggacgggaaaggggttgaaagagttccccaaagccccggctaggcatccagcctcagccatgggacccatggcctctctttagtgaatgatgcgccacaccagctgtatcacccccaggtgtacctgccatccttccattgcgcaaatgtggaaactgagcctgggggtaggggtgagcccttttgagcagcaggtggtgtctggggcctgggacctgtaaacaaatcctcattactcccagcct

SEQ ID NO: 35494 - DNA, 1572 bp, Artificial sequence
  DNA replication origin
gaaatcatgccattgcactccagcctgggcgacaagagtgacactccatctcaaaaaaagaaaaataaaatccgggcgtagtggcacatgcctgtaatcccagctgctcaggaggctgaggcagaattacttgaacctgggaggcggaggttgcagttgagatcgttccactgcactccagcctgggcgacagggcgagactccgtctcaaaaaaaaaaaaaaagaaaaagaaaagaaaaacttgttatcgaatgtgaagccaaatgggggtgtgcggctgcaaggcgggaggtgcatgaggcgtgggcatttgaggggctgggaggcctttctcttctgagatccattatggacggcagagggcagaggtttggatgtccagatgtccctggagctaggagaggcagggagatgcactggcttctctacgggtctttcaaaccttctcaaagcaaagctctgtgctttagggtcaggcctggccttggcctccctgtgatgtggcggggcttcctccctcaggtggtggaccgggggctgcagaaatcgcttgtgtttgaggatgacctgcgttttgagatcttcttcaagagacgtctgatgaacctcatgcgggatgtggagcgggagggcctggactgggacctcatgtgagtgggggtctgaggatggggtgaagctggggcctggggcaaggccaggacttagaggtgggggtgggggcagggtggagctgggacctggggatgggtcatggcttagaggcggggcttgaaggtggggtggaactggagcctaggtacatggccagggcttagaggtggggctgggaggcggagtggagctgaatcctacgggcgtggccacagcgctgcagctgagcctagagcctgtatgtctgggtgtggtcagggtggcaggcgtggccaacccttggaagcgtagcaggagggctcacgtggttcctgggcctgaaggcactgtcagggctgtagcctatagggaagggcgttggaaggatcacccagaactcaagggacctggccggaagcctgcaggcttggtcaaggcttagagacttgactgaggcctgtggaggtggatgtggctaaaatttgaccgggcagcctgtgggcgtggctgaagagcatgggggtgtggtcagagctggaggtgtggccgaagagtgtgggggcgtggccagggcgcctggtcttagacaagcccctggatgggagtgccaccaacatgtttccagcactggagccgtccttctcttctgtaagtgggctggtttgtcctctcccttcctccatctcttttttcccttccatgtgcagtgccctaatctgcattctgggaacactgccccatgtgaatagtaactgcacccctccattcctgactgcccccccatcagggcacctcgcccacctccacccccactgtcctctgaactcagagcagcttcagcctcagagaacgtctgcgtgatcctgctctccccagctccagatcctccatggctccctcacgccctttggaaaaactcactcttctcccccatgacc

SEQ ID NO: 35495 - DNA, 1057 bp, Artificial sequence
  DNA replication origin
tggagggaacaattatgcctcattcactgccgtaacatgggaaccttgcatacagcaggtgcttaataaatgctgggcacatgaacagatgaagagggcttggttcctcccaattccccagggccaagccctgttgctggcatgcagtaggcactccattaatgctgcctgtgtgcacgtgattgcttagcaagagctggctggacaccaccccacacgagagccctctgtggcctgccaaggggtccagaggtggacctgatgtcctcagtaagcacgtggagcctgggccaccgatggctgctttggctttctggctgctacccctcagagttcatcccgggcagcactgtccagtggggactggagcacgtccgagttcttggcctcacggctcagtgcctgctgctcccgcatcttctgggacttggcgcggtcccagtcggtcttgacgtgctcattgttccatacgactgaggtctcggtgtcactcacatagccatcgtctcctgtgtagtgtgtggggtagatgagcagcggctccacagagaaggcatgcaggttgcggagggagaagtgggccttgtactcggacctggggggaggaggaggggagtgaggggcagcaatggcttcaggggacgggacagctggaggaaaaattgggggtgaagaagtcagcggggacagattaaaacgtaagtgtgcaggggatacaaatggagacagatctgcgagggggcaaacggagggagaagtaggcaaaagaagagacatcttctcggaggccgtgagtctcacatccccattctcccaggacagacccaccgtgaaaccccagcccagcagccgcctgcccctctcacactgggtgtttgtcgaacatgacgggcaggaactcgtccacaggcagcatcttggagagcggctcagcagccagcagtttgcgggcgccttgcagggagatcacgtaggccagggtccagtaggaatagtcggcctccaccaggttcctcacgcgaggcacagccttctcggggtgctccacctgcatccg

SEQ ID NO: 35496 - DNA, 835 bp, Artificial sequence
  DNA replication origin
accttgactatgcctttagcttcagccacctttttaagaggaaattgctgggcaggtgggggagggctagtcacggaatgaaactataaactggaccgggtgtgaggaggggaggtgataaaaagattacaaggtggaggagcggaggctgaggaagaattgggacctagctcggcctggtgagcagcagcctggggaggaggggagaggtcagatgggtctgtagaaaaggaagattagaaagactcagggacgcttggggatgggactgaggggacaggagagacggaaagaaggaagacttgggacgagttgcactgggcacagagactagggagggaccgatgtgtaaaagaatgcctggacgtcaggcacctcagactgtttgcctattttacgacaagaattatttagatcttgcaggatggaaaaattgaaagtgccgttttctggctatttggaaccactgttgagtttgtattggggtcaagcagcattgcagaagaaaacaaggcatttaggttttaggtcaggtgtgagtcaaagaggttttaagttcttgagagcacaggctaagggagatggaggagtggagcatggaaggttgcctatagtgaaggaggcaagcccagagaaaagagagagtagagacacagagggaaggggtttgggggttcttaccttccagaaaagccagaaaggggtcagggtgcaaaaataaggggttggggcacagagataagaggtcagggcacggaaataagggatggggcgcagagataagaggtcggggcatggaaataagggatcgaggcacagagataagaggttgggg

SEQ ID NO: 35497 - DNA, 1348 bp, Artificial sequence
  DNA replication origin
cacagtaggtgtggcctgtctcacgttccgcccctccccacgcagcacgctgagcgccgacgcgggtcccgagtgctatgagctgcaggtgtgcgtcaaggactactgcttcgcgcgcgaggaccgcacggtggggctggccgtgctgcagctgcgtgagctggcccagcgcgggagcgccgcctgctggctgccgctcggccgccgcatccacatggacgacacgggcctcacggtgctgcgaatcctctcgcagcgcagcaacgacgaggtggccaaggagttcgtgaagctcaagtcggacacgcgctccgccgaggagggcggtgccgcgcctgcgccttagcgcgggcggtcggccgagcggcactgcgcctgcgcggagggcgctgggcggggagggacggggcttgcgccttggtgggacctccccaggggcggggctcggggggctccacgccaagggtgggctgcgcctacgcccttgactcagctttcccttttggggaattaggaatggaggatgccccgccctctcgggaggccacgcccaagggcgcgacgaaggaaggagccacatccccaacttgaggccacgcccccagcacctagggggcattttgagctgggatgggggaaacctcgtccctatggaggaggccacatcccggggctctggtaccgggaggcaccacctcatgtcccctggaaaagccataagatgggacccagacccctgggaccccagaccaattgccaagtatggaaatctcagctccctcgagggggggccctgggcaaggggtagggctctctggagcgcccctctaggtggcctggggactggagggaccaggatgctggttggagggccccggaataccggagtccctttagatatttgtgcaaaaaataaatggggggaggggggaggatgggatttcaaaagcacatgcgcccttgggcgcccaaaccctgggggccgaggggacggctctggttccccacgctgcccctacttccctttgggagtttgcctctccctctcccccaacaaacccagtcctcatatcatagagttcaacacacccatttgacagatggcaaaactgaggcttaaagagctgcttgagacttggccaaggttccaggtgccataccctctgtgcccctcccttaggcctgtgtgccccatggaagggtgggctgagatcgggatgacctgacacagctccctattgctgctaattccccctcggcctcctccaaggggtgggaattccaggccaagacccctacttcgcctttccttctccggctgccaagcaggacctttgccctcagccct

SEQ ID NO: 35498 - DNA, 1460 bp, Artificial sequence
  DNA replication origin
cttgggtcgagtgtcagcctcacagagcactggggcagggcaatgttgttggatgttcttaggagacagaagtgcagaagaaagtagtcccagctacctgggaggctggggcaggaagatcgcttgagctcaggagtttaaggctgcaatgagctatgattgtgccactgcactccagcctgggtgaccgacatagcgagaccctgtctttaaaaaaacaaaaaactatgggccaggcgcggtggctgacgcttgtaattccaacactttgggaggccaaggcagtggatcacctgaggttaggagttcgagaccagcgtggccaacatggtgagacccccccccccgccacccccatctgtactaaaaacacaaaaaatcagcccggtgtggtggtgcatgcctgtaatcccagctactagggaggctgaggcagaagaatcgtttgaacccgggagacagaggttgcagtgagccgcgattgtgccactgcactccagcctgggtgacagagggagatgcccactcaaaaaataaaaataaataaaaataaataaaaatgcacaggggtaagggtaaatcagagctggttagctggtattatctagggggcctgggagctcttatgggacaagattgaagccagttccatgtcgtgtcagcacagggctcttggtcagaaggttttggggcgattggcccctttaggggatactcaggaggagaagcatggtctagtgggaggtcagatgtcagccagggtgggccggagtacttcagggatagaggtacaacctgggaggtggacaagagggagaagctgggcgtgaccctgtaggaggggctcttatccagctggcgtcagggcaggtcactgggactgcttaggggcaggagcacaggtgaggggcatgcgggaggcggtgtcacccatggtgaggcaccagggcaggctcatgtctggagggcatcttggaagtaagaggggtgggctgggggtgtggggggctggggaaagggccacgtcgtgggtctagaggagagcctggttaaagagcttctgggtgggacattaggggcagggccgtgcgggcagcagttcagccggcagagggcacaggcgcgggtatctcagggtgggagcatggccttgcagggcggtgtctgaggggcgggagctggatgtaaaactatgcggtcatttttcggtgggtggaaaaatgggaagaacaggcgtgggcgtggcccagctcggggtcagctgctgtgggcgcggccaagcacagggttgtaggtcaagtaacggggcaggggcggggctagcgtagcgtgggaggtgacaggtgtgggcaccccggtgtgggcgtggcccgcaaatgcggtggggacggggccgtgggcggggcatcacagtaggtgtggcctgtctcacgttccgcccctccccacgcagcacgctg

SEQ ID NO: 35499 - DNA, 984 bp, Artificial sequence
  DNA replication origin
ccactgcgcccagccttgggcaggttttgagagccacaaacatctactttttccaactgggagaacctgacctgtcttaccctctacttcctccaacagtggtggctgccaatgacctcaagtggcagacttctggcatcttccggccgttcatcgaggtcaacatcattgggccccagctcagcgacaagaaacgcaagtttgcgaccaaatccaagaacaatagctgggctcccaagtacaatgagagcttccagttgtgagtttgggatgctttgaagagcatgggggcaagggagggggcatccgccaggtgaaccccaaagccagctaggcaggaggtatctggaatctgggcccgggaatgggaggggccacattctaggtgggggtgctggaaagggagaccccttagtagtgcaggaatgacatcagggaggggacacgaggatggaggtcacctttgggggctggcagatccaaggggaggcaatgagtagagtggggtaacttcatgatgaagacttgcagaggggagggaaagtctgggcaggaagtgcatggtgggcagggccattgctggggctggagactctgtctggtgaaggaatgagggtggcagtgatgacgcttatgagcggggggctgagggacctggggacaggactgaggttgcatgggggtggggactactggagtctacattgagccttgtcaggaccgttggggcagcccatctggaggagtcggctctggggacaggagtggagtgtagatggatcccaggcttgggggtgggtgtcacgtggggtggaggtggggtcacattggatggaggttcttggagttgggagtgggcctaggctgcgggtatcaggatagggtctagaggatgctgatgatgtggacagcataaaaaagtctgctctggccgagtgtggtggctcacacctgtcatcccagcactctgggacgccgaggcag

SEQ ID NO: 35500 - DNA, 1947 bp, Artificial sequence
  DNA replication origin
agtcttctgttgtacaagaaacgaaagctctggctggatgcggtggctcattcctgtaatcccaacattttgggaggccaaggtgggaggatcacttgaggccaggagttcaaggcctgcctgggcaacacagggaaatcctgtctctacaaagaagacaaaaaaaaaaattagccgggcatggtggcatgtgcctgtagtgccagctattcgggaagctgaggtgggaggattgcttgaacccagcaggtcaaggctgcagtgagctgtgatcgcaccactgcactttagcctgggcaacagaacaagacccaggaaggaaggaaggaaggaagaaggaaggaaggaaggaagggagggagggagggaaggaaggaaaggagggagggagggagggagggagaaaacaagagctcagagaataaacccacttgccatgggcagtttatctgaagaaggaaggaaggaaggaaggaaggaaggagggagggagggagggaaggatggacggaggactcagagaggactcagagaataaacccacttgccatgggcagcttatctgaactaggattcccacaggcctgggccctgttgtaaaaggggccactcaatctatttcatgagcaaagtaactgaggttcagtgcaggaggcgagcagaggagcagccactcaaggctgcagggagagctccaggcagagcaggagcagccatagctccactcgttagtgggtcagaaccaggcggcgcagaggttgaggaggacaagaggtggcagagccccaccccggctcttcattccagatggtttgaacccttcgtcatccagtggctggatgagaatgaggaggtgtcccgggatttcctgcacggtgccctggagcgagacaagaaggatggggtaagaaggcccacccacaaccaagttcctaatcttcccactggggtcaatttaggtggaaatttgcccttgagatgaggccagtctctggtaggtgtccgccatctttgtcttgctcatggtttttaaaatcttttgttcattcatcaactacaaaatgtgagttccatcaagccggacacctccaggcaccccatggcttctgcgtccacctctagagttgactctaagtctacctcgccctctgtccatctcaccccggggaaattggtctctggctctccccgtggagagtgggagagttgggctctagggattctctggtgctgatctcctccttcctcttggcctccttccccctgcagttccagcagacctcagagcatgccctattctcctgctccgtggtggatgttttctcccaactcaaccagagctttgaaatcatcaagaaactcgagtgtcccgaccctcagatcgtggggcactacatgaggcgctttgccaaggtgtgggagagtgggtagggttggggctaggggacagggtcagggttagggaattgaagtctgagttggagatgggctaaggttgaggttgaggttggagttggtgatgtcattgaggttgggattgaagttggagtttgggttgaggttggagttgaagtttgggttgaggttgaggttgagatgaggttggagttgaggtttgaatggaggttggagttggggttagggtttaaattgagattggagttgagattggggttggagttgaggtgtagggtaaggttggagttgaggtgtgggttgagatcagggttggaattgaggtcattagtgcgagttggcaatgctgtttggttggagtttgaggctgtgctgggtcttgatttggaattgagattggagtgagtgctgagattgatgcacaatttgagtgagtcttggggtgagtttgagggttgggatcattggggttgaggtttgattcattggcattaggctgtgttgaccttgggaattacaagtaggaattgg

SEQ ID NO: 35501 - DNA, 1964 bp, Artificial sequence
  DNA replication origin
cagcgtggaggcaggggagggcctgggactttaccgcgctcagtgatggggcggaatggggcaggacagggacagcgccaggttaggcgcccccaaaccgcaccccatccctccctgcagaaaaaccacgtttacaagaagaccctgcaagccttaatctaccccatctcgtgcacgacgccacacaacttcgaagtgtggacggccaccacgcccacctactgctacgagtgcgaggggctgctgtggggcatcgcgaggcagggcatgcgctgcaccgagtgcggtgtcaagtgccacgagaagtgccaggacctgctcaacgccgactgcctgcagcgtgagcgcagggcctgagcgcagggccacgggttggcgtggggagccccggggcttgcatggcggggaaaggctgaagggcaaggcgatgggtggggcaccatggggcggggcaaggggcggggcgtcgtgaggcaggggagggactcgctgaaagggaggggtggggttaaaggcgcaggactccctggtggaagggctagggggtcgaggggtggggaaagaagctgtgagggtgtcagagaggggtggggcagggctcagggactagctaggttgtgcaaaggacaggcttagtgagaagaggcagctcccctggataaaatgggttagctaggggtagctctgagaggaagaggggctcagagagggaaggggttcagactgcgagaggactgtggagggggggattggaagggggaggggactcagaggaggtgggaccaagagaaagggaggggtctgagagatggaaggggctcaggaatgtggaggggactcgcaggggtggagatcagagacgaggaggggattcagaggagtggggctcagagaggcagcgggactcagaggggtgggactcagagagggggcggagattcagaggggtgggacgcagagggggcggggactcagaggggtggggcttagggaagaggccttagaggggtggggctccaaaaaccagtggggactccaaggggtgcggggcagagaagggcaggacgcagggacatggcgactcagaggagcatggctccgagaggaggtggaagggtgaagggtctgggtggggggtacagaaagcaggtaggaaaccggcttcagggggtgacacctgagtccccccggttgatgagtaggggcggggctctcgccttggtgaggggccactatgcagggcgcgctggggtcagcgccggcctcgggcgtcctcaggggctgcggagaagagctccaagcacggggcggaggaccggacacagaacatcatcatggtgctcaaggaccgcatgaagatccgggagcgcaacaagcccgagatcttcgagctcatccaggagatcttcgcggtgaccaagacggcgcacacgcagcagatgaaggcggtcaagcagagcgtgctggacggcacgtccaagtggtccgccaagatcagcatcaccggtgagggggcgtgggccgccatagggcccctccttctccaccctctgagacctgtctcatgccctgtcccatggcctggtccctctcctttgcagcgcgcactcactcggtcgggtgcattccatctcatctccgtgtgtgcacgcatatggggggacatgcgtgcctccaaacgcctgttcatggcactgtatctgggtgcgtcttggatggtgccctccagaatgagactccaagaagaggaattgagggtgcatggtttatctggaaagtgaccccagaaagtcctggtgaggggcaaggacttgagacagggatggaaggagtcctgaaggagatgccgttgagcagacaatgctgtgggcaagggggtcagcccatcctggggccactggggacaatgtcgagcatgcagctcagtgtggccccacttaggggcgaggatactggcttttctc

SEQ ID NO: 35502 - DNA, 882 bp, Artificial sequence
  DNA replication origin
ctttgggaggccgaggcaggtggatcacttgacgtcaggagttcgagaccagcctgaacaacatggggaaacctcgtctctcctaaaataacaaaaattagccgggtgtggtggcacgcacctctaatcccagctactcgggaggctgaggcaggagaatccctttaacctggaaggcagaggttgcagtgagctgagattgtgccactgcactgcagcccttgggtgggccttgagagaagtgaatgctggtttgagccaggttcagattcctgagctgtgtgaccctgggcaagtgaacccctctctctgggccttcatctctgcttccatctctgtcttttttttttctaggtctggtttgttcgctcacatcctcagccccacccagcccccagggagcgcacccacccagcacctcacccctgggactgaaagaggctcaggaacactcaggaatgtgcccagcaggagctttgggcctggctcctggaggaggtccagcctgcaggcgtggggactctctgtgaagggggtgggcaggggaaggggcaagaggtagaatgtgacgggatcgggggtggaggggatgctgacagaggctgagaaaggcacccacagctggagggactcatacagggagaggaagggagaggagagaggaagaaatgatgggcatgaaagcaagagaggagagtctggacagatggagagaaatagagagacacaaggagacagcgagagtaccaggcatagaggcacatgcctgtaatcccagctactaggaaggctaaggcaggaggatcccttgagcccaggagttcaagaccagcctgggcaatgtagtaagatcccatgtctaaaaataataatttaaaaggg

SEQ ID NO: 35503 - DNA, 796 bp, Artificial sequence
  DNA replication origin
gcacatgcctgtaatcccagctactaggaaggctaaggcaggaggatcccttgagcccaggagttcaagaccagcctgggcaatgtagtaagatcccatgtctaaaaataataatttaaaagggagagaggctgggcgtggtagcccacatctgtaatcccagcactttgaggccgaggcaggtggatcacatgaggtcaggagttcgagaccagcctgggcaacatggtaaaaccccatctctattaaaaatacaaaaattagccgggcatgatggtgcacgcctgtagtcccagctactcgggaggctgaggcaggagaatcgcttgaacccaggaggcggaggttgcagtgagccaagatcacgccattgcactccagcctgggcgacagagcaagactctgtctcaaaaaatatataataataataataataataaaagagagagggggaaagatttccactagggagggcaggcaggtggaggagacactggggagaggagaggcagttgggggagaaaagtagggatgcatatgggggtgggaaagtgacaggctctggggggtgatacaaggggctcactggggtctagactgggctgggctcacttgaagctcctccaactgtgccctgttttataaaccatggatttaggctcagcggggagcccagtagctccttgatctgttctctctctctctttcccaatccctgtctctcatctccctcctccccgttctatttctctccactctggtcgtcttcttttggtctctgttctctccttctctc

SEQ ID NO: 35504 - DNA, 723 bp, Artificial sequence
  DNA replication origin
aagtgacaggctctggggggtgatacaaggggctcactggggtctagactgggctgggctcacttgaagctcctccaactgtgccctgttttataaaccatggatttaggctcagcggggagcccagtagctccttgatctgttctctctctctctttcccaatccctgtctctcatctccctcctccccgttctatttctctccactctggtcgtcttcttttggtctctgttctctccttctctctctcactgtctctgcccttcttgtgcccctcccttggtcagtccggctcctcttccctaagcctcagctccttcctgcagcctctcttggctagaggggaatggtctccgttggggtcctcaggcagtgggggaccggctggagggctgtaccctctgatagctgaagccaggctcctgcacttagctccctgccgaggtccaggttgaggacatccatgatttttcatcactggggctcccagtgggagaggggtctcagagggaaaaggggacaggaaagggggccgagagtggcgagggggttctcaggagggaagggtgttcgcggtgagggaggggattcgggaagggggatgggcgcagaggggagggtggtatcgggggagaggcttggaggaggaagggggctcagagaaggaacccagtctctctccctgtcttccccggtcagtaaatggtccctgagtcaccgtc

SEQ ID NO: 35505 - DNA, 1055 bp, Artificial sequence
  DNA replication origin
cggcgtggacgcgggtgttcttaaagggacaggggcctactttctctaagctcgtttctgctggacggggctgggggtggtggaagaagggtccctagagtcaaaggtcaactcctccatcccctagcctccaggcctatggagttaggggagtagggaagtgaaggagacccctaggcgacccccaccgcctaggcctgaggacggaatgggaggagaacttgaatgtccagaccccctactgacctctccccctgctctaagtagccgggctcttaaaggtggcactggaggaggttccgacgtgggtgttcttggctgactcctctatcctctctcttctccccccagcatcccgccccaccccgcctcacatcctccaagttgggcttctctggaaggtttgcctagtggagtgggggggggggggggggggcggggatctcacccttaactctgacgcaaacaggaggctcggctgcgggggtggcattaagggggggcagcaggaggcaagagggatgaggcttccagaaacagagacgttgggggaggactgtgctggattctgtggactttacagggaggggcccggctgagtggagaggaatcgctgggaggggcaaggctggggaagaggttgacaggggtgggaggtaaggccctcaggtgtaaagggaggtgtgaggttggagtgaggaggagtaggaggcagggaggggtggggagagggagaagtgctgggtgaggccagtctcccagggagaggtgggatggtgcccagagaggggaggggctgggatggctgagcacgagagatgttggggtgggcttggcaggagtgaagctaggctgagatgggttgccgtgttgcctgagctcagctgaggaaatacctgtcccccctcccctccaccggggacccacaggcgtttgccaatccctacacacattcatacccagacttgttcctgtgtggacacaaatgcttaggatgtatgaaggctctacgcagaccatgtgcctgggaaggcacattccgtaggcacacgtgt

SEQ ID NO: 35506 - DNA, 832 bp, Artificial sequence
  DNA replication origin
gttggaggagggagggagacgtgggaggggcatgaccccccaccccacacctttatggctctggggtcgtggggaagccagcccaaccgaacccaggcgttctgggcactcccgtttgagaaatcaaactctgggagaccttgggcggcaggggtggatgtggaccgccgttccacgcctacagagctctgaacccctggttcttaaggactggggtccccccgtcactcccacccatttcaagaaggctggggtgggggaaggggtgtgtctgccaagcctgagactgcaggcttcgggagacctcgggcgacaggaagcgtgcgtgtgctgaactcctgctgcctggacacagggtgggcaggccggggagccgggaaccgcccccgccgcccctcctcctccctcccctccccctcggccgattcattcacaaaccctgccccgcccgcccgctccccgccgcggcagcttccgagtgcaaatccggccgggctgggccggcgtggacgcgggtgttcttaaagggacaggggcctactttctctaagctcgtttctgctggacggggctgggggtggtggaagaagggtccctagagtcaaaggtcaactcctccatcccctagcctccaggcctatggagttaggggagtagggaagtgaaggagacccctaggcgacccccaccgcctaggcctgaggacggaatgggaggagaacttgaatgtccagaccccctactgacctctccccctgctctaagtagccgggctcttaaaggtggcactggaggaggttccgacgtgggtgttcttggctgactcctctat

SEQ ID NO: 35507 - DNA, 1496 bp, Artificial sequence
  DNA replication origin
gaggaaacctgcttgggggccgccgtcgccccttgtccccctgcaacgaggaggtgtggggcgaggcgccccttcccggagccaggccctttaacgcccccccagcccgcagcgcccccgccccatcaggcgtccctgggctccgcctgcccgccccgcatcagcgccacgtcaggcgctgtccgcgcccccggtgctgaaccaagatggccggtggcggccgggccccggcgtgagccaagcgcgggctgcagccgggagatgccccagcccagcggccgctgagcccgacccgacagagccggcccggccgcctccggcccacctgcgagctcggagacatgtctctgctttgcgttggaggtaggaggcgaggctgggggtcgggggacccgtgtggacgcgggctggggtcggggtccgcgtggatgcggctcccagggggttcctggggggtgacccgagtccaggtggctggacttttgagaggggtagcccttgtcgacgcagctgggccccggagggggtgatccgtgtagacgcggcagggctctcgggggtcctggtggccgctgctggaggggtcgtgtggacgcggctgaacgcggaggcccgtgtggacgtggacgggtatccggggttctacccggaaacgatctagactggggcgtctgtgtagaccaggtttttagagggtcagtgaggaagagtctgggctcggtagtttgattgaagcctgcaggggtgcttggaaggggtctggtgttgtgggctgggttacgggtcctcatggacgcggacccggctggaaattcgaaggagagtgcggtgggagggttctccaagccgtggggatgtaagatataggtagaggggcttggccatcagggcatccacgagttctaggactctcccagccctaggtgtaaagaggactggagtggggggagtgtggagacaggagacccctcccagcgtccagagagggctgtgactggaggtctgggggcgcttttccagttaactctttggcctcccgagtgagggggttggaggaatgtccagaaggtcttcccgctccctgccccctccggttctcccaaacacgtttcagggccttctcggcagggagcctacttcttggaagagcaatgtctcctggtccccctcctggcccatcctcacctcacccactttgcactggagagagggagggagggagacgtgaggtggggggggagctattttggggccagaacgccatctgcacagaggcccacgcccaggcccacgctctgcgttggggttggaggagggagggagacgtgggaggggcatgaccccccaccccacacctttatggctctggggtcgtggggaagccagcccaaccgaacccaggcgttctgggcactcccgtttgagaaatcaaactctgggagaccttgggcggcaggggtggatgtggaccgccgttccacgcctacagagctctg

SEQ ID NO: 35508 - DNA, 994 bp, Artificial sequence
  DNA replication origin
agacagagtttggttttgaacaatggcctcactcaactccatgcacattctgcatttatgaagctctttcatgtgggctgggggcaggagaccctgtggggctcagcctttcatgctagtttaggtgccagtgatacagcgagcaggttgcagggcaaggggcccacatggagctgcccagtttgatatgtggggagggggccaggcgcagtggctcaggtctgaatcccagcactttgggaggccgagatgggcggatcccctgaggtcaagtgttcaagaccaggctggccaacatggtgaaacctcgtctctactaaaaataaaaaaaataaaataaaaaaaaaaagctgggcatggtggcatgcgcctgtagtcccagctactcggggaggctgaggcaggagaatctcttgatcccaggaggcagaggttgcagtgagccaagattgcgtcactgcattccagcctgggctgcagagggagactccatctaaaaaaaagaaaagtggggaggagtggcagagtttcgttcgggtcagggcccaatcagaggaagggataggggctgggggagtccagagaggagaaacaaaggctcagcttggggcagtcagggaagccttcctggaggagaggatattcagacaagacattgatggatgaaaaggagttcagagtgtgggcaaggacccatgggctggatggcttagagacatagagagagacctagacaggatgcagtagagctgcaaaaagactttacagagagaggctaagagacacatgactgagagagcagtggacagagtcagaggaacagagacccagggagagaaagagaccaggcagtagagttagagagacagagacgtagagacagaggaagagagatactcagagaacaggaccatctgcccggtgctggtgccgggcgtacacacaagagcttgcatttgcctgtacttgcttgagtattgcagggaggcgtttg

SEQ ID NO: 35509 - DNA, 1293 bp, Artificial sequence
  DNA replication origin
caagcccaggcccgtgtcccctcccctatcttcacccggagttggggcggggcagccctgcccagcccaggcccggatgccactttctccgcgggcacccacgggcaccccgcctttgcccgcgtcgtgcgcctaacggtgaaggggacccagccccaggcccgcgacccccgccccggagcccgggtcccgccgccgccgccgccgccgccccaccccgccggccccgggcccagacgcgcgaacgggcccgcctcccgggctcccgcgggcccccaggccagcccgacctctttcgagctcctccaggacgtaggtgaggagccccgggctcccgaactcgctgcccaccacgaggagcagtgagctcggagccgcggcagccccagatccagccaccgccgccatcttcgggccgccccggcgttctcggcgcccgccccgcaggccccgcctcttaaaggggccgcaccggaagggctgaagaccccgcccggaaccaccgcatccccgcccctttttgtcgaccacttacaggccctttgaggtcgtggagagcaggggatgcgggcgttaaaggggttggccgactcctgggtgtccgcttgggagccgcctctcccaagtgaccattcattcattttttttttcattgaacaagctttgattgcgtgcctgctgcatgtaggtcagaactcctgccctccaggaactcacatcacatgacagtaggccgcatcagaacccggtgcctatggatgctcccagctctctaggtcagggcttgaacagagaaaagaaatctatcttgtaggtagggctttaagggatgtgtaggagtttgccttgtgggtggtggggcaagagctggtgaggcagaagtttacagcaggtgcaaagttttagaggtaagaaagtacatgtgtgtttgggacacaaccggagcactctgggcctgcctggaacagggcaacacttattctgcacctcctgtgcgccaggtattttattgcattagctcattacatacaagcacaaagcgatgagttttgtgcttgtatgtaggcacagatgagtaggcacagttactgtggtcactttcagaggaaagaagaggaaactgagatttggagggatgaagtcaccaggcctgtaagtggtagagcaggtttgaacccaagtgggtcttactctagatccagcctgtgcaagggactgcctgcgttgcgcacatgggtacctctctctccccagataatcctctttaggcttttctttcctttcctcccctct

SEQ ID NO: 35510 - DNA, 2226 bp, Artificial sequence
  DNA replication origin
gcggtggttccgggcggggtcttcagcccttccggtgcggcccctttaagaggcggggcctgcggggcgggcgccgagaacgccggggcggcccgaagatggcggcggtggctggatctggggctgccgcggctccgagctcactgctcctcgtggtgggcagcgagttcgggagcccggggctcctcacctacgtcctggaggagctcgaaagaggtcgggctggcctgggggcccgcgggagcccgggaggcgggcccgttcgcgcgtctgggcccggggccggcggggtggggcggcggcggcggcggcggcgggacccgggctccggggcgggggtcgcgggcctggggctgggtccccttcaccgttaggcgcacgacgcgggcaaaggcggggtgcccgtgggtgcccgcggagaaagtggcatccgggcctgggctgggcagggctgccccgccccaactccgggtgaagataggggaggggacacgggcctgggcttggggacccttgcagttggaccacggctccgcttcccgcctgactggcctgcccgggggtagggcctggggtcgctttggatctccaggtcttagcagcttagatagagatctcccggagggagaagcagatatgggggaggctgggcctggagccccggggcccgctttctgttgcctcacaaggagctgctaattggggtgtgggcgggtgcggcctgccctggggatttggcacctagggaggtgagtcataggcgcacctgccaggttcacctgcagccacttggctcagtgggactggcgggcgtgatgcgcccgtgggtggagatgggtgttcatcccccatccctcggagcatctggacctggcgtttcattgcatgtaaaatgggacaggaacacgcacctcggttcatgtgcttgaggagtgtttagtgagcacctgctatgcgccaggcctttgggcagtggacacagggatatggccgggatgatagacaggttcagccctgccaacacaggtctggtttggggatggacccaaagcgagtgaggagatggaacaagcttccagctcacatggtgtcaggaaggatgagaaggctgcaagggactgagaggacagtcagtcttagcacccgaaggtgctgagggggaagggccccctggccagtaggaacaggtgggggcggcagggggatggacttccaggcaggggaaacagctgttgcaagggcggtgagtggaaacgggtctggcagggcataggagcagcgaggaggtggagatggaggaggtggaggctttgttgctgatgaatcttgtgtgtaaaatgatgaggtgtgctctgggtcccctggctcagctgcagcgagacctgaaggtgttgggtacttctgagtctccaagctgtgagtgaagggaggaggctggggcgctccccacccacggggtgctaattattgaaatattctgggagctggggggcccggctgaactcccgccttgatccctccttcccaccaggcatccggtcttgggatgtcgatcctggcgtctgcaaccttgatgaacagctcaaggtctttgtgtcccgacactctgccaccttctccagcattgtgaaaggtgaggctggggtccccctgactgctccctacctcttgttatttggggaagtgccagccgtgtgccaggcatggggggtgggatgcagctataaataacaacagtaataatacagttgagacctttcaaatgcaagccgtgacccagtgataaccccctcagtcctcagcaacccacagtgcaggaactggtgtttttgtccctgattgacagatgaggaaattggcattgaagggggaagaggcagggagatctctgaggagggggttttttgatgagaaactgctatgactggtgtgtccagtggaagggaagggccccagtcaagacccagcagtggacagaacatctagaatgaaccgggcgcggtggcttacgcctctgatctcagcactttgggaggccgcagcgggcggatcacttgaggtcaggagttggagactagcctggccaacgtggaggaaccctgtctctactaagaatacaaaaataacggcatggtggcaggcgcctctaatcccagctactcgggaggctgaggtgggaggatcacatgaacccaggaggcagaggttacagtggggctgagactg

SEQ ID NO: 35511 - DNA, 2043 bp, Artificial sequence
  DNA replication origin
ctttgctctcggctcgccccggcccctccaggtcctggggcgtcaccacgggctctcgcaggaacctcaagtgctgcaggcggaccaggccgtccaggaggcaggcgggcggggtgcaaccggggaacagcacgcgcaccaccttctcgccggggccggcggggtgccacaccagcagggcgcacacagaggccagcgtgcgctcggcgccggcggagggcgggtgcagcacatacatgtccagccggcccacgcccatcttctcgaagagcacggtgggtttggctggcacggggccgcggctgagtggcagaggcgtgatgcccagctgcgccaggaggctcagcgccagctccgcctcatcctcgccgcgcgccagccgcgacgcggcctcgcaggcgttgaagaacacgacccccaggttgggggagatgagcctgcgcagcctgtcgtcccaggagcccccaccagcagccacctcggagcgctccgccagtttgcgccgcagcaggctgttgaggccggggaggctgtcggcgccagggtgggtcaccagcacggcatccacgcggtccaggtgccgcaccagcttccagaaactggacttggggtttgagccaccgttgaccagcacagtgaagccattgacggcgaagaaggcggcatccccgaggcctccagggaagatgtagcagcagggccggcccagcctgaggaagcccccggaggtcgggggctccagcagctcgaagggggacggtggctccagagactcagccacgtactccaggaattcgcacaggccctcagagttgggcagctgcgccggggggttcagccgcagctggagccggagcgccccctgaaggccaggcacagcgggtgccagctgagcccagtcaccgaaggtggggcaggtgatggtgagtatgggcggctgcacaggtgggggcgtggtggccaggatgtcccggatctgtatggaggaggagtggtaagggaccacctagagccaggcaacacctagcccggtgggaaaactgggcgaggacaccctcatcctttcccccagggcctgctcctcagggccctcccgccaaaacccaaccctctccagcgccacaaggctctttgatctggcctcacctcctgtctctccctccccttcaaatgcctccctgccccagggcctttacactcaccattctctcctcccagggcacagctccctccaaggagactctccacgccccacctgtctactgaaccttttctcaccatttttaagtgccccactacaatgtgaaagtgaggtttgccattttgcccatgtgtcctacccagactgcgggcaccaggaaggacccatttggctccatccctcatcaggactttgggacatctgctgacctacaaactcagctcacaccacaccctttcgcgggcaatgggactgaccccagacagccaggaggcatgtgtcaccactgccatcctacagaggatggggagaccaggccatggaaaacagcaggtcgctggtgccacacagcctgatacaccccagtcaggattcagagctggggaagcaggggatggcaaaggggtggcttacctctctgtccttcaggacctggaggaagtggtgaggcgagaagccccctgtctgtagcagcagctcccccgtctcctccaggcagggcccagccaacaccagtagcttgtgagaggcagggtccaacagaaggttccggagctgagggagggggtgaacactaaaggacccgttctgtgcagtgacgtatccagcagtcctctttggggtagcctcgagtcgatacataaccacccctctcctgtcctcaccccacgaccagcccagtgctcaactagctacgaaggcagtctccaggtctcctgctgggccctggagcaaccctagcaaactcctattcatcctacaaagcccagctctgatgtcccttcctcctgaaggcactacttgccctttctgggctctctctagtccacctctccctccag

SEQ ID NO: 35512 - DNA, 2554 bp, Artificial sequence
  DNA replication origin
ataggaaacctgggcatgctgtgtctaatgagcttccatgagggacacactgttacaacttgctactggagaaatgaagcctgtggtgtgcagccccactgggagaggattctggaagcttctgcctggtttcctttggacttcaccctatgtgccttttctctttgctgattttgctctgctatgagtgcaaccataggccgggtcctcctaaccaatcagttacataaaatacgctatttaaattttcaactgtttcattttacttattgtggcttctagaaacccacagttggcatacgtgctcacctgtccaggcacctcagaatggcaagtgcttcaacactgaggtcagtttccatttcacaggagaaactgagccccggagaggtgggcacggctgaggtcacgaagtaattacgaacaggaggacttggctgggtgcagtggctcatgcctgtaatcccagcactttgggaggccaaggtgggcagatcacctgaggtccggagttcgagaccagcctggccaacatggtgaaaccccaactctactaaaaatacaaaaattagccaggcgtggtggcaggcacctgtaatcccacctactcgggaggctgagacaggagaattgtttgaacccgggagtcagaggttgcagtcagccaagatcgtgccattgcattcttgcctgggcaacaagaacgaaattctgtctcaaaaaaaaaaaaaagaacagaactggcagggcaccgtggctcacgccagtcatcccaacactttgggaggctgaggtgggcacacagcttgaggccaggagtttgaaatcagcccaggcaacatagtaagaccctatctctaccaaaaactttaaaattaggcaggggtagtggcggtgccagtagtcccagctactggagaggctgaggtgggagggtggcttgagccccattgttcaaggctgcaatgagctgtgaccacaccactgcactccagctcagagacagagtgagaccatctcttttaaaaaaactgaaaatgtaaaaacagggggacgagctatgctctccagcctaagcagctgctaacccagcccagggccccagctccagtactcacccgacgggcctcgagtggcagtcttgggggttgaggactttctggacaggggtgcccggcctcccttctcactgggctcactccgggcactgagtggtcggctggcacggtccccaccagcaagccccttggttttggcagcagccactggagtggctttgggggcggcagcgcgtgagttggggcgggccaggggcttccgggtgcggctgacgttctccgtttgccgtgctgtcttggggggcagcatctcggggtccaccatgcagatgctggatgggtcaggcagtggtggggggaccttgagggggtcaggcaaagggtcgtggcgagggactccaaagccctctgtgtcttcgtctgagtctgccgcaccgggggccaggggcacgggatccgagtcagacagggtgggcagggactcgctgaccgatgtgggtggcgtctcctcggcccccagcccacctgcccgttcctgtgaccgggcactgctgtcattcgagctgccgggggacgcaggtgccggtgccattggcaccgccttgcgatgctcaaattcacagggtgacaccaggcacaggtccacatcgtgtggggaagccgagcgccgcgcccgggggccacgcagcgggaggctcagcccagcctcactggtgggggcggatggcggcagcacctgctcaaaggacaccgacagggactcgtccacctcggtcgagtgcggggagcccacctctgcgggtagtgagggcgtggtcaccgtgggtgtggtcactgtgggtgaggcgtctggcccggcctccccgccccgcagtgggctcagcgacagccgctcgctgccctctgcggggctccggtgggactcaggggagggtgtgcgtggccttgggattgagctggcggccaaaggcagctccagtgccttctcctccccggctgggatcggccccagctccaggctgggcgtggccaccagctgggaggccggagagccgcaggctgcactgggggggctggcttctccacatcggaggctgggcgggctgcggggtccatttgccaccggcgggaagccagagtgggacgtgctgggcgctttgcggggcttgggtgccgcctgggcattcgtcttcttgaggttgggcacagaagaggctgcccggcgcacctcccgcggctgggtccgggagacactcggtttggggtctttcttcaactcccggggggtcttggcttctttctcagtcttgcgtggggcctcagcccgtgctggctccttgcgggccaccccagggcgctcctggccaggtctagggtgggtggccaggaggccctctctcttcgagctgtcccgggagcccacgctctctttgctctcggctcgccccggcccctccaggtcctggggcgtcaccacgggctctcgcaggaacctc

SEQ ID NO: 35513 - DNA, 2804 bp, Artificial sequence
  DNA replication origin
ctgttcgctcaataaacgttggtcgctccttactccttaccactgagtctcagggcgaaagagtggcgcctgtctctttaaattatgcaaatagactgcgggtggcgtaagggggggaacataaaaaggagcctagtcttcggctggaccaatcagcgcgctgagctggcggagctgggcgcctaaatggcccaatggggggccgcgcgggatcagagcccgccctgcctcctggcgccgtcgcgggggtggggactttctaggccacgccccgggggcggagcccgccggcagccgcgccgcagccgcggagggaggggcggggcgggctccggtgtcagcgaccaagccgcaggtggcggcgagcgcggggctcggcccgagctcaggaggtgagtgttgccccccggaaccccctgggataccctggcccgcgcagcctcccacgcgcaccgtgccctgcagccccggcggctgcggagggcaaaggcgcggcgggacgcgagggatggagagcagggggttggggctacgcggtgggcgccccggcttccccctccaagtggtaattgggggtccgcaggcgaaaatggggaccgctccccaaatcccccgtctcctggcctagaaccgagcgtgcacgggggcggcgacgacgcgagacccctccccaaattcttttattctaagcctaggtctgggttctggggctgcaaagatgggggcgccgctccccttccagcctggaaccctgggcggtggctgagatggggaccacccgcagattccctcttcccagctccggcctgcagaccaccggggaccgagacgagggaccccttcccttttcctccactgtgaacccctatccaggcctggtggctggaggagctggggtgtcacctggcccctcctctaatctgccccatcccagtcctccaccttaaggatggggtggggggcgtttcactggcatcttctgtggggaccccaaggttggaattttggggaggaggtcactgtggggtcccctgcctggcacggtttatccaggccaggccttgaagggcctggagcctggacttggggggggggtccctcttttactgaggggcggggtgtacagctagcatctgtttctggggattaaaataaatcgaggtaaattaggatcttgccagaggctggctgtgagtggggtgcggaggaggcttggggggtgggggacccctccatctgccttggatcccccgagtcacctgccccagctgcactggggaccaggaggcagtgtcgaatggacctgcttcactggtgaccttgggcaggtgacagcacctttctgaacctcggtttcctcttttgaaaattgaggttgggagcttcggaccctgcattttacagattctgaactcacccagcccacattttgtccaatggtgattcactcttttgcttaacatgtgggtggtttggggtcaagacagcattgggtttggagaccctcccacagtgccttgctatcctctcagcctcagtttactgcactgcaaaatgggttgatgatgacactctgatattggggctgagggcatggggacagggagtaaaacataggaccaagctgcaatggctgggatggggcatcgccaccctggtctcaccattggggccacttagggcacaccctgacccacataccatcacccacgccaggggtgaacctgttctcgggcgaggtcctgggcaggagggggtgggagttgccaggccagctcattccctgtcccttggagcgccctcccagtggtgggcatggggctgggagtctgacacccccaggtttgaatttgcctctacctgtgtgtgtgtttttcccttggtgcctttgtttgttcttctgtgaaatgggctgaattcctctgggaagatgggaggagtctgtgggaggaggaagctctgtaaatacagacatgattattataatattaatgacagtattagtgctctttaaatcgggtcacagctgaccaggaggagggaggggaagggggagtctatcaaaggcattgcctgaggagactccagcacctgggaaagttgggtacacagtaggcattcaatagatgtttgccaaatgaagtgaggaagagggaggggacccatggggaggacagaaaatttctgagaatccctggctcagattcccacttggtggcccgagtcactgtgtgacctggggcacgtgtctcagtttccccatcgtggtgctggttgagataagatactgccttgaggtgtggtgacgagaatcaagccagattgtctgtgatcgcagcccaggtggcgaggccaagaggggagacatgacatagtgggtcattgaaacagcatggtacctgcttgaaccaagtgactggtccgtgggaaggatgagaaaacccttgctactggccctactgtacatacactggggtccaagagagagggaaatgtgagatcctgtttcccaggatcctggaagccagatcgtggaaggtcaggagtggcccaaggtcatcaggcaagacgtcagcggctccggacacccagccaggcaccactcgattcccaggatgggagctcgggtcttgcctttgttgctgatgtggttcctgctttgttttatctgttctggggctgctcacatgtctcagccccaggtttgcaagacttggtgccgggaaggcaggatggggacctctgagtcagctggcaatgtgctgtgtaaccttgggcaagtctccggccatctctgggctttg

SEQ ID NO: 35514 - DNA, 779 bp, Artificial sequence
  DNA replication origin
gtgggtgtgaataatgtccctgccgaagctcagtttgtcccaggaacctgcccacacacccagggaagacagtcgttgccatcagggttggttttgaggtctgagtcaaggcctgggggcagggcggggggcggttggcagggtgagatggaaggttcgatagtggggcgcctgactcactgctgccccctgactcccctagacatgtccagaggtggatgaagaaggtttcactgtccggcctgatgtgacccagaacaatatccttctggcaccccctgggggcagttgttggcacagcaaggacaaaattctccgtaataaccagtccaccttcagcagtcctctctgtgtacatcctggagagagtctcctttgtggatgaagccaacctaaatgtaaacacccactctatggggtcagcactgggcaagagggagagagaaaaggagatctagcagggcttcctggaggagggggcaccagtgttggggttttgcagccgaataggagtttgccagttagttctgggcatgcttgtgcaaaggcttctcggggggggtgggagtgctggtgggacatggtgtcaggactgaaggtggcgcgtggtgagcgatgggattgggcaggacctcgaagggtttgagcagggagggacgaggctggattggagagctgactgggggaaagcttgtgttgggattggcttggaccttgactgcagcccacgcacggccgagccctcccgtttctcgtccagcgactccgacttcgacgat

SEQ ID NO: 35515 - DNA, 1265 bp, Artificial sequence
  DNA replication origin
cgcgctcctgccccaggacctttgcaggggctgtgccctctgcccagcacgcctttcccctcatgtccacgtggttctgtcctcacctccctcaaatctcagctcagatgtcccttcctcagggagggcccccacctggcacccgctaccgcctgccttgctaaatgtccatctcattgttgtccctgcaacggtgggaggttctgcctgcctggtcctggctgtgtctccagcagcctgatcaggccctgcccaaagcaggcgctcaatcccccgcccagggttccagcaactctcaggcccaggcccgctggactcacctcctccggccaaggcctccagcccccaggggcctggagacgaggcgaggggctgcggcgagtctggcagaggcggtgcccggatacccctggcctctgggggtggcgccctacagctgggcgggctctgcggggtgcctgggcgggggacccaggaatctggggaggggccaggtgccgcgtgggacggagagtccaggccggaatcctccacgttttcgggcgacgaggaggagaaaggggaggggctggaggtgaagcccaggctgctagagccttggggagggaagcgggcggtcagctccgaccctcgcccactcagagtccctgcccatcctcctgcaggccacggccacgtcgagggaaggtcaggggggcccccattcaaagtccttgtgcacgcccccaaggctacaccttctggtgacttccctctccacaaatgtccggcccatccactcagtcaccgcccactggccaaggccccaccctatctatggcccctcccacgcgcactctggccccgcccacccctacacggactagtcctccctccagcctggcttccaggggacctcattggcctaactctgcaatggccccacccaacctccctccggccacacccatgccctccaatcccttatccccatcacctgtaaaatcttcgtggtcaaaggctgactccaggggcggcccaaagaggttcttggacacctgctcctctgactgcaatctctctgcacagctagagagggtgaggccaagagggctgcttctatttttcccaagcctcatcccaccctggggcctttgcacatgctgttcccagtcttttttttttttgagacggagtcttgctctgtcggccaggctgcagtgcagtggcacgatctcagcttgctgcaacctccgcttcctgcgttcaagcgattctcctgcctc

SEQ ID NO: 35516 - DNA, 1628 bp, Artificial sequence
  DNA replication origin
tttgaatgggggcccccctgaccttccctcgacgtggccgtggcctgcaggaggatgggcagggactctgagtgggcgagggtcggagctgaccgcccgcttccctccccaaggctctagcagcctgggcttcacctccagcccctcccctttctcctcctcgtcgcccgaaaacgtggaggattccggcctggactctccgtcccacgcggcacctggcccctccccagattcctgggtcccccgcccaggcaccccgcagagcccgcccagctgtagggcgccacccccagaggccaggggtatccgggcaccgcctctgccagactcgccgcagcccctcgcctcgtctccaggcccctgggggctggaggccttggccggaggaggtgagtccagcgggcctgggcctgagagttgctggaaccctgggcgggggattgagcgcctgctttgggcagggcctgatcaggctgctggagacacagccaggaccaggcaggcagaacctcccaccgttgcagggacaacaatgagatggacatttagcaaggcaggcggtagcgggtgccaggtgggggccctccctgaggaagggacatctgagctgagatttgagggaggtgaggacagaaccacgtggacatgaggggaaaggcgtgctgggcagagggcacagcccctgcaaaggtcctggggcaggagcgcgctaggcctgtctgaagaacagcaaggaggtctgcctgctggaacggggtgatcacggaaggaggaagaagagaaggcagggaccaggaagggcctgatgggcccagggagggcttgtgaatgttaccctgagtaacgctgagggccatgagcaggggaggggcgggacctgactcaggggtcacaggctccctctggcagcttcgggagtgagggcagaaaccagagactggggaggcaaccagggaggcaagtaggcgatgggggtaagggtggcagtgggagaagcaggtggaaaggtcgctgcaggggagagttcggaggagtaaggatggggaaggagcggagtcaagggagggaggaggatggggaaggagcggagtcaagggaaggaggaggatggggaaggagcggagtcaagggagggaggaggatggggaaggggcggagtcaagggagggaggaggatggggaagggacagtcaagggagggaggaggatggggaaggggcggagacaagggagggaggaggatggggaaggggtggagtcagggaggggtgggggacgtcgaggctgtgcctttaggtgtcaggtgcacagtggaccctgagtgtggggaaggtcaggtcagagcaccccctccttgaagacgtcatcaaaacaggaggagcagccgcccagggagagcagaggagaggacagccggggagcccagaggggttggagacaggaggacagcaggagatggggggagagcggcgggatgggctcctgggggctgtctgaggagaatgggaagcccccgagtcagagggactgtgggctgtgaccacccgaggtccccagtagtgtcaacaagggctcctggcaccctccataggaaagggccaggctggagcccgttcaagggagagctg

SEQ ID NO: 35517 - DNA, 897 bp, Artificial sequence
  DNA replication origin
gctggagcccgttcaagggagagctgagtgggtggagaccacagagtgggggcagaagaagctcttttttttttttttttttttgagagggagttttgctcttgttgcccgggctggagtgcagtggtgtgatcttggctcactgcaacctctgcctcccaggttcaaacagttttctgcctcagcctcccaagtagctgggactacaggtgcgtaccgccacacgtggctaatttttgtatttttagtagagatggggtttcaccatgttggacaggctggtctcgaactcctgacctcaggtgatctgcctgcctcggcctcccaaagtgttgagattacaggcgtgagccaccgcacccggcctgagtagaggctcttatccaaccctgcaaattctgcccccccaggggacattgtcagtgtctggagacatttttggttgtcaccaccaggcaggagtggtgctcctggcattcagtgggtggaggcctgggttgctgctcagcaccctacagtgcacagggcagcccccgcccccgagaatggtccagcccccaaatatccacagtgctgaggctgagaaagtcgggtagagcggggagcacagcttggggtacaggtgagaggggaggtaggtgggaggggaggttggcaagcaagggagcacgttcatagatggaacagaaccaggaccctgaggaagcaggagagggaggggagcttgggtgttaaaggcatgagactcagacacagaccacagtaggtggctgcagtcaggttctcggaaagggtagaggtcacaaaatggctgaatgttggctaaaaatcctctgctgaaccccccttacagcatgcctgcgtcttaagccttcagtgcttgcttgcataccccca

SEQ ID NO: 35518 - DNA, 953 bp, Artificial sequence
  DNA replication origin
aagcgagatcctgtctctcaaaacaagaaaaaaagaaaaagaaaagactacaaatctgtctgattgttgacttccagaacccttccaaatgccagcaggtggcatctggatgtctgggggcacatcgtaggttttcgggtcctggaattattttcaatatagagatggaatctcactatgttgcccaggctggtctcaaactcctgggttccagcgatccgcccccctcggcctctggaagtacaggagtgagccactgcgccgaccccagcttcaggaatctttgaactccccgcagagagcagaggtgccgcaaggtttaacctgcctccctccctccttatcgccatgggcttatccaatcatttcttcacggaacacacgtgggccaacgctgaccgggctctgtgccaggaacccgcaaggcgctgcttgttcatctccagccacggggagctcattccctagcagcgggccagacccaaggtggggtcgtgagccccgagaggggcgagggtggcaagagcgggatggcagaggtggcagccgggaccggagaggggaagaggcatggccggggagggaggagccggcagagaacttcgcctgggccaccaggaaactcagccgagctgggaagagggggactggcaagcggccaaggcggagggaggcaggaaggcgtgaggcccggtgggagggaggaagcgggagaggggcgggagctctggctcaggtaaaaactctttcttcggctcgcgagctgagaggagcaggtagaggggcagaggcgggactgtcgtctgggggtgagtgtcggcagcccccggaggatctggcggaccccagtggtgggggtttgggggtggggaagttgtggctctggagaagcccctgccggtctccaccgcgcataccctgcagatgtgggaacattcgggagccccgagtct

SEQ ID NO: 35519 - DNA, 1119 bp, Artificial sequence
  DNA replication origin
cgaatccgcatcatcaggcttgagctctgtgctagtaacctagctcctctgcccttccccctagcctctcctagaagaagaccattttgggtctccacgaggctggtgaggacagcagaggggcagaatgggctgtgatggactgacgaggacttctggtcccctgggtccctcaggagtgggtggtaatttggacaagaaggacaggtggccccgatcaggtgaccccagtccagcgcacctgcttgagcgtgaggttgaagaaggagtcgtggaagtcccactgcaggatgtctccgtgagtctgtgcctccagctccagcagccggttgaccttgcgggcctcgtgcgggttggaggctgtgcccaccaggaagaggaggcgcagctgcaaaccccgtaccttgcgctcgcggccccacgtgcgccgcagcagctcgcggcgcacatagttgctaggggaggacttgatcaccagcagcaggaagaccggctgcgcgcacttagaggggggcacgtcctgcagcaggggaaagtggcggcagtgtctgtacaggaggaagttctgaacgtgctgcggctgcgtggcgaagtccgggtgggtgaccatagaggtgttggcatggcacggggccggggctgggcgggtgggtggagtgggccaggccagggcctcggggatcgccggtggctgctcctggaccttgcaggtgggtggtgacactagcagactgaagaggaggagggtgaaagcgccgatggccagaatgagggtggcattgggccgccggtgccggagatacttcatcctggccagccagggtctggggtcggcctgaggagcctcctgggcggctcctgtggaaaacaaaactcactgaacactcgccatgagcaaagcgcttttcctgtggcccccaacatctggttgcacctgtacagttgctcaggttggcaaaatattgaaattcaccccccacttaactcctccaccccttgcaagacccatttcaaagcactccaacccctgttggctctgacaggtgccctggccctccctgctggggattaattttttaaattttttaattttgttttttttttttgagacagcgtctc

SEQ ID NO: 35520 - DNA, 1505 bp, Artificial sequence
  DNA replication origin
aaaaaatagagacgaggctgtgcgtggtggctcatacctgtaatcccagcactttgggaggccaaggcaggaggatcacttgaggtcaggagtttgagaccagcctggccaacatggtgaaaccccatctctgctaaaagtacaaaaaaattagctgggcatagtggcatgcacctgtattcccagctactcaggaggctgaggcaggagaatcacttgaacctgggaggtggaggttgcagtgagccgagattgcaccactgcactccagcctgggggacagagccagactccatccaaaaaaaaaaaattaattaaaaaaacataaaaattaattaattaaattttttttgaaaaagatgaggtctcgctatgtggctcaggctggcctcaaactcttgggctcaagcgatcctccctcctcagcttcccaaagtgctgggattacaggcatgagccaccaagcctagctacctctcatgggttcttgtccatcaaaaaggtcttgactgagcacatgctgtgcacctgaatctattctaggcattagggacacagcagtgagtgaaacagacaaggcccccagcctcatggggagacagaaccggaacaaataaacaaggagatgttggccgggcgcagtggctcacgcctgtaatcccagcactttgggaggccgaggcgggaagatcacctgaggtcaggagttcgagattaccctggccaacagggtgaaaccccgtctctactcaaaatacaaaaattagctgggcatggtgagtgcctgtaatcccagctacttgggaggctgaggcagtaggatcgccggaaaccaggaggtggttgcagcaagcccagatcgcaccactgcactccaggctgggcaacagagcaagactccattaaaaaaaaataaataaacataaaaataaacaaggagatgtgtcccccgtcattgccaagttgagttggacatccagcactggtctgggtgccttataaactccatctcctgtaaacctcacagtagcccttagaggtgggtgggactcattcacatcccattttccaggtgagaaaagtgaggcacagagaggtgaatgaactcctccaaggtcgaacaccaagtaagaggcagagcttggattcgaatccgcatcatcaggcttgagctctgtgctagtaacctagctcctctgcccttccccctagcctctcctagaagaagaccattttgggtctccacgaggctggtgaggacagcagaggggcagaatgggctgtgatggactgacgaggacttctggtcccctgggtccctcaggagtgggtggtaatttggacaagaaggacaggtggccccgatcaggtgaccccagtccagcgcacctgcttgagcgtgaggttgaagaaggagtcgtggaagtcccactgcaggatgtctccgtgagtctgtgcctccagctccagcagccggttgaccttgcgggcctcgtgcgggttgg

SEQ ID NO: 35521 - DNA, 846 bp, Artificial sequence
  DNA replication origin
agaaggatcactggagcccaggagttcaagaccagcctgggcaacgtagtgagaccttgtctctacaaacaatacaagcaatagccggtgtggtgacatgcacctgtggtttcagctactagggaggctgaggcaggaggatcactggaacccaggagttcaagaccagcctgggcaacatagtgagaccttgtctctacaaacaatacaagcaatagccggtgtggtgacatgcacctgtggtttcagctaccagggaggctgaggcaggaggattgcttgagcccaggaggttaaggctgcagtgagccattattgtaccactgcactccagcctggacaacagagtgacaccctgtctcaaaacaaaacaaaacaaaacaaaacaaaacaaaacaaaacaaaacaaagacaaaattatggtagtgataagtgccttgaaagagatgaacagagggaaatggtggggtgggggtggtcaaagagggcctcttacggggccgacgctggaaggaggaggagcctacccatgagtaaagctaggagaagaaatttccagtggaggacacggaagggaaaaaggccttggggaggtaatgagctgggtgcctttaagcaccagtgcgatggaggcagatgtgactgcccggaacaaatgagggaaggagggatggagatgagcgaaggagggcatcagggagaggtggtgtttttttgttgtttttttttttttgagacgtggttttgctcttgttggccaggctggagtgcaatggcgcaatctcggctcaccacaacttccgcctcccaggttcaagcaattctcctgccttagactcccgagta

SEQ ID NO: 35522 - DNA, 1015 bp, Artificial sequence
  DNA replication origin
tgctcggctttgagctgagccctcataggcacaggtgttcaggagtctaatcttccctcaccctataaggcattactattctcattttggaaaagggtaaactgaggctctgaaagtgctctgacttgccacacagtgagagagtagccaagtgggggccaggatcctcatcggcctcacactctagcctttcttctcagtacagagactcaggcgccagctggcttgcccgagaccccggcccaatctacagactgggaaactgaggctagccctgcggcgctcacctcagcagggcaggcaggaggcgccggcagcctctggccctcctccagcagttccaagaggcggcagagggcggggacatcccgctcacatcccatcatccgcaggaactcctggagccaaggaggagcgcatgtggtgggggaggagcctccgtgggtggagggggaggggccacccgtggtgggggtaggggccatctgtgatggagcggggaggggctgcctgaaccgtgaaggggtcagaaaggtgaggaagcgtcctccccactggggcctatgatgctgggaccaggtgaccccatgctaaagagggacgcaggcgcagacaggttggagattggccacgaggggcgtggagggagaagaaggctgggggctctgggaagccgactcacggccgaggggctgcagcttttgtcgcagtaggtgaagagctcgtacaggacgaccccgaagctccagacgtctgactggcgagagaagatgttgtccgagagggattcgggggcatacctggagaggggacaaggtcttgagatgcgagggtgtagaaaggacaggaagaggggggcagccttggaatggggaactggtcagggtaggtggggactgtgagcaggtcagtcccgtctccagggtctcggtttccctggctgtgggataggtggattctccagccctgggaggtgcctgggaagagctaaggctgtggggaggaggcgggggca

SEQ ID NO: 35523 - DNA, 1214 bp, Artificial sequence
  DNA replication origin
tggccacgaggggcgtggagggagaagaaggctgggggctctgggaagccgactcacggccgaggggctgcagcttttgtcgcagtaggtgaagagctcgtacaggacgaccccgaagctccagacgtctgactggcgagagaagatgttgtccgagagggattcgggggcatacctggagaggggacaaggtcttgagatgcgagggtgtagaaaggacaggaagaggggggcagccttggaatggggaactggtcagggtaggtggggactgtgagcaggtcagtcccgtctccagggtctcggtttccctggctgtgggataggtggattctccagccctgggaggtgcctgggaagagctaaggctgtggggaggaggcgggggcagcacggaggggcggagatgggggcggggccagagccgtgggagggggaggggccagaactgggcggggggaagggcggaactaagagggggccagccctgaggggcggagccagcgtgttggaggggtggggttctgaagcttgggcggggcgagagctgagagaagggcggggctaaggctgggggccgctgacagcagggcagcgggagacagaggagccagtgctgttgagggggcggggctctggggagtgggaggggccaaagctgcagcggaggaagggcggggctaaggctggggagcaaagcagcgggagggggcgggggcatggctgggggcggagccagagccgtggggaataggggcggagcctaggcgcgggttccccaccagaaaatggggctctggcctggctcgcggaccacgtagtagtctttgtcaagcggcagcagcttagctaggccgaagtcagcgatcttgacgtgtgcctcgctctccacgaggatgtttcgggcggccaggtcgcggtgcacgcagcggcgggagcccaggtactccatgccctgcgggcgggcggtgtgagcgtgcagagaggatcccaggataatccggcaggtaccccaagcgtgacctggcaccccaacccagaccccaactataaccctacccccgagccatcctccactgaagttctgatcctgagccctaagccaaccccaccactcccgagacctggaccccaaaccactcctcagccttcaccgcgacctccaagcagacccctgcccaggccgtgccagctgaatccccacaagtcccggg

SEQ ID NO: 35524 - DNA, 1105 bp, Artificial sequence
  DNA replication origin
ccctgaatgagagtctgtgtgtgcctggtgccccaactagggccgcaccccagcccctgggctaaagcctgggtttgtgtgtgtccccgcggggacccctcccgacgctgagggccggctccctcccctccaacccctgcagctacaaggcctgcctacccccaagcctgcgcgacctgatccagggcctgagcttcgtgacgcggaggcgtattcggaggacggtgcgcagagccctgcgccgcgtggccgcctgccaggcagaccggcactcgctcatggccaagtacatcatggacctggagcggctggatccagccggggccgccgagaccttccacgtgggcctccctggggcccttggtggccacgacgggctggggctgctccgcgtggctggtgacggcggcatcgcctggacccagggagaacaggaggtgagggcggactcccccgctgggcggggccaacgtgggggcggggctcggggaggggccggagagtggtaggggatgtggggcggagccaaaacgaaagacttggggaagtgggcgaggcttaatgaggggcggggcttagtgagggaggagactgcgggaatgggaggggcaaactgagtgaagggttgggctgagcgacccgggaatgaaaatgggaggggttgaggagtgggtgggtgggcgctggaacgaggcaagactaagaggcagagtgaggctccgagagctgggaggctgcgaagcggggcagggatcaaggggcggggtccggcagagagaaggaggcggggattggcagagcgggtgggagatgtttggggatgggtaggggaggtgttgagaggttggagttgataggagggggcgcggcttggaagggttgaatggcaaagggatagggagtggatggtgtggcttgggggtgggttcatgggcgtggtttggcggggtccagctgggcccccacttcggtactccccctccttcccaggtcctccagcccttctgcgactttccagaaatcgtagacattagcatcaagcaggccccgcgcgttggcccggccggagagcaccgcctggtcactgttaccaggacagacaacc

SEQ ID NO: 35525 - DNA, 1177 bp, Artificial sequence
  DNA replication origin
cccgcccctcattaagcctcgcccacttccccaagtctttcgttttggctccgccccacatcccctaccactctccggcccctccccgagccccgcccccacgttggccccgcccagcgggggagtccgccctcacctcctgttctccctgggtccaggcgatgccgccgtcaccagccacgcggagcagccccagcccgtcgtggccaccaagggccccagggaggcccacgtggaaggtctcggcggccccggctggatccagccgctccaggtccatgatgtacttggccatgagcgagtgccggtctgcctggcaggcggccacgcggcgcagggctctgcgcaccgtcctccgaatacgcctccgcgtcacgaagctcaggccctggatcaggtcgcgcaggcttgggggtaggcaggccttgtagctgcaggggttggaggggagggagccggccctcagcgtcgggaggggtccccgcggggacacacacaaacccaggctttagcccaggggctggggtgcggccctagttggggcaccaggcacacacagactctcattcagggtcaggtatgaggaccggacctcagagtaggggagggccattggcgcccacaggtcggacagggaccccacaggccttttagctgggggaggtcaggtgtctgtccagctggagcctgggggtggagagggctgggttcgtgggaggccctgggtcataggaacaccctgaaagcttgcaggagaactccatggtgggagcccggcaaagccccgatggagcccacgttgctcactcccaagcagaggccgtccccacagcctggtggctctcacctgacagtcttcagcagctctcccggccgctgggcctgctctcgcgccatccgggccaggtccaacacggccaggctgagacactcaccctgctccttgagactgaggcccacggggaggcgcccactcaccaggtcactgcggtgctggggggccgccacagggagcatcagctgaggccacccaacttcaagccctgttgttaacctgcagacccccccaatcctgggctgacccccacccctggactgccacagggagggtcagacgaggccccacctgattgcatgccagtcctcatgttgccccttggacccccaaccccctggg

SEQ ID NO: 35526 - DNA, 1338 bp, Artificial sequence
  DNA replication origin
gcagtggtacaatcttggctcactgcaacctctgcctcccaggttcaagtgattgtcctgcctcagcctcccgagttgctgggattacaggaacgcaccaccacacccggctaagttttgcactttttagaggcagggtttcgccatgttggccaggcaggtctcaaactcctgacctcaagtgatcctcccgcctcggcctcccaaaatgctgtgattacaggcataagccaccgcacccggcctccagcactcctttccatgccctccctgctcagaagtccaatcccctctgaccaggactgaggggctttttctctctgtgccccaggcaagttgcactcatggcacctccaagtgaagagacgcccctgatccctcagcgttcatgcagcctcttgtccacggaggctggtgccctgcatgtgctgctgcccgctcggggccccgggcccccccagcgcctatctttctcctttggggaccacttggctgaggacctgtgcgtgcaggctgccaaggccagcggtgagtgcatccctagtggatcgggccagagggaaggatggggctgtgtggggccaagattggaagctggaatagttgcctgcagaagtcagcatcggagctggggctttgggggatgagtaggagttttgtaatggagaagggtgtgcagggttggcttctgaggcagagggaatggcctgtgcagacggagaggtgtgacggcacatgaagggaacagctggtcataccttgaggtatggaaggatctggacggttgggtatgatgctggcactcctgaagggcacagatggggtgactcaggagggagctgatgggaccatcccctgtaggcatcctgcctgtgtaccactccctctttgctctggccacggaggacctgtcctgctggttccccccgagccacatcttctccgtggaggatgccagcacccaagtcctgctgtacaggattcggtaggaagtgccccccagcccccagggattgtacaattttatcatctccttgcatttcgaggtgcccacacccctgccccagggaggtatggtcactacccatttctcagatgaggaaacagaccagagagggtgggtcacttgcccaaggtcacacagcaagttaaaggtacaagctgggctctgtgaggcctccgcagaatctgtccctcgcccccaccataatgtcactcctactgaggctgggttgcactttcatcccagggttctctcctctcctcacagcttttacttccccaattggtttgggctggagaagtgccaccgcttcgggctacgcaaggatttggcca

SEQ ID NO: 35527 - DNA, 2408 bp, Artificial sequence
  DNA replication origin
gccaccccagtagctgggattacaggtgggcaccaccacgcccagctaattttcttgtatttttagtagagatggggtttcactgatctcaaactcctggcctcaagtgatcagcctgcctcagcctcccaaaatgctggattacatgtgtgagccaccgcgcctggccgagaccaggagtttgaaaccagactgggcaatatagtgagacctcctctcaaaaagaaaaaaaagccttgtaatcccagcactttgacaggccgaggcaggtggatcacttgaggctaggattttgagacctcatctctaaaaaattagcagggcatggtggcacacccccatagtcctagctacttgggaggctgagacaggaggatgccttcagctctgcaagttgaggctgcattgagctatgatcacaccactgcactccagcctgggcgacagagcaagaccttatctctagaaaaaaaacacaatacaaaaactatgatccaaaataatgccctgtggctggggtggggcggcattaatgagggtttttttgtttttgttttgagacagagtctagctctgtcatccaggctggagtgcagtggcacaatctcggcttactctgcatcctgggttcaagtgattctcctgcctcagcctcccaagtagctgggattacaggggcacgccaccatgcccggctaatttttgtatttttggtagagacggggtttcaccatgttggcgaggctggtctggaactcctgacctcgagtgatcctcctgcctcggactcccaaagtgctgggattaccggcgtgagaaactgcgcctggcctaatgaggtttaagacaatcagaggactaggacccctaggactcagctttcgcagctgtgaaatgggctgactccccagcatcctcattgaggtggtctgctgagcgcaatccaggcctaaagtgtcaactcaattaatgtgcattaatttgtatatttcttgatgatgtgccggtaagcgatcaacaaacgcctgttaaaccaaacaggaagggcaattggcacagcggtgtggtggttactgtgggaagggaagtcttgtgggggaaagaaccttaccaaagggacactttgatgtcaccgatgcccagaccaagaatgagcacattcctagtcccgggaaccttggaggagccccatctctcccacagagagattgatgtctagttttgccctttatagaaataaaatcacacaccatagcctctctatcgtcccctcaacatcagccaatcaagttttttggtttgtttgtttgtttttttgagacggagtctcgcactgtcacccaggctggagtgcagtcgcacgatcttggctcactgtagcctctgcctcctgggttcaagcgattctcatgcctcagcttcccaagtggctgggattacaggcgcgcaccacagcgcccagctaatttttgtatttttagtagagacggagtttcaccatgttggccaggctggtctcaaactcctggcctcaggtgattcgcctgccttggcctcccaaagtgctgtgattacacacgtgagccacattgcccagcctttttatttatttatttattttgtaggggggaggacggattcttgttctgtctcccaggctggagtgcagtggcatgatctcggctcactgcaaactccacctcccaggttcaagcgattctcctgcctcagcctcctgagtagctggaattacaggcacccgccaccaaacctggctaatttttgtgtttttagtagagatagggtttcaccatgttgaccaggctgatctcgaactcctgacctccagtgatccgctggcctcagcctcccaaagtgttgggattaaaggcatgagccactgtgcccagccccagtcgagtttaaaataaggcttcagtggcagtggcgccccactgcaatcccagctactcagggggctgaggcagcaggatagcttgaggccaggggttagagacctgcctgaacaacatagcaagactcccatctccaaaacaacaaaaaaatcttaacagaatattattattctgtaatactgtaacaaaaaaaaatgaaaagtcagaggtgatgtttggtcccagaaaacgccatagtttttttggttttttaaaaatgtttgtagaaatggaggtctggctatgttgcccaggctggccttgaactcctggcctcaagctatcctcccgcctcggcatcccctgtttataatcctcaacgttctgcatcctggtatggtcgggtaccctgtgtctggaccgggaaggcctggagggtaggggctgggaactccgccccccaatccctccttcccaatccctcctccccacccccaaccccgcagcccccgt

SEQ ID NO: 35528 - DNA, 1526 bp, Artificial sequence
  DNA replication origin
gaaggtcaagttcttctttgaggtatttctcccttaagactcagggagacgctgggcgcagtggctcacgcctgtcatcccagcactttgggagactgaggcgggcgattacttgaggtcaggagtttgagaccagcctagccaacatggcgaaactccgtctctactaaaaatacaaaaattagccaggcgtggtggcctgtaatcgcagcactttgggaggctgaggcgggcggatcacttgaagtcaggagtttgagaccagcctggccaacatgatgaaaccctgtctctactaaaaacaggaaaattagccaggcctggtgatgcctgtaatcctagctactcaggaggctgaggtgggaggattgcttgaatctaggaggcggatgttacagtgagacgagatggcgccactgcactccagcctggcaacagagcgggacttcgtttaaaaaaaaaagaaaagactcagggagagataatgacccatttctgcctgtggtgccctgggcccagccctaaaaaaccaggtggatccggcctggcctcttggaacttgtgatctggcgctgagacaatgagcaaatgaaggagccaaatcatcgcagacaacaaagaaagccagggtgtcaggacaggcacagactggaacttggacccgaggcaggacagggagctggccagggaaagggtgctccaggaggagggcacaggatgggcaaagaccttgagagggcagtgatcttagcagcttgaagagcagtcaggaggccaggggcaggggtgagatgagggggaaggggactgcagggcggtcaacaggggcaagatcgtggggggacagggggatcagggtctttgggagaagggtgggttttgcctggagcataatctggagccacaggagagttggaagtaggagctgttataaatagaagaggcagaaggcccgggcagcatccaaatgcagagacttgggccagtgttcttaggataataggatcagagccccggaagtagagcttcaggaatagactgacgaagtggtgaccgggtacagtggctcacatctgtaattccagcactttggaaggcccaggtgggaagattgcttgagcctaggagttcgagaccagcctggccaacatggtgaaaccccatctctactaaaaatataaaaattagctgggcgtggtggcatgtgcctgtaatcccagctacttgggaggctgaggcaggagaatcactggaacccaggaggcaggcggaggttgtagtgagctgagattgtgccaccgcactccagcctgggcgacggagcaatactctgtctcaaaaaaaaaaaaaggaatagatttaagaagttgtggccaagaacagtggctcacacctgtaatctcagcactttgggaggctcaggcaggaggatggcttgagcccaggtgttcgagaccagcctgggcaacatggtgaaaccctgtctctacaaaaaatacaacaacaacaaaataataagctggatg

SEQ ID NO: 35529 - DNA, 2209 bp, Artificial sequence
  DNA replication origin
cctggacttgaccaaagattctcacctctgcatctgtaaaccgggagtcttccctgggccaaacgtttggattgcagttgggaaaacggaggcagccgcagctcgcgtggcaacagtgcagggatcccagggctggggagagacctgaggtcttgtcctagttctgcctggaatgggctgtgagatcccatgctggtcactgggcctcagggtgaaagaagatgttggctggatgttttgaggtgcagagtggctgtttgacggcgactgcaaagcaattcaggactgcagcatgaagaaaggaggctgtgggtctaagccacagctttcctggtctgaaacccttagcccaggcaaaggagaggcaggcaactcaattaatcctccctggagacctccctctcctcagttcattttgtgtataaagttgtggtcgggagtgtgacctacagtcaccaagaatccacatggaggccctagggtggccctgcctcctgcttcccgaatctgtggtcactagatgtaggaaagggagtgaggtggatctccacagttgcctctgggtgctggccttaccctcactcctgtttcctttcagctacgagagtacaaggtagtgggtcgctgcctgcccacccccaaatgccacacgccgcccctctaccgcatgcgaatctttgcgcctaatcatgtcgtcgccaagtcccgcttctggtactttgtatctcagttaaagaagatgaagaagtcttcaggggagattgtctactgtgggcaggtatggagaggccggggctacgtggggtctggagtggatttgcgcctcttgggacatcgtgcatctcaagaattaatcagacatcgaacgggtgcggtagctcaacgcctgtaatcccatcacatcagacatcagagccccgggttgtgtttctgcctgggtcacgggactggagcagagcttatgtgccatttccctgattagaaagccagggacccagggagcgggtgggtggcatggtgggacaccttggttggtgctgtcttccctgggccctgtctgttaagtgaggagaggtgatggctatctggtcagtgggtggtagctaggttggcccagacaggttccaggagacttgagttcaggaactgcatctggggctgggttggtgtccgtggcagaagcctggacttcaggctgttgccatgggaagttcccttacctcacgctccctgaggatgcctgaaggtaggtggggctgggaaactgaggcacaagagtctggccatagagtaggcctggagcctggggtgtgctttagaggcagagggttcagtgaggatggggctagggcacatcggcttgctgctctcacatctccctgtggcctctccttggcaggtgtttgagaagtcccccctgcgggtgaagaacttcgggatctggctgcgctatgactcccggagcggcacccacaacatgtaccgggaataccgggacctgaccaccgcaggcgctgtcacccagtgctgtaagctgcctgtcccgcctccagctttttagaccctccttgactccctcacactgaggcagggcaagtgccagaggttcccagtgcaggagagtctcaggactggtggcggggcacaggaagacaaaaggatgccccaggccccagatggcgcttttctgagagccctgccaggctcggttgtaaatcacatcacatctggaaactccctttttgggtctgcaccttgtttagactgggatccacatcaccactgttttctgggacccactgagaaccgaattgaacccctgcctagtgttgggagctggcaccttttccctggctcacctgccagggtctgtgagacccccacacctccctgattgcacctaaacccaagaatcactgtttcttatagcggtggtttaaacagaggtgcaaacagcaagcggatcttgtcgcctttggggggctgtggccgtgcccctcaaagtgaatttggaggttccacaactctagtggccagtgactgcagggacccaggccttgggctatctcgcttccccaccaccaccttcccgtgagccccgagccctcaggcagttgctgtgaccaacaggatgtgtcaggtcattgggcaggcactcaggaggtttgctgaatgcccagagcccaggcaacaccgtcaccctggcccc

SEQ ID NO: 35530 - DNA, 1523 bp, Artificial sequence
  DNA replication origin
ggctggagtgcagtggagaggttacggctcactgcaacttcaaccttctgggctcaagtgatcctcctgcctcagactcccaagtagctgggactatgggcacaccaccaccacgcccagcctctgcatggggttgtgactgttcctctccctcctgagaaagaaccagggtctgtctattccttcaatcacccacaccggaattaacgcaggcccctgcacaaagtagggactcaaggacaattgaggctgcaacaaagggatggtgtgtgtggggtgggggtgggcgcgtggagtttgggtagaggatttgacatgacagatgggaggatgtgtaaatggatggatgggtgggtggatagatggatggatggataaatggatgtatgtatcgactggtgggtggttgaatgggtgaatggatggatggatggatagatgggtgggtgggttgatgggcaggtgggtggatgggtgggtgggtagatggatggatggatagatgggtggatggatggatgggtgagttgatggatgggtgggtgggtggatagctggatggatggctggatggttgggtggatggatggatgggtaggtggatgagtggaaggatgaatggatggggtgggtggattgagtggacgaatggatggacaggtagctggttggatggtggaggaatctgactgaatggaaggatggggtttggcagggggtgggggaattcggtggtagaggggcttctgggcacatttatgagaggctgagtgtgccaaggtaggtgaataggtgcaggctagtgatctgggagcacattcatcctgtcaatggcccctcaataatgggattggcctccatgtctcagctggttggggcagagctctcccaagtggttcccaggctgctgccacgtggttgaagccctggaggggctccaaggcacagggaggggactgaggtggagatgagggtatgcagtgggctttggtggggccgtgagccttccactctcctgatctctcatcctccaactcacctaatatcacctcgcctgccctgcagcctggagggatcaccgccctcactttatacaggaagaaatggctcagagagggcagggacttccaggcagttacggcctgagtccacagtgccacgccctgcttcaggcccagctcaaggtaaggtaaggtcacatctaacagagcagctccattacagcctaagcaggactcatgtctcctccccgtgttctaatcaagggggtagaagggtcaagcctcagggacgggggcagcactgcacagggtcaagtaccggagatccttctccctcactgctcctgtgtgttgcttcttcatagtccaaaatgactgctgcagcactggccatcatgtccacaccagccagaggcgttctttctcagaaatggcacatcagtactgtatttttgttttgtttggtctcgtcttgtttccaggctggagtacagtggcatgatcatggttcactgcagcctc

SEQ ID NO: 35531 - DNA, 2270 bp, Artificial sequence
  DNA replication origin
ccagcactgccagtggggcaggtcctacccccgggcctctgtccggtacctcgtaggtgctggtgaggcccaggcggtagaagacgggcatgaagagcagggcggtgaggaccgagttcagaagctggcccaggcacatccagaggaacttgaggccatagcgataggcctccgacggcacgcccagcacctgcacggccgacatgaagctggcagacagcgacaggcccacgggcagggccgccaggcgccggcccccggtgaagaagtcctcagcgctgcgctgcccgccccgagccagcccgacccacagcccgatgccagtggacaccaggagcatgagggcaaagaccccgtagtcccaggctccgaaggtgggccgttccccggtctccacggcctccatgagggcgggtgcggaggcccagcgcgtcctcggacgccctgcgtgctcaagcgggggaagctggcaggggccgaggaggcaggacggggagggcgggtgggaggatgctcggcagcctgtccccgctccgtctggggtgggaagcggcgagaggggccggggctccctgggttaggaatctatgggctgtcgatgtccgtgtcggcctccctgtccccgctgtctgtctctgcgtccgcccctgctgtctgtctgtcctgccacctcccctctcactctgggttccgctgtcccatgcagccggctgtctgtccctctccctgggcgctgtgctcagcgctgacagctggaggtcgccttggggcttacgggagcagctcgtgattgtgggttgcagatttattgggctcccgggtcaccgcgactccgcctccagacctaggggcgggcaggacccgcaccctttcagccctggactgggacagacaggccaggacaggctatctgggtggctgcagggggtggtatcggggagggctcccaaatgcccctccatccccatgcacccacccatccccatgcactgtgatcccctgatcacagctgtcactgtctgctgttgacaggtggggaaattgaggctcagagagggcatgtcactatccaagcctgcacagcctgcttcagcactcaaagccgtattgtgcttgaataccttgagctatggggagctcactttcatgcaggactggggttcactttcagggtttcaggggacccataaagaaaacttacctggctttaccacccccaaactggcatgtgggcctaccccctttctctagagccttagggggtgggcatcactgaaccccgctcttgggctaagctgggtgggagacattcagagctcaagttctgagtgggtacatacttggggaagactttgctcctccctgggccttagtttccccatctgtaacaaggataaaatagaccctgcctcagaggaataaatgggacgtggtaacgaaagcctggtacatgataagtgcctcattcatttattcctttattcatttgtcacttcattcattcattcattggttcctttgcagatatgcactgagagttggccctgtgccaggcataaatggctcactgaggtggtgcgaggggcctttaaggttatgaacccgaataagcggagaccatgaccaccagggaggtagagtctggcttgtccctatcatatagatgaggaaaccaaggttgggtgtgggagaaagtctactgggggggtcacgcttccatgaggaccaacgagctgtcatctcagggcccttctctgggggacccaggaggactttgacctctggaggttctggtctctgggttcaagtctcagctcagcctccaactttctgggcaatcacgcatctcaaacttggttcccttctccataagctggtggaatctgaaatcctgggggttgaaagaaacagcgtcagaggccgggcatgatggcttatgcctgtaatcccagcactttgggaggctgaagtgggaggatcatttgagtcccagaattcgagactaccctgagcaacatagtgagatcttgtctgtatgaaaaatacaaatattagcgaggcgtggtggcacatgcctgtaatcccagctactcaggaggctgaagtgggaggatcgcttgagcgtggaagttcgaggctgcaatgagctgtggtcgagaactgcacagcactccagcctgggcagcacagcaagaccccgtctccaaaaaaaaaaaaaaaaaaaaaaaaagggcttttgagcgcttctcgccagcctctgctgctccctg

SEQ ID NO: 35532 - DNA, 1249 bp, Artificial sequence
  DNA replication origin
ctgcatgggacagcggaacccagagtgagaggggaggtggcaggacagacagacagcaggggcggacgcagagacagacagcggggacagggaggccgacacggacatcgacagcccatagattcctaacccagggagccccggcccctctcgccgcttcccaccccagacggagcggggacaggctgccgagcatcctcccacccgccctccccgtcctgcctcctcggcccctgccagcttcccccgcttgagcacgcagggcgtccgaggacgcgctgggcctccgcacccgccctcatggaggccgtggagaccggggaacggcccaccttcggagcctgggactacggggtctttgccctcatgctcctggtgtccactggcatcgggctgtgggtcgggctggctcggggcgggcagcgcagcgctgaggacttcttcaccgggggccggcgcctggcggccctgcccgtgggcctgtcgctgtctgccagcttcatgtcggccgtgcaggtgctgggcgtgccgtcggaggcctatcgctatggcctcaagttcctctggatgtgcctgggccagcttctgaactcggtcctcaccgccctgctcttcatgcccgtcttctaccgcctgggcctcaccagcacctacgaggtaccggacagaggcccgggggtaggacctgccccactggcagtgctgggaccccgtgtgggggaggcgctggggctttgggccgctgtacaggaggacgcggatggcacctcggtgctttaacggaaggggcccctaggcagacacgtggggagggttctaggaagaggccccaggcgcccggcgaggggcaggaaggaggaagagagagcctggcgtcctgctccttcggtggaagcgcgcgcggggcggggcccggctcgaccaggtgtgtcctcacgggtggacacacacctgccccccacctgcccgggcgtgcagacccacgtgtgcgcgctagaggggactgctgacggctccggggttcgaaacctggcttcactgctttcttgtatcttgggcaaggggcgtgcctctctgtttgggtttcccagctgtccaatgggcgaattacaggacctccctccaggggagagggtaaagcgattaaaatcgtgaccggggcccggtgcggtggctcacgcctgtaatcccagcactttgggaggccaaagcatgcagatcacctgaggtcaggagttcaagaccagcc

SEQ ID NO: 35533 - DNA, 1235 bp, Artificial sequence
  DNA replication origin
agcctcctgagaggctaggattacaggcgcgtgccactgcgcccaggtaatttttgtattcttagtagagacggggtttcatcatgttggccaggctggtctcgaactcctgaccttaggtgatccgcctgcctctgcttcccaaagtgctgggattacagacgtgagccaccgcgcccggccgccattactattattatcactacgatgataatatcgccatcaaggtcagacctgagccagccaaaggtagccctccctgggacctcagccagccccaggatgaagcaggagctcacttcctgctggactggaagccagaagaggtggaagcctggatccagccatgcctgaagctaccatacctctagattctcagcaataagcttttcagatcatttttcactataaagatgaggacactgggtcccagctgggacagaggcttcctcaggagaaaggggcaagcccagagtctccccacaagagacacagtgggcccgatcccccgtatggagtgagttcccagggccactcaccacagccgtgtagaaggtgcagataattccggtggacaggagcgacgcccagatgtccagcccggtcactatgcaaaaagaggtccccctgttaggcccctgggcggggcgcaaacttagtcttgggttctcctctccctccctttctcttcccagacatgcttccctaatctcccagagtcacaccttggttcaggatgagggccggtgcgtagattacgatgccggtgtacagcatctgtagacagagtgtggggcgggtgagcagggagggcgtctgggcgagttggggatggggagaggaggcagaagggtggtcccagaatatgggcggggcagataggccgggtcttccagagtgcaggcggggtcaggccggctgtggtgtgggaggggactgatgggggcggggtcagaacgggagcatggggggcggggtctgggcggggtcttgaatggtgggggccgggctagtgaaggctgacgctctcggggccctgagcggagggcggggccgaggccactcaccgtggctacaatgtactgcaaagtcccgcagagccgcactgcgcggctgaagcgcatctccaggtactgcaaggagggactcgaggtcacctggacagtccttacccaggagccgaggcctctcgggtccctggtctgctctctaggtgggcccctccctccggaagc

SEQ ID NO: 35534 - DNA, 1513 bp, Artificial sequence
  DNA replication origin
acaaaaatataagctgggcgcggtggctcacgcctgtaatcccagcactttgggaggccgaggagggcggatcacgaggtcaggagatcgagaccatcctggctaacacggtgaaaccccatctctactaaaaatacaaaaaattagtcaggcgtggtggcgggcgcttgtagtcccagctactcgggaggctgaggcaggagaatggcgtgaacccaggaggctgagcttgcagtgagccaagatggtgccactgcactccagcctgggcaacagagcgagactccgtctcaagaaaaaaaaatacaaaaatattagacgggcatggtggcatgcacctgtaatcccagctactctggaggctgaggcagaattccttgaacccagggggtggaggttgcagcgagctgagatcatgccactgcactccagcctgggcaacagagtgacactccacctcaaaaaaaaaaaaaaaagaaaaaagaaaaaaattagccaggcatggtggcacacacctgtaactccagctacttgggagattgaggtggaaggatggcttgaacccaggagctggaggttgcagtgagctatgatcgggcctctgctcaccaacctgggacaacacagtgagaccccatctcaaaaaaaaaaaaaacatagaagtgagttctgccactgacacatgtgacctctctgagcctcagtttaatgggaaagagggaaaggtgcccccacctctcaggagaccagggcagggggcaggtggggtctcacctgaaggacacctcctccgagcagtgaggacagggctgccacggtgagacaggccgatccgtagatgagtgctgtagtggatgaggatggcacggtcaacggggagggactgccctggcctcccacccaggtctccctgaaactcacagagccccttggagataatcacgagtttcctgggtgccaggctccgcagccgaggtttgatgaggtcttctacagtgactgcagccatagcattgatgctggtggatgctgtgctgtgtgaggaaggcagcggggggtcctcaggccatatggagagaccgtccacaccatctggcctgccagacctcacccagcctgagggcaacggtgggggtaacccagtcctgcaaaggtgaaggagatatttgcccctcccctccccgaagacctgagacatccctacaggagcaaggacacctgtgaccaagggcaggtgggacagacaggtgggttctggttccagagggactgcagtcacatgtgggagatttgcaaaagggacagtgagggcatgtgaccagaagtcccggaagagtggaaaccacctgagtgtgtggccttggaaggcagaagcaggggactgcttggtcatggctgtgccccagggtttagaacaacagtacctgggctgagcacgttggctcatgcctgcaatctcagcactttgcgaggccaaagcatgcagatcacctgaggtcaggagttcaagacc

SEQ ID NO: 35535 - DNA, 1007 bp, Artificial sequence
  DNA replication origin
caacccaagggagataggcaggaacaaggggggggggtcctctcccctttagggaaactgagacacagaggagtccttgagacccacattggagttcctgaggtctcgctttcccagcgggtaaactgaggcccagagcggtgggagggctccgccctcagccccacttccacctactctcccagggctccttcaccgtcatgggagtcatcagcggccccctgctgggagccttcatcttgggaatgttcctgccggcctgcaacacaccggtgagtgggggcggggcaaggggcggggaggggcggggccggacaggcccctccccttccctgacgccggctctgcccccagggcgtcctcgcgggactaggcgcgggcttggcgctgtcgctgtgggtggccttgggcgccacgctgtacccacccagcgagcagaccatgagggtcctgccatcgtcggctgcccgctgcgtggctctctcagtcaacgcctctggcctcctggacccggctctcctccctgctaacgactccagcagggcccccaggtgagcagacttgagggtaggggggtacccgagccctggatggtgtgatcttgaagggaaacttacttgccctgcactctgtgtaagaagcctgattagtaaaatgcattcctgggggagggaacggtaggtgcaaaggccctgaggccacaatcgggttagtcccagtccaactgcactgaggttagggtgcatttaatgggaggagagatgggtgggagatatggtgcagccagaggaagctagtactttttttgttttgtttttctgagacagagcctcgctctgtggtccaggctggaatgcaggggtgcaatctcagcttactgcagcttcaacctctcaggctcaagcaatcctcccagcttgagggaggcccagaatttggtttggttctattttttattgagataaattagccatttaaaagtggcatttaggccaggcaggcacagt

SEQ ID NO: 35536 - DNA, 1651 bp, Artificial sequence
  DNA replication origin
cctcacttcccagtaggggcggccgggcagaggcgcccctcacctcccgaacggggcggctggccgggacgggggctgaccccccatctccctcccagatggggcagctggccgggcggggggctgacccccccacctccctcccggacggggcggctggccgggcagaggggctcctcacttcccagtaggggcggccgggcagaggcgcccctcacttcccagacggggcggctagccgggtggggggctgacccccccacctccctcccggacggagcggctggccgggcggggggctgaccccccacctccctcctggacggggcggctggctgggcagaggggctcctcacttcccagtaggggcggccgggcagaggcgcccctcacctcccggacggggcggctggccaggtggggggctgaccccccccacctccctcccggacggggcggctggccgggcggggggctgacccccccacctccctgccggacgaggtggctgccgggcggagatgctcctcacttcccagacggggtggctgctgggcggaggggcttctcacttctcagacggggcggttgccgggcggaggggctcctcacttctcagacggggcggttgccaggcagagggtctccccacttctcagatggggcggccgggcagagacgctcctcacatcccggacggggcggcagggcagaggtgctccccacatctcagacgatggggggccgggcagagacgctcctcacttcccatatgggatggcggccgggaagaggcgctcctcacttcctagatgggatggcggctgggcagagacgctcctcactttccagactgggtagccaggcagaggggcttctcacatcccagacgatgggcggccgggcagagacgctcctcacttcccagacggggtggcggccgggcagaggctgcaatctcggcactttgggaggccaaggcaggctgctgggaggtgaaggttgtagcgagccgagatcacgccactgcactccagcctgggcaccattgagcacggagtgaacgagactctgtctgcaatcccggcacttcaggatgccgaggctggcagatcactcgcggttaggagctggagaccagcccagccaacacagcgaaaccccgtctccaccaaaaaaaatacgaaaaccagtcaggcgtggcggcgcgcgcctgcaatcgcaggcagtcggcaggctgaggcaggagaatcaggcagcagtaccgtccagcttcagctcggcatcagagggagaccgtggagagagggagagggagatggtggggagagggagagggagccatttttgtatttttagtggagacggggtttcaccatattggccaggctagtctcgaacttctgacctcgtgatccacctgccttggcctcccaaagtgctgggattacaggcatgagccactgcacctggcctatttctgttattattacattgtaataatacaactgaccataatgtagaatcagtgggagccctgagctttattttctgcaactagatagtcccatctgggagtgatgggagacagtaacagatcatcaggcattagattttctctctctctcttttttttttttttgagacagtc

SEQ ID NO: 35537 - DNA, 1255 bp, Artificial sequence
  DNA replication origin
gggggtcagccccccgcccggccagccgccccgtccgggagggaggtggggggggtcagccccccacctggccagccgccccgtccgggaggtgaggggcgcctctgcccggccgcccctactgggaagtgaggagcccctctgcccagccagccgccccgtccaggagggaggtggggggtcagccccccgcccggccagccgctccgtccgggagggaggtgggggggtcagccccccacccggctagccgccccgtctgggaagtgaggggcgcctctgcccggccgcccctactgggaagtgaggagcccctctgcccggccagccgccccgtccgggagggaggtgggggggtcagccccccgcccggccagctgccccatctgggagggagatggggggtcagcccccgtcccggccagccgccccgttcgggaggtgaggggcgcctctgcccggccgcccctactgggaagtgaggagcccctctgcccggccaccaccccgtctgggaggtgtacccaacagctcattgagaacgggccatgatgacaatggcggttttgtggaatagaaaaggggggaaaggtggggaaaagattgagaaatcggatggttgccgtgtctgtgtagaaagaggtagacatgggagacttttcattttgttctgtactaagaaaaattcttctgccttgggatcctgttgatctgtgaccttacccccaaccctgtgctatctgaaacacgtgctgtatccactcagggttgaatggattaagggcggtgcaagatgtgctttgttaaacagatgcttgaaggcagcatgctcgttaagagtcatcaccactccctaatctcaagtacccaggaacgcaaacactgcggaaggccacagggtcctctgcctaggaaaaccagagacctttgttcacttgtttatctgctgaccttccctccactattgtcctgtgactctgccaaatccccttctgtgagaaacacccaagaatgatcaattaaaaaataaaaaaaaataaaaaataaaatacaaaaatgagctgggcagggtggcgggcgcctataatcctggctacttgggaggctgaggcaggagaatcgcttgaacctgggaggcagaggttgcagtgaaccaagatcgcaaatttccctccagcctggtcaacaagagcgaaactctgtctcgaaaaaacatatatataataatactaaagtgcacagtaaatgtaatctg

SEQ ID NO: 35538 - DNA, 2397 bp, Artificial sequence
  DNA replication origin
ggttccgtctcgaaaaaacaaacgaacgaaaaaaacacaaaaaacctttaccaaagaaggcagttggctagttggctatagtttgtcaacccctgctctctagaatattctcagcccccgtgagtttccctcatacccctcctggtcagtcccccaccagtgatacctctcctcacttcaaacatcatgcattggccaggcacagtggctcacacctgtaatcccagcactttgggaggccaaggcaggcagatcacttgaggtcaggagttcgagaccagcctgggcaacatggtgaaaccccgtctctactaaaattacaaaagattagccaggcgtggtggtgggcacctgcagtcccagctatttgggaggctgaggcatgagaattgcttgaactcgggaggcagaggttgcagtgagccgagatcgcaccactgcactccagcctgggcgactgagagagactgtctcagaaaaaaaaaaaaaaaggaccctgtctgaggcagaatgtgtgtgtgacacgcatcggtcggggagcctcgggacgttgcctctgaccgagggggaaactaaggctcctcagcacagcaatgggagcccagtttgtgcactccaacagccttgactttaaccgccccctccactttcctgctgtgctggtgggggtgggggtcaggccctggcagtgtccttaggtgcgtccacccctattctgcgacattcccttctgtcaaatctatctggagatgcagtggtagtgtcccagggggacactgcaggtgtggggatcgtccctgggaaggctgaaggtgtgagagtcagatggtggagtctcaggcagtgagggggcaggcaggggtgtccgagaccagggccctgcaggagtgccaggcagtgggcagagtactgccctgagcttccagcagcactgcatataaaccgtgggcttgctcggccccctggggtccgtgcaggccagggcaagggcaagtcccgtagcccagatgtccctcatccagccagcatcagggcttccctgggcggccgatgtggaatcagtttcagcctcagtgacccacggcagggaaacgtggacagtgctgcccgactcataagggcagagcccctgccctagcctgaaacgggtccaggcctcccacggctcttagaatccaacatgaacccctccctggcccccagaggctccgcatggcccagccgtctccctcccggcctcttccccctcccgcttcactcccactccagcctccaagctgttcctgttacaacaaatggctcctgcctcggcgcctttgcactggtagccctgctgctaaggacgctcctgttccccagctctcccccttggccggcgctcttcgcacctaggagcgtcacttcttcaagagccacccacccgccctgtccaaggttcccctgttggcctcacatcccccgcccagggcagcaccgggacctatcttgttcctggtatgtcccctgcacccagcacagagcctaaatcctcgttggctgagatgaaaactcgaaccccaggctagtgggtggcgcgggggtgtggggtcttctgcctgaccatgcacgccgcccccgcaggaggagaaggagaagcggcgcctcgaccagctggaacgtaagaaggagacgcagcgcctactggaggaggaggactccaagctcaagggcggcaaggcgccgcgggtggccacgtccagcaaggtcacccgggcccagatcgaggacacgctgcgccgagaccatcagctcagggaggccccggacacaggtcgggcggcatcccgctctggagctgcacttttgcccactgcagaggcagtggaccttgagtccattagccccctcctggcccccagagaagctgccggggctccacgtggtgcagggtgggtgggtaggccgcctcctggtaggcctggccgtgagcagacaacctcagggcttgtgccccgcggggtcctcttgtttgcagggctgccggaaagtaaggcagagaactgggcgccgggagggtgggacctgtcccaagagggcttatcagctgaagtcgcgattccatcccccctcatctctcccgccttcctcccgcccctagcttctcttgccagtctctatctcatctccttggaactgtgcatctttgcttatctctctctgtctctgtcacccacccacccgcccagccgagaaagccaagagccatctggaggtgccgctggaggagaacgtgaaccgccgcgtgctggaggagggcagcgtggaggcgcgcaccatcgaggacgccattgcagtgctcaggtaacggggcggggcctggggctttcccaggggtggagctggtcatcgggggcgggg

SEQ ID NO: 35539 - DNA, 1647 bp, Artificial sequence
  DNA replication origin
ggggcctggggctttcccaggggtggagctggtcatcgggggcggggctacctgggggcggggccgggcttttcggggcaaggctgcgcccaaggccccctgacgctcatgtccacccccagcgtggcggaggaggcggccgaccggcacccagaaagacgcatgcgggcagccttcacagcctttgaggaagcccagctgccgcggctcaaacaagagaaccccaacatgcggctgtcgcagctgaaacagctgctcaagaaggagtggctccgctctcctgacaaccccatgaaccagcgggccgtgcccttcaatgcccccaagtgagcccagaacttggggagccagttcacccacgggtggtccaggtcacgactctgcacgcccttaggccaggtcagctgcgagggtcacagagcgttccgggggccaaggcgccgggccccggggccatgctcttatcaccagccacccgtcctcccgccagagggtccctgccccgagtgacaccccatcccctcccatcccccggcgcgtgtgtgtagagcctcagggctgagtgcccaataaaggtggcggcaaggctgcggtgaggcacttgaagcctaagtgagtgggtggggagaggcgggcgaagaatggggagaaggaacagctttggggacctgctgtgaaccgcactgggatcatagctagaaaagacaagagcccccaacagcgcgctccttcctgctgccagctgtgcttcatcggctcctgccagcacccctccttggctgtgccacttgtccagtgaggcacctgctccactgtctcctgcacacgcttagagaggtggaggtggaggcgctggccatacttcagaggcagagccagagaagagctggagcctgtctgccttctgagattccagttcagggtgggccctaggacttgattgggggtaccatgttgtgtttggggtcaggaaatgctggctgctctgctgttattcctacaggggaggcatctgggccaaatccttctgtgctgaatcctgggcaggcttcccagtggaggatttcttccttagtgggggatgagtcagatctcattgcagagggaggaggaaggcactgggctgggaaaggcctggaggctgcagtgagcaggtggatcggagtgggtgtgagcaagcgtcccgtcagagactgcacatctgggaagggtggagtgggatttgaacctagttctggcttcctagaacttagccagcccggaagaatagaggaagggcagctgggagatgggcctgtgaggctttgtgggctgagcaaattgcttggactcatgagggcggcaggggatggaggtgcccccagaagctgcagtggtcagggccgggtgcggtggctcattcctgtaatcccagcactttgggaggccaaggtgggcggatcacctaaggtcaggagttcgagacaagcctggccaacatggtgaaaccccgtctctactaaaaatacaaaaattagctgggtgtggtgacgcatgcttataatcccagctactggggaggctgaagcactagaaccgcttgaacccaggaggcagaggctgcagagagtcaagatcacagcactgcactccaacctgggcaacaga

SEQ ID NO: 35540 - DNA, 1439 bp, Artificial sequence
  DNA replication origin
cccgcgcgcccggttgctaaggcaacggcgggggccggagtgggaacctcgggaagaccccgctctcgctccctcccccgccacctcctcggcaaaccccactccggtttgaaccggtttccccgccccgcccccatgcgcactgcggcgggtgaggattccccggccctcagggtgggtgggttgggggcggggggcggggggtgtcgggtggggccgacgcatgcgcgctgggcgcggcatcccctcttctgctggcgcgcgacgggaaagccccggcgcaaatggcgagcacccccgcgcaggcgcagtgagcgaccggcggccccgcggccccgcccggtcgtcctggcaacgcacgcggggccggctgggcgcgcacggaactcccctctcacgccccctcccgctctctgcggcggagctggggattccctgctgccagtgcgcacgcgcgagcctgggattccgcgggggcgggggtgggggcggggccggggccggggccggggctaggagccgaagggagtaagggcctttctgtaacagggaacaaacgtcatcaccttgtctttgtgcccgagggctgacgaccaccctctcagctcctgtcctgagtttcatcctcactcttgtccaccagttgtccctctgcaggcgcccggaagagcctgccacgcgccgctctgatcggctctctgccctgctcataaccccaccggggctccccatcgtcctggggtgaagccccactcctttgcctggcgtccgaggccctgtgtgcccagtcgtgtctggctggccctcccgtcggcttcttccctcggatcgattaccattggtccccgaccttctctcatccccagccagaaagaccctaatatggtcatgtgggccaagcccttccccacgtacccttcccaggtaccatctccttgattctccagatagcctggggttgggcgcggtttttagtcctattttaccggagaaactgaggcttagatcattcagaaccttgtctaaggtctcagaagagtcagaggtgggattcaaacccaggcctccatttgtggggagctatatgggctattccattcatttcctggctgacatcttcagccccaattctgggccccaaaactacccctgctgccttcctggcggctctgggtgcttcccggctatgtgacacaggcaggtgacttagttttctttctcttttcctttttttttttttttttttgagacagagttttgctctccttgcccaggctggagtgcgatggtgtggcctcggctcactctgcctcccgggttcaagcgactctcctgcctcagcctccagagtagctgggatcacagacgcccgccaccacgcccggcttttttttttagatggaatctctctctgtcgcccaggctggagtacagtggca

SEQ ID NO: 35541 - DNA, 1422 bp, Artificial sequence
  DNA replication origin
cgcggggccgccggtcgctcactgcgcctgcgcgggggtgctcgccatttgcgccggggctttcccgtcgcgcgccagcagaagaggggatgccgcgcccagcgcgcatgcgtcggccccacccgacaccccccgccccccgcccccaacccacccaccctgagggccggggaatcctcacccgccgcagtgcgcatgggggcggggcggggaaaccggttcaaaccggagtggggtttgccgaggaggtggcgggggagggagcgagagcggggtcttcccgaggttcccactccggcccccgccgttgccttagcaaccgggcgcgcgggccgcagtgcgcgggcggcggcggcctcggggaagccgggtggctctgcgcctgcgcggggctccgcgcctgcagccggggttccccctcgagcaccggggggacggcgggggagtagaggatgggcgcgggggagcgggtgctggggaggaagagaccgtgggggaagagacggcgcgggaggaaagaaggggaggaggggtgggtgccgaggagggggcggtgggggaaaacgcaatgggtagggactgtagggaggggtgcagggagaggcgagcctggggatgcgcgccagggagggggtgacgggggagagcgtagagggagggggacgacaaaggcggagggggatgggagggggagcttagggagtagagaagggatatggacaaggagaggggtacactgggccagtgggggcgatgggagggggagctgggggacaccttaggcacctgcagtctcccgcccagcagattggtctgcgagggtgggggttgctgtgccagaaagtcaggatcttcgagtccgagcttaaggtttccagatttagaaaaaaaaaataaaaaaacagggcgcccacttaaacttgactttcagataaacgagcaattttttattataagtatgtcccattccgtgtcctctactttatcccgcagccctaatctgggctattgtcgttcccccccaccccccaatttacacaccatctgtccctatccttttcgaaagctgtgcggaccctcgcggaagacgcctttgtctcccgcctgcctagcgccccacagcccggcatgtggggtgtacccccgggccccgtcatcccctcccccagccatctgccgtcctcctggccttgaacaacagcctgaagtcgagtccgggctaggcaggggaaagcgcaaaggtgcagcacgcaccctcggggattttctcagcgctcctcaccccccacgacctccaaaccctccgctatgggcctggccctgccaaggccacatcgccccgcgggtcccagacacccgcaccttctccttctccaggaacctccagggctctgctttcgggcagcctccctcactctctgg

SEQ ID NO: 35542 - DNA, 1282 bp, Artificial sequence
  DNA replication origin
cgttcgcttcttttacttattcgccatcggaacggtggaacatttgcgcctccggcctggcttctgctcaaccggccaggagctcggtccctgcggatcattttccccaggggcatattattccggaaacgggctaagcggtcccgggttggggacacgtcggctcctgtgtttttagtttcgctggcctaggtgacccccctgcagaagacggctgtggatctgctgtgccgtgtcttggaggcatttctagggcggctagctgggcaaagggtggtgctgtccctttatttggagctaggtagctcctggggtggtgctgggtcgggagcggccctctcctcccatcagctaggaccaagttgcacctggcccctcattcccaggggcggagagaggagaagatgaaagagcaagcaagttcacaccagggcttgagggcagtgagaacagtaaaccagggcgacgtgcccagagaaggggcgactctagggaagaggcgaccttggatggagccctgaagagccctgtgggaacagggggtgaggagagccagggaagggcgatcccggcccaagaaaccgcagatgcaaaggctctgaggctgaaccggttagggggagaagctgggcgtgtccagaatgtggtgggcggtccagggagaccgcggagggattggaacaaagggtgggcgttgtggggggcagaccgcgtcggcctgtgaggagtcagggtgctcctcttggttcaagaagagaagggaggtggggggagggcggtcatgcgggacagggacgtgacctgtcacacgggtgaggactgaagtctgtggctgcgtcagggagaaggactgtggcggggacaggaggagccgcgggagtggggaggattttcgggctccactgggcgattgtggggtccacggggcgtgggggaatcccctgatcatgggtgtccttgtcacttctgcagcctgactctccttcactgtgtctgactaaagcatgggtcgcagccttccccaacaggggcgggaagtcccccccggggagggtgttgggtggcaccccttgtcctcggctcctgcgaacccaccggctctctgcctccacagtgcagacccgaaggcctcctcccctttgttctttttccctccacacggtcacggtcacaccggcggctccctctgagcgcatctcacacacaatgggggtggggggtgcgctcccagtttcccctcctctcagtatcggcgtccccgagccccgcccgcgccacggaa

SEQ ID NO: 35543 - DNA, 1566 bp, Artificial sequence
  DNA replication origin
ccccccaccactgaggagggtgcaggcgtggaggatccccatgtccccaccttcacctcgcggagggagggggatgtctgcgcttccccagacctggaagcaggaaccccctcctcacagggcatgggggtggggtcaggagctgactcccgggatcggtgttggaggcgggggttgaagaagggatgtccccctcctcccgcagctcccctttgaattcccggagtcgggcaagctttgaccaatccgcccaccaaagagaaggggaccgccgccgggaccgaacgctccccgccgtgccccccactgccactcaccggccggagtcggccgccgcagccggagtccctgcgccctgcccgagcgcgaagacaagtgcacggccgggcaagggcgtgtgagccgggagggtgtgcgcgcgccgccgcagagccgaccccctccccgccgacctgggccccgccccgccgcccggggagggggcgcggaccccgcaggccgagggaggcagtccgtcgcggccacagccggggccctcccccccgcaaggcgtctcctctaaagcagggatggaatccccctccaggtctctcgccaaagcccactctcccccctccacccaggggcgtgacagcaaatcttagaagacggtcaaagagatgggaggaccctctgccgcctctggcccaaggtgctcatcttacagacggggaaactgaggcccggagagcggaagcccctggccagggcccagtgtcccagcagcacggaacagggctgctcccctcactctggggggccgctctctcagctccgggaaagaagagagtcagggagagaggaaggcagacaattaaagcctccccaccacgccactggggaggatcgggggacccagaggcttcgggcagctggcgacgttgaccgggctggaaggtcccagctaggaagggggagcctgggtggccagaaccaaaccacagaaaacttctctatttcattgttgggctggtgacaccctccccccaacctgcgcgattaggaacctcttgagcctgactggcccgggcttgggtggcagagttgtgaaggtcactctgccaccttagaacaatgtggctcgcggggtctggctcggtaggggatgggagggagaagtccaggggcaagccctttccgtgacctcggccctgccaagcccctttctgagcctcagtttcccttcagcgaacggacaagtgcccacctccggggtccctccagctctccgagtccgtagggccgccggatatgtcttgctgttctccttcagctgccccctccaacagaaagcgtggctccagctcagaccaccgtgttcctcctcgaagtcccctgctccgccccgtctctgaacccccacccaccttcagccttggtggggaccttcagccaccttcaggcaggggacagggaggggggttcctcttggaagcagggaggcttctacaaacctccattctggtttttgttttttgttttttttcctctcttttcttccattcattctaaaaatagccctccccc

SEQ ID NO: 35544 - DNA, 2634 bp, Artificial sequence
  DNA replication origin
cccagagtgaggggagcagccctgttccgtgctgctgggacactgggccctggccaggggcttccgctctccgggcctcagtttccccgtctgtaagatgagcaccttgggccagaggcggcagagggtcctcccatctctttgaccgtcttctaagatttgctgtcacgcccctgggtggaggggggagagtgggctttggcgagagacctggagggggattccatccctgctttagaggagacgccttgcgggggggagggccccggctgtggccgcgacggactgcctccctcggcctgcggggtccgcgccccctccccgggcggcggggcggggcccaggtcggcggggagggggtcggctctgcggcggcgcgcgcacaccctcccggctcacacgcccttgcccggccgtgcacttgtcttcgcgctcgggcagggcgcagggactccggctgcggcggccgactccggccggtgagtggcagtggggggcacggcggggagcgttcggtcccggcggcggtccccttctctttggtgggcggattggtcaaagcttgcccgactccgggaattcaaaggggagctgcgggaggagggggacatcccttcttcaacccccgcctccaacaccgatcccgggagtcagctcctgaccccacccccatgccctgtgaggagggggttcctgcttccaggtctggggaagcgcagacatccccctccctccgcgaggtgaaggtggggacatggggatcctccacgcctgcaccctcctcagtggtggggggaaagcaccgctggttcccgttgccccctcctccctctctgtcccctcaggtttctccctttctccttgcgttgtggcggggattccctgtgctggccaggctgcgcagtaggagggaaccccccacctgccagcctactgtgcgctgggctccgggttcctgttcttttccctaagctccctcccttcccccctcccctctcccggacaggaggaggggctgaggcccagagagggttaccactcgcccaaggtcacccagctgggctggggcagagcaggtttctggtcagatccacgaatcccgggacccagctggggaggtcagctttgggatcctctgcccccgccgccgtttaaccctgagcgtgggttgccagggccccagaactggggggattccttactttctccaagtttctcctctggctagagacccagacaggactgagccaagaagccccggcctcgctctcttccggggctcccagatctcacctcctcttgtcccccgtgtgcccccgctcccagcctcctcaggctgcccaagacctcatcaaaggaaatccctggggggagggggcttatagatggggaagtcaaagcttctggagccacggaggagataatttttactccgacgcagcaacccgctgagtgaccttggacaaggccctgccctcccaaggctagggtcagcaccaagtccccctggctggaacaggtggcccctgagccatccaaggtgaccattgccccgatcccaggtcctggtgagagaaagggcagctgggggtttccccttcagtcctgttctggggtctggcattgcccctgccctccatggggtgtccttttctgccctcttctccaggatcggacttgggtaccatgtgcttctataagccctctgcagacagcactaaatagatggagggagcacgccaagggagctacaggctcccagggcagcttcagagctggggagcaagagttcagctgctctgccaagcgaggtggttcacaactgtaatcccaacactttggaagggcgaggcaagctcaggagttcgagaccagcctgggcaacgtactgaaaccctgtctctacaaaaaattaaaaaaattagccaggtgtagtggtgcacacttgtagtccaagctacttgggggccgaaggtgggaggatcgcttgagcccgggaagtcaaggctgcagtgagccatgttcatgcgactgcactccagcctgggtgacaaaatgtcacctccctgaatgtcacccacctagatctccccatggcgaaggaactaggggcaatgtgagggggtgagcaggaacagcattgggaaagacagataaagcattcagtgtctagcttctggagcccagtgaaaggaggagtggccttagggaggggacatggaagaggtggggctagcccagggccccattggagtgataaagccactgttcttaagcttcctgaaagcttaggagatgacccagctcagcaacaccaagccagagcgcagatctgctgtaaagaccattgtacgtaataggctgaagcaggtgaatcacctctggccaggagttcaagtccagcctggccaacacagcaaaaccccatctctactaaaaatacaaaaagtagccgggcatggtggcaggcacctgtaatcccagatgcttgggaggctgaggcaggagaattgtttgaaccctggaggcggcagttgcagtgagctgagatcacatcactacactccagcctgggtgacagagcaagactctgtctcaaaaaaataaaaaataagaaagaccactgtagtccgg

SEQ ID NO: 35545 - DNA, 1181 bp, Artificial sequence
  DNA replication origin
tgagccgaaattgcagcactgcactccagcctggcgacaaagcgagactgtctcaaaaaacaaaacaaaacaaaacaaaaaaacaaaaaacagagaaagggagggagggagggacagagggagggaggaaggaaggaaggaaaggatggagggagagagagaaaaaaaggagaggagaggggaggagaggagaggggaggagaggggaggagaggagaggggaggggaggggaggggatggtggggaaggggaaagggaaagggaaaggggaaagggaaagggagaagagagagagggagggtaggagggagggagagagaaaaaaagaaggaaggaaagaaggaaggaagaaaagaaagaagaaagaggaagggagggagggaaggaagaaaattgttttgtattaggaagaaaatagaatatgaggatgtattagtgaccagaggagcagggaagcctcttgtaaaagtcagagaggcctctctagggcagtgatcatgagctgagacttgaaggaagaggaggaactggcctgctgacagctgggggaacagcatacccagcagagggaaccacatgtgcaaaggtcctgaggtgggaatgagcttggcgtgtttgaggaacagtgaggaggctgctgtggctggaacagagtgagtgggagagaggaggaagatgaaggcaagatcggcaggtaggagccaagctacaaggaactcagcggctgcagtgagggtgtggacttcagagcaatggggaaccatggcaggtgtgtgagcaggggagaggcatggtctcagttaggattttcagaagccctgtggctgctgtggagagcagggcaggagtggaggtggcaggagcccagagtggaggcccaggagatgtctggtggtttcagctgggttggtaccagggtagagcctcagatggaaaaaagtgggcacattctgggactgggttggggatggaggatgaaatgtggccaggtttccatctcatgccaagtagctactgtgagagaagggagcactcattgtgcttggggaaacctgggaaggcatcctggaggaggtgctctttgggctgagcctggaaggtcaagtagaagcttgccagcagataaggctggggtcatgtgggatctaactgctcaaatgccaggggatcactgagcacc

SEQ ID NO: 35546 - DNA, 1372 bp, Artificial sequence
  DNA replication origin
tccccacaacccctttcttgctctgcagtgactctcaaagctgcttgtgtctggtcagatcactcgtaacagccccctgttacagatcctatccaaccccgcctggtacctctgtggatctgaccgggaccacccaggcctctatttcctgattgtctcagccctgggcattgtcaccacggccgggccttgtgcagagcagtctggacaggctgggatgaggaacgggctctccaggggagggaacaaaggtcctgtctgagactctgagccatcacctggcccctctgtgactcaccgccaccctcagcccatgcagctatccctcattcatgcctgcctgcctgcctgcctgcctgcctgccttccttccttccttccttccttccttccttccttccttccttccttccttccttccttcagtccaactgttttctgagctccgcagaggaaacacagaagacagcctccctcaggaataaacactcagatgttcctgacctgggccaaagctctgggctgggaagaaaacagatggagggtgtgggagagagataggaggtgggatctgctggctccaggaagcccccaggctggtgggggacagagctgaacacagtcaccccaagcctggtgggaacagggtgaggcagaggcagaggcagtaagactggaagaggaggaaggaagagctccctacccactggtccccaaagctccctggagccgccattaactttgaatgaatgagtcggccaagttcagcctgggtgctgggggaaggagcacagttttggggacccccagccctggtgatcccaaactccctggggctctggcttcctgtcatcctggaaatgggtgttggaggttaggactgggtggcctgatccagacgggcgtctctcctcccacagaaggtggcctctaaccgagtgccccagcatgtacccagtcccacccctggaaggccctacacctggctcccagacaccccccaacttgcaatcaccctagtccccctcaaggctcccctatgcagagctagaccccggaggaggtcgtttgaggggcaggcattgagttgctttgcaaagttgtctttcagctgatgcttacggggaggacagtccccaggcgtgcaaaggttgacagagcggctgaagtttgggacctaattttggggagggggtatagttaggaggtccggagggctgttgggggcgggggttggagcttcaccaaggtccttcccgtcttatggggcaagagggggagttcgaagaccagccgcatgccggggggttgcagggggcgccggggaatgtgggatctttaaatatgggcggggcttgcggggtcgtcgaag

SEQ ID NO: 35547 - DNA, 1138 bp, Artificial sequence
  DNA replication origin
aaaggttgacagagcggctgaagtttgggacctaattttggggagggggtatagttaggaggtccggagggctgttgggggcgggggttggagcttcaccaaggtccttcccgtcttatggggcaagagggggagttcgaagaccagccgcatgccggggggttgcagggggcgccggggaatgtgggatctttaaatatgggcggggcttgcggggtcgtcgaaggcggtgccaacccgggctcggccaatcggcggcggctcccgcgtcgcaccgcccccttctctcccggcccgggcgggcgctcgccccccgccgggcccgtggactgggcggcgggggatgcgcctgccgccgccgcccccggccccgccgcccccgggccccgcgcccgctcgctgctgcccgccccgtccgcgaccccggctccggctcccgactgggggtccgcggccgcgcgggaccctctcccctccagccttgtccgcccgctcgggccgagccccgcaggtacagggtgggatgggtgagggtgcgggaggatccaggatctgcagctcagggagcccgaggagggaggcacgtctcggagggggacgcggtttggggcaggggccaagagggagggtctccgtgcggtccggagcctaggagacacaggaaaggtggggggaatgaatgcatgtacattgcccgagtgagtgaggatccacgcacccccatcctgggagggggagggtgcagggttcactttgggggagggcagagctgtgagtctccaaactgcatagatagggttggaggtcggggagctctcagggatggacagtgacccgcaatgacttgggaatgggagggaggtgacccaccactggcccctggatccaggggttggggcactcagggaggggtcaggaaaccgggtcttccatctctccccggacagaagtcccggacccagctcggggcactgcccctgctgttctggagggctggccagcagatgggagttcccgaggctggggtctgagcggtgaggctgatggagatgcatcagaatggagggcccccgagggaggcagcctccaggagagcaggctaattgcaccctgctggctgctggcaggctcctggcgg

SEQ ID NO: 35548 - DNA, 1351 bp, Artificial sequence
  DNA replication origin
ggggagctctcagggatggacagtgacccgcaatgacttgggaatgggagggaggtgacccaccactggcccctggatccaggggttggggcactcagggaggggtcaggaaaccgggtcttccatctctccccggacagaagtcccggacccagctcggggcactgcccctgctgttctggagggctggccagcagatgggagttcccgaggctggggtctgagcggtgaggctgatggagatgcatcagaatggagggcccccgagggaggcagcctccaggagagcaggctaattgcaccctgctggctgctggcaggctcctggcgggtggtgatggggggatcgggcgggtagccagcgccttgctgcactggctcctgggcggcccatgggacgggagggcaggcagtgtctgtctgccctgcagagctagggccctgtgattattgggggaggggaggggaagggaggggtgggggtggtggcgggaagggggatcctcggagaccttcctcaacctcagcagggacacccggactctggctgcgcccgctggggacccacaacaggcccacatgtcccagaagtttctgctgtgtgctgatctggttgtggtacccggaagcccctgggtgtgcatctggggagcaggggcggtctgccttggggattgaggggcagggagcaccttctcttggtccagttctgaagaacagaaatcaatggcatgaagctcttacagactgcaaagcatttgccatgcgagatcttactctgttctggacaccaaccctcgtagtgggggggtgggggggaggcaccatgaggaatctttacaaagcaggtggccaaggagtgggcagtaacttgctccctggcaggggtacctagggccccttctcagtggctgcctcaaccaacctgtcatttgtaaaaatgctcgctggagggccctgggggcctgactgggattctgtctcttcccatgtcctgttgggtggggaatctaaggagccatcagccctgctccctgctaccctcatcctctcctcaagagctctcatgggtccccccaggcacacgaggttcccccagaagtgtgtgtctccagggagggtgtggaagtgggtctctgctcatcccctgcaccccaggcttcagggaagggagctctcatgaccagacagagtagtaaaagtaaggcaatatcaaagaccttccaacccaaatacaccccgtaggatgtttgttgtttgttagagatgggatattgctagttgtccaggctggtctcgagctcctgggctgaagtgatctcctgccttggcctcttgaatagctggaact

SEQ ID NO: 35549 - DNA, 960 bp, Artificial sequence
  DNA replication origin
ccctgatctttccgtaacctcacaaatacttaggtgggccttctgctccgaggctcaaacccctgcccactgcctgaacatccgctggctaccaggtggggctgggagcttgcactagggtgcacacaggaaccccagatcctgccctcctccagggggcccaggaaaacccaggcaccccttccaccatccccgagggtgcaaaacttccccagctggggatggggggcacagggatgagaagcgggtggcctggcagacagaacccagagggggtgtaggcctccgatggcctctgcaaacgaccttccgaaacgcaccaatgaagatgcaatttggggatgtgactcagccacccgacgcatgggccaaattcagccgtgtgtctgccatgttcctcctcgcctggcagccgcgtcctaaggtgccctgggcagggagggggtggggaggaggagagaaatggcaggtggcttccaagagggtggaggggtggaggggtggagggctttcccggcacccaccacattactgtggaccgggctcttactatgctttgagcctgagatcagggtgatcacatttaatccctatcaccaccggtgagcaaggtggcattcccgttcccattttacagacgggagacagagctcagagaagctcagcaccttttgcccaaggtcacccagccaggaaaggcagggactaaattagtgccatccaggcgtggcaggtggcagggtctgctttctgggaggggaactggcctggtcctgccgtcgagaagccactagcttggagcacagaactgatgagtgcctgggccttccccattcctgggtacacatcccctcccccactgcaatctgggcctaacactggagtccctgggaccctcagggattcccagagacccaggagcccctgggaaccctcagccaaggtttggatgcccatgaa

SEQ ID NO: 35550 - DNA, 1130 bp, Artificial sequence
  DNA replication origin
ctctcaatgccttggtgagcatgatgactatgtcaccatcattgaggtccctgctctcacacatgatgccacaggacattgctctgtaatcacacagggtgcttttcaaatagcctggcagggaaacaggctagcctgagatcatagagcccagccaagcatgtcttatgtcttacaaagccctgcagaatcgattctagatcttggagttaaagcctgcattgccacactgtttggagatcatggatcccctcctggaaaccatttggattctgtttggaatctgtttggagattatggatcccctcctgcccaggcaggagggagcctcaggatctctgtagccacagccagggtccctaatgtcccataggccacagtgcaggagcctacaaatgcaggaggcacggtgaggtgaggttaactcatccaagagtctgaaggttggaagaggatgagctcagatgaaaaccaccttctaagcataccattagccaccctctcctcccaggcaagcccgttggtagatttcatcttccagcgttcagcaagtgtttcctgagtgtcatctgtttgctaggcattgttctaggtgcttggatacacataaagtcagcaggcagggctctggtaggggggcattccaggcagagggcacagcctgtgcaaggtatcagagaaggatgaacttgttggaatctggtgattgggagaccattgtggctggaggaattgggtctggggagagtaagaaggacgagataggtgggaaccagatacagagggccccttggccatagtgaagagtttggtgttttatttgtttttgtttttgttttttttagagatcggctctagttatgttgtccaggctggatttaaacccccagactcaagtgatcctccagtctcagcctctgagtagctgtgattacaagtgtgcaccactgggcccagctctggagtttctttgttctttttcttttttttgagacgtagtctcactctgccacccaggctggagtgcaatggcatgatcttggctcactacagcctctgcttcctgggttcaagcgattcttctgcctcagcctcccacgcagctgggactacaggcatgcaccactacg

SEQ ID NO: 35551 - DNA, 1579 bp, Artificial sequence
  DNA replication origin
agccccaggaccaggacgatgacgaggatgatgaggaagatgaggccggcaggcagagagcctcggggaaaccctcaaatgtgggccaccgcctgggccaccggcgggcgctcttcgagaagcggaagcgcctcagcgactatgccctcattttcggcatgtttggcatcgtcgtcatggtgacggagaccgagctgtcctggggggtgtacaccaaggtaggcgtggtcctcccccaggcactccagggaggttccaccaagcccgcctagctttcttgacatggggttgggggtggcagggccccccgggagatagggagtgttagggggctcccggaggtgagggctccctggccttctgcatacccacctccaggaaggtagcagggaggctacacatggagaaggaaggttccagcccattccctggccaggtgtcaaggggctgcaccctggcttaaggcggaggggggcttccccccaggacaggggttccccagagtgggcctgctctggggagcaacagaagatcttcctccccttccgagagtgagtgcgtccaggttacaagcctggctgtgggttccctcatgccacctagaatgtgtgaggatggagagagatcagggctgtgtcagcctgtaaactctgaagtgccgaggctggatgaggtccggccttgtgaactgtgaagtgctgtgcccaagtgaggccaggcctcataaactgtgaagcactggacacatcttgctgtcagcccagtccccaggaataaggacaggagagcaccgcttcctgaatacagcacatgctgcacgcccagccctgataagctgtttcacacacagcagccccaggactggggaactagcagaaattcagggtacagtgggagaagccactgggaagagccccatttagctgactcccatgcccgggagccagggtaaggggatgggagggccgccggcccaccgcctccagcgtccatctggctgtgtcctctctctttaccaggagtctctgtactcattcgcactcaaatgcctcatcagcctctccacggccatcctgctgggtctcgttgtcctctaccatgcccgggagatccaggtcagtgctgaatactgcaggaagcagctcctctcctcaaaccccagatccccccacaccagcccaccttagaccccatcccctcaaaacataaaaggatgtataattggcttctgatagaaaaaagatctccataaagacacacagtttccatcattctagatttccttgaaacacacatctgtgttttaattttcattgattatttacaaaaaagaacaggtagtgagaaagtgaggggctgagctgggactctgggacacacgggttgtttccaggctggagtgcagtggtgcgatattggctcgctgcaacctctgcctcctgggttcaagcgattcttctgcctcagtctcccgagtagctgggattacaggcgcatggcaccacaccttgctaatttttgtatttctagtagagacgggatttcaccatgttggccaggctggtctcgaactcctgac

SEQ ID NO: 35552 - DNA, 1831 bp, Artificial sequence
  DNA replication origin
aagtgacttttttttctttttcttattttagaatgactttattgcttcttatttttaaaatgacacgtgaaaaaggaaaaaaaaagatacttaagagttatacacacgttcagaaggaagagaaaagtacagtgaagggctgggcacccacacctggaatctcagcactttgggaggctgaggagggaggactgctggagcccaggagttcaaagccagcctgggcaacagagcgagtccccatctctgcattaattttctttttctttttctttctttttttttttttatcgagacaagagtctcactctgttgcccaggctggagtgcagtggcgcaatcttggctcactgcaacctctgcctcccaggttcaaatgattcttgtgcgtcagcctctcaaggctgagattacaggcacccgccaccacacctagctaatttttttttttttttttttttttttttttttgtatttttagtagagacggggttttgccatgttgcctgggctggtctcaaactgctggcctcaagcagtcctcctgcctcccaaagcactgggattacaggcaggagccactgcacccattctgtttccacttttggaggttgtgaatagtgccgttgtgaatgtgtctgtccaagcgtttgcttaaacacttgttttagtttctcttgagtctgtctaggagtgggattgctgggtcattagtaactctatgttgaactttttggggaacactcatatttcgttcgaactgtggccagtgctgagaactagagagttttgcatacgaggtcacgtttctgacttctcttggaaaaatttgaagctggtgcggttgctcacacctgtgattccagcactctgggaggctgaggcaggaggacacttgaggccaggagttttagaccagcctgggcaaaatagggagaccccatctctacaggaaatttaaaaaattagccaggcatggtgttgcatgcctgtaatcccagctcctcaggaggagactgaggcaggaggatcacttgagcccaggaggtcaagactgcagtgagctgtgattgcaccactgcactccagcccgggcacagagcaagaccttgtctccaaaaaaaggaaaaagaaaagaaaaatcctcgccaggcacagtggctcacacgtgtaatcccagcactttgggaggccgaggcatgtggatcacttgaagtcaggagtttgagaccagcctggccaacatggtgaaaccccgtatctactaaaaatacaaaaattagccaggcatggtggcaggcacctgtaatcccagctactcgggaggctgaggcaggagaattgcttgaacccgggaggcagaggttgccaagatcgtcttcatggtgcatgagccaagtgaaccaggattgcgccactgcactacagcctgtgcgacagagtgagaccctgtctcaagaaaaagaaaaagaaagaaaagaggctgggcatggtggcttacgcctgtaatccctgcactttgggaggccgaggtgggcagatcacctgaggtcaggaattcgagactagcctggccaacatgatgaaaccccatctctactaaaaatacaaaaattagccaggtgtggtggggcaagcctgtaattccagctactccggaggctgaggcaagagaattgctttcacccaggaggcggagattgcagtgagcagagatcgtgccactgcactccagcctgggcgataagagcaaaactccatctcaaaaaaaaaaaaaaaagaaagaaagaaagaaagaaaaatccgagcctgtggggtttcaggccaggct

SEQ ID NO: 35553 - DNA, 1224 bp, Artificial sequence
  DNA replication origin
aatcgggttgatggtccaccacctcctaggggtatttacaacagactccctcctgcttggaggtcccaaaggcacggccggttttccttcatcccagacccatttatttgtcttttttttttttgactggagtgcagtggcgcaatctcagctcactgcaacctccgcgtcccaggttcaagcgattctcctgcctcaggctcccgagtagctgggatcacaggcaccaccaccgcacctagcccaccccagatccatttaagtcttgggaggaaacatcggagctcccaggggtcagctgcccaaacacaacatgagagccaagcccttccttaatccctcacccttcggacacaagggccctgaggctcggagaggacgcccagtggagtggcctgcccccgtgacggggtgacttaccccgacccaccccgccgggcccgttctccctgcctccctccccttgcggcagctaatcttaaattcctagcgggtcggggatggcggcagcggtggcagtggctgctctgcgcacacagctcagcggagggtgggactcacatgttttccctaaagtccagtggagcgggcagaggggaaaatgaaagctggttaaacgtgggagatgggagacagaggggacggggaggcatccctgtgcctgctgcctgcgccccccggggccagagatcgggagtcagcctcccagggagccgaggggctgggagaaggaagcttgggagaccctggcagggaggatgagggagagggagctggggtccctccctggttgagggcagctggggacacagggttaggtccccagggaggatgattactgaagccacaaactggaagacaggaggcaccacgggtgtcttgcagtcggggagacagaagcaatggccagggtcgggaggggcccagggtcggtgaaatcatgaatgggcatggaggtccagggagacgggggctgggggctgggggggctccaggggcggcggtcgcacctctcgcagacgcgcacggtccaggctgcgatgatccaggaggagatgctgaagaccagcagcacggtgccggggcagatggtcatgagtgtcttcatgacgaagcgcgtgttgaaggtgatcttgttgagggccccgatgctgcggctcgaggcgtccgtgaagattttgctgtgcagtagcatcacccggcccagcaggtagaggcgcagga

SEQ ID NO: 35554 - DNA, 2170 bp, Artificial sequence
  DNA replication origin
cctgggcccctcccgaccctggccattgcttctgtctccccgactgcaagacacccgtggtgcctcctgtcttccagtttgtggcttcagtaatcatcctccctggggacctaaccctgtgtccccagctgccctcaaccagggagggaccccagctccctctccctcatcctccctgccagggtctcccaagcttccttctcccagcccctcggctccctgggaggctgactcccgatctctggccccggggggcgcaggcagcaggcacagggatgcctccccgtcccctctgtctcccatctcccacgtttaaccagctttcattttcccctctgcccgctccactggactttagggaaaacatgtgagtcccaccctccgctgagctgtgtgcgcagagcagccactgccaccgctgccgccatccccgacccgctaggaatttaagattagctgccgcaaggggagggaggcagggagaacgggcccggcggggtgggtcggggtaagtcaccccgtcacgggggcaggccactccactgggcgtcctctccgagcctcagggcccttgtgtccgaagggtgagggattaaggaagggcttggctctcatgttgtgtttgggcagctgacccctgggagctccgatgtttcctcccaagacttaaatggatctggggtgggctaggtgcggtggtggtgcctgtgatcccagctactcgggagcctgaggcaggagaatcgcttgaacctgggacgcggaggttgcagtgagctgagattgcgccactgcactccagtcaaaaaaaaaaaagacaaataaatgggtctgggatgaaggaaaaccggccgtgcctttgggacctccaagcaggagggagtctgttgtaaatacccctaggaggtggtggaccatcaacccgatttacagagagggaaactgaggctctgggggacaaagggacttgcccggagccttgagtcctggcagtctcagaggcaggaggggctccgccaggcctggggtgtgagggtgccttatctgggagagggtctccctgccatgcgcctagctggtggaggccctggaggggtccctggctggacccctgcttgccctcagcaccccatcctcatccctccacccagcccccaccccccatactcccacgggccctgcctgggcatgaggcctggctctcagggatgaaaggcccagtttctctggctgttaaggcttccagggctctccttgggctcttgatgttcccccatgcagctctcacacccctgatgggtggggtcagaactagggttaggggtatggggtgcccctcgtcaggtatccctgaggtccaagctgggtccttgcagggctctgggggggtggggcacggggcagggccggcaggcagccaatcctaaattctgagcctggcgacaatgcttgaagcccccttgcctgcctcgctctgacccacccccgcctcccgcatgtcccccagccgtgctcctgggtggtcccgcggcaccccccaccatcgctccgtctggatctggggctcacccacccaccgactagagggcacccccccgcccctcctgccctctgggggtcaggcagcttggggctcagatgttttggtgtaagatgggggtcagtcagctgggcaccgtggctcatgcctgtaatcccagcactttgggaggccgaggcgggtggattaccaggtcaggagattgagaccatcctggctaacatggtgaaaccctgtctctactaaaaatacaaaaaaaaaaaattagatgggcatggtggcgggcgcgtgtagtcccagctactcgggaggctgaagcaggagaatcgcttgaacccgggaggtgtaggttgcagtgagccaagatcatgccactacactccagcctgggcaacagagagagatattgtctcaaaaaaaaaaaaagatagggtcagtccctgggcctttacccagcaagtgtcctagaagcccagactggaggtgcctggagtggcattcgacttccgcgggagtgaagacccccaaatgccaatatttggggagcccccatctccttccctctggagcctgaccccagccctatccttgggctgtgtcacccactgtgcctggcacaggcctcccctg

SEQ ID NO: 35555 - DNA, 1097 bp, Artificial sequence
  DNA replication origin
actgacagatggagggacgctgatcaggcacagctcgtgatgggatgagcaccctgtcagcaaggggtatgcaagggctggtggagcgggcagctggctggacctcccaggatcatacacatggaccctcacccttaccatgatgccagtgagcaggcacacacccttcccgcagtaggtgtggggcaccatgtcgccgtagccaatggagaggaaggtgatggaaatcagccacatggcccccaggaagttgctggtcacttcctgcttgtcgtggtacctgggggagccagagtgggaagagggagggctcagtctataccatcccctttgcctccatcacaccccctggggcagcgccagggctggagggccctgagtccacctcgctgcgttggggctatgtcctgtgggtacaggacaggcgcaccctctcccccgctacagcccttccacattccctttgcctgcccccccaagctgcttccctggatggggcagagaggggcccaggtgaggttgtatgaacatacaatccccctcccaacgacagacacacacagacagggggatgggtgaccacagcaccagaagcagcaggaggtggaggcaagaattcaggacagacaccaggaagaactttctcagccagcaaggccccaaggagggaggaggactggaggaggtgggaggctggaggatcaccacctggggctcgagtgaagaagggacgtccatataggaaggacatagactggaggacagcatgagtcccccaactcagcctatgttgcatctgggggttgggaagagaggggcatcggctttggcactggggagatgcctggggctatatttgggacccagggagacaggccccaagactgacagaacttagtcctggtcacagccaggcttgggacttcggccagaggggctgcaaagaggttctgcctgtggccatgctagcgggccgagggcttggctctctgggtctgggggtggctctaggatctgttcccactcagctctcagtccccaaatccccttggcctttttctggagactgggccccctctgacctggcttccagctaa

SEQ ID NO: 35556 - DNA, 1239 bp, Artificial sequence
  DNA replication origin
agtcttggggcctgtctccctgggtcccaaatatagccccaggcatctccccagtgccaaagccgatgcccctctcttcccaacccccagatgcaacataggctgagttgggggactcatgctgtcctccagtctatgtccttcctatatggacgtcccttcttcactcgagccccaggtggtgatcctccagcctcccacctcctccagtcctcctccctccttggggccttgctggctgagaaagttcttcctggtgtctgtcctgaattcttgcctccacctcctgctgcttctggtgctgtggtcacccatccccctgtctgtgtgtgtctgtcgttgggagggggattgtatgttcatacaacctcacctgggcccctctctgccccatccagggaagcagcttgggggggcaggcaaagggaatgtggaagggctgtagcgggggagagggtgcgcctgtcctgtacccacaggacatagccccaacgcagcgaggtggactcagggccctccagccctggcgctgccccagggggtgtgatggaggcaaaggggatggtatagactgagccctccctcttcccactctggctcccccaggtaccacgacaagcaggaagtgaccagcaacttcctgggggccatgtggctgatttccatcaccttcctctccattggctacggcgacatggtgccccacacctactgcgggaagggtgtgtgcctgctcactggcatcatggtaagggtgagggtccatgtgtatgatcctgggaggtccagccagctgcccgctccaccagcccttgcataccccttgctgacagggtgctcatcccatcacgagctgtgcctgatcagcgtccctccatctgtcagtccacccctcccctgctctgctcttttcctctgacgtcacgtggaagccacacccacaggcttcctgggacatctccatgcggtccttccaggcctagatatgcagctcccaccatgcctgcccagtaagaagctgcggtccactctgaccagagagtcactgtcacccctttattctctacagcctgatttattcacagcctttggatccagggcaaggggcttgatgctgatgtgccttagtttcctcagctgtgaccagcgctacttcctctgctttgcaagggctaagtcggttatttatgtgagaatcccagaactgtgaatgccatggacatgctataactacctgct

SEQ ID NO: 35557 - DNA, 2345 bp, Artificial sequence
  DNA replication origin
aggtttttctgattcccacattcatcttggtacccagggctggaggtctacctcctgggacatcaccagtgccttccagccatgcacacaggcagccactaggcgggtcctgctttattcagaaccagcacggacccctccccgggctgctccatgcccaccgggggcctggggagagtcgggggaccaggtgaccagaggaagctccgggctcccctgccctcacccatggtccagccctgccctctgcctgggcagtctgggcggggcaggcctcagtccactcagcctgactcagcgttggcttcttgaactccaagaggcgccactgtacaaggcttcccggaggtggcggccacacgatggccaagatttaggggtctggtggcgggcagggccgtcacccgcagtccgagggggccacgggcgtccaccggcagggggagctccgggctgcctggtcttgggggccggggccgggcctgggaggcaggggaggcgggggtgggcgtatggcttgggcgatgaggccaggcagggcctgtagagaggcacccagcgcatccaagcggctttccagggtggccaggcgggcctccagctcctcgtgctgagcgtgcagctccgatacaaggtcgtacatgacggtctgggtctgcgggagacagagaggggcaggagagaggcgccgctgagtgagagaggaaaggacgataccacgacaccaatgacagagagggacagcccacacgctccaggtgggtgccagccactaatggggcccgtgtgaggggtggctgggaggatacccccagccccagaggtcccttgctgggcccagggaaggattggagagtggatgaggggagagactggtcttttctttctctcttttttttttttttctttgagacagagactccctccgtcacctatgctggagtgcagtggcccaatctcggctcattacaacctcctctttccgggaggcgcccagcctaaaagacaggtcttaaatgccaagctcagctggttgtggtggctcacgcctgtaatcccagcactttgggaggccgaggcaggcgaatcgcctgaggtcaggagtttgagaccagcctggccaacatggtgaaactttgtctccactaaaaatacaaaaattagccggatgtggtagcgggcacctgtaatccccgctactcgggggggatgaggcaggagaatcacttgaacccaggaggtggaggtttcagtgcgcctgagtgacaagagggaaaatccgtctcaagaaaaagaaagcaagcaagccaagctcagggctggcaggcctgggaaaggcctagtgaggttctggggtggggggacatgcccagagctgccctgggggtctagtggccacagggcacacatagccacaggcagtgctcaagtggtacccacagacctgggggatgtttggggctgacgttgctccaggctggggaacagcaggagcgtggggacatggctgcctaggaagaagaggaggggggaccctgttcagtcgtgaactgccacccctcccattaggctggggaggggacaggggtctaatgacgaaggtgactgccctgagaatctgacgcaatcacagactgggaacacgacagccacaattactgttacagcagccagtggggcatccctaccacctcaactgcccggttctggcactgtccccctatgggcaggggaggccggccaggcagggacagtcctgggtgcagacaccactctggccaccaggtggcactagaacatcactccacggctctgagcgcagctgggtcaggacaccggtttgccaccccgcggcggcctccgtgggaggatggaggcagtggtggaaggaagacaggacaggacgaggtgcccaccccagctcctctgtcctctcacacccagcctcttcctcccagcttcctccactgtgccccctacccttttccctccatcagtgcaaggcagaccccactccgagtgcaaacaccttgtgggggcctcccctcctagcaccactgaccttaccctggcctctctcaggcaccacagtccctagagccagagggtgacatctggaggccagagcagtgtccagccttcaggtggttctttttagtcttttctgaggtttaaaatttttatttttatttttatttttgagacgaagtctcgctcttgttgtctaggctggagtgcagaggcatgatctcggctcactgcaacctccacctcctgggttcaagcgactctcctgcctcagcctcccaagtagctgagattacaggtgcccgctaccacacccg

SEQ ID NO: 35558 - DNA, 2867 bp, Artificial sequence
  DNA replication origin
agcacgaggagctggaggcccgcctggccaccctggaaagccgcttggatgcgctgggtgcctctctacaggccctgcctggcctcatcgcccaagccatacgcccacccccgcctcccctgcctcccaggcccggccccggcccccaagaccaggcagcccggagctccccctgccggtggacgcccgtggccccctcggactgcgggtgacggccctgcccgccaccagacccctaaatcttggccatcgtgtggccgccacctccgggaagccttgtacagtggcgcctcttggagttcaagaagccaacgctgagtcaggctgagtggactgaggcctgccccgcccagactgcccaggcagagggcagggctggaccatgggtgagggcaggggagcccggagcttcctctggtcacctggtcccccgactctccccaggcccccggtgggcatggagcagcccggggaggggtccgtgctggttctgaataaagcaggacccgcctagtggctgcctgtgtgcatggctggaaggcactggtgatgtcccaggaggtagacctccagccctgggtaccaagatgaatgtgggaatcagaaaaacctgttcccatcaccggcctagcctagaatcctagcctagaagccctctctccctctgggctggagctcagtgagggacaactctctagggacacctgtaccagccccacctggcgctgagatccctcagacagcatggcccagccctggccagaagcatcgctccccttcaaccaaccgcgttgatggacacccactgtgtgccaggccccagcggggcccatgggggaggtgacctgggtgaggaaggtcatttgggtttttgtgagatttgtattgagcacctgctgtctacagagaatgtgatgatgtcaattaccacactgattcctcatcagaacttgaccatggtgggatgggggggaaactgaggcccagagaggtgaatctacctacctgggaccacactgcgaggaaggatggtgcattcaaactggaaatcccctaggccaaagtaaagaaccggactggctgggcacagtggctcacacctgtaatcccagcactttgggagggtaaagcgggcggatcacctgaggtcaggagttcaagaccagcctgggcaacatggtgaaaccctgtctctactaaaaatataaaaattagctgggtgtggtggtgcacgcctgtaatcccagctacttgggaggctgaggcaggataatcgcttgaacccaggaggtggaggttgcagtgagaaaaaacctggacttggtggaagggactccatggaggagccatggggacgtcaggaggaggggttatttggtgacatccaggggtcagagagacccttcaggggtgggctacaggggagggttccagacacaagtagaatcagaaaggtccctggaggccatgggcttgggtgctgggagcaacaggcatttacttggcagatgctgagccctgggtggggcgaggaggcctggctcctggggagacgacgctgtgcatagccgaggagccccaggtcctggcagcctctgataaggccatccatcgcctggctcaacgagataactaggccgtggctggtgcatgaatgaccagcttgggcccacgcacgagaagggtatgaggaggtgctggtcagacccgggttcgagtcctgactctgccactgctgggtgactctgagcagtggctgcccctctggggccttggttgtttcatctgtaaaatggggtgacagtctatttaaccagaactccctaaaaagggccaggcaactggtaggtgctcaataaatgctccttcccgcctgagggatcacactggagtctttggcaggactcatcctttctaccctgttgtctggctggggaaactaaggcctgagaaggaaaggggctgtccttcagggtgagaacccagggtttggttaaggaacatccgtgggtgtaccttctgtgccagtggtagctcccaggtctgatggcagaggcacagtaaacccatagtacttaaaaaaaaaaaaaaaaaaacaccaaagccataaagttatgaacaggccgggcgtggtggctcacgcctgtaatcccagtacttcgggaggctgaggtgggaggatcacctgaggtcaggagttggagaccagccggccaacatggtgaaaccctatctctactaaaaatacaaaaattagctgggcgtggacgactcctgtcgtcccaggtactcaggagactgaggcaggagaattgctagaaccagggaggtggagattgcagtgagccaggatcacgctactgtgccccggcctgggcgacagagcgagactctgtcttaaaaaaagagagagagaaagagaaaagtaaacaaggcaagaaagaaagagaaaaaaagaaagagaggaaggagggaaggaaggaaggaaggaaagaaagaaaaaacagagaaaagtaaacaaggccagaggtggcaaggggactctgaggaagtggcatttgggcgtgggcgggatgggtgggagaacggatctggtagcggaacggcccagtgcggaggcgaagagagctactcgaggtggattttgtttgagggacagccatgaagtgacaatgacggggagactgaggcggtgccgggttctgggcggcggggggggcaggggtagtgaggggcgaatgagaccatagggctgagatctgcggccgcctcggtgcctccccagccacctccgcccctgcctgcttctgattcaacagcgccgaccctacaaaaacagggcccgcccatctccgaggatggcaaag

SEQ ID NO: 35559 - DNA, 2572 bp, Artificial sequence
  DNA replication origin
ccggctaatttttgtatttttagtagagacagggcttcaccatgttggccaggctggtcttgaactcctgacctcaagtgatcctcctgcctcagcctcccaaagtactgggattacaggcataagccactgcgcccagccaatttttatgtatttaaagagatgggggccgggcatggtggctcatgcctgtaagccaagcattttggaaggccgaggtggatggatcacctgaggtcaggatttcgtgaccagcctggccaacatggtgaaacccgtctctactaaaaatacaaaaattggccgggcactgtggctcatgcctgtaatcccagcactttgggaggccgaggcgggcagatcacgaggtcaggagatcgagaccattctggctaacatggtgaaaccccgtctctactaaaaatacaaaaaattagccgggcgtggtggcgggtgcctgtagtcccagctgctcgggaggctgaggcaggagaatggcgtgaacccgggaggcagagcttgcagtgagccgagatggtgccactgcactccagcctgggcagcagagggagactccgtcccccaaacaaacaaacaaacaaacaaacaaaaattagccagcgtgttggcgggcacctataatcccagctactcgggaggctgaggcaggagaatcactggaacctgggaggcagaggttgcagtgagccaagattgcgccggcgccactgcactccagcctgggtgacagagtgagactctgtctcagaaaaacaaaacaaaacaaaacaaaacaaaacaaaaagttagccgggtgtggtggcgggcacctgtagtcccagctactcaggagtctgaggttgcagaatcacttgaacatgggaggcagaggttgcagtgagccgagatcgtgccactgcactccagcctgagtaacagagtaagaccctgtctcaaaaacaaaaacaaacacaaaaacggagtggagggtgggaggtctcattatgttgcccaggctggcctctaacttagctcaagcaatccttccgcttcagcctctgtgatagctgggaccacaggtggacccaccaggctcgcctctccagtgttttttgtttatttgtttttgtttttgtttttgagacggagtttcgctctgttgcccaggctggagtgtagtggtgccatctcagctcactgcaatctccgcctgccgggttcaagcaattctgcctcagcctcccgagttgctgggatttcaggcgcccaccagcacgcccagctaatttttgtatttttagtggagacaaagtttcaccatgttggccaggctggtctcgaactcctgacctcaggtgatctgcccgcctcagcctcccaaagtgctgggattacaggcgtgagccaccgcacccggctgcctctccagtgttttaaggaagtcgccgttgagtgtctgggccggccttcgggtgaaagcggtcccaagagttctccgagtcgccggggaagggaagtgcctcctgggccccttcctgccctgccccaccgcacttgcttctgtttccaccgctggggagggaagggtcccccgcacctgtggctcttgtgtgcccaaaacttctattgcccgcagcgctgggaaaaaagtggggctgtcgagaatctgagctgcctccctcccggcccattttacagacgggtatagtgaggtctggcttggcccggaggaatagccagggcggcccagagaggatgatgccctcccgcagccacacagtagggtgtgagggtatggactgcctccttctgtgacccctggctcgctggtgaccagctgcgtggcctaggggcgcttggggtgcgagaaggactgaggttcggggaagagtagggacctgcccaagacccagactcccaggagaatgtgaccccacttcatctcttcccctctgggatgcatttccacctcctcaccgggaaataccaccagacccccaaccctaccccagggaagaactcagcgctgcagaccctgtggggtaaactgaggtggggccctgggtaacacgagttgggggccttctctgagaatcagggactccaggcctgggatcaacggggacactggggtccaccagggagatctcccactctacttcccgcgggtttcctggactctaataggagggtccccctgctttgaaaggggtctccccaccgcacagtctaagttgagggagtctggctccagagaagggaacacccagaccctgggtagacgttcccggttagtgggggtcctgaccagggcggggtgggtgtccaggctggagtgcagtggtgcgatctcagcccattacaacctctacctcccaggctcaagcgatcttcccacttcagcctgtagctgggactccaggcgcgcgccactaagcctggctaatttttgtagtttttggagacatggggtttcaccatgtcgcccaggctagtcttgaactcctgacctgtgggagggtcaggaccccgggaagggggtttccccctccttgaaaaggatcacccgacc

SEQ ID NO: 35560 - DNA, 893 bp, Artificial sequence
  DNA replication origin
gccgcgaccccgtctgggaggtgaggagcgtctctgcccggccgccccgtctgagaagtgaggagcccctccgcccggcagccgccccgtctgagaagtgaggagcccctccgcccggctgccaccccgtctgggaagtgaggagcttctccgcccggcagccaccccgtccaggagggaggtggggggtcagcccccgccaagccagtcgccccgtctgggagggaggcggggggtcagccccccacccagccagccgccccatccgggagggaggtgggggggtcagccccctgcccggccagccgccccgtccgggagggaggtcggggggtcagccccccacccggccagccgccccgtccgggaggtgagggggcacctctgcccggccgcccctactgggaagtgaggagcccctctgcccggccaccaccccgtctgggaggtgtacccaacagctcattgagaacgggccatgatgacaatggcggttttgtggaatagaaaggggggaaaggtggggaaaagattgagaaatcggatggttgccgtgtctgtgtagaaagaggtagacatgggagacttttcattttgttctgtactaagaaaaattcttctgctttgtgatcctgttgatcggtgaccctacccccaaccctgtgctctctgaaacatgtgctgtgtccactcagggttaaatggattaagggtggtgcaagatgtgctttgttaaacagatgcttgaaggcagcatgctcgttaagagtcatcaccactccctaatctcaagtacccagggacacaaacactctgcctaggaaaaccagagacctttgttcacctgtttatctgctgaccttccctccactattgtcctatgaccctgccaa

SEQ ID NO: 35561 - DNA, 1692 bp, Artificial sequence
  DNA replication origin
cggggtggtggccgggcagaggggctcctcacttcccagtaggggcggccgggcagaggtgccccctcacctcccggacggggcggctggccgggtggggggctgaccccccgacctccctcccggacggggcggctggccgggcagggggctgacccccccacctccctcccggatggggcggctggctgggtggggggctgaccccccgcctccctcccagacggggcgactggcttggcgggggctgaccccccacctccctcctggacggggtggctgccgggcggagaagctcctcacttcccagacggggtggcagccgggcggaggggctcctcacttctcagacggggcggctgccgggcggaggggctcctcacttctcagacggggcggccgggcagagacgctcctcacctcccagacggggtcgcggccgggccgaggctctcctcacatcccagacggggcggcggggcagaggcgctccccacatctcagacgatgggcggccgggcagagacgctcctcacttcgtagatgggatggcggccgggaagaggcgctcctcacttcctaggtgggatggcggccgggcagagacgctcctcactttccagactgggcagccaggcagaggggctcctcacatcccagacgatgggcggtcaggcagagacgctcctcacttcccagacggggtggcggccgggcagaggctgcaatctcggcactttgggaggccaaggcaggcggctgggaggtggaggttgtagcgagccgagatcacgccactgcactccagcctgggcaccattgagcactgagttaacgagactctgtctgcaatcccggcacctcgggaggctgaggctggtggatcactcgaggttaggagctggagaccagccgggccaacacagcgaaaccccttctccaccaaaaaaaccagtcaggcgtggcggcgcgcgcctgcaatcgcaggcactcggcaggctgagacaggagaatcaggcagggaggttgcagtgagccgagatggcagcagcacagtccagcttctgctcggcatgagagggagaccgtggaaagagagggagagggagaccaaggggagagggagagggagagggagcttaaaaattgttaaattgttatacatttaaggaaaaaacagtgacactggaggggcgaggccagtggaggtgctgtgtgacctcgggcagagccccacccatctctgggcctttggggtccgtctgcgaaatgaattgagggaggcgctggctcagtagtcccttcagggttacctaatcccgcttctcctcccggacttaacggcctactgtctcccctctagtatccattgaaacctggcctaaggtcccagaccttcctttcaactccaaagacccatcctcccaggcagccttccaggctgatcactgtgcctccaactccgtcgttcctgttccgatccccatcacgggctgagggtgaccgtgtttgtttatgaccgccccctccacccacacacctcactgaggtggtggaagtctcctgagccaggctcagaggcggacagtcacggcaggggatgggttcagcggcagcgcattacgctgccacgagagggcgccagcgtcccgcagacgacgcagaggcaactcccgctggagaaactccatg

SEQ ID NO: 35562 - DNA, 1548 bp, Artificial sequence
  DNA replication origin
tgagggaggcgctggctcagtagtcccttcagggttacctaatcccgcttctcctcccggacttaacggcctactgtctcccctctagtatccattgaaacctggcctaaggtcccagaccttcctttcaactccaaagacccatcctcccaggcagccttccaggctgatcactgtgcctccaactccgtcgttcctgttccgatccccatcacgggctgagggtgaccgtgtttgtttatgaccgccccctccacccacacacctcactgaggtggtggaagtctcctgagccaggctcagaggcggacagtcacggcaggggatgggttcagcggcagcgcattacgctgccacgagagggcgccagcgtcccgcagacgacgcagaggcaactcccgctggagaaactccatgcgacttttctttggggaaactgaagcccagagagaggtcacgccgtcccgtggccacaccgcagctgtggacctgggggtgcccgagcgtcccctgcattcagctctgtggcgggacgggggctgaggatgactggagcaggcacaagggctgcggggaaggtagggtttgccagaggctgaaaattgggaagggaacatcatttcgtaggtaccgctcctgggcgaatgcgccgaggcgcgaccgagtgacggtatgtcaagagcaggttgatgacccgggagcgaggctcttggaggagtccagctggggctgcacgatgatccatgcacaaccttctgaggtcaggactgatttttactttctcccggctctacagaggtggaaactgaggctccaagaggttgtcatttgcccagagccaccagctaagcgggacttgaatcaggaaaggggtgcagcaggcaccagtgtggagggcggtcccacccacctcctccacttctccctttgcatagcgggggaaacaggcctggaacagtcataggctctctggccctcaactggggcgagagtcccccgccccaaatcgggctggacatgcctcgagtcacgtcaacgaggggcggctggtgagtgattaagccgagaggctgaaggctctgctaggtgacctcaggcctgggccctgcctctgcacctctttttttcctctttacccccggggtccgcgagagaccagctctggcagcctaagggcttcagtttctccccggggtccgcgagggaagggggcagccggcggtgagcaggggcgtttgttattttgctccacgcctgggcagagccacgccccttgtcgcgctattggtggagtcccttcccggggcggggaagagacggtgaccccacccccccccgccctgccgtataaaagcggcgccgacgcacggcgcggggattttctgctccggttggtgagcgcgcctgcgcgttgacggcgattttgcgttctgaggctgcagcgtcggcatcttgagctgccggttcgcgagttcgaggccaggttccgcctgtcgtgggttcgcaccccggacgcgatgctattcgacaaggtgaaagcgttctcgg

SEQ ID NO: 35563 - DNA, 1864 bp, Artificial sequence
  DNA replication origin
caggggcgtttgttattttgctccacgcctgggcagagccacgccccttgtcgcgctattggtggagtcccttcccggggcggggaagagacggtgaccccacccccccccgccctgccgtataaaagcggcgccgacgcacggcgcggggattttctgctccggttggtgagcgcgcctgcgcgttgacggcgattttgcgttctgaggctgcagcgtcggcatcttgagctgccggttcgcgagttcgaggccaggttccgcctgtcgtgggttcgcaccccggacgcgatgctattcgacaaggtgaaagcgttctcggtgcagttggacggcgcgaccgcgggcgtcgagcccgtgtttagcggcggccaggccgtggcgggccgggtgctgctggagctgtcaagcgccgcgcgtgtgggtgccctgaggctgcgcgcgcggggccgcgcccacgtgcactggaccgagtcgcgcagcgcgggctcgagcacggcttacacgcagagctacagtgaacgcgtggaggtcgtgagccaccgcgccacgctcctggcgccaggtacggatggaggacccctgctccaacaccagttgtgtgcctcccaccacctggacggcggtacctccgtcagccctgggaccccagcgcaaccgctcagtcgcctcctttttctcctacctgcagataccggggagaccacgacgctgcctcctgggcgccatgagttcctgttcagcttccagctgcccccgtaagtcctctggggtgcagggttgccctaagcctgcagccccttccagattggtacctccaatactggatatctgggcacctctgagccccaagactctccccctgggaggcccccggagtgtctgtgtctccttctccctgcctgcttgtctctgtatcttgtcccctgaagtcccgtccctccaccctaggaccctggtgacatccttcgagggcaaacacggtagtgtccgctactgtatcaaggccaccctgcaccggccctgggtcccagcacgccgggcaaggaaggtgttcactgtcatcgagcctgtggacatcaacacgccagccctgctggtgagtggccacccttggggaggtaggttgggagtattgtaggaaggggcctgcctggctgctgggcgacaccaaccaataagatggaggtcataggtgggccctggcagggagggaggcaggtgtgggaatgcgtgtggaatccactgggatctgcacccatttgccgtgtgactctgggcaagtgtcttgaagccctctctgagcctcagatgcctcttctgtgaaatagaccagagctagggcttaccaagtgtgaattacacaccaaacacttggcttatacatttcatttctggctttataagatgggttgtgttcctggctctatttaacggatagttcctggattgttaaaaagaaaccaagccctgcccaaagtcctccctcagctgggggtggtttggaagctccacagcgactgtggtttgcacaaagtgactcatccatgtcactttcctctacaccgacaggcacctcaagcgggggctcgggaaaaggttgcccgatcctggtactgtaaccgtggcctagtctccctttcggccaagatcgaccgcaagggctacaccccaggtagcaggcggaccggactgggttgggacgggggctggtgttggggttgcaggaggggaaactgaggccccactgctccttgctgcaggagaggtcatccctgtctttgccgagatcgacaacggctccacacgtcctgtgctgcctcgggcagccgtggtgcagacacagacgttcatggcccgaggc

SEQ ID NO: 35564 - DNA, 1401 bp, Artificial sequence
  DNA replication origin
tggtgcagacacagacgttcatggcccgaggcgcccgaaagcagaaacgggcagtggtggccagcctcgcgggcgagccggtgggccccgggcagcgggcgctgtggcagggccgggcactgcggatccccccagtgggtccttccatcctgcactgccgcgttctacacgtggactacgcactcaaggtagggcatcctgctggccctgggggacagtgcctacattcaccctgtattccctcagactgggggaagctgaggcctcagtctccccaggcataggagggaggtgggggttggggaggctgcctgggcaccctcccttatggttccttcctccaggtctgtgtggatatcccaggaacgtccaagctgctgctggagctgccactggtgatcggcaccattcccttgcacccttttggcagccgttcctccagcgtgggcagccacgccagcttcctgctggactggaggctgggggccttgccggagcggcctgagggtaagctcccaccctgcttgcatgcagagggtgggtggatacacggagaggtggatgccgggtcaactctctcaccacgagtcccccggaatcccaaccaaaggacatacagcctggcagccccagagctggcacaagccagctcctggcccctggtcccttggagcagggctctctcctgccaacctcacccaccctgtctctcgcttccagctcctcctgagtactcggaggtggtagccgacactgaggaggcagccttggggcagagccccttcccgcttccgcaggaccccgacatgagccttgaaggcccgttcttcgcctacatccaagagttccgctaccgcccgccacccctgtactctgaggtgagctcaggggtctgagaaccacccatgcctctctgggccctgggagccttgatggggtggcagacatagtagatgggttttttttgtttttttgtttttttagacagggtcttgctctgtcacccaggctggagtgcagtggcataatcatagctcactgcagcctcgacctcccgggctcaagcaatcctttcgcctcagcctcttgagtagctgggactacaggcacacgccaccacatcctgctaatttttgtgttttgttttgttttgctttgctttttgagatggagtttcagtcttgtcacccaggctggagtgcaatggtgcgatctcagctcacttcaacttccgcatccctggtagagcgattctcctgcctcagccttccgagtagctgggattacaggtgttagccaccacacgtggctaatttttgtatttttagtagagacggggtttcaccatgttggtcaggctggtcttgaactcctgacctcaggtgatggcctgcctcggca

SEQ ID NO: 35565 - DNA, 962 bp, Artificial sequence
  DNA replication origin
actggggcagcaggaggggaatttggggtgcccgggcctagggacagaggggacttgctgagaaggtgatgtgaggtctcagatgtgcaggcggaggaggtcttggggagatctagggagacagagtgccaggtggaaggtatggctggtgcaaaggccctgaggtgggcacgaactggcagaggggctttggcttcattcaggaaggtctaaccccacagcaggatggggagccatcaggaggttgtgctggtggggccaccaggacaagctgtcctgtaactggagctcagcaggaatgcgtccccctcccacccccacccccaccccatctctggcgctctttgcttgggacagaatgtgctgggaggagaggctggcggtggccgcgcctggtggctggagcggggaggctggaggattcctgaacagtggcccggctgggctgggctccctgccagcgtgggtgggaaaacaagcagcgggcgccctgactgcttgtcaccccttgtcccccagctggccgggccagggcaggaggcagagatggtgagagagtcagggacccaaagagacagagagatggtagccaagagagatagtgagagaatcagaggcagagggagacagagacagggagaaagagacagaagtacagaggcaataagactgagagacagagacagagacagtaagcaagacagatattgagagagagacagagatgggaaagaaaagatggtgagagtcagaatgaaacagacagagacactgagagatagagacctagcatttgactctgcatgggggacacgtctgactctaggaggtcttgggagcaagtgcaagggatgacacctccacccccatcagaatcttcatctgagctgggcatggtggctcacgcctgtaatcccagcactttgggaggccaagatgggcagatcacctgaggtcagaag

SEQ ID NO: 35566 - DNA, 1502 bp, Artificial sequence
  DNA replication origin
caggaggcggagattgcagtcagctgagatcatgccactgcattccagcctgacggacagagtgagaccctgtctccaaaaaaaaaaaaaaaaaaaagggcagggcaggtagacattcctccagacccctgtgttaaggacttagggatccccttgcctgtaccatcttggctggtgggccttggcgaagtcacttgttccctgtgtctcagtttccccacttgtcaatcaggcccagcagggttgaagtgttggagcacagggggatccatcccctctctgatcattcttgggctgagtcctttttaccccgcacccacgccctcatcttttattgttgttttctgtggatcctcccagatcgggccgcgcagtccacccagcccagcgtggcaggcactgatggccaccggctgagtcaccatttcctcctggccccttgcccgggcccagtgctttctggggactttcctgaacatcaaaaacaaggtggggggtgggggggtgactcccgggtgagggaagctagggcagacacgcgtgtgtttggataggtttgtgcataccctggcgtgggttcaaagcccatgtctgggccccacctgtaggatccaggccataaccgcatcctcctaggagttggggtactccacatgtgagcacctggtgaacactctgtgcccggctgcttgtgcccgagttcactggctggtgtttctatgttgctgacaggcttatgtgtgtgcgtgtgtgtttgcacgtgtgtgtgtacatcatgactgccctgtgcctggagcccagcgacagagaggcccagcccctcgctcaaaaggtgcatctgaactccagccgcccctgcccctcaatgcacccagctcctcgctcagaaaggtggatctggtggagataactccctgggccaaggcaggggggcttgggaaatcctgctgcattagggtgcaggggtggcggaggcagggtgaggcagaggtggggtggtcagaactgtggatccacatggatgagcctgggcgggctgagctttgggaggaatagatgtcaattgtaaaaaccttcactaagccacctactgtgtgttcagggtgctgggacacagtggggacctggtgtaatagacaccacatcaacaaacaagtgaatatgtaaccccagggacatggggaggaccaggaaattaaatgcactggggcagcaggaggggaatttggggtgcccgggcctagggacagaggggacttgctgagaaggtgatgtgaggtctcagatgtgcaggcggaggaggtcttggggagatctagggagacagagtgccaggtggaaggtatggctggtgcaaaggccctgaggtgggcacgaactggcagaggggctttggcttcattcaggaaggtctaaccccacagcaggatggggagccatcaggaggttgtgctggtggggccaccaggacaagctgtcctgtaactggagctcagcaggaa

SEQ ID NO: 35567 - DNA, 1560 bp, Artificial sequence
  DNA replication origin
tggcccctccagtctccaacccggaggagaaacccgcccctcttcccgtcccccacccccagcccgcccggcgggtgttttttttttcctcctcctgggtattttggtttcggcaggaaccgccccggggagcaggcggttcccgctggcagggtcagcccagggcggggacgggagccaggagcagctccaggccagggaaggtggggaggactcggggaggaagcctggccgtggccccgaccactgggaccaggcaggtcgcgtccccatcccaatcttccggtgcctcagtttccccacctggaaagcggggctctgcgtgatcgcggcacagcccgtggaggcgcgtcgcgcatggggccgggcggggtttccacgtctccgccaaggttctgtccactcagttattaaacattgatggatcggggacagagccagaggccagtgccccaaaccggggcgggaggtggggaggggaggaggggggagggacaggccagaggtgggggctgggggcggggaggatggggagaggtgcccgcaagaggggtttatcaagatcaggaggattctcaggtagcacacccaaagcacaagccagcaaaggaaaatagatcaacccgactccacacaatgcaagacttttcttctgcaaggccactattaagagaggcctggcacagtggctcacacctgtaatcccagcactttgggaggttgaggcaggaggatcgcttgagtccaggagttcaggatcagtctggacaacatagtgagatgagaccttgtctatacaaaaaatatttaaaaattagccaggtgtggtggtgtgtgcttgtatagtcccagctactggggaggctgaggtgggaggatcgcttgaacccaggagttcgaggctgcagtgagctatgattgcgttgctgcactccagcctgggcaaaagagggagactctatctcaaaaaaaaaaaaaaaaatgacaacccacagaatgggagaatatatgtgcaaattttgtatctgataagggtcaaaaagataaataatccagtcagacatggtggctcacgcctgtaatcccagcactttggaaggctgaagcgggcagatcactcaaggtcaggagttcaagaccagcctggccaacatggtgaaacattgtttctactaaaaatacaaaaattatccgggcatggtggctaacgcctgtaatcccagctacttgggaggctgaggcaggagaatcgcttgaatctgggagacagagattgtggtgagccaagataacgccactgtactccagccttggcatcagaacatcaaaaagaagaagaaggaggaggaggagaaggagaaggataagaagaaaaaggaggccaggcgcagtggctcacgtctgtaatctcaacactttgggaggctgaggtgggagggttacttgagctcaggagttccagaacagcctggccaacatggtgaaactctgtctctagtaaacatacaaaaattagccgggcatggtggcaagagcctgtaatcccagctacttgggaag

SEQ ID NO: 35568 - DNA, 1445 bp, Artificial sequence
  DNA replication origin
catggtgaaaccccatctctactaaaaatgcaaaaattagccaggcttgatgatgggcacctgtactcccagctacttaggagctgaggtgggaggatcgcttgaacccaggaggcagaggttgcagtgagccgagattgcagcactgcattccagcctgtgtggcagagcaagactctatctcaataataataataataaataaactttccttctctgtacactggggatcagcggggtgctgactttttcaatggctcttgagatgcactgagtgcctgtagaatgcccacagcagtgctggccacacctcaaggtcccagcgccttcaggggccaggcatggctggagaccagcagcagggagggggcgagaggcagcccacgaggtatcctggagatagtggcagtgagtggtcagtccagggaaagggaaggaggatgggctttaggctctcaggggtgggtgggtgggtgggggttctgtgtcatcacagagagagatggaaggatggagagccttgtgtgttaagcatctttcccccctcaaggttggacacttggggctgtttcctggggtgccgccttctcccccaaggcttccaatctgcctgcagggctcaggacaggtccttcttgtgggagtgagggcgccggggtcttcctgacccatccatggtggcatccccctccttctctcacccagttccacacctagcagactgtggcaatcccaaagggcacggggatcccagtggctgagggaggtcgctgcctcctggagaaatgttattaataattgccctgactgctagtgggccaagtgtgcttgcctgggccagccctggcaggcctctccctgccatgcaccctctactgtctttccccatgctggcttcagacactggtgccaccccaggcacacctccacttctctctgccctccagactgttggtcttactgttctttcctgcaggggtacctcccgagagtgtctcccaaatatgcatctcaacctctgaggactaaagggtggtggatgaatggatagacaggtggatgggtgggtaaatgaatggatggatgaattaataaatacatgtatgtatgtatggatggatggatggatggatggatggatggatggatggctggatggatatatcggtaggtagataaatggatggatgggtgggtgtatggatgaatgaatacgtggatggatagatggatagattggtgactagatggatagatggatggttgggtgaatggataatggattaatgaatgcatggatgcatggataaatacatggatggatggatggatggatggactaatgaatacatggatggatgggtgaatgggtggatggtgggatggatggatggatggatggatggattaatacatggatggatggatgaatggacgaatggacg

SEQ ID NO: 35569 - DNA, 1323 bp, Artificial sequence
  DNA replication origin
ggtttcaccatgttggccagggtgatctcgaactcctgacctcaagtgatctgcccacctcggcctcccaaagtgctgggatacaggcgtgagccactgcgcccggccaatgcgctgggcatattgattaacctatcttagcctcagtttcttcatctgcaaaatggggctgaacgatgctgccttacttctgagaggattcatgcaaaatatttacttctgcgctctgctggaggggcggggccagctcgcccagtgggggcggggccctgtggtcgggctccccgggaggggcggggccaggccgtgtcagctgaccggcctggccaatggcacctggcggcggggcctggcaggccggggcggggccgggggcgggcctggcggcgcggactcccgggccatggacgagtcgagcctcctgcggcgccgcgggctccaggtgaggcccctgcgcgggcgggcggaaggcagagggcgcggccaagtggacgcggcctgaaaggtgccgggaggggcggggccttcacgggctgtagggaaactgaggcagagggtggggaacgctcagatcgcttctttttgaccacccgcttctcaaagtgctttttctcatggtgggaagggggaaggtgcccccttggacatctagggaaactgaggctccaagcgatggcgtgggaggaagaggctgagggctctgcccctccccaccagctgttctaataataatgctagcaacagcagccagagagctcaccatatgttcatggttgttttagtcctattactagcgatgtattaatatgagttcatatgtattaatacctccttgggtcgtcgctgcaccactgtacaccctcagctcagccctacgacgacctggggaggttggggctgtcaggcgcccatttgtcagaataaggaaactgaggctctagtcccggaaagccactctccagaggtcgcctagctgggattcgatctgcgccctcaaccagctctcttacggcacaaggcgctgccaaccagcagtgtgacctggggggagggcacccttgcttctctgggcctcagttttccaatgagccatagggtcctccttttactgagtttatgtttaggaggctgtgtcatcaggaggtagggacacaggcgtcggggacagcagaagcctaagtttgaagccacacagggactacatgaccccgggcagccaccctttgacttctctgggcctcagtgtccccattataagaaaagaaaaacaggaattaagatttggccattttcctctgggacttagaccacacccttaagaag

SEQ ID NO: 35570 - DNA, 1891 bp, Artificial sequence
  DNA replication origin
ggcgcccatttgtcagaataaggaaactgaggctctagtcccggaaagccactctccagaggtcgcctagctgggattcgatctgcgccctcaaccagctctcttacggcacaaggcgctgccaaccagcagtgtgacctggggggagggcacccttgcttctctgggcctcagttttccaatgagccatagggtcctccttttactgagtttatgtttaggaggctgtgtcatcaggaggtagggacacaggcgtcggggacagcagaagcctaagtttgaagccacacagggactacatgaccccgggcagccaccctttgacttctctgggcctcagtgtccccattataagaaaagaaaaacaggaattaagatttggccattttcctctgggacttagaccacacccttaagaagccaccaagttttcaggtagggaacctgggattcagcacttacccaacgaacatttatggagcgcctgctgtgtgcctggctctggagaggcagcggagtgttctgcaacctctggagctgccctcctagaaaccccaacctgttgggggaggtagacgccagagcagcggtgaccccacggagtgatcagttgtgataagggactcacagcaagtgaaggaggcgcctgacccagtcattgctgggagccctggggtagaggaggcagccaagggtggcgaggcattgcagcggggggcggtatttagggaaatgaaagaggttgacagaagctggaacctagggaggactgagcaggtggggtgggggtcggggactgaggttagctccgggcgggttgagggggtgagaggaatggggccggcgggtctccaacctggagccgcaccggtagctgcgggactgcgaactcagcaggtgatgggaagccaggtcgggagtggtcagggaaggcacgggctgagctgcagatcagagacacccggtctctggccgcgcgggggtggggcagaactggaggcgctgaggccagaggcaagagtgggggacttgggcggaaaggagggggcggggcgggattggcgagcagcgtggtgttggtgggggggcagtcccgcctccagccccagttagatgccaacccgcccgcagcctcttaaaatagagaaaccgcctccgggtaggcgaatgggggtgctgctgacgtcaagaagtggggcctgttccatggtgggggggtcaaacatttcctgatggtaagttctatgttacaaaaggggaaactgaggttcagagaagcatagccactgtccgggtttcacaaagtataggtgacagagtcagacaggatttgaacccacgcagttccggcttcctctccaaaccaacccagcacaggcgtccctccacgaaggtggagggatgagcacggattccccgactgaatgagggcattccgggcagaggccacagcacgtgcaaaggcccagaggcatgtagcctttcttacctgtttatatggggaaacaagaacttgaacctatttcttagcactagaggctgatggccaggacttaatgcttccagggccttcagtgctgattttgaagaggttagactttccccctagggtgatggggagctatggaaggtgctggagcaggagaggacatgcccatattgaggggctgggaagactcctctggagggctaggagcaggagtgggggaatcaaaaagggcaggaagccaggaaggagcatggaatgaaagtctaagtgtaccaggtgtggtggctcatgactgtagtcccagctactcaaggaggctgaggcagaaggatctctctctctctctcttttttttttttttgagaaagaatcatgctctgttacccaggctggagtccagtg

SEQ ID NO: 35571 - DNA, 1629 bp, Artificial sequence
  DNA replication origin
gagtgagactctgtctaaaaaaaaagaaaagaaaaaaatcatctctctcgggatcacatcagtgttcctgtaggttgggtttttttttttttgttttgctttgttttctttttgagacggggtccctctctctctgtcacccacatagtacagtgcagtagtgtcatcttggctcactgcaaccactgcctcccaggttcaagagagtctcccgcctcagcctccagagtagctgagactacacatgcgagcctccacacctgacttgtatgtttagtagagacagggtctcactatgttgcccaggctggtctcaaactcctggactcaagcgatctgcctgcctcaacctcccaaagtgctgggattacaggcatgagccaccatgcccagtctaggttaccattttttatccccaaatcttagagaacattattgttcaatgctttcattcatttacagatgaaagaaaccaaaggccggggtggggaggggttttccttgagctagtggtctggaagtgtgtgactgtggacaccccatctttgggagctgcttttgcctgagttgggggtgggaatcactcaatgaacatttttttgagcacctgctgtacactgggccctgctgaagccagaggggatacagacaattcaatctcagagcaatggttgaagttttgtactcaggagagagctcaaccagagaaagagacagaggtgctgggggtggctttatcctgaagatctggggcctcttggaggaagtgacctttgagcttagatctggaagaagaggaggagctggcagcggggaagtctggggagaatggcattccaagcagcaggaacagcttgggcaaagtttctggggtgccagtatgcttggcgttagaagaacagcatgaagacaagggtagctgagtggagtgagtggagatgaggtggcaggacagaaggaggaggtcctgggaatggggtcagagtggcccccaatcccaggccatctgcttctgttccagtggggatgatacagttggtggggaggtgcttgaaggccccagtggttgggggttgctgggggactgggacattgccccgagagccggcactgtttccagccttggcccaagctgtgggcagagtgttggaccgtgaatcaatgaggactgccgagggcaaagtcctggaccttggggcaggacagagccaaagactccacaagggatgtccactccctgccaccttccctgtgccccactgggtccaccggggcctcaagagggccagagtgagacacagacacccccagaccgtggggtttgcgctgagagggaggaaggacagagctggcggcgcctggtgctggtgggggtgcaggtacagcttggcggaggaggggctggtggggttgggatcgtatatgggtgagggggcgaccttcctggcagaggaaacagctggaagccagggactggaggtgtggtcagagcctctagtgtgcgcggggatgcggagacccgagcgggttaggacctcagtgctgagcagctggccgggatgcggggttggggagttggggcggactgcgctcagatcccggctcccagagagccccagggccggggcg

SEQ ID NO: 35572 - DNA, 1719 bp, Artificial sequence
  DNA replication origin
cccgagcgggttaggacctcagtgctgagcagctggccgggatgcggggttggggagttggggcggactgcgctcagatcccggctcccagagagccccagggccggggcgagggcagaggccgggccggggcggggagaggcggggtcaggccatggagcaatcgcgcggaccgcggagccagtgaccgcccttcccttccggggcgcagctcgggggctcccaagccggcggcctcggcgtccctgcggcagacagggcggcacccgcggctcccctttcccgctgcgcgaccctcgctgccgggccgggcctgcgcgcaggtgcggagctgcgatccccgccccgaggcggagccagcccggcccccagcggcccagcccccgcgtctagtctgccgcaccagccaggcgtctgtccctgcgtccgtgtgtccgtccgtcggtccgctcgcgccacgatcagggcttccgggggccaacaagggggcgtcggtaccccgccgcacagaggcggcctctgcctcggcatgaagtcccgcagggacaagctgcacatcccggcgctgaccctcgagtgagtgttgggcagggcgggggtatgcggggtgcagggaggacaggatgacaactaccctccccccacgtctctgttcgtgtcgcccagaaacgcaccgccgcctccggggagccctcccgggccatcggtctggccccgccctcacgtcctgagctgaacccagaatccccggtcttgggcccctactccctgagggaaccgcagccgccatccggagatccggattcggccacacgaaggggcggccgccaggttcaccgtccccggcctctttctttgcagtctgtctccgagcagccagagcccgtccctgctgggtcccagcagcccctgcagcccctgtagcccctccttgggcctgcacccctggaggtaagtgacagcgcgtgtgggcggggcgcagacatcgccctggcaccccagagccttggaaaccctccagactcatcggtctcctcaagatactgcaggttggtgacatcacctctctgggcctcagtttacccctccacataatggcactgcgatacgttctaggggcttaatgggaaaattccatttttagccaggccagcatctgacaggtggccaaggaaagggaagaacttaagctgttgcccaaggacttcgccaagacaggtgccggattcccaagcggctcagggcactccctgctgaattggcctggactcctgggtggtgacctcagggagaaagctcctccctctaaaacacacgcacacccaaggctgagaggccaccaacgagagccctgtgaattgagattaaccaaagtggcgccgggagaaaagaaccagggtgactgagcgctccctaaccctttcctgatccctacttcccagttaagaaaactgaggctcagagaggagatgccagttttcctgattcagtccatcccccgggggccaagcatcagggacagctttgctaccaggtctgttgagggttctactggccagttggttgactctgtgactggccaggtttcaggacaggaaggagttttgtgagctcctctcatggtttgggcaaaagtttagggagggacagatgtgaggtcaatggtgtctgttagagttatgtggcccatcaaccatttacactttagtatgaatgagc

SEQ ID NO: 35573 - DNA, 1221 bp, Artificial sequence
  DNA replication origin
tgctcggctggccgccgagccttcgccggcgccgtgccccctacctcttggagcgctgcagcagcgcgccttttgccaggcggctccgatggccgggagccgccaccgccgtccagtagctggggtcggacatgctgcttccctttgtgccgccgcagccgcccgaggccgggaagggaggcctcggcggtgggatcggccccaggagccccgcggagccggacagggaggggggcgcacggggctgcggggatgggggggcggcgagaaggaagcgcgcgcccccgagcgcgactggaactccgcccaggcgagtgcgggggcggggccgttgggggcggggcctgtcgggaggcggagcgagcgacgcggaagcgaggccggcggacccgcgtgccggcgagtgggcggggcgctgccatggccgcgggcggagaggcggagcgttgctagggccgcgggcggctgaggccgggcgttgctacgaccgcgggcggcgggggcggggcgttggcagcaccttaacctcgagctaggggcaggcattttggctcctttctgctaaaatgtaaatctaatcgctccctccatctttttcctctctcccagagcactgaccccttctcagtgcggcacccaagacccaccccagcgtcctggccggctcatgctaccacgcccaccctggccccactgcttggaatctagcctggcaaaactgcgtcctctcctctgaaaaacccgctttcctgtctgtccggctatgtcttccccaggctgggggctccttagggtcccagcagctcccagcaccggactggcatagagggtgtgtttggcaaattgagtcggggcgtctgacatgctctgtctgtgtgtggcgggaaaggccatcagccctgcctcagttaggaagcagccacctgattgaactccagcctcagtctcctcaactgtgaaattggaggaaaactgaactgacatgagaattacacaaatcagatgtaagggggcgcttccaagggcacctggtatatgttccatatctatatataatttatctctataaacgatagcatcaggctaacttccaggcctctgtttccccatgcgtaacatcccccatactgaaaacagaataaaatctgagacacagagcctggaacagggctgagggtacaatatgtgttcactatggaagcagaagtgtctcccaccgta

SEQ ID NO: 35574 - DNA, 1995 bp, Artificial sequence
  DNA replication origin
cgcctctccgcccgcggccatggcagcgccccgcccactcgccggcacgcgggtccgccggcctcgcttccgcgtcgctcgctccgcctcccgacaggccccgcccccaacggccccgcccccgcactcgcctgggcggagttccagtcgcgctcgggggcgcgcgcttccttctcgccgcccccccatccccgcagccccgtgcgcccccctccctgtccggctccgcggggctcctggggccgatcccaccgccgaggcctcccttcccggcctcgggcggctgcggcggcacaaagggaagcagcatgtccgaccccagctactggacggcggtggcggctcccggccatcggagccgcctggcaaaaggcgcgctgctgcagcgctccaagaggtagggggcacggcgccggcgaaggctcggcggccagccgagcaaacaggagttgccagaagtgtgtcctggccgcgtggcgcggaccacggcgagcgtctgtctgtggcagcagtgggaaggggggaggacgcctgtggatcgaggtgtcccctggggtccctggcaccctcctttcgcccctcgttccctggactggggtgtctgtccgccagcgtcgcagctggggtggtgacagacaggagtgagttgagattgagctaggatttgaacccgggtgtccagggctgggcagaaccagggaggaacttcttggaaaaactgaggctgatctgccgctgggggtccattcagcagaaatgttggctcagaagcaaatatttactgcacgaggctggcatttgggtggggtgtcaggagtccagatagttggggttaacccccgccaaagcctcaccgctcttggagtctcagtttccccttttgaaaagcagagaggataagtgagggctgtggattctaccagacctgggttcaaatttcgactcagccactaccaggctgtgtgacctcaagtagctccttaacctctctgtgcttgggtttctcattggtgctggactggggcaaagtctgggcggtgggaccagctaccgaaagaccttgaatgctgagtccagggcttaaacttacctccaagatcgtggggagcattggagggggaatatgggtgccagagggatgaggtgcaggaggctggcttcaggcccctgctttctgccacattctctctgttgtgtcctgggtaccaagagaggatcgttctcaaatggcaacttctcgaggtcctggatctcctccaggaagagttgaacaaacagtcggccctgcatagatgcttgggaagtgaacagatgatgcttagttctcctttgaggcctcacatttggccgtgttttcaagaagacctcgcccaagaacaggagggagggcaacgaagtgtttttcccaaatgcttttggaagcagcaagtgatacagcaggatcggggagggagggtgctggtggtgcagtgtgggggcgaggaaccaggtgaggggctgggagaggatgtggagacagccaggtgagcgtgcattgaggggttggcaggaagttttgcagaaacctgtgggtttcacttttgcttctgcagctcaggctgggagacaatcactgtgactgttgacatctgtggcttcagtttcccagtctggaaaatgggctcagctggtcattcccaactctggggcttgttggaattggcagatgttggggatgtaattcactcaggaggcactggctgccctcccggcgtgagccaggccctgtgagcattgtctaggcaaagacaacagtgtatgtacccgagtccgacccaaagctgagcactggatgtggtaggtttcatccttcaaggtagagatgaggaaacaggctcaaggggcagccacatgtggagacgtagacaggctgggcctcttctccctgcccaccttgtcacctgtgtcctttgatgatcatacgcttgttctcccatggattgacctgctccgagc

SEQ ID NO: 35575 - DNA, 905 bp, Artificial sequence
  DNA replication origin
gcactggctgccctcccggcgtgagccaggccctgtgagcattgtctaggcaaagacaacagtgtatgtacccgagtccgacccaaagctgagcactggatgtggtaggtttcatccttcaaggtagagatgaggaaacaggctcaaggggcagccacatgtggagacgtagacaggctgggcctcttctccctgcccaccttgtcacctgtgtcctttgatgatcatacgcttgttctcccatggattgacctgctccgagcattctgcctgggaccccatttctgcacctcggaggccccgagacttcatctctccctccccgcgagattctcccgccgctgagctgcgttggcggcttggggtgtgtgggctgatgctcttgtggagcagagctgttgctgggcaactgctctggtggggcgggggacggtgtcgctcccaacttccttctgtcaaggtgtgggctgaggccagggcccaggtgggagaagaagccaggcagggtgtgagagacctgggccagggatctggtggccagaagggaactgggatggaaagaggaaaacgtgggcaaaagttcagcagaagaggcaggactgtgaaagaggttgcatttagggtttctagttgggtcacattggcattttaggggcatcttgagaagaaggagggttgtcaagagatgggagcaggggcttcaagaggggtatatagaatggggtgtctcagcccatatctgggctccagggtgtgtttggttcacctgatttgctggtgctgctggcagtagccatggtacagggaaaagtgtgggggtgggactgtgacacagaaccctgaaaagctggtccaggggctcctggccatatgtagtgtcctccatcaggctagaagcacttcat

SEQ ID NO: 35576 - DNA, 1130 bp, Artificial sequence
  DNA replication origin
tgaccaacacggcaaaaccccgtctctactaaaagtacactaaaaaaatatatatatatatacacacacacacatatacgcacacacagtagagaccaggcatgctggctcacacctgtcatgccagcactttcaaaggtgggaggattgcttgaggccagcaattcaagaccagcctgggcaacatagcaagaccttatgtctacaaaaaaaaccttagctgggtgtggtggtgtgcacctgtagttccagctacttgggaggctgagcaggaggatcgctagggcccaggagttggaggcagagctctgcccatctcaggcggagccaaggtctagggcagaaggggaggccaggcaccccagccccccagctctgagcacactcctaacctgcccacagtctgctcatcacctcgcttggccacatcaagctcacggacttcggcctgtccaagatcggcctcatgagcatggccaccaacctctatgagggccacatcgagaaggacgcccgagagttcatcgacaagcaggtgggcgggcaggtgggtgggcagccccgggatgcctcctcctctctcctgggacctctcttgggctgggggctggcctcagtttccccgttctccctggcccaggtgtgtgggacgccggagtacatagcccccgaggtgatcttccgccagggctatgggaagccagtggactggtgggccatgggcgtcgtcctctatgagtttctggtgggctgcgtgcctttctttggagatacccccgaggaactcttcggtcaggtggtcagcggtgcgtttcctccacgggcctgggtttgagctgcagccccaccagagctctgggcagcggtcctccacccgcatgtcagggagagaagcaggaagaggggagggagttggatgccaggtggggaggcggtggggtgctgagtgaggcgggtggctggattaattatagggtcacagaggcttcactgaagtgacttgtgaggctgggcacagtggcaaacacctgtaattccagcactttgggaggctgaggcgggaggatcatataaggtcaggagtttaagaccagcctggacaacatggtgaaaccccatctctactaaaa

SEQ ID NO: 35577 - DNA, 1015 bp, Artificial sequence
  DNA replication origin
cgcagctcccggttccccgtggttctccgcgtccagacacacaaccccacattcaatgtcaactccaggcctggcacatccacttccttcggcccagaatacatgtccttcttcagcccccaacatcaccccttagagctgctcctccaggaagccctcccttctccctgggcaccctcacatctgttcctccctctggcctgaggcctggaggtaggagatgggctcaagacaggaggaagggccgggcgcggtggcacacgcctgtaatcccagcactttgggaggccgaggcaggatgatcacctgagctcaggactttgagaccagcctgggcaacagagcgagacccccatctctgcaaaaaattaaaaaataaaattagctaggcatggtggcatgcgcctatagtcctaggtacttaggagtctgaggtgagaggatcgcttgggccgaggaggttgaggccatagtgagctgtgatcgtgccatactgcactccagcctgggacacagagtgagaccctccctggttctaaaaaaatagagggctctcatgtgggcagctgcatgggtggttcattgaatagctggacactgggtaggtgtctttggcctaatgactcatgggccattaggtgagtgattgggggatggggagatgttggggtgattaatgggtggataccagataggtgggtgacagaccccgggagggtggagagtgaagagggcaggcctcgatcggcgttgaccgcagagggaaggatcttagcaggaggggtggtgctccctgggctattgtttgaccggatatattgggtaggtcactggttgtgtggatgaatggatgctggggtggtgggtcccagctggtgcccggagtgaaggggacatagcagctgcctggcaagtgctgggccctgtgagaggcacagaggcaacccctcaccatccctcccgcagagcggcaacaagatatccctgcggaccacagccctggagaacacctcca

SEQ ID NO: 35578 - DNA, 832 bp, Artificial sequence
  DNA replication origin
cctccacctcccgggttcaagcgactgtcctgcctcagccccctaagtaactgggactacggcgtgcaccatcatgcccagctaatttttatattttcagtagagacagggtttcgccatgttggccaggctggtctcgaactcctgaccttaaatgatccatctgcctcggcctctgaaagtgctgggattacaggtgtgagccaccatgcctggccaggagcaggggttctgaagcctccggttttcttaccccaggcggaagtcacttttcaagaagatctccaagcagacctccgtgctgcacaccagccgcagcttctcctccggactccaccactcactgtcatccagtgagagcctccccggctcgcccacccacagcctctcccccagccccaccactccctgccgaagcccagcccctgatgtcccagcaggtgggtgcaccccgaccccccaccaccccggctaccctgggagcaagggctggtgggccccaggagggaggaaggagttcaggggatggaatgacacgatgtagggaaaaagatgaccgggatcctggtgtctagcagggaacctgggagtacttagagacgaatgcaggtgccagggaaggatgcacccagcagaggaaacatcatggacaaatggggctagacaggagggtgggaaaactgagaagaggccaggcacggaggctcacgcctgtaatcccaacactttgggagcccgaggcaggaggatcactgagcccaggagtttgagaccagcctgggcaacacagggagaccccatctgtacaaaacataaaaaaattaggtgggtg

SEQ ID NO: 35579 - DNA, 1497 bp, Artificial sequence
  DNA replication origin
tcagtccccatccaggcatgactttacggaaaaaacattgcacaagaaaacgcgtaactttgatgccagggagagacctggcaggggatcagtctcttccggtgggcccgagagctactggcacggcttcctcgccctccacggcgatctgtggcactgaggtgggcagcccagtggcctcctcctgcggctcatcgaagctaacctcctgcacggcctcctgcttcttgaaggagtctcggcgctcggacaggtgcagccgccgcatgaccacgagctcggcctctggcccacgagtgcgccgccccgcctccccatccagccgctcccctgtgcccagcttgtcagctgactggccccggcgcagccgcggggatcgggcaggtgcgggcgggtgcccgggcaggggcgagggcgagcggggtgggggcgcggagatgggcgggcaggccagcggggagggcgggatgctgctggtggacttgcggcggccagtcttggggcggggtggcccaagcttggcagccaggccgtgcagggagctggggcgggtgtggccagcagcagctggggaggcggggctgctggagctcggggatgcgctgggtggggatgcagtggtatctgtgggtgataagcgtaggtcagggctgctggcctcaatgtccccagcccagaagtggagctgtgggactgacaaaaactgctaaagcccacatccttccatgtggccacccatcatgcctggttgtttttgtttttgagacagggtcttgctctgttgcccagactgtagtgcactggctcaatcatagcctcaacctcctgggctgaagtgatcctcacaactcagcctcctgagtagctgggacaacaggtgcacgtcaccatggctggctaattttttttttttcaatagagtctcgctctgtcacccaggctggagtgcagtggcatgatcttggctcactgcaaccttcacctcccaggttgaaatgattctcgtgcctcggccccctaagtaactgggactacaggcatgtgccaccacatctggctaatttttgtatttttagtagagttggggtttcaccatgttggccaggctggtctcaaactcctgacctcaagtgatccgcctgctttggcctcccaaagtgctgggattacaggcatgagccatcatgcctggttcatgccagacttttctgcctcctgctcagggttgtttccttggcctagctctggtgaactcccactcacccatcaaagccccagctcctactccccctcctccagaaagccttctctgtatcacttctgttttctttttttttttcccttttgttttttgagatggggtctcactctgttgcctaggctggagtgcagtggtgcaatcatggctcactgcagccttgacctcctgggctcaagtgagcctcccatctcagcctccagagtagctgggaccacatgtgtgcaccaccacaacca

SEQ ID NO: 35580 - DNA, 2176 bp, Artificial sequence
  DNA replication origin
gagacatcgcttgtgttctggtgtcaatcggggctggatggggcaagaatgggggacaagggtggctttgtaaatagcagcaaatccctgcaactaatttattactttttttttctttttttttttttttttttgagacagagtctcactctgttgcccgggctggagtgcagcggcgtgatctcagctcactgcaacctccgcctcccaagttcaagcgattgtcctgcctcagcttcccaagtggctgggattacaggcgcccaccactatgcccagctaattttttgtatttttagtacagacggggtttcaccatgttggtcaggctggtctcgaactcctgacctcatgatttgcctgcctttgcctcccaaagtgctgggattacaggcgtgagccactgggcccagcctaatttattactttttataagcgatagccgtactgagccgccccctgaaggcggctgccaggtcttgccccaggcacctgggactctgtttgcaggccctgccctctgggctgagaaggatgcactttggacaagtcatctgtgtttgtgttttccagtttttctgtactttttaagtgttttgtgttacctggtctcattcccctccccacacctacccatttgaggggatggagttgaagtcacctggtcacctgtaccggcccagttcggctacaacctggagtgtccgtaaacaattcctctcacccacaaaacaatgtaatcccagcgatggactggattctgaaggccacttcccaccatcatagctgccatgcccaggcagtgcctgctctatatatagagtctgcctccaatcctgctggcttcagcctggagaagggatatgggagctggagctttgatggatgaataggtgttcaccggatctgggcagaggggtcatccgctccccaggtgggcactgataaaggaaggtacaggcctcacctggaactgccaaggcagcctccagaaatgctcggctgtctcggggcacgctccagtatgccagtcctgcgggattacgtccagctacttccagaaacactcagtgtcccctcccctcaggctctgccttggcctggccttgtccagtctaccctggacaagatgccgtgtgtttgaggcccagcagagtaagcccttggccgtgatgtgtctgaaacacctgttaggggttccctccatatgtcagagcctctctgggatgaagttcaagccagaaaacccagtcgaggctcaagtttgaatttcagcttcactgtgtggctctgggaaaatggctttcccactctgtgcctcagtttccttgtgtttacaagactaatcccattgactgtttattaagcacctactgtgtgccaagcgcttttacgtggcttctccctcagccagccttgagaaggctggaggtggtgtcatcacctccattttacagacaaagcagctgagaccccagcgaggggcggagacctgtcccacgatcacccagcaggagtcgtggcagaacggagcatcagccagaccctgttgtgggcgttgtcatcaagggagcttgaatggagggtctggtgtcagatacagccgactccagccccagctcatcccccatgatgctgtgtgacccactgggcactctggtgagggagctttccagacatcaacagcccactctgcttccctttctgagtcccctgtccagcactgcctagtgttggagggtagaccaaggctgtgcatgattcaccccctccttccatcctggagctggcagtgaataaaagcccgtatttacaaagatgagctccaacgtctggatttgtgaggggctgagaaaggaggaagggaagagtggggaggggagcggagtgaaatagacccatggctcaaagtcattgcaagtgggttttgaggactgcatagcagttcgctgttgagattcttcctgatgccatcgctggtaccagcctcctgctaccctctccctgcgagtactccatcatagccctgcctttaaaagcttcctccagacatctgggccctgagctatgttttttatttttatgtttttgagacaaggtctcgctctgtaacccaggttggagtacagtggcgcaatcacggcacattgcagcctcgacctcctgggcgccctgg

SEQ ID NO: 35581 - DNA, 1403 bp, Artificial sequence
  DNA replication origin
cgcacaatgcctgggcgcccctcggtactattcgaagccccattccaggcagggcctcccttcatttggggcctcggctccagtccggtatcttggacgcggggagtctctccccattctgccccgaccgtcccaaggaggctgcaccgctgcggagccgagcccgaggcccccccttgcctgcggcccccccagttcccgcggggcccgacgcagcctggcgcttgcgttctggcttccaccggggcccggcactgcccccgggcgccccgcatttaagcacactcccagccgcccccgccacgagggccagtcaggactcacctggtcgcggccgccaccgccgccgcagccgccgtcacaccaagccaagcccgccccgtggctccaccgcggccaccgtcgccgcagccgcgggatccccgcctccgccgccgccacggttccgagcggcctggcccgcccccggcggaaatgcccgagcgcattcgagccgggcggatgaaccgaggccgaggcggagcctgaggtaagggggcacccgagtgtttccggaagtagccgaacgtaatcccgcgggactggtggactagagggtgcccccgagacagccgagcgtttccagaggtagccgagtgcaatcgggtcggcgagggatccgagactgggctcggctgggcttagagacgcccgagcgctttcggaaatggccgaacactctctacggccgcactggcacaactgaggctgatccccaagaccgcggagcgtttctggaaataaccgaatgtgctcagtgcccaatggaggccttgggagtttagacccagaggcgaccgccagcttatgggaattactgaagcatagatggttccaggggacaaatgaggcgttctcaagctcagcaaacagggggcagtagagtggggaaagggcctgccgcaaaaagcagaagtcggagaaagccagggttgaaggagtttccatggcaacccagagcgtccggaaacagccaacgatctcgacccctacgggcactagaatttagcggacttgagcctagatgccgacggtttccggaaatagccgaacgcactcggagatggggctgtagccaagagtgtttgcatgccggctgagcgccccggaagtaacggattgctctagggctgggccgggttcggctagagggagttttatggcagagcgcaagctaagaccaggatagaaaggacgcgacgattgcttattttgttattattttttgagacggagtttcgctcttgttgcccaggctggagtgcaatggcgctatctcggctcgccgcaacctccacctcccgagttcaagcgattctcctgcctcagcctcccgagcagctgggattacaggcatgcgccac

SEQ ID NO: 35582 - DNA, 1450 bp, Artificial sequence
  DNA replication origin
ctgctgggagtagagttcccaagaacctgccccaggtatactacatgctcagtaaatcagttttttttttttttttttttgagatagagtcttgctctgtcacccaggctggagtgcagtggtgtgatctcagctcactgcaacctgtctcccaggttcaagcaattctcctgcctcagcctcccgagtagcaggccaccacacccagctaatttttgtatttttagtagagacgaggtttcaccatgttggccaggctggtcttgaactcctgacctcaagtgatctgctcgccttggcctcccaaagtgctgggattacaggcatgagccaccttgcccagcctttttttttttttttccaatagaggtggggtcttgctatgttgcccaggttggtcgcaaactcctgggctgaagcagtcctcctgcctctgccttccaaagtgttgggattacaggtgtgagccaccgcgcccggccagtaaacaggcttttcatcacccctgttacagatggggaaactgaggctcagagcagggaggtatctagggccgtgcagtaggccaggaggaagccaggacttacacctagatctgccgacttggcccagttggacatgagggggcagcagccaggtggccagatacctagggcagggaggacgcaatggaggccactccgggtgctttgggagctccatagaggggtcaggccagctgaactaagaggtagggaacaaagtccaggaagaggcctctacacaagcaaaggcctcgaggtgagtccaagcaaatggacctccagtctctgcagaggaggagtgagtgggctggcaggtagctccagcctggggcccagagtaggcacaaaatgcagatggggaggtgcttagaaggaaccttagccccaggcagggacagggagccaggagaaggtgggggtactgcagctgaggaggaggggaggctgccggcagcagggcattgattattccccaggagtcccagcctggggaggcggagataggcacacattcccagcctagccctgcgggttcagacgccctgtgatggacagggctagggtcgggggatggacgtgctgttctagagaatggatcatcacagcggataggaaggcgcgacaggcagacggaacggcacatgcaaagccttggcagtgggttaagttgcttgtcaaggattcagggtggctataaggataggtgctatccaccaagaggcccgagtgtcaggtggaggctctgagcatccttcagtcacggggaaccccaagaggtgtccgagcagggcggaggggcgccacattctcgggtgcccaatttacccattcctaggcctctgttaccctcattctacaggtggggaaactgaggccccgagaggggatgcccagaaaaccgcctggatctgcctgccagcccgccc

SEQ ID NO: 35583 - DNA, 852 bp, Artificial sequence
  DNA replication origin
agctcatgagggcaggaacaggccttgtgtccactgctgagcctagcactgaagacacttgtcaaatgaccaaatgtcctttttcctccttccttggagatcccattgcctcactggacagaagaggagaccaagggtctgaggggaccacccccctttccagggcccctgcttgctgctcacctggctcaggggccccatcacggggcctggcgggcagtgggcgggggccccgtgggcgagggccgggccgggccagggccacgggccccaggaactccacataggtgccagggaagtcacctcgctgccgtgtgcgctcgttgaggccgggcatccagcccacgctctgtgggcagcgctcgccaccctcggccacgcccagcgcctgcaaggccgcccggctcactaccagcacgtcgccgggcagcagctccaggtcctccggccgctcccggcggaacgggtacagagcgcggtactggaagccctcagggcccgccatggccgcgtgagtggggtggggtctggatggttaggtggctgcttggagccccactggccccattggttgaagcagggctgggagggtccgctgggttggcttggggtgctgggacctctatctccagcagtcacaggcgaccacaggggccgctcatgcctcgcttcaaattattccatgacccttacaagggccactcgtcactgggtccaccattcgtcagctggtgggagggagttggtggtgtggtgtcaggtcactgggccattgagtcctccatcagcaggtgaggctggggcaggccgctcacgccctcacacggagggccatgggcgcccaaggctggc

SEQ ID NO: 35584 - DNA, 1581 bp, Artificial sequence
  DNA replication origin
gaggtcccagcaccccaagccaacccagcggaccctcccagccctgcttcaaccaatggggccagtggggctccaagcagccacctaaccatccagaccccaccccactcacgcggccatggcgggccctgagggcttccagtaccgcgctctgtacccgttccgccgggagcggccggaggacctggagctgctgcccggcgacgtgctggtagtgagccgggcggccttgcaggcgctgggcgtggccgagggtggcgagcgctgcccacagagcgtgggctggatgcccggcctcaacgagcgcacacggcagcgaggtgacttccctggcacctatgtggagttcctggggcccgtggccctggcccggcccggccctcgcccacggggcccccgcccactgcccgccaggccccgtgatggggcccctgagccaggtgagcagcaagcaggggccctggaaaggggggtggtcccctcagacccttggtctcctcttctgtccagtgaggcaatgggatctccaaggaaggaggaaaaaggacatttggtcatttgacaagtgtcttcagtgctaggctcagcagtggacacaaggcctgttcctgccctcatgagcttctggttcaagaagggatgagagtgggttcaggaggtgacacatgccatgaggaagggggcttgcgtgggaagatgcgagggtggaagctcaaggcagtgggggcagcgagggcagaggctgtggagtagaactctaatggcgggaacggccagcaggaggaccagagggaggaaggggagggcaatgtgcgctggcatggaggacttagtgggattgattttgaggacaatggagagtgttcagtaggattcagaggctcagcctagcttcatcctgccttttgcagacagggtcccttgaagaacccctttggagaccctgatttccaaaatgaagccacaaggagggtaggatgtgggctgctcagctgaggccacacagcacagtgggatatgaggaccccacatccctcttcaaagacccttggccatcaccacttgccaggggtgtgccaggtgtagagaatcgggggcaccgagcccactcagtgactgctgtttgatgggcagggagtgtgggctctggccggggaaactgtggcccaggttgcaaggaggaggctaagaggtgctgcatgctcggcatggtctgctccgaccctcccagcagcccagcaaaaggccctgtgtgcagaccgggaggcctgagtgcaaggccgtcaaatgccgtacttgaaaccagttggtcacccagggaggccaaagccccgggaggtgccaggcctgctttgtgccagggtgacattgcccaaaggcaaaccagagtcccccagcgcagggcggaatagggggtgctgaggtggtgcgacgctggccccagcctccaggcatctggtatctccagggcccaggcctgcgtcctgcctcggcctgaaggagcaggaggtggccccgtctgggctcccagccagaatctgcctctccccctggtaacagccacctccctcctctgcctgg

SEQ ID NO: 35585 - DNA, 2473 bp, Artificial sequence
  DNA replication origin
tcacaagaacgcagcttctcactctggaccccatcccctcccttcttagggtctagacgccgctcactctggccatgccccgcccgccccaccccaaactccacccctgctcgctccggctccgccccgcccctcacccgtcgggagcgccccctggcggcggcgaggacggcggcggcggcgcgcgcagcagcagcggcccaaaggtggcgcccagggcccggaccgcgggacccagggccggggcgcggctggccacgcggcccaggtgctggagcaggaagcgcagcgtgagcgcgcggtgcagcggcagcgtcggtggctccagcgccggccccacgggccccgcggcctctgcggacagatggccagggcagggtgagccaggcctgggccctcccacccgctacagccccctccttcccccgggctacccgccaggctcaccccgcagggcccggcgcgcctcggccgaggcctcgggggtcacgagcggcgcgggcagtgccagcaggaagctcttaatgccgtcagccagggctgccgtgtcccactgatccacgtcgctcagggaccagtctgcgggtgcaggggggcacacgtccaactcatgtgtactggggcccccagcctcctcccaaccccattgaggctccccttcacctgtacgcggtgcgggcagctccgggcggtagtgagattcgctgtccagccctgggggtgaaggggacaggcgagtcagctctcaaatgctgccccgacctcgtgaggcctggactggccgctcaacccccctgcagtctccctttgctgcccagagataagggcatgggaggggtggggagggagaactgggagagggcacagcacatgcagtggcctggtcatgttcaccttcccatcttcccttaggagtcactctgtgccctattcaacatagaggcccagggcatccaggctcagcctgtttccgtgcagcatgagcttggaggccctgtgagaggatgagtcgcctgtcactagaggtaagcaagcagaatccaggggctgcagccaggctggaacttacctgtcctttcaatggcctccacaagcttcaccagaagagggggagccacatcaggtggggagaactgctcgggcaagtcggggagtgtgaggcctggtgggggaaacaggggggttgcatgttggtggggttcctggaaggagcccagcccctctctttgctggctgaacctcagctggggcagtttgaggcagggcccagctcaggcaagtgcttggcaccttgactcccatccgcaggaggctgcaagaccttgggtggaggggctgggaaagggcagaattgatgggacacaattttctgggttagaatatgaggagttcacacaacttcacagactaggtggagtgcgctgaataaagtccccaaaaagatatgtccaagtcctcatccctggtacctgtgaccttatttggaaataggtctttgcaggtgtaaggaaagcaagaatctgtacatgagaccagcctggcattagggtggacactaaacccactggctgatgtccttgtaacaagagaaagccggccaggatggcggctcaagcctggaatcccagcactttgggagaccgaggtgggtggatcacctgaggccaggaattcgaaccagcctgaccaacatggcgaacctgtctctactaaaatcagaaaaattagctgggcgtggtggtgggtgcctgtaatcccagctactcgggaggttgaggcaggagaatcgcttgaacccgggaggcggaggttgcagtgagccaagattgcaccactgcactccagcctgggcgacagagcaagactccgtttcaaaaataagtcaacaggccgggtgcggtggctcatgcctgtaatcctagtactttgggaggctgagaccagcaggtcacttgaggttaagagttcaagaccagcctggccaacatggtgaaaccccatctctactaaaaatacaaaaaaaaaatgagccaggtgtggtggtgcgcacctgtaatcccaactactcaggaggctgaggcaggaattgcttgaacccaggaggcggaggttgcagtgagctgagatcatgccatagcactccagtctgggtgacagagtgagactctgtctcaaaaaaaagaagagaaagccaaggcagagactggaataatcaacccatgcatgagaggaatgaatgcctggaggcaccagaagctgcaaggaaggaaacttcagagggggcacgaccctgattttggacttccagcctccagaaacatgacagaataagtttctgttgtggtggggtgcaaaggctcacgtctgtaatctcaacactttgggaggccaaggcaggaggatcctttgagtccaggagttcaagaccagcctgggcaacagagtgagaccccatctcttaaataatttaaaa

SEQ ID NO: 35586 - DNA, 1654 bp, Artificial sequence
  DNA replication origin
cccctgcacccgcagactggtccctgagcgacgtggatcagtgggacacggcagccctggctgacggcattaagagcttcctgctggcactgcccgcgccgctcgtgacccccgaggcctcggccgaggcgcgccgggccctgcggggtgagcctggcgggtagcccgggggaaggagggggctgtagcgggtgggagggcccaggcctggctcaccctgccctggccatctgtccgcagaggccgcggggcccgtggggccggcgctggagccaccgacgctgccgctgcaccgcgcgctcacgctgcgcttcctgctccagcacctgggccgcgtggccagccgcgccccggccctgggtcccgcggtccgggccctgggcgccacctttgggccgctgctgctgcgcgcgccgccgccgccgtcctcgccgccgccagggggcgctcccgacgggtgaggggcggggcggagccggagcgagcaggggtggagtttggggtggggcgggcggggcatggccagagtgagcggcgtctagaccctaagaagggaggggatggggtccagagtgagaagctgcgttcttgtgatgacggagcggagacctgggctcctgagtcgtgggacagaaggtgaaggggcctagtcccgaagcatgtgggtggtgcctgcaccttcccttctgctcgtcgcagctccggtactggtctctcgctcgcctttgtgtgagaatctatggagcacttactgcatacagctatgagggagctggcctcgcacatgtgcctgtatcatctcctcctccgccctgcacatactgtctcgtatatacccccaggcgtgcaagcgcacgcacaatcctgtgcacatgcgtgggcggacaggccctacccagccctcaccacactccccttccccctaaggagtgagcccagccctgacttcccggcgctgctggtggagaagctgcttcaggaacacttggaagagcaggaggttgcgcccccaggtgagtcccctgtattgctgtcatttcttcccgttgggggccgtaaatactgatccctgagtgctgccggcatcagcaggctggttgcagtgggaggcagccacagtatacagtcggtgctcaggatgcatttgttttcctgtcccccagcgctgccgcctaaaccccccaaggcaaagccggcctccacagtcctggccaatggagggagcccaccctccctgcaggatgctgagtggtactggggggacatttcaaggtaggttgctggcagggggccagggaccaaggaggtgtcacagggtgagcggggtctccaggtggctcggcagtcccaatgttggatgttcccacagggaggaggtgaacgagaaactccgggacactcccgatggcaccttcctagtccgagatgcttctagcaagatccagggcgagtacacgctgaccctcaggtgggggcctgtccctgcaaggataaccgggggtcacaggtcacagagaccgggagttcagaggggatagaacatgtgcggtttcaagaatggagggccaggcacggtggcttacacctgtaatcccagcactttgggaggctgaggctggcagaacacctgaggtcaggagtttaaaaccagcct

SEQ ID NO: 35587 - DNA, 3003 bp, Artificial sequence
  DNA replication origin
actcaagagaaatgcagcaaggaatacctggagcgcttccggcgtgagggcaacgagaaagagatgcaaaggtgagtctggcgcctctgccctgccccaccccaccctgatctggtgcagtacaagccagggagggaaggaagcagaaggaggccagccacttggaggcaaagagtagtctgttgaaatggactttgggcctggtgcgatggctcaggcctgtaatcccagcactttaggaggccgaggcgggtggatctcctgaggccaggagtttgaaaccagcctggccaacatggtgaaaccctgtctctattaaaaatacaaaaattagctaggcatgatggtgcgcacctgtagtcccagctacttgggaggctgaggcaggagaatcgcttgaacctggagttggaggttgcagtgagccgagattgcaccactgcactccagcttgggtgacagagaaagactgtctcaaaaaaaaaaaaaaaaaagaaatgggctttgaaggatgaataggagtttgctagaaagagaaatcagaggaaacagcatatgcacaggctcagaggctggaagcacatagtctggtgcaaagtaggtccttgagaaaaccctggaggccgggtgcagtggctcattcctgcaaccccaacactgtgggaggctgaggcaggaggattgcttgatcccaggagtttgagaccagcctgggcaacatggcaaaatctacctctacaaaaaatattaaaatgttagccagacatggtggtgcacacctgtggtcccagctactcgggaggctgaggtaggagggtcacctgagcccaggagtttgagggtgcagtgagccgagataaaaccctgaggtctctgcgccaccccacccctcccacaggatcctgctgaactccgagcggctcaagtcccgcattgccgagatccatgagagccgcacgaagctggagcagcagctgcgggcccaggcctcggacaacagagagatcgacaagcgcatgaacagcctcaagccggacctcatgcagctgcgcaagatccgagaccagtacctcgtgtaagtggcggctccatacttccctgcggctccctggcgactgctgcggcacatggagatctctctaggagtctcagtctctctctctccaccaagtggcccttcctgggccccgagaccccttaaactcggttcctcccgggccccttgaaagttttcccataggtcagcctcagcttagtcagaggtgtgtgcaatgggagtgtcactcctatcccattccattttgtggaaagttggaagccttccacaaaaattcctgctgggctgggcgcaatggctcacacctgtaatcccagcactttgggaggctgaggcgggcagatggatcacttgaggccaggagttcaagaccagcctggccaacatggtgaaaccccgtctctactaaaaataaaaaatacaaaacccggccaggcatggtggtgggcgcctgtaatcccagttactcaagaggctgaggcaggagaatcacttgaacggggaggtggagtttgcagtgagcagagattatgccaatgcagttcagcctgggcaacagagcaacactctgcctcagaaaagaaaagaaaaaaaaaatcgcctgctgtgcaacctaccatgctgggtggctgcggcagccctgtcctgggttcaaatcagttcaaatcctgcccccacccaccaacctcctgaagacctcagccagagcctccacctccctcttgggcctcagggagggcactgtcgcgtgccaggtgctgtgctaagcaccgtgctcgttatgagttcatttggtccttttcaagccctttgtaaagtttgccctttacagctggggagactgaggcacagaaccgacagctgccctgtgcaaaggccagcagtgctggagtgagcctctggtgatgatgaggggcctgggctggcatcttcttgggggactccataggcgttaacagaaacaaaaaaatgaggggtgtgggtcagggttccccagcagagctgggcgagccaccctgggttcaggctgccctgagccaggtcagctctgccctcttgtggcaaccggagatattgtacccagaaccctctctcctcagccagaccctgcctcccaccggacaggcccactgtgggctcagcacccacacaactgcacaagcccacctttcctgttccttctcaggtggctcacccagaaaggcgcccggcagaagaaaatcaacgagtggctggggattaaaaatgagactgaggagtgagtgaccgtctggagggaggcagggagggcttcccagaggagggggccatttggggtgggtttcgaagaatgagtaggagttcaccagggaggaaaagttgtccaggcagctggggagcctcggaggctggcaggtgagtgaccagggccctccccgccaccgccccccaccccagccagtacgcactcatggaggacgaggacgatctcccgcaccacgaggaacgcacttggtacgtgggcaagatcaaccgcacgcaggcagaggagatgctgagtggcaagcgggatggcaccttcctcatccgcgagagcagccagcggggctgctacgcctgctccgtggtgtgagtggaccgcagcggtggggattcccgcgtccctcccagagctctcattgaatgcctgccgcgtgccaggccttgggaaggagtccctggtggggtcatccgggacaggggagcacgcggccctggaacggggaaagcttggcggggaggccagccttccgactccccctctcgtctgcccccacagagtggacggcgacaccaagcactgcgtcatctaccgcacggccaccggcttcggcttcgcggagccctacaacctgtacgggtcgctgaaggagctggtgctgcactaccagcacgcctcgctggtgcagcacaacgacgcgctcacc

SEQ ID NO: 35588 - DNA, 2218 bp, Artificial sequence
  DNA replication origin
ggtgcagcgttgacctcccaggttcatctgatcttcctatctcagcctcccaagtagctgggattacaggcatgcgccaccatgtctggctaatttttttttgtatttttagtggagaccaggttttaccatgttggccaggctggtctcaaactcctgacctcaagtgatctgcctgccttggcttccccaagtgctggaattacaggtgtgagccactgcactcggcaagatcttgtttctaaaaaaatttaaaaataattagctggacatggtgacacacacccgtaatccagtgactctaaaggctgagatgagaggactgcttgaggctgggaaccaggagcttgaggctgtgagccgcgagctgtgttcgcacaactgcactccagcctgggtgacagagtgagagaccttgactctttaaaaagaaacacaaaaaaccccacagggcttttgctcagcgtctcctgggacccggcgggctgtgcatgggagtgggtgaggagaggtcagagaagagcctccaatgctggctggaggtgccgacgacttgagaacatcaaagacacgggagactcctccctgtggcatgggagggttttgacttttgacgccacttggcaatgaatgaggaagctgtggatcagggaggggatacaactttcccaaggacacagctgatggttgcgacaggattcaaatttgggggcggtgggcgggggaagcagcttggaagcacttgaggggctggatggggtctggggtcccctgagcagtcgggagctcaggattcgaatctctctcctgtatgaccttgggcactgcctcaacctctccaggcttgagcagctaaactgggggagggaggggttgtcgggtctcagaggggcttggagttaaacccacgggtccgacctgctgtgacccccgtagacaccagggtccccgacacgcagaggtggtactgaagcccagtcactgacaacagaatcacccacgacgtttgatgttttatatcatatcaataacaacgtaccgtacaaaacctgcctcccagctcgtggggcaggcagtgtggtggccaagggcagcgtagaaaaccagggctcttgtcccaaaagaggagaggaaagagggttttgcagtcaaggaaaaacagaatcaaaacccaacatgatcgaagagaagccctgaatctgcatcagagggaggggccgtgggcagtgtcgcaacttggccactgcggcggcaccagtacggggagctgtgattcctaggaggggttggggccagctcacaagtttatttatttatttttttgagacggaggagtctccctctgttacccaggctggagtgcagtggcacgatctctgctcactgcaacctccatctcctgggttcaagagattctcacgcctcagcctcccaagtagctgggattacaggcggccgccaccacgcccggctaatttttgtattttagtagatgcggggttttgccattttggccaggctggcctccaactcccgacctcaaaagatccgcccgtcttggcctcccaaagtgctgggattacaggcatgagccaccgtgcctggcctgcgagtttaattattttttcgggggtgggtgaacttctcgcagcggcccccttgtgggggtaacccggtggcgggtttcacttcggggtttggaggggaagttggagtctgtggggcgggtcccgcccggccccgaatgtcacggccgaggttctcggaagcagcagagtgaagttccttcctgccctgaccccaggtctatggcttaaaaatcagggtgcccaggctggggccgcgcagcccaggggccctctgtaaacatggcaggtgcagccagaaggggcttccgggaccccgggggacctgcggtgggcagggcagagggtcagggtgaccagagccatggagagggcaatgcccggaggacacgtagatatggggtgggggagttaggacccccaacatggagagagacaggggccaagaaagacagagaaaaggagacagagggagatctggagaatgggggagggaaggaaagagaaagagggtgagagaaccccaaacaagagccagagccggagaaatgaggacccctggatgtggctggtctggtccgtggctcccgccgccgcagcctccggcgcagacgggcccaggggcggctctg

SEQ ID NO: 35589 - DNA, 1121 bp, Artificial sequence
  DNA replication origin
aagactacctttaggggaggtgaggtggggcctttgagacagacacaggctgagaggaatggtggtgtctccacgcacccctagaccttctaggggcggctaggggacttgaggcccgagacccactctcagagtgggcctgtgacctaacaggggtgacgtcggatggaggctggggatgggatggaggccggggttttgggggagtaactgaaatattcaggcccccgagagtgggcaaggcctgtgtggccaggtctcctccctccagtctcgcccgtgacctccctcacacccaacccccacatcctgcccctcaacccttcccccctcaaactcctgaccccgacgctccagacccctcaccgtggtcccgtgggactgactcaggcttgaccacagccacgccggaaagcagaagctggcgcagggagtggcgtgtcatttctctagggtacccacccagccccacttctggcttggggtgaagagaactggccttccttcttttcatcgttcaaggcttgtggggggtggggggcaacctggccttcaagggacgcccatgggggagagaggcagcctgtgctgtctgggataggggtggggtggcttggagtccacctggctttggatttgagtgacagagcctcagctttcccttctgtgtaatggggagaaggataaggtttggggaacaagagtcaccatggagggctcagaggcaggtgggggagagttgtcccaggctggggcttctggatggcatggtcaggccttggtgcctacacaggacagtggccccaacagtgaaggcagagagaatagcctggaaaaaaggcccagatggaggctggagtgttgggggaataactgagacattccaaccctgccaggccttacattcagggcaagacacatcggatcctagggaagaaaatgtcccacacccagctggaagatatacctgagtccccagctgtgcccccctctagttgtggggaagaccctggccacacacacagtagctggtttgggagccggagcttctctgaagtcccagtggctggatggtccccgagcccatccctcagacgaccaaaccgttggcaaaggctccc

SEQ ID NO: 35590 - DNA, 981 bp, Artificial sequence
  DNA replication origin
gagccgcgcctcctggtggggcttgtagtggaagaatgcacgggtgggctcttccggttttcccggtgaggctgaggctccgggatggcattgggcttacccaggccttagccagggagggagagagggaatggactgaggaacttgccggcccgacccagccccctgacttacactcttatagcgagcatgtttgcggtgggctgcagcatgggtcccttcctgcactactggtacttgtcgctggaccgcctattccctgcgtctggcctccgaggcttcccaaatgtcctcaagaaggtcctcgtggatcagctggtagcctctccattgctgggcgtctggtacttcttgggtaaggagcctcctaagcctaggctttgcctctcataggtcgggaggggtggagccagctttgtgttaagaaggatgcagaggtgcatttccaatttgccccctgtttgggtcgccctggactaggagccaggtcacagcggggacaggacggactcggccgatgtgaacgctggcgagtgtaggagggacgaggactgtatctgttggggctgccctgggcgggaggttgagagcatttcccaaagaaggggaccacactcagttgagacatgaagagggaaccagcgggcagagggaacagctaatgcaaaggctctgaggcctgaaggaagagaaattgaggctagacttaatggggtgcaaccgtgccagccctaggctcggtaaagacagcggtattaatagaggagtctctcattctccacctcccagcccggcttcctggtctgtgatggaaaagtaacacaactccctcaacttcagggtgtctccattggggcacgtgtttatatgtttataacctctctttctctcactgggactgacttgctctgttttgtctctacaccagctaccctaattctctgtccatcccatctgaaagtccctgtccctctgcccggg

SEQ ID NO: 35591 - DNA, 1008 bp, Artificial sequence
  DNA replication origin
aaataacaaaagaaaatgctgtggatgatcaaaaccagggtgggcaggacccggtgctcacagggacacacatggatggtccattcgctttattgggtgcgtgtagtgttgtcatgacatctcctaaggaactggggggcacgtttgacactcatgaggtcagaacaggtctggtgggcggggggggggggggtcccagggtggtgaatacccacagcacacccccccaccaaaagagaaaacggggagaggagcctggcaggccagactctgatccccatggtccacacagggaaacccccaacagcggcctcggcccaccgcggcagagccgaggggctggcaggcctggccacctcccattgcccgatcagcctgctttagggtgtcatctggcccctcttcacaactgacaactgtggatgggggtgaattttaaaaaaaggcggggggggggggttcaggagggtgagcggtgagttcacggggccacgagacaccacagctgagtggggaaagggctatatgtacaggaggggcagggcttggggcgggcaggggagcctgggcccctgggggacatcttcaataaataaataaatagctacaataataaataagggtgacgggctaagtcaggagcaggggtcttgtgcccgtggctggtaggggccgggtcaggcccgggtagttgggggaaggtggggaagacagggaagaggggaaagggagtgggatggctctcagcaggcgcagtcctggtgcggtggcacctgctggtcactgagctgtgggccctgcttggcgcctgtgaccgcagggtccgccgtgtccaacgactcggacatcttctcgcagatgacatccaccaggcgctcaaaggtctgcttgacgttaatgttgtccttggcgcttgcctcaaagaactcgaaccctgtggtcagagaaggcagggatgaggaccctggccacgccctatgccaactcccagagatgcttctctgagga

SEQ ID NO: 35592 - DNA, 1471 bp, Artificial sequence
  DNA replication origin
ctatttttactttaaaatactaagtcagtgacggaagcttccgcacattctcgtggctcacttttctcttcctggggaaaaaaggcaggaggtatttccgagagagccacccatgtaggaagcgtgcctttgggcgatcagggagctgagcaaccgaaaaacctcccctccaaggaggcggcaggccagggcctggaccagctgccctggagccccccacagagcacggactaccgcgtgggcgcggagggcagggagaatgggaggtggatttctttttattttttgtttttctgaattttcccaatttctctgcagtggattggtgatacttctatagtccgagtgggggaggagggagcaaacatgttaccctaaaaagaaaaaataaatttcccaaatgtaaacggtgcggggacgtgggggtgggcgtcccagtactcccagggcactgggggcgggctggggactgggttggcggcggctgggcctcgaggcgctaagttattctggtctctcggcgcctccgcagctggcgagctttttataaacaggacgagtcaccccccgccacacacacacgctccagccccgcctactgggaggggtggggggagaatctaggggatcaggactctcctgggggccacacacccctggagggtttgaaagctggagtagggggagcaggagacccaaagtgggggctggggtttcgggctcctcctccctccccaaattctgacttccttccctaaagatttggaggaataaaagatggaccatcttagctcccaaaaggctccatcctctgagttttgctttcccaggatggagggagggggtctcccagcccccgggtctttgaatccgagctttgaagagctggaggcttcggctcgtgccctccctgtttcccggggcatttaccgcaggctttaaggggtttccgggacaggtcgcttctctgtccctgctaaaccttttcttcgaattttcttcttgatgacggggcgcagggaggggagggggttcccagagagtccatcagccccttcctccttttctgggaatggtggggaggggaggctctcttgacctctacttctttcttttcaaacctcagaaacgggggaggggtggagtctttactagcccctccctcagtgggggggtcttacgcctcgggaatgggacaggggtccctcttgactcctgtttattctttggtatttattttgaaccccatatatgtgagggtataaaacatctcttgggcctcgatttttcttttctgcaattgggagtcaggggcatttaacaggggtcacagcaccttggactagacggtggcctcaagagtcccctacctggggtgggtgcgggcgggtaagggaaccgcccctcgaagaccggggctcagccaaggcctcagcctctcggcccttcaatctcccagatgccaccattg

SEQ ID NO: 35593 - DNA, 1600 bp, Artificial sequence
  DNA replication origin
gaggggctgtgctgggtctcagggagagtcgcatgaggggaccccagggactaagaaggagcctggaggagaagtcctgagagcaggaccccctcagttgagggcatatggtgtgggtaaaaagctggaagatgggagagagctctccctgatggcccgtctcctcgcagacatggagaggacatgattgtgacgccctttgcccaggtgggtgtcccccgccctccctgccctgaccccctccggatccggcctctccttcccaccgcctaccacctcctcccaacaggtcctggccagtctgcggaccgttcggagcaacgtggcggcccttgcccgccagcaatgcctaggagcagccaagtaggtagagggcggggcggggcgggggcggggccggcagagacaaggtgggcggaaagcgggctgcaaattgaggctggggctccggcgcctccaggtgggtttgaggggcggggcctggtggacttgggggcggggcgagatgggcggagcagccacgcctgaggctgctgtaccgcaggcagggacccgtcggaaacccttcatccagcaatcagctccctcctgcaggtaaagtacctgttccttccctcccccgctgaggacagctgggagcttcctttccatagtgacctccccagtccatgagccccttatactggggctaattgtagccccgcccctgcaaaaacaataacgccctcggggatggaccccaccacactcatattacagatgaggaggctgaggcccagagatctcatggtcacacaggcactcggggaacagatctggaacttgggtccaggagtcctgggtggcccccgtgggaacagtttcagggtccagatgaagagacgaagtcgcgagaggcgtggggtccctgagcgggggggttgggcaggcccctgactgcctcggctcccagaggacacggggcagaagctggcattggagacgctagacgagctggactggtgcctggatcagttggagacgctgcagacccggcactcggtgggggagatggcctccaacaaggtgaggtggggcagatcgctgagctcacctgcctcggcccacggtgccccatcatcacggtcttcaccttctctccgccccagttcaagcggatcctgaaccgggagttgacccacctgtccgaaaccagccgctccgggaaccaggtgtccgagtacatctcccggaccttcctgggtgagctttgttgagtcactgcctggacgacattttaggagtactaagaaacaaaagaaagattcctatgatagacctcagtctgggggagatacagccagacacagacaccttcagcccccatgagtcagggctggatcagagggaggaacaaggggaacttccaggagcaggggacattaaagctacggttttgaagcatgagtagaaatttgcctaggaggagatggagggaaccagacactagcttgggagacggaaaggacattaggctgtttgggggaaaatgctgagccccaggcacccaggggccaagcctagcagaagggtttactgagatcagctgtgaacagaggag

SEQ ID NO: 35594 - DNA, 924 bp, Artificial sequence
  DNA replication origin
tgccaaatcccccacctctacccagatctgagcctacgcggggtgccgacccagctcgtggacggggatacggtgacctttgacccaaaagtcttggccgggaccagccggacactggccctcggccgggagctccgagtctcaggcggtcccggttgtcttcctgtcggtgccgcttccgcctgcccttcttgaaaacccacccccaggtcaccgccttctctagcgccccagttcttgccctacgccctttctctgacctctgaccccaaagaggaggagccagagggaaagacagggtttgagggtagaacgggacaggtagtgtggagagggaggagggtgggccgggcagaaagcacggcctgtgcaaagacccggaggtggaagataacaggcggaacgttcaggctgaagatgaagtggaggagtgggggagcctagggcaggacccggctagctgggggcgtggtcggcggccgtggggcggagccttatgggctgagggtggagcctggaacgctgggggcgtggcaggtagccaagggtgtgagcaagttggctaggagtggggtctctctagactaaggcgcacgcaggagctaggcagaaccccggcctcctccaggtagaagagcccaagaagctgtttccagtccacgtgtccaccatgtgagctagatctcagtttgtccctttgcaatatggtcatccagtcgcagtctttggatgttcggttgtaaccccctcaaagagctctcggggatgggctacatcacgcacatgttagaaacaggagaggccgggtgcggtggctcatgcctgtaatcccagtactttggtaggccgaggcgggcagatcacgaggtcaggagttcaagagcagcctggccaacacggtgaaaccctgtctctagtaaaaat

SEQ ID NO: 35595 - DNA, 2145 bp, Artificial sequence
  DNA replication origin
ccaaagttttgtatttttactagagacagggtttcaccgtgttggccaggctgctcttgaactcctgacctcgtgatctgcccgcctcggcctaccaaagtactgggattacaggcatgagccaccgcacccggcctctcctgtttctaacatgtgcgtgatgtagcccatccccgagagctctttgagggggttacaaccgaacatccaaagactgcgactggatgaccatattgcaaagggacaaactgagatctagctcacatggtggacacgtggactggaaacagcttcttgggctcttctacctggaggaggccggggttctgcctagctcctgcgtgcgccttagtctagagagaccccactcctagccaacttgctcacacccttggctacctgccacgcccccagcgttccaggctccaccctcagcccataaggctccgccccacggccgccgaccacgcccccagctagccgggtcctgccctaggctcccccactcctccacttcatcttcagcctgaacgttccgcctgttatcttccacctccgggtctttgcacaggccgtgctttctgcccggcccaccctcctccctctccacactacctgtcccgttctaccctcaaaccctgtctttccctctggctcctcctctttggggtcagaggtcagagaaagggcgtagggcaagaactggggcgctagagaaggcggtgacctgggggtgggttttcaagaagggcaggcggaagcggcaccgacaggaagacaaccgggaccgcctgagactcggagctcccggccgagggccagtgtccggctggtcccggccaagacttttgggtcaaaggtcaccgtatccccgtccacgagctgggtcggcaccccgcgtaggctcagatctgggtagaggtgggggatttggcagcattcggtccaagtatgaccgggtctgagttgggtctgatcacgtcgaattggacttggtcacgaagagtttgttcgatgagttcgggagaattcggctacgtccgattgagctcgggagacttcggataagttcgagcttgttcgcctaagtccggttacgctcggtctgcttcgaacaagtccgggtgacgctcgggccgggtcgggcatgttcggtcacgtccggctacatgagggctagttcgggcatctccgactaagaccggccgcgctcggcctgttccgtccgactccagcgggtttagcagcaccgggatgaaccccacggccagccgaaggggcggggcttcttaacccttccctggcccgtctggggtgcgccgtgggcgctgtggtgcaatgggagacgctcttaggggcggactggaggcggcggataacccagatctgcccctcgagggggaggcatgcggatcgcgaccccctacccctctctcggctctccccaagggttccagaaaagcgcgtctgtggacaaatagggaaactgaggccaggagcggccacagggcgtgcaaatccggatcccgggcgcggagggttaaggactgggcccgggttttcttggggcgggggaggctgtttttctttctgctctaaacttagccgggagcggcggggtcaggctgtggttccatgacgcgggcggtgcgggggtagagccccccggctgtgggaacggcgcggctgcccattggccaggggggtaaactgagccagggaggctcggacttgggttcgggtctggcctgcgcggggccggccctcgttcatcctcacttctgagtacccgcgacgcgccctcgacgtccctgcgctgtctctagcgccttcaaaagggaatgtgcttcgctagtgtttggtgccccgaggtcgctctccaggacacggaacccccactctcccactccctggttgaaatggaaccaccaggaaccacggtcataccttctccctccaaccccagctatgaccttggagagggacctcccctctcagcctttgggtgccagacttaccaagtgggtgccaattcggcgcggaccaagcgcaggatgccagccacagtcggcgcccacaagccccactccgaaccccagccttgcccccatccctccccacgaggtcacagtcgtttctggaaag

SEQ ID NO: 35596 - DNA, 1432 bp, Artificial sequence
  DNA replication origin
gggggcttcctggccagatacctgaggctctctgtttttctgggctgtgtgactcctcctctgagcctctgttttctcatctgtagaatggggagactctcatgtatctggccttagcatggttgcctcaggatctcctgtgggatccctgatcaatgggcttctccaggactgccagaaacatgggtaccatgtctggggacaccaagactgaggcagccgccccggggggaaggcccaggctgagagacagaggtcattccacagcaaggggcacggtcaggcctcagttgctgggaggtcccctgggcctctgcctgtgacatggctgtttctaggtccctcctccttgtgtgacacatgctaagccttggtttccttttctgtaaagtggaacaaggccagcctgactccagcattctgagggtagagcacctggtacagactctgggaatcctcccagacaccagaggccccccccagtcctgggacagtgaggtccctctgatggcaggggtgggcggctgaggtttcgcaggacagaagacttggcagaggtgatgtgcggatgtttgtctaggaggagacagcaggagaggtgaaggcatccagagacagggcctggggaatgtcagagcaggtgggggatcacgtggggagttgcgtggaggggtgctgggagagggggccctgagtttgggtctcgctttctgcaacaaagacccatgcccgtgaccgcgtccatggaagcctcagtttccccacttggcaaaggattaagggtttgtagtttctggtgcgctgtttgatggcactaggcctcagtttctccatctggaaaatgggcagaggaggattagaaacattgcgtgggatcggacattggcaaactctatacctcggtgatgccctcaataatggaaggcaagacagctgtttctctgggcaccttgctttctgactccctcattctacactttttagcagttattggcccagcaagctgcactaaccagggacgtgccgaggaaggctgagtaagatccaggctctgagatcttaggggcagccctctaaagaagtacagttgggcctggcgcaatggctcacacctataatcccagcactttgcgaggctgaggcaggaggatcacttgagtctgggagttcgagatcagcctgggcaacataaagagacacccccatctctccagaaaatacattagcccgggcgtggtggtgtgcatctgtagtcccagctacttgggaggctgaggtaggaggatcccttgagcccaggaagttgaggctgcaatgagctaggactgtgccactgcactccagcctgggcaacacagcgagatcgtctcaaaaaaaaaaaaaaaaaaaaggagcagagagttgcgtctgactctgtgcctcagtttccccg

SEQ ID NO: 35597 - DNA, 1034 bp, Artificial sequence
  DNA replication origin
agttccaccttctaccgcttcagcacctccggcgcggacagctcctcgctgtcgcctccactcccggccctgggccggacccgggagcagacgctcctcggcgcccgctcacggggacgagtcctgctccctgctatcccagacccctttctctggcgcatggagaacctgggggtcggcgaaggggcagaggcttgcagcaggttgagtcgctctcgcggccgccacagcatgaccagagccccgaagcacctgtggcggcaaccccggcgccccatccgcatccaacagcgcttctattcggatccggacaagtccgcgggctgccgcgagagggacctgagcccgcggccggagctcaggaagtcgcggctctcctggcccgtttcctcctgcaggcggtaggtggccggggcaggggcctcctgcagcgcgggggaggggcgcgcggggcctggcgggagtgggggagggtccttgcttctccagggggcgggggtctctgctgcttggttgaggctggcgcctggaaggaaaaagctatttctacgtaggggtggagctgagggtgctggtgtcatcatggcttgtgggtctgtgtgaccgggtgtgcccacgtgcggttgggactgaaagagtgtgtgtgtgtgtgcgcgcgcgcgcgtgagactggggtgaccagatgtgtttggggtgctcctgtacgttcatgcttgggtatgattccatgtgtcccaggtagttgtgggtgtgcctgtgtgtctccccttgtggtgcctgtaggtatgtggctgagtgtgactgtccttgtgctaacatagctgggggtccgaaggttttcggggttgtggaatgtccgcaggcctgtgggggaagtttgtgaccagctcaagcacccgaggtaaccctggggtgcttggatataaatacacacacacacgcacacacacacacacacacacacacacacacacacgtttttatttttgagacagagtctcattctgttgcccaggtacaagtgcagtgtctcg

SEQ ID NO: 35598 - DNA, 2024 bp, Artificial sequence
  DNA replication origin
gacccccgccccctggagaagcaaggaccctcccccactcccgccaggccccgcgcgcccctcccccgcgctgcaggaggcccctgccccggccacctaccgcctgcaggaggaaacgggccaggagagccgcgacttcctgagctccggccgcgggctcaggtccctctcgcggcagcccgcggacttgtccggatccgaatagaagcgctgttggatgcggatggggcgccggggttgccgccacaggtgcttcggggctctggtcatgctgtggcggccgcgagagcgactcaacctgctgcaagcctctgccccttcgccgacccccaggttctccatgcgccagagaaaggggtctgggatagcagggagcaggactcgtccccgtgagcgggcgccgaggagcgtctgctcccgggtccggcccagggccgggagtggaggcgacagcgaggagctgtccgcgccggaggtgctgaagcggtagaaggtggaactggggctcaaggtggggccgacaccgaggagctgtcgatgcccagatggtgctgaagggtagaacaggggagaagaacgtggtgagggggtgttgaagctaggggctgaagagacccccccccaacacaccagccccgaaaaccgtctgccgtcccctatagcgctgcatggaaaagaaccaagacaaggacttggagtggagaagacagaaattgtccactgatcgctgctaaatggagggcagggagacagggtctcaggagacccccggggccgagacggtgtccctcgcaccgtgttgaaagagaaaaaggtagctttgggttctccgggtggatgagacagcgaagagctgtccgcgacctgatggtgctgaaggcaggggagggagaccggggttcaggtgcacccccagaccagggcgtcatccgcccaggaggtgctgaaacatgagcagtgacgggccctcaaccttccccagcaacaatggcaacaaggagtctggaagcagtcaaggttctggtcttcggaggtacgtacagatagcagtctttctgccaagcccaggaaggtaggctccgcggttcagccccagaaggggtctctttggagccctaaaacccccacccatgccaggcagggatatgagaaggacagggaaattggcaaggctgtgagggggctcccatgtctgggatgggcacacagaggctacctctggccagagctccaaacagctaccagtagggatgggcaaagaggggaagtcaggtctctctaagaaacatcctagttctgcttctaagaccctccccaccccaaagccatgctgcagctgagttgggggaggactggcagaaaacccaccttttgtggaagctcaggacaggcaggaggagtatctctgagactctcgtgcttttaaagccacaccaacacacagaccctcagcggaaatggcaggatctcattcgccctgagaaaggcccaggccccacctcacagccacgattcctgccctcaaaccccaggcctgcccctccctcccagttctggaaactcaagtctccacccaccaggcgtcttagtctcaggggtaatttcctgggaagtgcaaggatgggtaagaacattttccatcatggttaactgaagtaggcatgaacagcagcagggctgggcgggtgagtgtggtgcagaaagaggtgagattttgtactcccagggtcatgacttggtggaggcctcctgtgggctctgggcttgggcagggaggcatttaaggccattagggtgcctcttgctgcatcagatttgagaagagccccgatgtttttggaagtctcagaagcactcaacaaggtctttcccatggagaccatctcccagtgaccccagccatgtccccaggttggagaaaaggaaaacatttgggccaggatgtcagacagactgaattcaagccccagtaccatcatgtcttgctgtgtgacgcatgacaaatgactccctctctgttctat

SEQ ID NO: 35599 - DNA, 1432 bp, Artificial sequence
  DNA replication origin
acacctgtccaggttcagcagcctgggtgggggcatcaggactggcgaaacaaggtctcctggccccagacacatgggagacccattcagctcccagagtggctctgatggtttcagggggattacgagaccccagcacctctcctgagacgcccccaagctcaagaataagcttgctccaggaggcccaggcatgtctggcacttaccaccactgcggagtcctgcctgggtcccatgacctgctggctagtgagggaaggaggggagaaaatgacctgaccaagagggaggcccagggctccctcaacacccactcagcggagccccttaactgtctgggcaccaggccaggacataatccacacactttccttgggtgaggctcccagtgggtggagggcagagtgtccaagagggcctgaggggacgagagagtggccaagagggtggccgggcatggagggggaggggcggggagggcagaggaaggaggggggaaggagggaagggaggcgtaggagtgaggaggctgggtgagaggtgttaagattaattgttcatgtgtttgcatatgatagagtgagagagagggcgcgaaggaagatggtggtaggggaccagcagctctgggaagggggggattttatcaactcagggtctaggatatctgcttccaagcagagcccatggggtgtggcctaaggagcttgggggctccaggaaagttgcccgctgtgctgtgccgccccgggtagatcaaagaccctctctggtcattggctgggcgcggtggctcacgcctgtaatcccagcactttgggaggcggaggcgggtggatcacgagatcaggagatcgagaccatcctggccaacatggtgaagccccatctctactaaaaatacaaaaaaattagctgagtgtggtggcaggtgcctgtaatcccagctacttgggaggctgaagcaggagaatcgtttgaacccaggaggcagaggttgcagtgagctgagatcgtgtcactgcactccagtgtgggcaacaagagcgaaactccatcttattaaaaaaaaaaaaaaaagaatggcttgaacccaggagtcagaggctgcagtgagccaagactgcactactgcactccagcctaggtgacagagggagactgtctcaaaaaagaaaaaaagagagagagatggggttttgccattttgcccaatttggtctcaaactaccaagctcaagcaattcacccacctcagcttctcaaagtgctgagattacagtggtaagccaccatgcccggcacccccagttttgtttgtttgttttgagacagggtctcactctgtcacccagactagagtgcagtggtgcaatctcagcttaccgcaacctctgactcccaggctcaaccaattctcctgcctcagc

SEQ ID NO: 35600 - DNA, 823 bp, Artificial sequence
  DNA replication origin
gctacttgggaggctgaggcgggaggttgcttgaatcccagagtttgagaatgcagtgagctgtgattgtgccactgtgcttcagcctgggcgacagagtgagaccccgtctcttaaaaaaaaaaaaaaaaagggctgggcacggtggctcatgcctgtaatcctagcagtttgggaggccgaggcgggtggatcacttgaggtcaggagttcgagaccagcctggccaacatggtgaaaccctgtctctgctaaaaaatacaaaaattagccaggcctggtagcgggcgccagctactcgggaggctgaggcaggagaattacttgaacccgggaggcagaggttgcagtgagccaagattgcatcactgcgctccagtctgggtgacagagcaagactccgtctcaaaaaaaaaaaagaataaaagaaagaaaaagaaatccataatagaaatgctagaaggttagaaggtttcagtcatgtccccaaaaggccccagtctgggtgagacagaggacagaggaggacgaggacagagaacaaggacatccccagccctgtgggttcagggatcggagggaggtgggagaaattggtgctcccagaggggacaacctggctggacgaggggcagagggagtgacagcaggggtttgggcagctgtggaaccaggagcagggggaaagaggacggcaggggcagggtgtctttagtggatgactggctttgagagcttctgggtcgtcgtgtttagaaggggtggagtccaggtgaagagggcgagaaccgcacccgggggaacaggagcgccccagggaggt

SEQ ID NO: 35601 - DNA, 1174 bp, Artificial sequence
  DNA replication origin
ggcgcggctaccgtgtgcggcggaacctggcacacctctgcagagccaccacgaccatccagtctgcctggcgcggctacagcacccgccgggaccaagcccggcactggcagatgctccaccccgtcacgtgggtggagctgggcagccgggccggggtcatgtctgaccgaagctggttccaggatggcagagccaggacagtatctgaccatcgctgcttccagtcctgccaggcacacgcttgcagcgtctgccactccctgagctccaggatcgggagcccgcccagcgtggtgatgctagtgggctccagccctcgcacctgtcatacctgtggacgcacacagcccacccgtgtggtgcagggcatgggccagggcactgagggccccggggcagtgtcttgggcctccgcctaccagctggctgccctgagtcccaggcagccgcatcgccaggacaaagcggccacagccatccagtccgcctggaggggctttaagatccgccagcagatgaggcagcagcaaatggcagcgaagatagttcaagccacctggcgaggccaccatacccggagctgtctgaagaacacagaggcgctcttgggaccagcagacccctcggccagctcacggcacatgcattggcctggcatctaggaccctggctccctgcagtggggacttcgtgggaggcactcatggctctctgggtctaatgaataaagtcctccacagcctagatcttgggtgatgtgttctgggttaatggaagtggcttgggtatagtgggggaatctggaacatcccagagggaagagaactctgaagttaccaaccatgcagtatgcatctggggtctgtggccagcatggggacctcaaatctttcctggaggtcaggcactgccaatgtggtctcagctgtgcctctgccatatccacgtacaggtagtggggtggtgtccagcccgtcccagatggaaactgtccccagtgcactctagaaatgtgcctgggacctggcccagagcactcacctcaagtccctcacccctaaaaaatcctacaggatggctgggtgtggtggctcatgcctgtaatcccagcactttgggaaaccaagacgagtgggtcacctgaggtcaggagttagagctatcagcctgg

SEQ ID NO: 35602 - DNA, 1072 bp, Artificial sequence
  DNA replication origin
tgtccaggatggagccccagccatttccactgccacactggtcttaaatgccatgtctgttttcgcctgtttctgggtgccagtcttgattttctcggcttccaaaggaagctcagctgcagccctggggaccccagttcccggatgtggttgagccaggcacctgatcttcccctcagccaaataggagggggatgaggctttcaccacctttgcagcctgcttcacattcacggtggccttggccttgggtgggttctcatggatggagcctgaggtgttgggagttccggctgctaccgccacttggggtggagccttgacatttgccactgttggagaggccagacacagagtcttgaggatggtggccaccgagcgtaactgggctggggtcttggttatcatggctggcaggcgggtctggggtgagggcttggtcaccccaactgggctcctctgggatgaagtcttggacattgtggctgacagacatgtttgcaatgggtttttggctggggtggtgaccgggtgcatctggggtggggtctttgccatcgcaggccccgggcatacctggggcaggctcttcatgatggaagccagaagggaaacctgaggtcggttctttgccgtgatggtcgcagggcatgtctgccgtggggtgccagttctggaggctgtggggtgtacctggatcttggtcattgtgggcatggggcatgtgtgaggtgcagttttggtcactgtgggccccggatacatctgggctggggtcttgattattgttactttgggaactgggctagtcttgggtggggtggtggtcatcgtggacgctggatatgtctgtggcagggtcacggagaccactggatatgtctggagtagagtcttggtgatcatgggccctggacatatctggaagggggctttgggggtctctgctttcacagggccctgggtttgggctctggatggtctcgtaactgcctggtcataccttctggacaatggtgtctccggagccctggctttgttggtccgggcacttacacgtttggtcttcact

SEQ ID NO: 35603 - DNA, 1418 bp, Artificial sequence
  DNA replication origin
ttatgtttctactcgggaacaaacgttggttgtgtgtgtgtgtgttttcttgtgttggttttttaaagaaatgggaagaagaaaaaaaaattctccgcccctttcctcgatctcgctccccccttcggttctttcgaccggtcccccctcccttttttgttctgttttgttttgttttgctacgagtccacattcctgtttgtaatccttggttcgcccggttttctgttttcagtaaagtctcgttacgccagctcggctctccgcctccttcttcccccgccggggcctggcgggctgggcggggcctggttcgcttcccccctacacccccgcctttctctcctccctctgtccctagctcctccccttgttggagggagcagagagcgggtgtctgagagcggcccgcacatctggcgcgcagcgagcgccccctagacgcgccttggcgcggggccggctgatgtccaggttggggaggggtcttggggtctttgatctgcgtttggaactagctaatgcccccttgccttttgggaaggagagatttcgaggtggaaagggcacagccccagcccaaagcaggaaggaagagacagaaacttagtaaactttttaaccttttggtccttggtttgcctgtccgtataaaatggggagaacagtcgaaaaacttgccccataaagttgtgacgattaagagagtttatgtttacagagcagtgcttggcttacagtgtaagcttttctcttttggtggatcgggggatgctgaggcccaggacaagctgatggacccagtaccaggaggaagttggcacaggtgggatctaacccaagaggtctgcctccaggactgggattttccaagtatctccctgaagttcgcttctcctcctcctcccaacatcctactccctactttgaggaaatctaaggttcagagaggttgagcaactggcttgacatcacacagccttttaaggagactgtgcagagatagtctgaccttggactccctcactttcagagctttgacccgaggcttcctgcttctcctgcctgctctgccctttgctgttaagaccctgcgctttgggcttccaactcattggggaccctgagggatgtgaacattagtggccgaggtcacacagcaagtagggctggtggccatgtgtacctagccagccctgttagggagggccactgaattgtacccattttacagatgaagaaacttggagagaatggccaccgtcccttggtcatggagaaaggccttgccaccaacagctatgttggggttcatttgtttgagacagagtctcgctctgtcacccagactggagtgcagtggcgccatctaggctcactgcaacctctgcctccccgggctcaagtgattctcctgc

SEQ ID NO: 35604 - DNA, 1588 bp, Artificial sequence
  DNA replication origin
gggggcccgcgcccccccgtccgctcggccctgcgcccgccccggccgcggccgcagcgcccggccctccactggcggcggctcctgcgccgcgccacttgtgcgccctcttatagcctcggctcggcgcgatgagctcaccgcccccgttcgccattgggtgcgggtgacgtcgctcatttgcatggaggggcggggccaagccgccgacgcccgcccggccgccgttgccccggcgacgcgcggtaaacgccacaacagcgcgctgccttgtgggttgacgtcatgggggcggccgcgcgcccgggccgggtcaccccgccccgggaccgctgtgtacgaccgatctccccggcgccgcctccgccaaggcacgtcccgggtggcgtgatgggcccgggccaccaggcgcccgcccgccccgaggccccgccccgtgtccgcgcgtggggccccggccgggcgggggcgggggcgggggcggtgccggcctccggggactggagggggatggggtcccgcatggctaaataactccttggcgcctcctgctctgctgtgccgccagggcctcccctagcgcgccttctggagaggctttgtgcggatacggggctggaggcctggtggggctgtgtccgggggctcgccgggggtgtggggaggtctgcgttcctcaccctccctccttccttccctccctccctccaccccgcgtgtgattgctcaggaagagacgggaggggagaggagggtcgccagaagttgctgaaagcgcttggatcctgatcattttcactgagtgcgttctagaaccaggagtcctacttcctgcctttacagatgggaaactgggctcagagaggtggagtgaccatcccccgagagttagctaggagtcacagcagggcccgggctgtgactaggcctgagctcttgtccacccttagaaccctagaacctgggagtccaggcccctgcgcagccccttccttccgccgcccacgttttaaccccaggtctgccagggctgtgatgtcctgggcgagggtgcccaactccaggggctgggctgatgaggcaggaatgccgggtataattattacatgcttgttaccactatcatggctgttagggcttaatgagccactattaagactggctgggaagggggtgtgagggaggagagatggacccaccccaccaatactcacaagggatccttaggacatctggatctgacctacagcctctgcatgcacccctccagctccccacctctgtctgaatggagcccacaccctcctttccctgacctccttcccctcactctctctgatccttggcctcccagttgcaggactaatcgtacctctgggcctttgcacgtgctatgctctctgcttggtactcccttcccccagtgcaaagatgtgtcttcaggaagtgccccaccctcagactttactcctttattgtagcctctgaatctgccagaatgatggagtggaccatagtccctgaaggtcagggacattgcctatgctgagcctgctgacagggcctcgcatagaatggatgctcagta

SEQ ID NO: 35605 - DNA, 1703 bp, Artificial sequence
  DNA replication origin
tggaagcaaggtcattttagagaagcatgctgtaggttggtctcacgattttcctttaagttggcccccttttctgtttttacttcagtaaatacattttaaaagggaaccttcatgtcaccaccaagaatggaaaaccagtttctcttgctataaatagaaggaaaccaaaaaactatgaaatgagagcaaagtcaggcattcccacctcaggaacactcagggctggggctggacttcgaatgtctgagtcttatcaaaggcagggaagccccaagcagaagggcaggaggggccacagggacccacttggcagatgctccagtcccgtgggtcccagcacacagtaggtgcttgatgaatgtgtgttgatctgttaacatgcaacccattattgtaggtgcccccccccaccatgatgtgtgggttttgcctgcatccgaccacatactcgtggcttttccaggtactgagccatttccccgctgacagactgagggcagggtggtgcctgaatggggaggggtgggggaggtggcaggcagctgcctcttgggcaggggaccccacaggggcctctctggggaggcttcggtttggtttggtgacatgccaggatgcagctctgggcaaacgtttatttgcagccttggggctgtccccacccacggtcctgtgggcccctgacgtctgtccacactgagatgtgggcccctgtggcccgccgccctccctggctgtctgtggtgtgtgaatcaatgaatgagtgaatgagtaaaggaatgaatgcaataagtagcataatggatgagttcgtagaataatgaatggatgagtgaattaatgaatgagtggaagtattcatgctgccaagatgggaaacccattctccaggtattctttttttttttttttaagacacagtcttgctctgtcgcccaggctggagtgcaatggcactatctcggctcactgcagcctccacctcctgggttcaagtgattctcctgcctcagcctcctgagtagctgggattacaggcgtgcgccaccacgcccggctaatttttgtatttttgtagagacgggatttcaccatgttggccaggctggtctggaactcctgacctcaagtaatccgtccgcctcggcctcccagagtgctgggattacaggcgtgagccatctagatatgctttgtccccttttttcggatggacaaactgaggctgtcagccaagaaaggcttcagtatgtggaaggcagattcgaagccagttggccctgcacatcgtgggctgcatttctgcaccaagactgggggttcctggagcgagcttaggggtccggactggtgcagacggggcgctggacctggcccccagccagcggaagggatctgggccccagatggggagtagatggaactggaggcaaggcaggcggcagggggtgaagaggccgctgccccaggctgcggggatggggaggcaccggcagggtccgcgttgattcagaaaggaccccaaggaaggagcaactttgggggaccccaaagttgtctgagtggtatcaaaggccgtgcacatggggcccttaagcgctacagcaggggcaatagtggagagaccccacgccttcccgcctcccgctgcccccgcatccccttcctcccgcctcccgcctcccccctgctcctcgcct

SEQ ID NO: 35606 - DNA, 885 bp, Artificial sequence
  DNA replication origin
cgagcttaggggtccggactggtgcagacggggcgctggacctggcccccagccagcggaagggatctgggccccagatggggagtagatggaactggaggcaaggcaggcggcagggggtgaagaggccgctgccccaggctgcggggatggggaggcaccggcagggtccgcgttgattcagaaaggaccccaaggaaggagcaactttgggggaccccaaagttgtctgagtggtatcaaaggccgtgcacatggggcccttaagcgctacagcaggggcaatagtggagagaccccacgccttcccgcctcccgctgcccccgcatccccttcctcccgcctcccgcctcccccctgctcctcgcctctcgctctcccggggaggaagtggcgagaatgcgggggtgggcaccctattctcacttcccctggggaagggcggggcctgcggggtcctctccgccgccgggagacggcatctccgcgtacaggggtgggggcggggagccctaggagctgggcaggcgctgctcagtccctggccaggtgacgtccgtaagtttcctggtcttcgatggttctcgaatgaaaaatggggggaaagacattgagttggaaacagcgagttgttggggagagaggaccccaccccgggccggtactagcagccagacacggacacgccctgccccggaggggtcagggccaggccgaagggagggaagtcgcagtaaacacagggttgggttggggcgggaggcgcattccaggcggagggaacggcgcgggcagaggcctggaggctggtggaggcctcctgcctcgcctagctgcggggtcctcagcgtgtggcccctcccctaatgggagggggggagaaa

SEQ ID NO: 35607 - DNA, 966 bp, Artificial sequence
  DNA replication origin
tccaggccacacccggagctccacctcccttacctggttgtctctctgtctctgtcttgctcctagatttttttccagcctccctctcccgctgtctctccttccaactcatttttttttctcttggtttatttccaagccacgatattgcttttctcttccgctatctcgaagctctggccctccaatcaggaggcccgatttagtacagcctcacccagaacgttggggccgttcctttggcctcgatatacccactcaataaatgggcttgtcctagagcttaaggcctgcccctgggggggaggaaattccggtggcggacacccttccccatccccggttcagggccccggcggggaaggggttaaccacgcgccgtcccttccccccagctctgcatttaattagcagtccggtggggcggcctcgctgggcgggcgggggaaagggagagagggggtggagaggagatcgggggagacgggagggagaaggggataaggaagaggggaggggaagctgaagcaggaaggggagggagaggaggggagtgagcgacgggaggagaggagggggctggagaaccagcccggaattcacagacagcctcgcaggtgtccccgctccagcctctttcttggggtgcagtcccctcccacacccccttttcaaggccgaacccagcgcccacactaaatgtcaactctccccattatccggttgaggaaactgaggccatgcagaggtggtgatgtgccaagtcgcagctcggggcaaacgtttattcgcaggtatttgcgcaatggaaaacaagcccaaaccagctccaggtcgtccggcgacctggaggagctgggagggggcggtagtgtgggacgcgggctagcgggcttagcaccagccaggccacggccgttcccgtgcctcaatttccctctctgcacagagcccagtaaattgctt

SEQ ID NO: 35608 - DNA, 2070 bp, Artificial sequence
  DNA replication origin
agtggatggatgggtgagtaggtagatgggcggatggctgatagagggaggaagacctgacactgaggtccgctccatgagaagcagcgtctcccaccttccagcagatgactgagtggtgtctggtggaggaacttgtccagtccttcccgaggtctcacccacccctctgcagcctcagaagacacccccagggtggaggctggaaagttggggctggacagggtgctatgagcgtaggccaagcagaggcgtgccggccgggtaccagatgctgctacctgcctctgccgctgagtcagcatcaccatggcaactggccctgccggatgcttctctgggcacatccccgtcactgcagccaccaccgtcacagccgcctcctcacagggggcagggggagcagctatttttacacagtttgtgtgcagcactcaggggccagggtgctcaccttccctacaccccctcccctgttagtgtcagccccaccatctcctgaagggggcttgggaggatgttgtcacctggggtgggcattgtgagaacagatgagggacatgtacaagggctgagtggctggactgcaggagagaagagagccaggggcgatgatggggaagactggccacagcagggagccacagagggtgtggggaggccagaggggcactgacggagggcacaacaggggtccctgtgaccctgggcaacctccacatccccaaagcctcccctgctgcttctggagcatgcataatggtaggaaaagtgaggcagggagagcagtcacaggctccacctgggctggccaaggactcaagccaccccccaccctccctgcttaggatctggaggcccctgtaatcctccatctctcctcaccctgcgccacgcctcctcctggatgttcccttaacacacctcaaattcagcccgggtacagtggcttacgcctgtaatcccaacactttaggaggctgaggcggacgaatcacgagatcaagaggtggagaccatcctggccaatatggtgaaaccctgtctactaaaaatacaaaattagctgggcatcgtggcgcacgcctgtaattccagctactcgggaggctgaggcagaagaatcgcgtgaacctggtaggtggaggttgcagtgagctgagatcgcaccactgtactccagcctgggggacagagggagactcctctcaaaaaacaaacaaacaaatacctcaaattcctccccagggcctttgcacgtgctactccagctttcaggaacacccttccctggggcatcctcatggtggccctgctgctggtatcatggatcctctggccccccccaccccacactccctccgcctgctgtcatttgctttctcaccacctgactttatatcattcacttctttcagttgttcccgtcccaagaatgaggggccactgagtcacctcacagcacatagcccacacttcgcttcgctgggctcctctctgatgttttcagggacagggcggggacttgggttgaccgatggctccaaaggcaggcatgaccttcctttcaggccacaaggccctatcagaagtcagcagtcagtgcgtgagccaggcctggaggctaacaccagggccaggagttattccaccacaggttcctccaggaagccgcctcctaccgggagcctgcctgggtgcctccaggccacacccggagctccacctcccttacctggttgtctctctgtctctgtcttgctcctagatttttttccagcctccctctcccgctgtctctccttccaactcatttttttttctcttggtttatttccaagccacgatattgcttttctcttccgctatctcgaagctctggccctccaatcaggaggcccgatttagtacagcctcacccagaacgttggggccgttcctttggcctcgatatacccactcaataaatgggcttgtcctagagcttaaggcctgcccctgggggggaggaaattccggtggcggacacccttccccatccccggttcagggccccggcggggaaggggt

SEQ ID NO: 35609 - DNA, 1827 bp, Artificial sequence
  DNA replication origin
gagatggagggggcagtgagctgtgactgcgtcactgcactccatcctgggcaacagagtgagactccatctcaaaaaaaaaaagagagagagagagaaagaaagaaagaaagccagccaagaattaaatatgatcaattccaggtgagtgagtctcccagacagtgggaacagcatgtgcaaagaccccgaggtgggaatacatagctgtacccaagggaaagctggcatggaacaagtgagtggggagaagaagaggggaatagacggcagctgctggggggcctggggatatggggaaggatctaagatggactcagatgggaaaacagagagattgagagatgcaggaagagagagggagcaagactaggagaacaaggaagagatagggcctcagcatctcaaggcctggctccaagtagccaaggaggccttgtcctcacccaagtccctgcaccccagactgctgataccctgcctgcatcgacagtggcaaccaccatgtgcccagaaggatgtcagtacacggtaagtgctccaaaaatgttgagtgaatggatgaacacaggaatggatggatgggtgggtgtgtggtaagtggatgggtggctggatgaataggtggattggtggatggaagggtggatggtggacggatgggtggatggtggataggtggatgggtggatggatgggtggatggatgggtgggtgggtagataggtggatgggtggatggtggatggatgggtggatgagtggatggtggatggatggattggtgggtagataggtggatggatggatggatggtggatgggtagatggtagatggatgagtggatggtggatggatggtggatgggtagatggtagatggatgagtggatggtggatggatggtggatgggtagatggtaggtggatggtggatggatggtggatgggtagatggtggatggatgggtggatggtgaatgggtggatggtggatacatgggtgggtgggtagataggtggatgggtggatggatgggtggatgggtgggtgagtggatggtggatggatgggtcagtgggtagacaggtggatggatggctggtggatggttaggtggtggatgggtggacggtggacggatggtggatgggtggatggtgaatgggtggatggtggatgcatgggtgggtgggtagatggatggatggtgggtagatggatggatggtggatgggcagatggtggatgggtagatggtgcatggatggatggccgctgggtggaggaatggatggatggatgaatgggtagatggtggatggatgggtggatgatggactgattggtggatgatggatgggggatgagtggatggtggatgggtggatagatggacaggtgggtggatggatggtagatgggcagatggtagatggatgggtggatggtggatggatgggggatgagtggatggtggatgagtggatggatgggtgagtaggtagatgggcggatggctgatagagggaggaagacctgacactgaggtccgctccatgagaagcagcgtctcccaccttccagcagatgactgagtggtgtctggtggaggaacttgtccagtccttcccgaggtctcacccacccctctgcagcctcagaagacacccccagggtggaggctggaaagttggggctggacagggtgctatgagcgtaggccaagcagaggcgtgccggccgggtaccagatgctgctacctgcctctgccgctgagtcagcatcaccatggcaactggccctgccggatgcttctctgggc

SEQ ID NO: 35610 - DNA, 731 bp, Artificial sequence
  DNA replication origin
ccaggctcgtgccaggccctgggctccaaaagaagaaggtggggagggaggtgacagggacacaggccatctgggggtggctgtcagagtagtgctgggaacagcaggtgaagcccagaggaggagaggaggaggagagagaggagggggatgggggatgggagtgggggatgagtggaggaggatggaggaggaggggaatggggaggaagatggggagtgagaggagggggatgggggaggagaaggagaaggaggaggaggaggaggagagagggatggcttcccacagctgcctctcgggggccactgcccaaggccagcctctgcacttttgtccctgaagcgggtgtttggctccaggatgaggtggcgtcagcagccgacccgggcctgtcgcactctggcgggggactgtgggctggccctgcagagctcagcccccggctgagtcacagcacagcgccaggcgtgggcctccctaacagaaagcaaactccaggcgagaaggtctgggggcgggtggggaccatctacgataaaggcagccccagttgggtgaggagggcacagaccatcggagggacagaaagacctggaagccttggatttaggaactagactggtgcttttggtttcttttcttgttgagggggctgaggatgaggctttgtgaaaccaaccaggaagaatgaaacacagagctggtccgacacccagctcgagggagg

SEQ ID NO: 35611 - DNA, 1508 bp, Artificial sequence
  DNA replication origin
catgagaagcctgttgattcagaggctgcgtggtctccaggggttggtttggcctctgcctccagcttcgagtggacggatggctttccctgagcagcctgcctctgtggccaggcggtgatgctgccgtcacatgtggctgggaggagaggcgatgggaactcacatcgtccccatctaagtggggccctccctccctcagaggcaggccgcaggatgcagagaccccgggctgagagacctctggagcgctgtgggcaggaggcaggggcctccctgcagtgagctcaggccctgcccaggttcctgcacgaggaagcctctgggccctgcctgggagagctgggcgccaagtcacctgcccaggccctgagtccccacagaaccatggtgtgtccgccccacgagccctcgaggggttcctgggagagtgagcacccaaaggggctgttcctccccgcccagcgctaggccaggccacacctacccaggtgtggaggagagtgtctgacaggaggacttggggattcgggcaggtaaggccttttggggtcaaagttagccagatgagaagtgggaaaaccacgtgcaaagttctgggggcaagcccatggcgtgtgttccggaaacagaaagttccatctggagggagtgtcgtcgggctgggagaggaccgccagggcggggcaggatctcgggccctagagagccctgctgaggttcttagaccttgcccccaggctggagggggccctgggtgggttccaagctggaacatactgtgatctgactttaaagggcatcgggggcaaaggccatccaggcgtcgtgcgtgggtctgtccaggaacctgggcggtggggcggggctgggaaactgatatggtaggaatggccctggcccctgctaatccctcgatctgtcccagtgggggcctcggaggcattgcagcatgagtctgtgtctttgcaaggcccccatttctccagtcttggttagctctcctaaaactggcatcgctgggagccgcccttgagccaccctggcaggacccaagtccccccatttcccgcccctcttcacccaccacactaggcctgtagcttgctcgcatgtccctgcacccagcgcaggccctgtcaggagatacttagatgaatgaatgagtcagggcatgtagagaggcttccagaagtgaggtggggctggggcaggaggaggagtagctgggcttcggctgtgtctggtgcacagggaggcccccacccgctctgggctttgggctgcaggtgaagaaccccaaccagagagagccccatcccaggctggagggagccccagtcagccactcctgagccaggcccacgggcagaggataggagccagtcttccttgtgagtgcacaatgggggctgcgcctaccacacccacccttgctcctgggtgaaggattgcctggggtcaggacagatcctgcctgcagggtggaccctttgccacgtatgtcc

SEQ ID NO: 35612 - DNA, 950 bp, Artificial sequence
  DNA replication origin
ctctgctgcctttagtccagcctggatgttgcctgcactctgcgggccatggtagtgtggccctgggatgtccgggatgcccaggtcacggtgggcaggagcagcgccagggcccggtgggtcaggagccaccagccagagcccaagaccggaagtgcctggctaggagtgctgctgggtcggccggggctggaagatggttcccctggtgtcacgggccttccctgcccctgggatgacccacagagcactgaggaggaggccagggatggtgctgaaggcagcggctcccttggactcctcccaccaaccttccctgaccccatctgtcttgtctccctgtgggtgacagccccccatggtatagggaggaaactgctggggagcttggagtgcctgcctggggtcaccttgacaggacaacagggctcgaggggggaggcgcttcttcctgaagtggccgtatcttgccctgaccgccacccccacccgggactgggcctctcatcagcacagggctgggcggggtggggacaggtggtgaggctgctgtgcagcagcgctagaagctctagaaactgcttgctgggtttcgtgccatagcctgtcggagggcgtctgggtgggtccagtctggctgtgtcggatggtgccttggtgcagaaccgcgtgcctcccatctgcggccagcggggctctgtccacttccggtattggaatcaccaggcgtgttgcgtgcgtgagcatgtgcggtcttgtggacacctccaggtcctagacatgagaagcctgttgattcagaggctgcgtggtctccaggggttggtttggcctctgcctccagcttcgagtggacggatggctttccctgagcagcctgcctctgtggccaggcggtgatgctgccgtcacatgtggctgggaggagaggcgatgggaactcacatcgt

SEQ ID NO: 35613 - DNA, 1508 bp, Artificial sequence
  DNA replication origin
agaggcccagtcccgggtgggggtggcggtcagggcaagatacggccacttcaggaagaagcgcctcccccctcgagccctgttgtcctgtcaaggtgaccccaggcaggcactccaagctccccagcagtttcctccctataccatggggggctgtcacccacagggagacaagacagatggggtcagggaaggttggtgggaggagtccaagggagccgctgccttcagcaccatccctggcctcctcctcagtgctctgtgggtcatcccaggggcagggaaggcccgtgacaccaggggaaccatcttccagccccggccgacccagcagcactcctagccaggcacttccggtcttgggctctggctggtggctcctgacccaccgggccctggcgctgctcctgcccaccgtgacctgggcatcccggacatcccagggccacactaccatggcccgcagagtgcaggcaacatccaggctggactaaaggcagcagagtccgggagtcttgggcctcccctggagggggctgccccagcctgagccacagggagtccccagtcctaggtccttccaggtcaggggtggcaccaacagacacacagcaggaaagtctcccacagggtcaaagtccagggcacactgggagacttggtggcctagctcaccctgccctgtccctcctgactgacccctggaaggacgagcagtcctaggcggcctcccccactgactcctcccatgaggcccagggagggagggaggaggctgagtgtgcaccccctgcatcccacccccgttggtgggtgcagcacccaccctggacgtgcagatgacttctcgcaggttaatgttcatccagttgtcgcagctcaccaggtgtccattgtacgtctccccatttttcagctccaccaactagaagagagacaggctagaggttggctgtagccctggagccctgcgccatgggcccctcaggaggtgtagctctgccctgagatggaccaccacctccgggcctcagcccacagttcccagacccctaaatggccttccttacaggcgacaggctctgcctccgctagacacttcgctggcagttagacagtctatcatgacgccaacctttgtgcaattaaaaaatgatactgggccgggcgcggtggctcacgcctgtaatcccagcactttgggaggccgaggcaggcagatcacgaggtcaaaagattgagaccatcctgaccaacatggtgaaaccccatctctactaaaatcataaaaattagctgggcatggtggtgcatgcctgtagtcccagctactcgggagcctgaggcaggagaactgtttgaacccaggaggcggaggttgcagtgagttgagatagggggaggttgcagtgagctgagatcgcaccactgcactccagcctgagcaacagagtgccacttggtcttaaaaaaacaaaaaactaagaaacacagaaatgtttaaagga

SEQ ID NO: 35614 - DNA, 1405 bp, Artificial sequence
  DNA replication origin
ccaagccccgcgcccgactgccctgactcccgaccctgggacccccaaggctcctcctcctccactttccaggaagcctgggctgcgcggggctcccgcgggtgatgacaccttccaaatctgagaggacttccagcacctgcccctctcggccccgcagtcccggagccgcccccgcctctgcccccggccgctgccgctacagcccccatcagccagcgtacccgtcactaccaccgccttcctcggctgctccatggcgggatcgggctgtgcctcggacctgcttctgttgcgactggcgcgacagctgctgccgctgcagcctctcggccgcgcgaggccacgcccctgtcaagcccccggcctcgcccccggtcagccgctcggcgtgcgcgcccccgggcccgagacgcagcgtgcgcgccctgcgccccgcccccgtcggctaggcccggtattccccagcctccgtttccccgtctgcaaaatgggaacatcttatgccgtagtgtgtagccgcttgcacgcactgagccaggtgctggggatgagccggtcctttattctgcaagggttcattgagggcctgccctatgcatgcatactgcgcagaattagggagggaagtccccgcgagcaaggcccgttttccagataaggaaactgaggcacagaatgccacttccccgaggtcactcgcctcaaggggtcacaggagcagcattcaggccaggaagttggcgggggtgggggaggacagagtaaaaaaggaaaaacacgacaaccatatttgtgtggtgccagaagtttctctgcaggcccccatggtcctaggaggctaatgggggagggcgattgtacctgctgttccctctgccggaacacaccccgcaggtacctgcgaagctggcctccttcaggcctcagctccagtgttccaatgtcgcctcctcccaggggccctcctcctgtcctggctgtcacctcctccgaggggtgaactgtcactttctccttgtggccttctctggctatcacctccctgctatcctattacctcctctgagggttccttctggccctccttggctgaaatgacctcactgctaccccccagtggttccatctcattccctggttccatcctcttcatagcaataaagctcagaaataatttcctttctctctcttttttttggagacagggtctcactctgttacccaggctggagtgcagtggcaaaatcatagctctgtaactttgacctccagggctcaactgatcctcacatctcagcctcctgagtagctgggactacaggtgtgtggcaccacacccagctaatttttgtatttttgtagagatgggggtttcatagtgttgcacaggctggtctcgaac

SEQ ID NO: 35615 - DNA, 2561 bp, Artificial sequence
  DNA replication origin
caaatatggttgtcgtgtttttccttttttactctgtcctcccccacccccgccaacttcctggcctgaatgctgctcctgtgaccccttgaggcgagtgacctcggggaagtggcattctgtgcctcagtttccttatctggaaaacgggccttgctcgcggggacttccctccctaattctgcgcagtatgcatgcatagggcaggccctcaatgaacccttgcagaataaaggaccggctcatccccagcacctggctcagtgcgtgcaagcggctacacactacggcataagatgttcccattttgcagacggggaaacggaggctggggaataccgggcctagccgacgggggcggggcgcagggcgcgcacgctgcgtctcgggcccgggggcgcgcacgccgagcggctgaccgggggcgaggccgggggcttgacaggggcgtggcctcgcgcggccgagaggctgcagcggcagcagctgtcgcgccagtcgcaacagaagcaggtccgaggcacagcccgatcccgccatggagcagccgaggaaggcggtggtagtgacgggtacgctggctgatgggggctgtagcggcagcggccgggggcagaggcgggggcggctccgggactgcggggccgagaggggcaggtgctggaagtcctctcagatttggaaggtgtcatcacccgcgggagccccgcgcagcccaggcttcctggaaagtggaggaggaggagccttgggggtcccagggtcgggagtcagggcagtcgggcgcggggcttggggggccgggcaaaagcccggcgctgcgcaggcccccctggcgtcctttcctcccaaggtggggatggtgaccctcctggcacctgcctcctctgtctggcctgcgggctggactggacccttcctccctgccccttccgaggtccagcctgtccccacaccgctcccccaacccctggccccaggggacaaaggccgatttgcgggcaggaagtgtcccagtgacaaatgaacctcccagtcactgctcgccgcgccctgcgctcctggggggctactctcccaaggcaggggcaggtgggggtccggggacctcgggctctcccagctgtcccagggactgtcttcagcggaaacctttttgtgttttgtgccagggctgtttgttggtgagtcagggcccctgctgtcaccgactcccccccacccccaaaccaactgtttctcctccctgagactccgcctcggggccacgtggggcgccaacttccgctggggcctcagagtcaaggagtgggggggtcattttgacctgctgtctggaggggtcagagtgggaaatccagcaaaggtgcacacaggtgttttgtggctgttgaagggagattgaggctgatccaggagattcagggaagaaggaagaaacaaggcacctgcttaacaggtgtgtataattgggaggagggtcactgcccccatcccttccagccttcctttatctggttatttattccagcactttttgcatgagctgattacatctttactgtctccattttgcagaaagggaaactgaggctcacagaggtcatccagtttgtaaggggctgagctgagactcaaactttggctgtacagaaggatagagttaggaggtcccctcctgagccacagcccctacctgctatcccaggctacagcatctctgcatagcattcatatcctgtgggatcactggcccagatggaccgtatttttttttttttgagacggagttttgctcttgttgcccaagctggagcacaacggcgcgatctcggctcactgcaaccttcgcctcctgggttcaagcgattctcctgcctcagcctcctgagtagctggaattacgggcacgcatcaccccatctggttaattttttgtatttttagtagaaacggggtttcaccatgttggccaggctggtctcaaacttctgacctcaggtgatccgcccgccttggcctcccaaagtgctggaattacaggcatgagccaccgcacccagccccagatctggatttgaatcccagctttttcaccttcttgctgtgtgaccttgggcagctagcttcacctctctgtgcctcagtccctgctcctggaaactgggcctaggaaacacccttgcctgaaaggggatgtggccaggcttaatgccaggaagatcacttagcacagccttgggcgactgtcgtgttttggaaagggggcctggagtttgagctagcagggaggagggtgacaaggtgaaatctagacagcctggagggctcattcctcatttggtgccgattcagggcattttgggacagtgacacaataattgtaggttgagtcaaggggaccagaggaagtgaagacaggatcaggaccttttcggaggcagaagatacctctggcccctggctgagcatgaggggcaggtggaggtgaagacaggaagggactcattgacttcagagcggacaggtgcaggacggcggctctgacgggcctccaggtg

SEQ ID NO: 35616 - DNA, 2111 bp, Artificial sequence
  DNA replication origin
tcggtcttttgaatgagcaccatgggattgtagctggcgggcacgcagcagggcgctggcaccgtgtcgggcttcaggcggtgcaggctcgtcttgatctgcgcgtgcatgtttgccgcccggaactggctcgggcacgcgccgatgcacatggtcacttgcacctcccgtggcgacagcacccaatcggcccagcccaggtcttccagcgacgcgcggaccgtgtgcagacggcagcaacgcccgggcccgagcggacagtggtccccgttgcgcgcacgcgctctgcggcgccccctggcggcttgcggccgcaagtgcaactccagctggggccgtgcggacgaagattctgccagcagttggtccgactgcgacggcggcggcgacagtcgcaggtgcagcgcgggcgcctggggtcttgcaaggctgagctgacgccgcagcggtcgtgtcacgtcccacgaccttgacgccgtcggggacagccggaacagagcccggtgaaggcgggaggcctcggggagcccctcgggaagggcggcccgagagatacgcaggtgcaggtggccgccggatcccagccgcactgtgggaagacagatagggaagctggtcacccacaggcctaccgttttccaggaacgagggtgcccatttcccctaacacgccaagctggatctcaccacggcggcggcgcctttgcacaagttatttcccctaccaagagcatttctccgtgcgggcgcggtggctcacgcctgtaatcccagcactttgggaggccgatgcaggtggatcacttgaggtcaggagttcaagaccagcctggccgatatgtggccaatatggtgaaacgcccgcttctactaaaaataccaaaaattagctgggcatggtggctggcgcctgtgatcccagctactcgggaggctgaggcagaagaatggcttgaatcggggcggtggaggttgcagtgagccaagatcgtgccactgcactccagcctgggcaacagaggaagactccctctcaaaaaaaaaaaaaaaaaaaaaaaaaagggcatttctccccttgaatctcctgaatctcagtatggctggctcctcctcttccttccagcctgcctaaaataggaagcaccctattttatttccttgtgtatcattcatattccctacttagaatcttagcttggttgacactgtgcctggcacacaataggtgcttagtaaatacttgaaggaattaatgtatatctgatattcaggcagcctgagattccaaccatggctctgcttttcttctggcagtcaaaaacttacttgcttcacttatttatttatttattatggtcttgctgttacccaggctggagtgcagtggggcactcatggctcagtgcagcctcaatctcctggattcaagtgctcctcccgcctcagcctcctgaataactgagactacaggcacacaccatcatgtctggctaattttttttaaacatttttggtagagatggattctcgctatactgcccaggctgcaatgttctggcctaaagcgatgctcccaccttggcctcctaaagtgctgggattacaggtgtaatcccgagaaatgaagagtgccaaacccatcacattccagactactgagcctctaggaatcacagcccctcaggctggtacaagtgttagggagactggggagactggggtttgagggtgccttaacctagttgctaggcttagcaagggtgagaggtttgccggagtcacacggcacagatgggtttagggcgggctaagagtgtgcccctctgcctgccccctcctgggtcccaccacagcccagacctcatccagtgccctgcacccctggagcctccatggagggcacagagatggggaaaatactctcctcctcccctaacaagtcgctcgttgcatgtgactttagcagtgccttgacaagcgatttcatcagattcagaaccagctccagctggctctgcccatcacaaacttctatccatgcaccacacccccattgtttctcttggatcctggccccagcccaggtcagggaccatgcccacaccgcacgc

SEQ ID NO: 35617 - DNA, 1600 bp, Artificial sequence
  DNA replication origin
ggtccttgtgtgtctttttacagctgtgtccggggcctggcataaagtgggcactcactgaatacgttaaggggaacctgcagtcattcaggttggcctgtgggtgatggcattcccagcagatacacctcactgctggaagtgggtactctgtccctcaagacacccatcgccattcctctcagagattcaggatgggcaggcagtttggtgtggagagggggctggactcagcacacctcaaaattccaacatcctaaacaggaagtatatataacctgggagatgtggtgtgcatgaaaatattcttcacaacttatttgtttctccctactctttatatgtgaaagaatgaggtgtcactaacatggaagtgccacaaacaggaggggtgatgggactaacccctcaggttggggacagtaccacaaaacaaggcacttggttgcagatagacttggctctgagctgcctgtgtttggaaaggtgactcccaagtggggagagcaacaggatggtgatagagacaaagacagagacagatcctctgcctcagaccccaaagagagaagttttgaggaatgaggaaagatggagggaagctgagacttaaaaaggtatggggtctcagctgtttccaaaacagaaacaccagcctgggcaacatggcgaaactcagcctctacaaaaaatacaaaagttagttgggcatgatggcatgcacttgtagtcccagctactcaggtggctgaggtgggaggatcgattgagcccgggtggttgaggctgcagtgagctgtgattgtgccactgcacttcggcctgggcaacagagtgagaccccgtctaaaaaaaataaaaagaaaaaagaaacagcaataaggagatagagaaatagagacagagagtcagggagtcaggaatggccaaggctgcccttagagcccacaggtgtcgtaagcaccttccaatggcttggcatctccgagaacaccttgccactcattccttgagcctttccacttaccccctcccaggtctcctagagaaactgaggtcagggagaggaggatcttctcaaggtcaccttcccttatcctggacaccacagggaacagttcagacagctttatttttatcaccagagttttaaataaatacacagttccatcagaccagcccccgagtccccaagaaggtcaccccaataaattaataataaataacagacttatataaatacagctgtttgggcaggaatcgggtgtctcaggaaccttgagcccattccacagggcaggacaactgaggtcgcgtcctccgcgcaggtgcacagtggaaggaccaggactgctcatatgcagtggcagtctttggctaacaagtcatcataggtctggagcgacaccccggtgtcggtcttttgaatgagcaccatgggattgtagctggcgggcacgcagcagggcgctggcaccgtgtcgggcttcaggcggtgcaggctcgtcttgatctgcgcgtgcatgtttgccgcccggaactggctcgggcacgcgccgatgcacatggtcacttgcacctcccgtggcgacagcaccca

SEQ ID NO: 35618 - DNA, 971 bp, Artificial sequence
  DNA replication origin
cagattcacttcctagtttgcagatgaccgtcttctcactgtgtcctcagtagacagcagagggagcaggggagctcttggggcctcttttataaggagcagagggatggaggagcccagccagcagtgagcctcatgcagctgcacgtcctccacgcccagttctgaggcctcttagaaaaaaaggaaataaagaaatgaggaagtgccagacccgaggctgcaggtggtgggggacaggcaggcctggggtctgggatagtgagttttggaggtgggtctgggggagccgggggccttggagtctgaggtctgtggggtcctgagatttggggactctgaggtctggggatccaggggtctgagagtcctggaatctaagggtcctgaggtctgggggtcctaaagtctgaggatccggaggtttgggggtcctgggatctaggggtcttgggatatgggggtttggtgggggggtataggggtctggggatccagatgtctgagagtcttggggtctgggggtccaggggtctggtggttctgaagtctggggatccagaggtctgggagtcttgggatctgggggtcctgcagtctgggggccctggagtttggtagtcctggggtctgggatgtagggaaaagaaaaagcgatcagactgttactgtgtctatgtagaaaaggaagacataaaaaacttcattttgacccataccctgaacaattgctttgccctgagatgctgttaatctgtaactttagccccaacctcgagctcacagaaatatgtgttgtatggaatcaaggtttaagggatctagggctgtgcaggatgtgctttgctaataaaatgtttgcaggcagtgtgcttggtaaaagtcatcgccattctccattctcgagtaaccaggggcacaatgcactgcagaaagccgcagggacctctgctctggaaagtcaggtactg

SEQ ID NO: 35619 - DNA, 1473 bp, Artificial sequence
  DNA replication origin
catgtattgagcgcctactgtgtgctgggctccggagacccagccgggacacgttgctacctcttggagctcagaatctgatgggggaggcggacagtcaaaagctggcgagtcagtcggttaatttcagggagtgccacgtgcgtgagagggaggggacccctggtgacaggacgggcgacggcggggtcggtcggtctcccgggggagggcggaggcggagggagggagggaaggagggagggaggctgaggcgccggcggcccagagagctgtgatgggggaggcgcggagggcgggagcgaggagcgcggttctcatggcaaccgggaaggatctccaaacacagcctgggcgctggcggaaaagtgcgagggcagcgggccctgggtcccacgcggcgtcggggagctgagccgcgcgcactcccaaccagggcgcacgccttgcgggggcagaacccgcagaaagggaccccccacccacgcgaaggacgggcagggcggggaggaaaaattattaataacggggagaggaggggtggatttgaaagacctggaagtggaatgttcagactgtagtcacagtaagggccaaggccctgaggtgggcacacggcgaaggcgctggaggcagagccaggaagcagccgtggccggggcagggtgaagaagagggggatgatggcagggaaggcagagagctagaccacgcccagaggggagggggtgagatttttttctaagagcattagggagcaatgggagggtgtggagccgcgaggagaggatgggatctacgtcacgattttaagaagctccatgggaggccgcacgtggtggcagcgtgtgcctgtagccccagcacttcggaggccgagacaggatgatggcttgaacccagcaggtgaaggctgcagttagctgtgatcgtgccactgcacttcagcctggacgacagaccaagactcttactaaaaactaaaaaaaccggccgggcgcggtggctcatgcctgtaatcccagcactttgggaggctgaggcgggcgaatcacctcaggtcaggagttcgagaccagcctaaacaacatggtgaaaccccctctctactcaaaacacaaaaattagctgggtgtagtggcgggcgtctgtaatcccagctactcaggaggctgaggcaggagaatcgcttgaacccgggaggcgaaggttgcagtgagccaagattgcgctccagcctgggcatagagtgagactccgtctcaaaataacaacaacaaaaactaaaaaaacctaagaagctccgttgccagtgagatcaaggtggcacagagggggcggggaggttgccccggggaaggggcccagggcaggtcctcggctgggtctctgcttcttggggtggacagtggtgagtcacccaccatggatgtcccctaaatacgggtcaggggctgtgcctggaggagccct

SEQ ID NO: 35620 - DNA, 1845 bp, Artificial sequence
  DNA replication origin
gccccgcactcacttctcgcgggcctggctgtcggagggcacggccgaacccttgccccccttggcgtacatgctgctccacgccgccgccgccggggcccacacctgtcaggcggcgccgcgggccgcgcttgccgtcgccatagctaccccgcgccccgggcctcaccgccccgagccccaggcgggcacggcaggcatcgtccgcgcgggggagctccagacggccgcggcggcggcggcagcggcggctccagctccggccccggccgcagggtggctttttttcctccctttcctccgcgcgggctgttccgggaaacgcgcgctcccctcctcccgccgcgcgcgcccccgcccgctgcctctacgccgcccgcgggcgcagctcttaaaggggcgatggcgggcgcgcgggtgggtcccgccgccggagcgcgcacgcgcagtgcccgccgcggggggtgggggcgcggctacacactcgcgggtcaggatcccggacggccacccagggacgcacagctgatcgcggctgcacacgcgcgcgtgcacacacacgttcactcacctcaaatggagccggccacccacattgttgtacacccagccacacacattcgcagcgacactcaacatagcgctccacacagcaaaagtgtaccccgctgctggaacgactgcggatagccccataaagcctcaggcagtgacattgggtgtctcaccccgcagagctacccacactcagcaagggtgggaaccaccgcacatacagcccgcccagcgacacacatacactgccacacacccagctcacagtggccgtcctggaacaactaaacacaggccaccgcacacaggcacccagcctcacgcaggcgcgcgcttatgcaaggccgtgccacagcttccaacagccgtggacagagcccacggagttaactcacagtcaccctggggcgcactatcgcggcctcctcagaaccacaccctacccagctccacagtcacagggcctgcggacactcagcgtcccgcccgaagtcacacaacacagacacaacccaggcacacagacacaaagctcctatagtacccaggctgtgggagccacctggcaccaccccgaagtaacacccggtgacaatactaggtgctgggtgactgctgtttgggcttctcagcctcggtgctgtgagctgtaaatggggcgcatcccacctttgtctgcgggagtcagggtgcaggcagtgggtgcccttttccccttttagggcccttcatccccccaccaggggtgttcagagagggtgggggcggatactgagtcagggacccccgcagggcagggatgcccgggtaccagtgggtcgtgtgtggatgggcagggtaggggaaggcggtgcggttgactctgggtctagatgtttctgtgtttgccacggctattcctcttttttcctaggcaagcccgcgtgtgtgcaaacacgcggctcccgtgtgagtgcacgtgtgcatccttgtgcgtggggggcgggcaaacacccaataaattatcgctgtctcggcgactgtccctggctgcgcggtggcagttgtgggtccgagtcgggccgagtcgctcagtgaggttgcgtgcacaagtgtgtgccgaatgtgcacgtgtgtgtctccgcgcgtgggtgggccgccagctccctaggacctgtgtgtggctctgtgctcacgtttcgtgtgtgtgtttgtgtgtgaatgtctggatgtctctcgctgccagctgaccccgcagatgcctccccgatagaggccgccccccagtacgtgagaaccccccgcccccac

SEQ ID NO: 35621 - DNA, 2438 bp, Artificial sequence
  DNA replication origin
ccgtctggagctcccccgcgcggacgatgcctgccgtgcccgcctggggctcggggcggtgaggcccggggcgcggggtagctatggcgacggcaagcgcggcccgcggcgccgcctgacaggtgtgggccccggcggcggcggcgtggagcagcatgtacgccaaggggggcaagggttcggccgtgccctccgacagccaggcccgcgagaagtgagtgcggggccgggggcggggctcggcgtccgcgctcttccgtgggctccggcgcgggcgggcaccgcgcggggcacgtgggcgcgggcggcggggagcgcgagcctgagcgcgctcgaggggtcgcgagattggcgggggcgcgcgacccccgaggggcacgagattggcggggggcgcgcgagaccctgaggggtcgccggagttgagggttggcgggcgacccgaggggcgctagacgggagtggacgggcgagaccggagcggctccaggggtcgcgagattggcgggggcgcgcgaaacccgagggcgcgagatttgagggggcgcgcgagatccccgagcgggtctcgggggtcgcgaggcctcctcgagacgtgggtgcgcgaggctgcggacgcatggggatcgaggtcagcgaagttttccgggacgaacaagagtgtcggctcggggaccccagtcgcctggggtagagctggagagcggctggaggggcgcgccgccacctgtctgccctggccccagcagctgtgtggggcccctggggaagccgcacggttcacagtccaggggcgggtggggacgacggagccgctctcttgataccactgaagagtgcatactgagggccccttttgttctgggcgtggctccaggccgtgggtaccaggcgctctgaagctggtaggggcaggttccaccgtgcggatggaggaagggtcgtggtggggctgaggtctctcggggtggggagtcagccgagtgtgctctccgggtggaaagcatttgaaaggtgcttggagcagtgaccgtcccgcaggaagggcacggggcagtttgcagtgttgttaaaagtgcccagaggccgggcgcggtggctcacgcctgtaatcccagcactttgggaggccgaggcggtcggatcacgaggccaagagatcgagacaatcctggccaacatggtgaaaccccgtctctactaaaaatacaaaaattagctgggcgtgggcgcctgtagtcccaactactcgggaggctgaggcaggagaatcccttgaacccgtggcgcagaggttgcagtgagccgagatcacgccactgcactccagcctggcgacagagccagattccatctcaaaaaaaaaaaacaaaaaacaaaaaaacagtgcccaggaggaggggagtcttgtcatagctgatgggggacttccaggatccttgaagttgagccacctggagtggcccgtggtgtggaactggccacccaagcagagaggaggctgggtcagcagggaggggtcccatgaggacctgccttgagggccaggccaggagtgaggacttgaatgtctgggtgctggagaggagccctggacgttggctgagtgtcccccatcctgcctcttctgcctaggctgacttgggatgccccacccctccacaaagatgcctgtcccctctgcccagcctctgggtcattttggagaagaggctcttctggctagaaggtggtaggcaaatgactgcactgtcaggcctcccttgcctgtgtgcagttaggaagatgagctccatttccaagcacccttaagcccaaagactttttgaaactggcctctggctcctgctcaggtcggaagcaggaggtgtctgccatggtcacccctggacccctggtctgtctcctgtgtgtctccaggcagctgctggctctggaggcatccacccacccagtgggaatcgggatcgttcactgattcagcatatctgccctgggtgtccctgggtgtggcagtcgggaaggcaggctccggtcgggatggcagggtcggtggccctgaagaagcccccaccccagcagggaggcaggtatccagttagcaggagaaagcaaagtggatgatagatagcgaagggtgaggggatgtcaggtggagggcacagcaagtgcaaaggccctgatatgggaccaggaaaaggagctggggctgggcccaggtggaggaagaggcagcctgcaagagtgccagatgggccccagtgggttgtgtgtgcagaagtgcgctctggctcccaggtggagtggggcttataggggtcaggaacagaggctgggaggccctggggatgtggacacagttgtctgaaagagagctggggaggccgggcgtggtggctcacgcctataatcatcctagcactttgggaggccaaggt

SEQ ID NO: 35622 - DNA, 2348 bp, Artificial sequence
  DNA replication origin
taacaacccacagttcttccctggagactgaatcctgtttaaaataaaaggaccaatgtggaagggaaatcagcaaaaccgaaaacttcctttggcctcccatcgctcccaggataaactcccaaatcctcagtatggacagaatagctgctgaccttcatcagtacttaccccatggttcgcctaatcctcccggcatcccaggagggggtccccgggccggtttgttcattcactggggtgactggggcccaggatgcccagctccattctaaggtcgttgcagtgagcagactccaagtccccgccccacgtcaagctacattccattgggggcccaagacagagactctcagatggaggagacggagcagggtgggggcttccatgtgacagtgaagccccgagaggtgacactggagtctctgggtggaagtgccccaggcagggaaacagtgcgcagaggccctggggtgacagggcagccagtgtgtgggtcggggcggggggcggcacaggagggtttgaacaaggaacatgggggtggggggagcagcacctggaggggactctgtcgtaatccaggtgggagacggtgggtggcctggcccaggtgtgcagtggaggtggggagaggggcccaagtcaggaaagagatttccttcggtgtttttttaaacgcagtgatgtttggggacagctgggtggatctcacacaggtgcacgcctgtgcgcacgccaccagaggctccttggacaggatgcatgtgtaaaggccaagctgacagtctctgagcagggagggggagaatggggaaggggtgggggctcagggtgtcgaggctgggcctctagatgtcaagtgaacagggaatcccaagtttggggaaggtcaggccatagcaccctctggacagcccctacttgaaggcatcatcaaaacaggacgggcggccacacagggagagcagaggagaagacagagctggtagccgggggcgggggctggaggcaggaggacagcaggagggggcggagagggcggggtgggctctagggggccacctcctgggttaggcacttatggggacagtcgaggaacaggagacaaggaaggcaggtagaacccttcgcagccccctccttcaggagtccccctgggccttttggacagccgtgccctgggtgtggggtacccagaatgcagcctcagcaggacctcccgctgcccccgccctcccggggccgctcaccagcgttcctgcaactctgtcttaccccactctggcctttcatgccccctgctctgacccctaagtggctggggtgggaactctcttccacacctggcaggtgggttggcactgggctccccaggctagtcggtctgcccctggaacctgctcaccctggccttgtgtgctccccttccactgatggacgcaggcctgtcagccactagccacagggaaaagctcagaagcctctagatgggccagggtgccacagaagtgagctagacaggtgggcctgcaggccgccgggccaggaaagtggaggaagagcaggtgtgggagactggaggggtggaggtcaggatctagcagggcctgggctgggggcagtctcttcaagagtgctgtgatgatgcaggggtgaccattgggcgctgtgtgtcctgccccatccctgcccctggggtggccttcacagctcatgtggtgcagtgtgagcctggcgcactccaccctggaccgcctcccctccctgatgtcacccccccacttgcctttccgtagcctcagcgccttccaagctgccacagagctcacctctcttgacaggtattgcctgtctctgtctctcccctcaagaacatggcctccaggacaggggccgggtgtgtgcactgcgcaaaaggcacttcatggatgctggaggaactaatgaagaagtgaatgaacgaaggaggggaggcaggatgagatttggggcaagggcagtgcccatgaggaccaggtgggggcaggaagtccccatgttctctaggggccggggcaggaacaggaggactggaaatctgaaagggacttgggggccctgatgggtggtgggtgctaggattggagcagcctggctgggagggagcagagcgtgagtcaaaggaaggttattttaggatggggcccgcagccagagagggcggcgcagctgagctggaggcggctgtggaagggcccccaggcctgcctgcttctcgcctctagggctcagcctcaggctggccctctggtaccctgtcttgaatctaagagtcccccaacccccagcagactctcgtggtccct

SEQ ID NO: 35623 - DNA, 2192 bp, Artificial sequence
  DNA replication origin
cagggagcggctcagttccagggaggtccagaagggctggtgccacaggactgggcgaccctttggatagggggtttgtcctctgctctctggtgtggcagctggactggagcggggtggacagtccggcctccccctgtgacctgcagagggccgtgctggagccacctggctgggcgagggtgactcaggtccaagcccttggggtgcacagtggttgggagggtgagtccaggggtccctggcaggctggggactcgcgcagagccctgtgggtgtttgggtagggcagcaccactgcagacatggcactgcaggccctacctcccctggccccccacctccattccccagacattgccccaggttcagcactgccctgactggggacagtctgcagaaagggttgaggccaccatggtggatgggcatctcttccccaaggaagagatggggtccagggactgcaggggatgtggggtggaggaccccttccctccttccttcctgggccggggaggctggggatgagtttggaggtgggccctgagcacactacatggcccagggtgcccagtggtcgtccccaccctgcacacacacaggaatgacactcctctatggaggagacctccccagcgctgaggcctctctggagtctcagtgttggcaggacatggccaggacttggtcctcgagggagcgtggaacacagccgaattcggcccggaattgggggtcacggatgcctgggaggggcctgcaggacatagatggataactatgagctgtccctgctgagcagctggtggggaggccacctttccacccgccctcctgagagatggaggggctttggggtgggcccttgccttggagagtctgagctccctgggccgcctcgcccccacaggttggcgctgtacgtttatgagtacctgctgcacatcggtgcccagaagtcagcccagaccttcctgtctgaggtaagccaccacctccaggctggccctccctcctcacccacactccgggggtccttcatttccactggggatccagggggtgggcccgcgttgcccctctgatggccctgggaactgagggctctgcagggtccaggccctgggctagcatccaggcatctggtccacatgcccagccgggacctgccacacatcctggggccctctgcccaccctgttacccttccctccccactccctccctgcccagatgttctctgggcaccctgctgggtggtggggcagggtcaggtagggccaccccctcaccaccttcctttccctgcagatccgatgggagaagaacatcacgctgggggagccccctgggttcctgcactcctggtggtggtacgggctgggctgctgtgggtgggctgtggaagggggttgagggaggcacgtggagcaaccatcttcccctttggcccacagcgtcttctgggacctgtactgcgcggcgcctgacagaagagaggcctgcgagcactccggcgaggccaaggccttccaggactatgtgagtcctggccccagggactcaggggctccagggcgggaggtgtgctgggcctgtggctggggaggtggggtggggggctgcacagccagaggagggctggggatggtggcagtttggggttgacaggcagagctgcagcctccactcaggctcttggccacttttggggggtccttccaccctccacttggtccagggtcactcacagagtaagggaaagctctttccactgcacacacttctgagggtccccacagccctcccacccccattggggcactggggggtgccatttccccgcatctcatgtgagcctgcgtggagatgggggaagctcactgccttccccctcctctgccgtgtgtgcattgggggtcactgctgctcctctgagcggggagcacaggtcggggtgcctgatgggccaggcactgggacactttctgaccttgccaggtatctggagctgcccactccctctctgctgtcattttccctctgggttggaaaaggtcagaggccggcctggagtggaggctgcctggctaacactaggggatggcagcctcctgttgtcatggggcagcagatggcagcccttcccttcatcctctgcgctggaccacctggccccctctgttggg

SEQ ID NO: 35624 - DNA, 772 bp, Artificial sequence
  DNA replication origin
cgctccaccgcaccccccccccgccccctgcgacccgcagcttcccaactctaggccctgagcagttaatcccgggcggcgcgccctccccggcggttggcccgggccagaccccctacgtcaatcatccctgaagaggagccggcccggcccgcgttgccatggcgatgggctgggcgctccggcgtttcctggagacgccaaggtcggcagggagccggggaggggcgaacagagccccccccgcccccctcccccgcctcggagggcgagagaggaaggggccgcctccgtgcaggctcggcgggcaaggcgcccccagttagagcgagagcaacggaggcgacggcccggcatgacgagtccccgcggggattcggtcaccccagggcttgggcggcctccgccctgggccctgcggtctacgctctgcgccggcgctgccatggtaaccgctgcgcgcctgggaagcgcgttcacgccgactctccagctccgccctcctggcccggcggggggcgcccagagaggatgctagacccagacggcagggatgggggcagagtcgcccaagtccacagctccagacacccccggggccccagatctagcgggactaggacaaggggaccacacacgagtagtgggacaccatgggggtgaacagcagtgacgccaggagggcttcagcctgcccagctctcatgcagagtgctggaggcatcttcagagacatgggcgccccacccctcgggccgcctctgccttgctg

SEQ ID NO: 35625 - DNA, 2357 bp, Artificial sequence
  DNA replication origin
agctggaattctgattgatggcgggataggggctggagcttccctactcaccctgggctcgtggggagggctccatggcgccagggaggaggggctgggagccagggaggcctgcgggaggctgcggagggggtgcggcggcactgagtgtggggtgctccctccccggcccagctcctgcccgccctcccctcatccctttctcacctgactcggcatccgcagggtgggccgggggccccctgggaagcgcggtgacatgaagggctggaagaggtgggcggggatcagcaccttcccccaccctctggtccccaaagctaccccattcctgctatgctggggcccccgacctggggagccccctcctccagaaccagccagcaaagcccggccagctggcaccagccaggacctcatggcttgagggtgggagggggcggcgctgggggaggggatgtgtgtgtgtgaggggcaggcaccacagctccttacctgaccgtgaggccccatcatgggggcgttggggttgtggggggacggctgggagccgggggggccctaggaggacagaaccaggtgggtgggggggagtgaggccctactgggtttggctgaggaggggaggggctccatggaggcagaggggtgggccagcctgtgggacagggaccttgtgggaaggcttgagggcaggactcaggcaccagtggtcaccaggaccactgtggctactgcatccccaagcaccctgtgcgcacacatgtgcaggccaagtgcacagacacccaccctccactgcactcgggccctccctcgctggcccctgaaaggcccacctgggcacacctgcggcacagaggaccctcccacccaactccagcctgccggcctcatgacctctgcccacgtgggaccccccccaccctcaaacgcatgttcagccagagttgggggccagtggactccagccggggccatacctggaagaagccagccgccatggagcctgcggccattgtgtcacctggggccatactccccataacggggctgggggcggctgcagcactctgtaagggtgcgggaaacccagagggccaggtcaggacacctggacacttcctacctggggtgtgccccccctctctgcaggtggccggccccatgggacagcgagctggcattggtcagtgagcacactggggttgtcggcctgaggatctgtgggtctgaagaccctgtaggacgcaggatccagtgtcgccctcgtttctcacagacctgctccccactccagacccatctcaactggccctgcatcgtcctggctggcagggcagctcagctgggtccccaactctactcaggaccccccaaataaacatacacacaaatataccggcagtttcaagagcctccctgaaggctccaccttagaacaagtgtagacccctgccccaccccaccctgcccttcgtccaggagggagggtgaaaagcaggattctggggtggggtccccatcccccagcctctctcagatggagaaggcgacaagacagggtgctggagagggggcttcctgtatctgccagaaattgtggtggcagcccagacctggccggggaccaagttctagacctgtctgctatggggcctacagggtctggcagggggaaggtggggagggggatgtgaggtgggaagggaggcccagtctatgagggcagaggaacacgtctggggacagggaggggagaacttctctcctggcccctgtctgtatggtccaggccaagccccaaaccccaaaaagaaggtgatgggctctctctggggtcggcccaagccagcacacagggacactcaggtgtttgtggcatgaactacagccacttgggctcagagaggttgagcactctgcctacagtcacacagcgtttcctgccctcagggactgctgcaaggggccccctgcctagaggagggctcctggagaaatcctccctccccctgtggggctgcgggttgaccccttcctgccccttctctgaggttagcctcaagcctcccgccagggtcctaaactgggggaggggctggaggcgggagccccctaagcccaccgtgacggcgagcactcccaaggcccaaaacaaatccttcgaaagccctcgtgccctactcctgtgccactttctcagttccaaacttccaggtcccctctgggctctggcccccaccccgccccctcccgcaaacacaatggcctggagcagctgccctcccaggcggcccctccggtccactccccgagggtggggagggggcacctttgagccctgtgtctgtcca

SEQ ID NO: 35626 - DNA, 2164 bp, Artificial sequence
  DNA replication origin
tggagttgggtgggagggtcctctgtgccgcaggtgtgcccaggtgggcctttcaggggccagcgagggagggcccgagtgcagtggagggtgggtgtctgtgcacttggcctgcacatgtgtgcgcacagggtgcttggggatgcagtagccacagtggtcctggtgaccactggtgcctgagtcctgccctcaagccttcccacaaggtccctgtcccacaggctggcccacccctctgcctccatggagcccctcccctcctcagccaaacccagtagggcctcactcccccccacccacctggttctgtcctcctagggcccccccggctcccagccgtccccccacaaccccaacgcccccatgatggggcctcacggtcaggtaaggagctgtggtgcctgcccctcacacacacacatcccctcccccagcgccgccccctcccaccctcaagccatgaggtcctggctggtgccagctggccgggctttgctggctggttctggaggagggggctccccaggtcgggggccccagcatagcaggaatggggtagctttggggaccagagggtgggggaaggtgctgatccccgcccacctcttccagcccttcatgtcaccgcgcttcccagggggcccccggcccaccctgcggatgccgagtcaggtgagaaagggatgaggggagggcgggcaggagctgggccggggagggagcaccccacactcagtgccgccgcaccccctccgcagcctcccgcaggcctccctggctcccagcccctcctccctggcgccatggagccctccccacgagcccagggtgagtagggaagctccagcccctatcccgccatcaatcagaattccagctctcagagcccagaccttgctgcctccccactgtccacactggggaatggtccaggtccaagtccccttccttctgccccaccccagggcatccgagcatgggcggcccaatgcagagggtgacgcctcctcgtggcatggccagcgtggggccccaggtaagagtggagccctggtgggtggggccttcgggctgtccccggtctacccctcacagcccctttgcctccgcagagctatggaggtggcatgcgacccccacccaactccctcgccggcccaggcctgcctgccatgaacatgtaagaccctgggggatcctaggagtgtgcagttcgcaggccaccaccagcttcatggctgggtcagctggggcaggtcctgaatcctcaggacagccttggatattgtttatttcatggccaccgttgaggggaaactgagacttgaagtagcaattagtctcctggggccagtgatgggttgggattggaacctggcagctcatggtggccacttttccagcaacatctgctgctctgtggtcggtctggggatacagtggagcagggtgtggggggtgtgtggtgagggctgtgatccacatggactagccccagagtctgtcatccgcggtctcttccaggggcccaggagttcgtggcccgtgggccagccccagtggaaactcggtgagcctatggctgggtgggcaggcttggggtggggtgggagggacactgggtgagccgcctggctgactgctcacagctgcccttgtccccagatcccctactcctcctcatcccccggcagctacaccgtaagtctgagcaaagctgggtcacccctgggcaggggttgtgggatggcagatgaggggccatttctcacggttcctgtctcttgtgtgcagggacccccaggaggaggtgggccccctggaacacccatcatgcctagccctggaggtatggcctagtaagaggtgggggtgtgctagggtgggtgtgtttgggggaaaccccgtcacacctggcacccttctggtctcccccagattccaccaactccagcgaaaacatgtacactatcatgaaccccatcgggcagggcgccggcagggctaatgtgagtgggggcttgcaggggtgcttctcgaggcggtgaccccacttggggaatgggtggcccgagtcccacgctgtccccatgcccgcagttcccgctcggccctggcccggagggccccatggccgccatgagcgcgatggagcctcacc

SEQ ID NO: 35627 - DNA, 2722 bp, Artificial sequence
  DNA replication origin
ccctcccccccaggcccaaccctccacctggcctcagtcccggggttcctggcgggctgtgcggggcgggggcgcgtcggcgggggcagcttgcgagggtcgttggcccctggaggccgaggggcatggcgccagcacgtctgagccggtgcccgtgtctgtccgtgtctgtaggctcgggcgacatggacgggttgccgaaggtaaggaggctgcgctcttgccgggggtgggatccggggggggtggcggggagggggcggggcggggagttgcgagccgacggcggccgcccccagagttcccccggcgccgtggccggcctgagcaacgccccgggcaccccgcgggacgacggcgagatggcggccgccgggaccttcctgcacccgttcccgagcgaaagcgtaagcgactgcgtcgactccccccccgcggcggcgtcgggccggaggggctggcgggcaggccccggcggggcggccggggggccagagcaagaccgtgaccgcggcgggccaggtgggggggcggccgcggcatcctttccctctcctcaacctctccccaccccccaccacctcccgctcctatttcaccgtcccgatcccatccgcccccaccccgggacccgcgccccagggcggccttcccatgcatcgcccctcccccgttccctcctgtccccaccccatgtctgcccaggacccagccctgccctgtcccccattgtccctgggggcgggtcccagcctcttccggagctgaactcggcccctgcgcgctgccccctcctctctccgcagtactcgccagggatgaccatgagcgtgtgatggggcggcagccccgggcctctctgcgggcctaggcttctgcccagcgcccctgctcagggcgaggggctgaggtcacacctcgggcacctggactcctggccaatcaaggcttgcccagctgggaggccccacacgaaagactcttaccattttattaaaaacgcaaggacctcagagacgttcttttctgtatggacccttcctgccatttgtattttgtcccagagagaaaggctctttggggggcccctctccccaggacgtcagggggtggggcccataaataaatggaagctggttttggtttttggtagcttgtctcagattccctctttggccttctgccaccacactctccaccctgtggtcttgttccgtccccgcccccatctagccccacctttgagaactgggggcagagcgaggctccaggttctgggctctccctgggagttggggtgatgaccatgggcagaggggatgggactgaagctgggcgctcaagagtcggggaagtagagggaggcagagtcaggtcacaggccccaagaaccccaggtggaaggagggctgagtggcagcgcctttatttgtgggggccttcaaggtagggtcgtggggggcagcggggaggaagagccgagaaactgtgtgaccggggcctcaggtggtgggcattgggggctcctcttgcagatgcccattggcatcaccggtgcagccattggtggcagcgggtaccggtcctttcttgttcaacatagggtaggtggcagccacgggtccaactcgcttgaggctgggccctgggcgctccattttgtgttccaggagcatgtggttctgtggcgggagccccacgcaggccctggagaggtcacacagcttagcagagccagacacccacagggagaaagggggggtatccctgccacctacagccccccaagccctgtgcatagcttagccaggggggtatctgggccccgggcgggaacctggaggctggggtgcacctgaggatgttctcgatgcagctgcgctggcggaaaagcgcattgaccaccgggctgccgggcggcactagtggcgccttgaagaggaagctgagcagggacagcacggggtggaaggtctgcggctcggggtccatgtcagtgcagaagctcacgcgctggcacagctcggtcagcagcgctaggtccagcatgatgggtgcggccagcagcgagtcctgcggggcgggtgggtcaggagatgggggcggtggccaagccctgcctcccatagcagcccctgaagccgcgccgcacctcacacgtgttgtgcagcaccagtgtgttggttccgcccagcatcagctccgaggtatactcatccagcgcgcgcttgctgtcacccacgtacggcacatacttgatgaccacctggagtgcagcaggagtttgcccgggtccctgccacccctcgccgggcaaccccgcgcccgcgcccgcgccccacgcacgcagtggtcaggctcttcgccgggcgtatagagcactgggttgctctgcaccatgtcgtccaccacgttgctcttggacacctccttagagcggaactgcaatggcgccgataggttctccccatcgttgttgcccaggtggttgtaactcacgatggacatggtctgtgggtacaagggaagccccagcagctgcaggccctgcggccccacaagccaggtgctcgcggcccaggcccccttcctgcactcggcagctccctaggcccacgcaccttgaggccggagccaatgaggaagtccacaagcacggacttgactttggtctggcctgacttgaagtcatctccgcccacaaaaacccggtgctgccacg

SEQ ID NO: 35628 - DNA, 1220 bp, Artificial sequence
  DNA replication origin
ggcctgtagtgggcgagggacctgcagggggcgaagctctgtggggcgggagggcttgcagggggcggggcctggctgcaggcggaccccgtggaagggtttcgcgaggtagcggggactcctcgggagtcttacaggggcggagcttaaggtgccggaggtctcaggggaggggcctgggggcagcggcttccgtcctggctgtgagcctggaactgaaaaatgcccgaaagtggggcggggcttgagagtctaggtggggcccaggccgggtcgcggccctttcaccactcccacccgtcacctcgccgtgtctgctgacccccaggaggccaactactacggctcgctgactcaggcgggcaccgtgagcctgggcctggacgccgagggccaggaggtgttcgtacccttcagcgcggtgctgcccatggtggcgcccaacgacctcgtgttcgatggtgggcggagccctgggccggggtggggcgggatgggagatggggtctggaggggcccaggatccgggcagggccgagtgtgagggtccccccaggctgggacatctcgtcgctgaacctggccgaggcgatgcggcgcgcgaaggtgctggactgggggctgcaggagcaactgtggccgcacatggaggccctgcggccccggccttctgtttacatccccgaattcatcgcggccaaccagagcgcgcgcgcggacaacctcatcccaggctcgcgtgcgcagcaggtgctgtcccatcccgcatcccttgcttcctgccacctgttcttcgccacttggttccctctttttgccccaccccgcgaatccaggcctcacttgacacccggggaactgagtagcccaggcctctgtgagtccgagagtatgtacaaccaacttccctacaccctctccatcctccccacaccctcaccatccaacccacagctggagcagatccgcagggacatccgagacttccggtctagcgcggggctggacaaagtcatagtgctgtggacggcgaacacggagcgcttctgtgaggtgattccaggcctcaacgacacagccgagaacctgctgcgcaccattgaggtgggcgaacgcccgggtggagcgggtcaggcagggccagtcacagacacagctctgtgctgactgcccgccttgcccacagctcggtctggaggtgtcgccctccacgctcttcg

SEQ ID NO: 35629 - DNA, 825 bp, Artificial sequence
  DNA replication origin
tacgagtaccggacgacgcgcgtcagccgcgagggtggcgttctcaaggtggaccagggggctgaggaaggaggcgtgctggggagagcggggcggctcggggagaagggcacgggacccgggattcactgcgcggcctgtcttcaggtgcaccccacgtccacgcgcttcaccttccggaccgcccggcaggtgccccggctcggggtcatgcttgtcggctggggcgggaacaacggctccacactcaccgccgcggtgctggccaatcgactgcgtttgtcctggcccacgcgcagcggccgcaaggtgggggcgggaggggcgtggtgggtagggaggcttggtgggagtccttgcgggcgggggcgggagcctgcagggggcggggctctgcgggaccaggggggctgtagggggtggggttccgcggggcgaggggctgcaggggcgagggacctgcccgggtctggaggcctgtagtgggcgagggacctgcagggggcgaagctctgtggggcgggagggcttgcagggggcggggcctggctgcaggcggaccccgtggaagggtttcgcgaggtagcggggactcctcgggagtcttacaggggcggagcttaaggtgccggaggtctcaggggaggggcctgggggcagcggcttccgtcctggctgtgagcctggaactgaaaaatgcccgaaagtggggcggggcttgagagtctaggtggggcccaggccgggtcgcggccctttcaccactcccacccgtcacctcgccgtgtctgctgacccccaggaggccaactactacggctcgct

SEQ ID NO: 35630 - DNA, 2071 bp, Artificial sequence
  DNA replication origin
cttcctcagccccctggtccaccttgagaacgccaccctcgcggctgacgcgcgtcgtccggtactcgtattgcgcctcgatggcctcggggccgtagaccacgtccgggctctcgacgaagaactgggcggcggcctccatcgcggcgggctgggggcccggggtgagcagggggtcagcggggactctaagcggccggggccaagccagcctgggtccccacggaggccgtccctgccccgaaccgcactcaccggcgcagagtcgactcaggcagcggcggcggacagcgcgggctctcgggcgcgcgacctccggagaaaagcgctgcggcccctcccccgccccgcccccttccccgcctctcccgcgctgggagggaggggcccaacgtctggagacccggttcgaggcccgacaacccagagccaccgtggccatcgggtccccgcctggcggaagtggccaggcgtccacgagcgcggcgcgtataggttcacctcgctcgctccgcagcccccaggggctcatggctgcctatcccccctttacaagaggacaatgaggctacacatgagcccagccacaagccagggggtggagctgggcagggaagctgggcctccgggggggtaggtagggggtctgggtcagagacactgcaggggaaacaggcagaggaccagaactccaaagccagaatctcctcggagccacactgccacctactcccccttcgtgggcagcagcacctaccaggcagtcccatcccctggctccccatgtccgcccccatccatctcgggggacaaagtcactctgtccccacggggctcacaaggatggggcctgtttggcctgtttccccacctgcagcaggagggcttggcaggagtgggccggagcgggaggctgttcgctggaaaggggaggggacgcacaggcgggcagggccgaggcaggggaggaatgaggcctgcactgcagggcgcccccctcatgcgcgctgataagggagcgtgggaacccagcgggcaggccggggcagctcccccaggaactttccaaaacaagcgcctggaggccggaaagtttccaccactggagctggcccaaaaggtggatagttgggaacgtttgcaagagacagggcctgaccttggaggatgagggcttaagactctgggtccaggcctcaccctgaaggggccccagtctgagggagttggaagtggactgggacacccccgccccagtgggtgggaactcacaggcagggcccctgcaagacaggctccccagatgagggggctgctggcaagggttttgagacatgaagaggagttcactgaaagaaaactacaggccaagccacctgagccacccagacagggcagatgaaaaattggctacgtgggaggcagtttggggtcttgggcagaccctgagggctggggatagggagtgtgaaagagtatttggtgtttgttcctggttcttggttagacattgagctcaatcaccagtggccaacgatttaatcaatcacatatatgcaaatgagacagttggggctcagaacacagaaactcccctcagcctcaagttatggggccttggcctgccccgcgctttgagcagggcatcggaaagctcagaatcgagtctctccgaccttctcctgccctcctgcctctagcccctttctcccctggaaaccatagaaaccagaattcctcttccccaaggcaggtcagagacactggagcccttctccccttaaaacaaaaaaaaagccacaaagccggcaaaggtcactctctgcctgctcccttgaagaccctcattccgggagggtcctgcccataccctggaggaaggaatgctacccagagtctaggaagtctgggcaggctggcccccctcccccacccagtctgctccctttaagatctacagtgtttcaacacattgatacacattcttcatagaacctaagccgaaaaataggcagtcagccaggcacggtggctcatgcctgtaatcctagcactttgggaggtcaaagcg

SEQ ID NO: 35631 - DNA, 1509 bp, Artificial sequence
  DNA replication origin
gcaggcagccctgcagacaccggtgaggtgggatgatttcaggaggtcccagcccgggactgcccgcccctctgccctgggaaccagtccaaggggctgtcagttgaatttgcctttttgttgttgttgttgtttttgttgtttatttgttctccttttaaggaattatgaagctaagaaaagttttgtgttttgggggttggtggacaaagttctagctgattaaatatggtctaacttattgatactatttttttttcttttaatgttgtactgtggagaaaaactattttgagccatggggttggtgtttacaagaactttccacttttgccaaaatgttacaattgaaaggcatctatctgcgtcttcagtttcctgatattttcttaaaagatctagtgtcctttttgtacactaaacaggtgaatgctgacttttttcattctccaataaatttcactgaactgaacctggcagcccaggctgcctggctggtgtgtgtggtgtgtgggtgttggtgtatctgtgtgtgtggtgtatggtgtgtatgtgtgtgtggtgtgtgttggggtgtgtgggtgtgtagtatatctgtgtcggtgtgtgttggatgttgtgtgtgggtgtgtagtgtgtgtgatgtgttagggtgtgtgtgttgtatgtgtgggtgtgttgtgtgtggtgtgtgttggggtgtggggtgtgtggtgtgtgttggggatgtgtgtggtgaggatgtggtgtttgttgggatgtggtatgtgttgggatgtgggtgtgtgttggggtgtggtgtgtggatgtggtgtatctgggtgtgtggtatgagggtgtggtgtgtgttggggtgtgtggtgtggggtgtgtgtggtgtgttggggatgtgttgagggtgggtgtgtgttggggtgtgtgggtgtggtgtgtgttggggtgtgttggtgtgggtgtggtgtgtgttggtgtgtgttgaccggatgtgtggtgtgtgttggggtgtgagggtgtggtgtgtgttgggtggtgtgtggtgtgtgttggggtgtgtaggtgtgtgtgtggtgtgagggtgtggtgtgtgttgggggtgtgtgtgttgggtgtgtggtgtgtgttggggtgtgggtgtgtgtgtagtgtgtgggtgtgtcacagcctggtttctgtggtggctgtccctgtcctgtggttgggggtgggctggcatcaggaggtgatgtgacctggggccgccataatgatgagaaagggttgttcaggggctctggctgggaccagataagaaggcagagtttgcagcctacctgagccgttgcctgagaaaggaccaaatcagagggccctgtaggtgacggggagcgcgggggtgggggcaggctgggtcagggcggagggatagggagccatagcaggtgtgtgagcacagcagtaccctctggtgtggatagggtgggctgaacccagcattgggattccttggccccctgtggcaccaaaggctac

SEQ ID NO: 35632 - DNA, 1009 bp, Artificial sequence
  DNA replication origin
gaagacttagctgggggtggtggggcaactttggcctcagactcaaaggctcttcccccacaccttggaagtagcgggcagggaggctgccccgggcccaccctcctccctccagctcccatggctcacttggagcccaccccaacacaagagacactcacctttttgatttttcgatattcctgcaaaatctgccctcgagtagtctagaagaaaaacaaaattttgagaaaacagaatgtgtccccgcctacaggaaacccaaattgagtggtcccaggtgctctgagaagggggcatgggagggtggggcagcctcaaggacaaggccaagtaacaccccaggggcccacagcggctgtagctccggagtgggtggggcatgagggaaaggctgccgggtcccctggaggcaatagcaggtggggcactgctgttgtgggggcgtggcaggacaaggaagtatccatgtcgtgggggggtggggagggggtgggggggtgcagcaaagagggagggaaggggaaggagagatgccccaagaacccgtggctcgcagcccctagaaccccatcatgagtcgtcgtctttggaaggcaaaggggccttggccaggagagaccccggcatctgattaatcagggcccagccctgtagtcaggtcaccagttccgaaaggtggcaggtggggcggctacgtccaaggctaggctaagggtggagactctctgtatacacagggcagctgaatgagctgtgagctcaagccaggggaccacaggagtcctgattcccaggaccacagggacctgtcacctccccctgctatagttgtggcagcatggatgggccccagggtgctggacagagctcagctgcggagtctcctgagggtttggcacaggtaccaagagccctgtgtcctaggctgtgagaggaccccaggcgctcaaacatgtggggatccatgtaccccggctcgcccccatccaaggaggtgggtcacagc

SEQ ID NO: 35633 - DNA, 3807 bp, Artificial sequence
  DNA replication origin
ccgcagaaggggctaacatgcagagaggaatggggcccaggccccagctctgactgcagggaagccccaggagccagggccatgctgaggtctgctggggttcagggaagacagtgggggcccaggcaagccagccctattcagggagaggcagcacaggtgcagatgggcagatcctggtgggagagggatagcacctggacctctgtaggcaccgtgcgactgttgtggactgtaggtttctgctgtggggacagggcctggcaggctgggattggggagccaggagacctgggcggctccgagaccacagcccaggcacctaaactgagcagcagtagcacccgcctagcaccgtggccatgagcctgcgcagctgttcatttataggaaccagcagaagcagtggccagcgtgcagcggctgttccaccaccatgtgcgacaggggctgcagtggtcccatgtggcgatggcggccagttgcagatggccacttcgctctcggcgccagctggcccagggcagcccaggtggtgtcacctgctgtgcttttgggttgtgtctctggggaggaggctgagtcaggggattcctgggatgagggtgggagcccttctttcattatagctttgcgttgctcagagggccatgccccgtcccctgctgtggctggagagcaggtcctcacaactgtggctgggtcttactggataggaaggaagactttcggggttgggtcagccctgcctcgtgctgggcttcccacctcccgtgggactgcatgtgggggccgacggggagaaggtggccttactccctgggcagcctctctgaccagggccatgctcagggcaggactcctgattcccaggacacacccacaccccacagccagacctgggccacgatcaaatggcaggatctgccatttgagacccttggcccggctccagggtccacagaccactctgggctgtgtcccttccttggatgcccagtgcctaggtgccaagacaggcctggggactcaaggtggtttcctgtctggcctggtgcgtgttggcccctaggcagttcatccccggcccaggggctgtcatctctaccacaggtgagaaaatgcaaagcaggggtagatgtcccaagcaccaagaaaaggacagtggaggcaccagaagctgagcctggtgctggtggtccatgttaccagagtcctgaaggtggtacttgtgcagggcatgtcttagctgtcctgtgcccgtgcccaggacaagcaagtagagagacgtgggctgtgaaggggagagatggggagaggagctgctgtgggggtgttctccggggccccgaagcagggaccagcttggccggccccacacagccagagcttgagtaggagtcgggggccgctgaggtttgccaagggctggactttgaaggtcccactggtaccaggttgagctgaccctgagccttgatttccccgtttgtcatcctagctggtgaagatcttggggcatgtcaaatgaggtaatgttgaccagcctgacacatggcagttatctgttgtagaatacccacggagtccactgcgtggcgggagcatgggcttggccttcgcagctgcgccttgcctctcacttccttctggcccggaccagggtcagacccattcaatacatgcccattgagttgcgtccctgggaaggccacagcctcttaaagacaacccaggtgggggtggtggtgatatggaagacagtgtctggcccaaagtggggagtgttagaaactttgtggggagtgagcttcgtccacttttgggaatttggcagcagagaagctgctgtggtcagcccaggtgtgttacactgagagagagggctcagcaaactggagatcgcagactcctgctctctcaggggatagtgcagagggcccctgaaaatgtgcactagggccaggcacagtggttccgcctataatcccagcatgttgagaggccaagtcaagaggatcacttaagtccaggagttcaagaccagcctaggcgatataggcaagcctcctcatctctactaaaaagtaaaaaaaaaaaaaaaaaattcgccaggtgtggtggttcatgcctttaatcccaacgctttgaaaggccagttcaggaggattgcttgaggtcaggagtttcagaccagcctgggcaacacagtgagaccccatctctacaaaaaaattttgtaattagctgggcatggtggcatatgcctgtagtctcacctacttgggaggctgaggcaagaggatcacttgagcccaggagttcaaggttgtagtgagccatgatcgcaccattgcaactccagcctgggtggcagagcaagaccctgtctctaaaaaaaaaaaaaaagtgtattgaggatacatctgaaattgataaaatcatttctgtatcggaaagaaagccactgcaagaaggtctagaaaacgcactaaattgtagttgtggtcttaggcgacgcgcacttcagtcttcctgcccctcccctccctgatttccagaccctcaggggtgttgtcttatgtggccggggcaccccaccacatggctcaggagcaggacagctgcctggggtgccatctagccatcagctgtgctgctttgggcaggcccctgaaggggcgaagggctgagcgtcatcatggacactttgctcatggatggccgattggggtggcccatgggctcctctggctggccctgtcctggagctgccttgtggagcgtgcaattcagtgtctagtggaaaggacgggatgatctgggtggggcacagaccaagggcgtggaactttgtcagcagcaagagatgcaggccctgctggccatcttgtctttgtcctgtctggccagagactgggatgccccagagactcaggtcaagccaggggtcatttgttttcagcttagtgacctttgacatgcagtcagtggaggcagcaagggcctggcctgggggaagctctgaccggttgtgcaggctttggccctgcagttccctgacctgtccgctgtttgccaagaatgtgactgtggtgatgcctgggtgctctgtgtcctgcagggctttgccctggacacgcaggtgcacgctgagctctgctcaccacctggagggcacgcccaggtccagcagcccacagttgccaggtgcgaggggctcagcccttgcacctgccacacagtcatcccctctgctatccctctatgtccctccagcagcaaagtgtacagttttcatgcatgtccccatcctggcgtgcttcctgccgaccggtgccatgggcgcagactcaggaggtatgtgtttgctctcgtaggtttaaacggaacctgcagcgtttccagtgttcccacgtccacgtcggagacgcctgactacttgctgtgagtgtttgtctgggccctgcaggccaggcctcccttttctgggttcagaccccctcccccagcactgcaggttatcagaggtagaagccactgcaagtctgagtatgtgaattccaaacatagcagcctcttctgggccaggccccctcataatccagggaatcacccgagaggccaggccgccggtggagccaggatggccacttcctgggtggggctgggtccttccagcctccactcagtggcccctctctcctgtttcaggaagtacgcagccatctcctcttcggagcagcgccagagctacaagaacgacttcaatgccgagtacagcgagtaccgcgacctgcacgcccg

SEQ ID NO: 35634 - DNA, 1364 bp, Artificial sequence
  DNA replication origin
cacctgggacctgacttggtgctcgggcgcccccatgtggccagcgtgggccttgcaggcggcgttgggttttctagccaggccaggggattgcctgttgctgctcagccactctgtgctcccctctaaaatgatctctgctcctctccagaagcggctgcagcctcctgatttcatcgaccccctagccaacaagaaaccccggatatcgcacttcactcagagagctcagcctgccgtcaacgggaagctgggcgtgcccaatggccgtgaggccttgctgcccaccccgggcccaccagccagcacggacaccctcagctccagcactcacctgcccccgcggctggagcccccgagggcccacgaccccctggccgatgtcagcaatgacctgggccacagcggccgagactgtgagcacggagaggcggctgccccagcccccactgtgcgcctcggcctgcccctgctgacggactgtgcccagcccagcaggccacacggcagcccctcgcgcagcaagcccaagaagaagtccaagaagcacaaagacaaggagagggcggctgaggacaagccccgggcccagcttccagactgtgcacctgccacccatgccacccccggagccccagcagacaccccaggtaggtgcccaggcaggagggcgttgccggggctctaagtactggccccacacccgcctcaccctcatggggtgtcgagggggctcaagctgtagaagccaggggaggggaccctgttgccccaggccccatcagatttgccctgtgtgcctggcacctggcaccctatgttcctgcacctggtcctctccctgcctgtctggagtgcccggtgccacttgcagtcaatgtgccaggccagcactgggggccggaggcccagagccttgtggggaactgaggccgcagaaggggctaacatgcagagaggaatggggcccaggccccagctctgactgcagggaagccccaggagccagggccatgctgaggtctgctggggttcagggaagacagtgggggcccaggcaagccagccctattcagggagaggcagcacaggtgcagatgggcagatcctggtgggagagggatagcacctggacctctgtaggcaccgtgcgactgttgtggactgtaggtttctgctgtggggacagggcctggcaggctgggattggggagccaggagacctgggcggctccgagaccacagcccaggcacctaaactgagcagcagtagcacccgcctagcaccgtggccatgagcctgcgcagctgttcatttataggaaccagcagaagcagtggccagcgtgcagcggctgttccac

SEQ ID NO: 35635 - DNA, 1208 bp, Artificial sequence
  DNA replication origin
aggaccaggtgcaggaacatagggtgccaggtgccaggcacacagggcaaatctgatggggcctggggcaacagggtcccctcccctggcttctacagcttgagccccctcgacaccccatgagggtgaggcgggtgtggggccagtacttagagccccggcaacgccctcctgcctgggcacctacctggggtgtctgctggggctccgggggtggcatgggtggcaggtgcacagtctggaagctgggcccggggcttgtcctcagccgccctctccttgtctttgtgcttcttggacttcttcttgggcttgctgcgcgaggggctgccgtgtggcctgctgggctgggcacagtccgtcagcaggggcaggccgaggcgcacagtgggggctggggcagccgcctctccgtgctcacagtctcggccgctgtggcccaggtcattgctgacatcggccagggggtcgtgggccctcgggggctccagccgcgggggcaggtgagtgctggagctgagggtgtccgtgctggctggtgggcccggggtgggcagcaaggcctcacggccattgggcacgcccagcttcccgttgacggcaggctgagctctctgagtgaagtgcgatatccggggtttcttgttggctagggggtcgatgaaatcaggaggctgcagccgcttctggagaggagcagagatcattttagaggggagcacagagtggctgagcagcaacaggcaatcccctggcctggctagaaaacccaacgccgcctgcaaggcccacgctggccacatgggggcgcccgagcaccaagtcaggtcccaggtgccgctcagggtggcctcagctggggcccatcagcctgctgggatcgatgcagggggagggcagggcccagtgtgtgagcgggccacccctggggactggtctaaagcgctgctgtgctcagcatgcttccccagtgataactgtgacacaggagcaggaagcccagggttgagcccacatcagggagccgccccccgtcccaggttccgcactgtgacactggggtgctgcggccacactggcaggaatctgcccccaaccccaacccgacagcttcccccttggtccctgggcggagggaggcggctcaacttggagcagctcatgctccaaagagctggtgaggaaggtgacaagggttactgatgcag

SEQ ID NO: 35636 - DNA, 2515 bp, Artificial sequence
  DNA replication origin
ttaaagtgagcagctcagtaacattttgtacgttcataatattgtgcagccaccacctctgtctagttccagaaaattttcatttccccaaaaggaaaccctatccccatcaggagtcattctccccattccctcccatgctcccagcccctggtaactactaatctgctttctgtctctattgatttgcctgttgtggacatttcagatcaatggaattatacgctgtgtggctgacatgtaatctgtggaaacttgtagctgtgaggaatgttgaatcaggaccgggcgtggtggctcatgcctataatgtcagcactttgggaggcttaggtgggaggattgcttgagcccaagcctgggctcaagttctagacaagcctgggcaacatagtgagaccctcatctctacaaaaaatgaaaaaattagccaggcatggtgttgtgctcttgtgatcccagctaccctagaggctgaggtgggaggatcacttgagcacaggagatccaggctgcagtgagctgtgactgggattagaggcgtgagccactgcgcccaacctattttctgttttttttattccagtcatccctgggtgtgtgtgaagtggtatctcgttgtttgttttttgtttggtgggtttgtttgttcattattgctccttgcagggcagggctaacccataggcagtgtgcccagagtagccagtgtctcgttgttttgatttgcatttccctgatgacacatggcattgagcatcttgttatgtgcttttagccatttgtatagcttctttgaagaaacgtctattcagagcttttgtttttccaaggacacgaaaactggcattttttatttatttattttatgtttttgagacggagtctcggtcttgttgcccagactggagtgcaatggcatgatctctgctcactgcaacctccgcctcccgggttcaagtgattctcctgcttcagcctcccaagtaattgaggttacaggtgcccaccaccatgcccggctaatttttttgtacgtttaggagagacggggtttcaccatgttggccagactggtcccgaactcctgaccttaggtgatccgcctgccttggcctcccaaagtgctgggattacaggcgtgagccatgggcgcccggcctgttgatttattttttaacgttttcatctccctgtggagtctcttttcaaatgtattttcgtgttcctctgttttgaggtctgacgtttgttgcctggaagctgcagtgcagccgttggggacactgcacagcttggggcctctgaatcccgatgtgccctagtcctgggccctgtttcttcttctcctgaggccacacatctggccatcctgttgtccagctgtggcccaggtaacttcccaactgcctggaggagtggcccgagcctctttgctgcctgacagccctgggctcactgtcctgcagccccaccagcagtgatgaggatctggagtagagctgtgggggatggccctgcagcagtctgttgtcccctgaggtcgtggtgcctcttgctctgggccctggattctctggatcctgcagcagtcaccactcatgcttctgctatgctttccggtgtcttcactcctccttttgtctctgccttgcctgtccagtggatgcaaatgcctgttctcagttttctgtctttaactgggagttctgtttatgtccacatggctctcctctcaggccaccagggaagtgacacctgcagtggtctgtagcctagcccatttgttagggagatgggctctgggtgtcactggctggcagaatggccacggccctggacttaagtctctctgcagggcctggaggggcgctaggctgccctgagatggcacagcccccgggaattgaacagttgggtcagagaggatacccataagctgcagggttgctggcgggggtgggggattccacttgcccagatcacatggagcgggagaaggggcatgcactggggtgtttcttcccttcttccccagctgcatcacctagtcaagctggtggccactctgccgccctccagatcctgctgtgacctgggcttccaggaaggctgtctcatcctaggccagggccctccgttctcttctgcattttggacagtttctgcagtgagcgttctgaacaggatgaacagctgtctttaaaagcagggtccagcaccctagcgtgtgtccctggtctctccggtagcaggcacctacacaaagtgatcctcctctgggctcagggggacagtgagtggggaagtcctcctttgggtgaagtcgggggcaggatggcctcaggcccaggctcctgtgaccccttggccctgctctggatttgggaggaggggggtcccttccttgaggcatctccaccgggcccccatgtggatacaggcctggggcccctaggccccctcagcaccttctgacctagccctgcctctccttcgcaggaagctgtgccag

SEQ ID NO: 35637 - DNA, 1277 bp, Artificial sequence
  DNA replication origin
gttgctgggcaggctcaggcaggggggccctgtcagtgctgactgggtgtacagctgccccaggccacaggcagtggcctggtctcactgccagctctctgctgagtggcatctcccctgaagccagggtgacagaatgagtcctgccaacctgggtggagctggggttttcctgggacagggctgcacgtgagggtgcccagcccttagtcactgtggggcaggagccactggcaacttgggcctcaggccaggaccacagggggcagtgggggttaaagagatgacagaggagggcgggagagccacccaggccaggctcaggttcccacagccactctttttggtttccctggacgtgtggtccccagcttccctggctggctcattctgggtcaccatgtcacctgtgcacctggccaccacagagcctctcacaaacttgagcttccctcatcccagcagcgtgtttccagtttcttgtatgaacgagaataaaagtcacatctgggaagggaggtgcaggcagggcagggtggcacctgtgtgtgttgggtgaaaaaacacctcagtggcgtcgaagcaggacagatctggatggccagggtcacccacatggctctggctgaggcttcagggcgtgtgtggttgtttgtgtgtgggaggttgtgtttctgtgtgtatggattgtgtttgtgtgtgtgtgtgtgtatggattgtttgtgtgtgtgggggttgtgtttgtgtgggttgtggttgtgtgtgtggttatgtgtgagttgtgtttgtgtggctgtgtgggggtttatgtctgggttgtgtttgtgtggttgtgtgtaggggtttgtgtgtggaggggtttggtgtggaggggtttgtgtgtggctgtgtgtgtgggggttgtgcatgtgtgggttgtgtgtgtgggttgtgtttgtgtgtgggggaggttgtgtgtggtgctgtcggggtggttgtatgtgtggcgctatgtgttgggtattgtgtgtgtatggttgtgtgtggggagattgtgtatggaggggttgtgtttgtgtgtgggggggattgtgtggttgtggggggttgtgtgtagggagatcgtgtgtggaggggttgtgtttgtgtgtgtggggggattgtgtggttgtggggggttgtgtgtggggagattgtgtgtggaggggttgtgtttgtgtgtgtgtggggattgtgtggttgtgggggattgtgtgtggggagattgtgtgtggaggggttgtgtttgtgtgtgtgtg

SEQ ID NO: 35638 - DNA, 1479 bp, Artificial sequence
  DNA replication origin
gcggcgctgaaggaggataggagctacgggctgtcgtgcgggcgggttagcgacggcagcaaggtgtcggtgttccacgtgaagctcaccgacagtgccctgagggccttcgagagctaccgcgccagacaggtgagtggcatggcgcccggcgcgccagtggggaacgtccggacgcgggccggcctcgcgctcccctcactgaggcgtccgggctcggagacgctaggtctgtggtgctgctcgcgggtccctgggccggcggggcgcggagtgggcgccagtccggcctggagcgctgagaaccgcgttccttctcagcactaggaggcaatacaggcgggtggcccggggctgctgaggggcccagactcgcgcgccgggcccggggggcgtcggtgtcggcacctggcggcgtccggggcctttctggcctgctgggcacctgggcagggtccagtttgcgcacctggcggcggggcgaggaggcggtgggccgcacggtcccggcaccgtgatagggggaagctgggggcttttccatctggggccggggcagcgccgttggtgggggtgactgtgtctgtcctcctgggaagcagcgatcgtctgggtgcccggcagggggtggtcagcgaggcacttgtgggggtctgttctgtctgggtggaaggctttgcagctgggggctggctttgacgcgttccgatgaagccactcaggttgggccactttggttcttgggacggggagtttgggcagaaactgacagcttgtcccagctttctgctccccttacccccaggtgaccctctctctccggagagaggttccttggagagtggaagtgttgggggcggctgtgatgttatcctcagggcacatgtaggggatccctgccacccaggaggaagctctggctaccacatctggccgctgactctggaacttctcagaggccgatttgggcccatctgggggaagtttgaggcgtttcggttctgccacctggctggtggtggggaggggaggctgctgtgtatgttctcttgggcctgactttggggcgcatctggggccgtggtcagaaacctgcctttttcatttctgtttgtgtcatggccccccctccccccgtctgtgctgggtcagaagttgcagatgaccagtggtcaggtcccgaggggaagtggtttaggaaccttgtaactccttttctggaaattgggggcttcattgccctaaagggagtgggggtgggtctagtctcgggctcagagagccctgctccctgcgtgtgtgtgtgtttgtgtatactgttgatggtgggggtgggggggtgccgcgggcgggggaggagggagactaactaggaaggaatgtggctttcttcctgccccgaacttgttcagctccattagctaagccgagaatttcttccccctgtttcgtttccaccactctcccggtgcccacccc

SEQ ID NO: 35639 - DNA, 1086 bp, Artificial sequence
  DNA replication origin
taccttgtgctctgcgccatcaattggctccctaggagggatggggtcagcagccctgactttgctaagcccagaaaggggcagatgggacccctgtgtcccaacagtcccaccacccaaacagcctagggtcccagtaaggcagagcgccagtgatgacaggttggccgctgcgtgttctcagcttcccctgccttctgcagacgatccacgcagagctctcaaagctggtgaagaagcatgcggcgcagcggagcacggagaccgccttgtaccggaaaatgctgggcaaccccagccggctgcctgctaagtgccctggcaagggtgcctgggtgagctggggcacagaatgggcaggggctgtgtgcagggcacgcctagcagagggattttattttgcatacatggatgtcctcggagactgggccgtcctgggcgatgcaggggacgtggagagagcccagccctgtgtgatcatgagtggagtcgaaggtggaactcaagctggagggctgggggtggactgtggagcctcttccagggcacgaggggcggtgtcctggaggaggggccatttgatttgggttttgctgcatgagtaggagtttgccaggaagtgggaaatacatagtcaggcaatgatttgttgggaggtctgtttgggctgtgctggcagctgaggccccagaggccagtcttgacctccctccacccttctctcccctcctttttatccacagtccatcccatggaagtggctgtttggggcgactgctgttgccttggggggtgtggcactctctgtggtcatcgctgccaggaactgaccacctaggtggctgccaccccctctgcacaccatggaccctgccctgcgctccccaactcccccaggctccctgtccactgccctccctggtctggccccctcctccgggttaggggagcaaggattgggggtcgtgcagcccagccagcaggagggactgaggccctctaggaggaaagcccagagggagggggccctcattccttcagacccagttttcccccaccctccttaccccgctgggctaggtctcc

SEQ ID NO: 35640 - DNA, 1667 bp, Artificial sequence
  DNA replication origin
gccgtgccggccgggccgctgccctggcctaggctggtccgggggctagcgcgccgggggctgcggccgatgggcggggcgaggggccgcgggggtggcgagccgggggggcacgggggtcgggggtgcccgagggggcgcggccgggcgggggtggccagggatgggggtcactgggggcaaaggggatccagtgggggggtcccgatggaggcgtgcagggccaggggcgcccgaggcgtgcgggggtcgggtgccccagactggtggcgtcagacaggcgtgggtcgttgggggcctgggtcgcggcttgactgagggcccggccggggctgtggggcgtcaggagagcgtggggtgttatgggatcggaaaggggggggcgtctggggacactggagtgtttacggcgagacggagcggctgtggggggagctggcccgtgctgggggcggtggtggttggggtggggggtgggaggggaggccgaattgtgcgggcgcggggaattatgggggtgggggctgggagggtctctcaaagtggggctccgagcccgggaggagcaggcaggtgagggttagggaggggatgcggcgggctggtttgatggctgtgccacactcttctgagcttggggcctgggggacggaggggttggttattggttcaggaggtctggggcaaggaagaggctgtagaatgtggtgggacctcgaccactcctggaaaggaggctgctttgagggggtgggaccgaggcctgatgagaggaggatggtctcctggggaaggatttgggccagggtccctgatgttggggttgtgggggatagtgttagattcagagtgtggaaggaaaaaacgcttggggtttctgggtgattacagttggtgcttttggggagggtctcccctttggagaagaggctggaggtgggaggccctggtaaaagattcaatttcccccagtggccttagaggctctaaaaatggcttccctaaggcctcggaggctgtcctctccacaaaaatcccagcacccttcgctcagcttataatcaggcaaagccacagggcctgaagccccaggttcaaatcctcctttggcctttggctttctctgtgaccttgggcaaatgcctttgcccctctggcctgtttcctgttctgcaaaatgttgaggggaatcttccctacttcctggagtatttgtaaacattaaataataattagctctaataatggctaacactatttgagcctgatgccaagggcttgatgcatgggttaatttctcccaacaagctggggttgttgttacacccactgtatagatgaggaaactgaggcctggagcccttgagttacacagaaagtgatcggcagtgtggggaatcagtacagtggagactttgaggggctgtgtaggattctgacccacatctctgccccccacttccagggccaattcctgtccccccagcagcatggcatcgtgtgctgaaccctctgagccctctgccccactgcccgccggggtcccaccgctcgaggacttcgaggtactggatggggttgaggatgcagagggtgaggaggaagaggaggaggaagaggaggaagaggatgacctgagtgagctgccaccgctggaggacatggga

SEQ ID NO: 35641 - DNA, 1329 bp, Artificial sequence
  DNA replication origin
gtgacccccatccctggccacccccgcccggccgcgccccctcgggcacccccgacccccgtgcccccccggctcgccacccccgcggcccctcgccccgcccatcggccgcagcccccggcgcgctagcccccggaccagcctaggccagggcagcggcccggccggcacggcgcccccagcaccccaggacacttgcctctggctccgggacccccacttggggtcctgcgcccccctccccgcccccagccgcggccgccgcgcctcgggaaccaggttcggccgcttggccccgcccctgccgtgcccattggccgccgctgccgcgactgccgcacccgttggctcatgcagacgtccgtcccgggcgttggcacctcccccttcctgcttggccccgcggggcgttcttaaagggaccgaagcctcccggctgctggggctggggcgggggctggggcgggggctggggcgggggctggggcgggggcgggggaccctgggctggaccccaacacgggtcagtatcgcgcagcctgtgcgactcctgcctctcctctgagcttcatcctgaccatctgcgaaatggggataaacacccccatctatgcactctcaccttgggggctgctgggggcacagtccactctaaatgttatttccttaaagagttcaagcttgacgggcagggcagctctggggttgctgaatgacccatcctgaagccttagttacagaagtgaacctgagggcctgaggaggagtgacgtgcccaaaggcatacagaaacctccctcccatcccccacacagtttaatgtctagaaggttgcctggtgcatactggaggcgctcgattactgctgcgcaggcgactgagccagcagggccactgggaggagttcctcctctatgcactgtctgctggagggtgataaggtccccatggctcgggaagaaggtggcatccttgattagctaagtttttgtggatcttgttttgaaaccgggacacttctccctccttcactcagttttatttccttcctagcagttactccttccagaattatcttgtcattattttgcttgtggttggagggaccatccctcactctgcttcatcctggcagagatttttacctgatttgtacccagcacctccttgaaccatgcctggcatctatagaagctcaataaatgggtaggtggatggatggatggatggatggatggatggatggatggatgagtcagacaccagcttttggaggtagctatcatggaggtggtaactggctttttggagatcacttctaaggttgga

SEQ ID NO: 35642 - DNA, 983 bp, Artificial sequence
  DNA replication origin
cactgtagcatttacgaccttggggagggttaccactctgggacctcagtcacactatctacaaaatgggacacttctctcagccttccttcttccgggccgctttcaagcctgggcttctggaaatacgcaggcgcgagatgaattgtttgattggctattcattgtgatgcacccacgagctgaagctccgtctaagccccgccctttcctgtcgtgacttaacgcacgcaagcggctccagggtacgtccccgccacgcgcgctcgcaggatcggtgcgtggtgacgtttcgccggcgcgggcgccatcccggaagcgcgagcaaggccgccagatgtgcaggtgccgccgctaccgacgccggggccgagtttggggtggggctggggactccagggccgcggggaaccggtccgggtcgggcgcggcccccgggctgcggtggggtggggtgcgccactggccacatctggtcattcctgctgcgcacaggcctcagtttccccgtctgctcaatggatacgcaggcggcgctacgggctggatctggatccggatcaggggcataggaattggggcctcctgtgttctgggtgtgtcgtgtaacctggagctgggcgttgcccggtttgtgcctcagtttccctgtattgtaggggacggggcgtgaggggatatttgagcccctccccacttggggtttttcagagcttggatggctgagttaaattctgttaaataacctggatatagaaccgtggtgcttctctgcctctccctgtgagtttcggcaacggagcccgcccctgtgagcctcagtttcactcggagatgattgtgtctgcctcgtaacggtgattgaggatgaaatgaagtgctctacaagtgtttgcccgtaatatattcttagaggcccctgggatgctctcaaaatgttgattcccgggacttcttcacactcctcttggagaaacagcctg

SEQ ID NO: 35643 - DNA, 1433 bp, Artificial sequence
  DNA replication origin
ctccgtctcaaaaaaaaaaaaaaagtaacatagtgctagacacataatgaaaaggcaggaatggctgggcacagtggctcatgcctgtaatcccagcagttagggaggctgacgcaggcagatcacctgaggtcagaagtttgagaccagcctggccaacatgatgaaatcccgtctctactaaaaatacaaaaaaatcagctgagcatggtggcacgtgcctgtaatcccagctacttgggaggctgagggaggacaatcatgtgaatccggaaggtggaggttgcagtgagccaggatggcaccactgcactccaccctgggcgacagagtgagattctgtctcaaaaaaaaaaaaaaaatttatcagagaagaggccacatgtaagaagcagcctcgcagggggagcccccagccagtgcctaggctcagagcacccagagtctaactagttgggggttggtgcctaccttggggctggaggccggctggtgggcgactgtcagggccgtggctgctgggccgagcacctagagagagtgaagatgtgaggtgatgaacagtgtgggggttctcactcccgtctccccttgccctcagctggcagcaggggcttgtggccagcaccaggcccagcctacctgctcagcaggttaagccctgtgtgccttctctcccctgcaggacgctgaaagggaaactggccaggcagcacccagaggccttcagccgtaagtgtcacgcagggttcctgctcccgagcacgtcagcactctccacccagggcaggcttctggaaggccaccttggggcctgatactgagaccaggctgtaatgggcagtgggtctggggaaacctggggtgggggcagggtcagggtgctggcctggtcctgtcagcagctggcagagtgggcactaggacgggagtccgtgccccgtggggaggccgcacaggagaatgtggataagcagcatgacaatccttatccctgtgtgcattatgagccatctcagaacagagcacgggctcatgtgacaccagccccgacatcgtctcgccttccctgagccccagcttcgaggatctgtcccatgtccagctgttacccacagtcacccatggggtggggactgtgagtatcaccgtttcatggagagggaaacagaggcccagaggggcaggacttgagttcgcatctgtctggctagagagctcgcgtgttctctggggtaccattccatgttgccaccaccttaaagggctctgcaggctgagcctgggttcacaccatctgttgaaaaggccgacagctctccatcccagggcctccaacagcagtttacagagcagggagctgggctgaggggaggtcatatacctagcccaggtagtgcagtgagccaggttcgccctcagggctcctgtag

SEQ ID NO: 35644 - DNA, 999 bp, Artificial sequence
  DNA replication origin
ggctggggtgaactcagaggagaccgtgcttgtgcacctcaaggaggtcctgaccggtggtgggggacatctggctctggtgtctgggaaccttctaagcattcttcagagcagacgtcaggctcagctctggaaaaattcccctgtgcccagccccacgactccagctggaatgggcgtgccctggcatggcagaggggtcttgcagaatagagatgttctgaggaaggaaggagccagaattaaagacccccccaggaattccacacccctcgggagagagccttgtccccctaggagccctgggtgacagaacggggcagcaaaggagccctggatgacagaacaaggcagggttacccgctgccaccttgtatgctgctgccctgagaccccctcaaggcaccgggcagcagggctattcgcccgtcatctcctcgtcatctgtctggctgcggccgttgatggctggggagccaggctggacatgggacaggtcctcgaagccggggctcagggagggcgagacggtgtcggggctggtgtcacatgagcccgtgctctgttctgaggtggcaatggtggtcgtggtgctgggtgggatggggtcttcatcctcttcctccaggaaggatgcctctgggatatctgggggaaggaggcccaagagttggttttgtcaccttgccaagctctgtgatgtaggacttattgtccatgtgacccctaacggctgccctcaccccatgggggtatgacttgacccttttttttttttttttttgagacggagtttcgctctttgcccaggctagagtgcaatggtataatctcggctcactgcaacctccgtctcccgggttcaagcgattcttctgccttaacctcctgagtagctgagactacagatgcccatcatcacgcccatctaattttgtatttttactagagacggggtttctctatgttggtcaggctggtatcgaactcccgacctca

SEQ ID NO: 35645 - DNA, 1410 bp, Artificial sequence
  DNA replication origin
gcggacgcaaacacggggagaggtgcaatcgtctcaagtgactcggcgggcggggcccacaaccggaagcgggtgggcgaccttcacccacgtgcgctgcggcttcgttcgccagcatccaagatggcggcagggcggggcccaaggcgcggcgcgaattgtgacgcaggcgtccggcgtgctccgtgcgcaagcgctttcggcggcgattaggtggtttccggttccgctatcttctttttcttcagcgaggcggccgagctggttggtggcggcggtcgtgcgggttcgcgccgggccgagagcgggttgggggctgcgggaggctgcaggggcctgggcggcagaagaggcggccctgagctggctcatgcgggccagtctcggcagggtggctgggcagggctcgcgaggccacggctcggagcccagaccggggcccaggaggcgagcgccgttttggagaggagcctgcctgctctgcctgccagcgtgaccccacgaggcctcgggcgggaagaggtcctcggggcagatccgagttaatgagagaggggtattgagcgtgtagcgttaactctgccagtcactgcgtcagtcgctttggaaatactaaatttctcgagctgagtcttcatacctggctccattactacgtctgtaaggaggagctggtggtagtgtctgctttttagacttttctttagactatttgtatttttttcagatggagtcttgctctgtcgcctaagctggagttcagtggtgcggtctcggctcactgcaatctccacctcccgggctcgagcgattcttctgcctcagcctcccgagtagctgggattataggcgcctgccaccacgcccagttgatttttgtagttttagtagagacggagtttcaccatgttagccaggctcatcttgaactcttgacctcaaatgatccgtctgcctcggccttccaaagtgctgggattacaggcatgagcccctgcgcccggtcgattctttgtctttttaagtcaacttttatatgtgaacaatgcttggcaggtggttggtagatactaagtgatgttcgtggtttggggtcaaggcaagaagtggggtctggagagttttggtgtaattgagaaggaagctaagagtgttgggtgctccagcttggagttagagaggagagaggctgcgacaggaaggcatgtgtgttgtaggggatggcttcccatccaggctggcagcaggagcagcctgtgcagatcaggacctggctgccgtggaagagggtgggaccgccttcagggaagatggatctagcaagatgatgccaaagggtacttattccatcaggagatactgacgagtccttccgccgctaaacctaaggagaataaccacagtctgtgt

SEQ ID NO: 35646 - DNA, 1500 bp, Artificial sequence
  DNA replication origin
caaggacccagctcctcctccaggcacgcccgccgagaacacgcccacgcccggagcgggcgggggaccgaaccctgagcccctccgcgcccccactcactcctccagtcggcggaagccctgcgcgcgctcagcctgcagctggtggatgcgctgcaccagcgtccggatcggggcgtctttctgcgggacagggggcacggctggggcatgaagcccgcgcccctgggtctgcgccgcccgccccgcgcccgttcccgcttgggcctgggctcacccagggccacgccggctcctcgcgtccccgagcttcggtggcctcctcagcagcaggcactgcagggaccgtaggctccgccgcggtctcggtgatcatgactgcgcagccctggccaggctccggagcaggcccttccgctgcgcccgacgccccctacaggccgggaggtccacggaccccctaccctgcggccggccagccagaaggaagaaaggggaaccaagaccgcgggccgcccagtcaagcccacccttcttgttcccgtccagggcccgcctccgatcgtgtttttccttgattgtgcggctctgaatacagaacagctgttagccttgagttcgttcctatgcttgtatctcaacaccgacttccacttgaagcgggtactgagcgtgggttttgacgttcaagagtgttaagtaagcctgggcaacctagggaggcccgatctctacagaaaaaccaattagcccgacatggtggctcccgcctccagtcccagctactcgggaggctgaggtgggaggattacatgagcccgggagttgggggctgccatgagctatgaccatgccactgcactccagccggagccacagtgagtctgcctcaaaaaaagtgcagtggctggaactccaccaacattaacagagattcactggctcttcagagaatcacaggggtgaagacaagattcagtgacagggacggtgtcaacagcccaccgagttgaattgggtgtcttgtgtaatagccctgagcctggagcatagcaggggccagaacgacctcaaagtacagaggaggccttggagcttcctgctggagggatacatgggctagacagagctttggaaagcttcctcctccaggggcccagccggaggagcaggaagatgctggtagcctgacttagtgaagagggaccagctcaggtatggggtgacagacaccagcctttaagggggaagggactaggctgttagtgagttgggagtttttcttgccgatgggttcgtggtctcgctaactttgaagaatgaagctgtggaccttcgcggtgtgtgttacagatcaaaaagagtccacggaccaggagagtgagcagcagggcagtttattgaacaaagcgaaaggaaagcttccacatgctggaaggggacccggaagggttgccgttgctggctccggtggctagggctcatatccctatgttaccc

SEQ ID NO: 35647 - DNA, 832 bp, Artificial sequence
  DNA replication origin
cgcacaatcaaggaaaaacacgatcggaggcgggccctggacgggaacaagaagggtgggcttgactgggcggcccgcggtcttggttcccctttcttccttctggctggccggccgcagggtagggggtccgtggacctcccggcctgtagggggcgtcgggcgcagcggaagggcctgctccggagcctggccagggctgcgcagtcatgatcaccgagaccgcggcggagcctacggtccctgcagtgcctgctgctgaggaggccaccgaagctcggggacgcgaggagccggcgtggccctgggtgagcccaggcccaagcgggaacgggcgcggggcgggcggcgcagacccaggggcgcgggcttcatgccccagccgtgccccctgtcccgcagaaagacgccccgatccggacgctggtgcagcgcatccaccagctgcaggctgagcgcgcgcagggcttccgccgactggaggagtgagtgggggcgcggaggggctcagggttcggtcccccgcccgctccgggcgtgggcgtgttctcggcgggcgtgcctggaggaggagctgggtccttgtgtggctgcagagtcagatggggcggggatttcggggcaccgggtcctcaccttcacgaaaaaggccccacagcacgtccccactacccgacgactcactcttcgtggcttctctctcctccccaagagcaggggtgggcctgtctcgcgttcccctgcgggagtcaggaagcgtccttcctacctaccagtcctcccctctggtgtctggggacacttcctgggggcctttcaggtggttggcgcc

SEQ ID NO: 35648 - DNA, 1008 bp, Artificial sequence
  DNA replication origin
attcagtttagaggctctctcagaaaggagacagcaggcaggccagaggcagtgctgagcgcgatgtgggcgtggcctgggaacaacagtgacgtcttagccaggcattggccgtaggggtgggttaggttgcgcctcatggtcccagggacggggacccaggataaaagtaggccaaaaagcctggacgcggtggctcacgcctgaaatcccagcacttcgggaagcagaagagggcggatcgcttgagaccaggagttcgagaccagccttgcccatatggcacaaccccgtctctactaaaaaaaatacaaaatacaaaaattatgcctgtaatcccagctactcaggaggctgaggcaggagaatcgcttgaatctgggaggcggaggttgccgttagccgagatcgcgccattgcactctagcctgggtgagagagcaagagagcaagagcctgtcttaaaaaaaaaaaaaaaaaaaaaaaacaccagaaagaaaaaggccaaagagacgctgagacgggtcgctcatggggggcgtggcctaggaattccagtcacacacggttgcagggccgagcaggcggatcgcaagagagaaataggcaaagaactaaagctgtgatggaggaataatacggaggaggcgtggcctgggacccccctcgcctgtatctacgggaggttgagggtgggaccctagacgcggaacaaccagagtgggtggagcattgttggggcgggatctgggcatcttggaatagcatttaggcggagctgggagaaagcgggagtgctctgggaataaggacaaaacttgggaaaaaaattggggatgaacagcagagggcaaggtccgagaatccccaagtgaagccttaatagaggattggggtgggacaggaaggggtgaggtctgtgtatgggatactgggaccaccccccaaccaggggtgcgtcatgagaggagccggccagggtcctagagacacggcggggaaggggtg

SEQ ID NO: 35649 - DNA, 2217 bp, Artificial sequence
  DNA replication origin
atttatagttcccatccgctcttgtagggtaattaaaaccatggaggcgatcagcgaggttctccaggaccttaggtttgatgcggaatctgccgagtgatggcggctccccagggatgcgccgagggagatgggaaacggggcggatggcgcccagcccagccctaactgccagctggctggggttgcgccccactgcgctgctgaccttcctgcagttccagacacctcccacaataaagagctcctcctctgtagccgctctgccatctctgtgtacaagggtgctgcagccagtgtgcctagggagggggcccccacagggccagggattgtgggtagaagactcccaccctccctagaaactgaggtttttttgcttgagacagggtcttgctgtgtcacccagactggagtgcagtggcgagatcgtggctcactgcagccttgacttccccaggctcaagcagtcctcctgcctcagcctcccaagtagctgggactacaggcacatgccaccacaagcccagttaattttttttttttttgagatagagttttgctctttttgcccaggctggagtacaatggtacgatctcggctcactgcaatctgcacctcctgggttcaagtgattcgcctgcctcagcctcctgagtagttgggatcacaggcatgcaccaccacgcccagctaattttgtatttttagtagagacggggtttctccatgttggtcaggctggtcttgaactcctgacctcatgtggtccacccatgtcaacctcccaaagtggcgggattacaggcgtgagccatggcgcctggccaattttttgcttttagtagagatgaggtctccctttgttgcccaggctggtccccaactcctggccttgagcagtgctcccagcttggcctcctaaagttctgggattacaggcatgagcctttgcagccagccagctcaggtattttgaatcacattctccaaggagttcagaatcagaccttgcaaatactggatagacagtctgaagtcctgggaggtgaaaattctaatctcaaagggtcattaagacgcctcacattcccctcaaatctcacagcccccaccccaggccaggcaggccccaaactcaccttcacaatcacagcacctaaatagctcatttatttaaaaggactcttttggaggggccctaggtaatggggagtaatgactccccttctcacccccagccctggcaggggttctaggcaactcaaccaaccctcacacacacacacacacccactggggtgcacccaaaggtggcctcacgtgggagtcagagctgttatggccgttggagctcaggggccaccccagctcctgctgagggtggctcaggtgccctgaagtgagggtacagaggtggccccagtttgggttcggcctctgcgtctccacgtggcagggagggtggcctgagcccctacagcttatctggcaggacctgcaggcagaggggaagccaagctaagcagggagtccaggagagggccgcaccacagagccactgaaggaggcttcattcgtgtcctgtccccaccgcttctggctgtgtgactttgggcagggtcctgcccctctccgggccttggcgaggctatctgagctgcaggtaaagcacttggcgcggagccagtatgcagtaggcgcccatgcgtgctaactagggtgagtatgttcattcatttcggaggagattccacttcggacattttcagggcattgaatgttcttaggctaaaggagacaatgccagttatacagtaagtgctaagtaaatgctgatgaataacaaaggaagaggacggattccatctcagcgactctaaggctggggttgggaggcgtgggggtgtgaacaagacctgcagccaccggaaggggccctccccttgctccctcccgcccacccattcaggcccaccttacctctcgccgtgccccgtctgcccgagggcaggatcccctcgtcctgtgcttggaaggaaggcagaggtgtcgtgggggctgcagacctgcgtccacagcctgctgtcttccccctcccctgttttctgggcccccccagctccctgtccccacccccacgcccgagggtccctccttcctacctggttgcgggtcttgtgcgacttctgcatccaggctcgccactggtcgta

SEQ ID NO: 35650 - DNA, 957 bp, Artificial sequence
  DNA replication origin
gtcgtgggggctgcagacctgcgtccacagcctgctgtcttccccctcccctgttttctgggcccccccagctccctgtccccacccccacgcccgagggtccctccttcctacctggttgcgggtcttgtgcgacttctgcatccaggctcgccactggtcgtagaggcggaagctgaggttggagcagtacgcgtgcttcttgagccagcccaggaactgcttgagctcgcgccgcaccggccccgagctcggctctccgccccgcggttcgcacgccccgccgcccgggcccgggcgctctggtggtgggcggagcggcagtgtcagagcgcgcccggcagggggtgcgcgcgggcaggagaggggagaccccggcgcggcgggaccatgctcccctcggggaacctccctccccgtttctcaaggaccgagtcctccccgcggccctgcacagcagcccagctgcgcccctggcccggctgcgcccctggggaggtgggggggagggggaaggaaggggctcctcctccacatctcctccaggaacccgattcctgtggcctgagccaggtgcgagtggagtggggggaggggagaatgagagaggccagagccggggggatgagacatagagatagacagacagagcagggggccgaaaaagagaaagggagaaagacgcacggatgagagagccggggccagggatggagagatggagacgcagggtgggtgaaagccaagggtgtcagcccaggaggaaagggcctgatcagggtaggacagaaaccctggggacatagggacaaagagatcgagacagagacacagaggaagagtgacagatgaagggagaccgagtgcaagatgaccccatgggactgtccccagcatgggcccatgggacagggagtgggccaggagggccaggtgggaggcctgcctgtcggtcca

SEQ ID NO: 35651 - DNA, 2566 bp, Artificial sequence
  DNA replication origin
tggagacgcagggtgggtgaaagccaagggtgtcagcccaggaggaaagggcctgatcagggtaggacagaaaccctggggacatagggacaaagagatcgagacagagacacagaggaagagtgacagatgaagggagaccgagtgcaagatgaccccatgggactgtccccagcatgggcccatgggacagggagtgggccaggagggccaggtgggaggcctgcctgtcggtccagctgccggctgcagccagcccccagcaggccggcggataaggacatcggcctcacgtcataaataaagccggggacccgctgacaggccctggcacggccccggcccccgccgcccctgctggccttccccggcctccccagcctcccctgcggacgcagcggcctgctggctcctgtgcaagaatcgcaggtgccgggcacgagcaggggccaaggctcaggcccctcccggctgcgcttgctcccgcccacccctgaacctggaggggcccaggataggggctggggagctggctggagcctgactctacccctccctagctctgggaccctctctgggcctcagtttccctatcatctcacgagccagagtgagcttggtcttcccggtgaactaagtttagacctgtgtgacctcctagagcctcagtgtcctcacctgagaaaaagcggcctcccttgcagtgaaaccctggggggatgggacaataagtacctccatgccaactgcctgcaaacacttaggtggcacccaccatgtgggcacttgccacaaattatgtcatccaaccctcataacagcccaaggcaagtgggattctcgaccccaccttccagatggggaaacggaggccagacattccaagtaacagctttcgtttcatttcacaaaagagagactagaggcctgtggacccggagaaatcccagacagcaagaggaagcagacctaggcacctaatcattcccatccccctgccttgatcagaaggagaaattgaggcccatcaaagtgggagttggcagcccattggccttagaagcaggggtctcaaactcactggccccctcttaggagggagtctgagtggccaaaacagaccagatggggatgggcaaatggagagtgagggtcctgagaaggggagaccactgctggtgggggctgtaggccatgctgttacattttctagataatttatttttctagggaatctaggatatttgtgtaaaaacttcctgggtttaaaatttctactagttggtcaaactttttttttgttttccaaacaacaggccaaagaaaatagatccaagggccacattcagctctgggggggccaccagtttgagacttctactctcttggagacaatcaggaaacaggctgggcatggtgtctcacacctgtaatcccagcactttgggaggccgaaatgggcagatcacccgaggtcaggagttcgagaccagcctggccaacatggtgaaatcctgtctctactaaaaaatacaaaaattagctgtgcatgttggcgcgtgcctgtagtcccagctacttgggaggctcaggtaggagaatcgcttgaaaccgggaggcagaggttgcagtgagtgcagatcacaccactatgcgacagaatgaggccgtgtctcaaaagaaaaaaaaaagaaaagaaaacaaggaaacagaggctctagctggtttcggactggccgctggatcacccagccctaggagggtgctcaccactgcggggagtggaggcggctgtggggtggctccactcactccagatcccggctttcttggagccatagatgccaaaggggttgcagcgcacttgcacgaagtacacggtgccgggtttcaggccggccaggcggcaggaggtctggttgctcacatcgtccaccacctggacagtgaggacaaggtcagagtagagggcggggcctagcaggagcgggggcggggcctggaaggaacaggggcggagtcagggaaggggagggtcaccttccagtccacactgtcctccactcggtagcggatctggtatttggcttgaaagaggaaatccttgagggcgggtggcgacacccagcgcacgctcagctggtcctccaggcccccgacgcggctcacgtgcacgtcgggcggggggtccgtggtcactgcggggcagaggagggaccctctcagcctgggactgtctgggtttaactccccccagcagtgtggcccagggcacttggcctagatggaacctgcctctgttttcctcctcttccctctgcccccacccccaggactggtggattacacgatatataatattggagaaacactcagcacctaattaatgttagctgttatcaccattattatctgtgacgggagaaacataatcctatcttcaactgactatgggaaagcagccattgcggggttgatgatattattattatcatgcttaggaggccaggggctgtcaggccgtcagccttctgggaacctccctgccaccccctccccactcaca

SEQ ID NO: 35652 - DNA, 878 bp, Artificial sequence
  DNA replication origin
tggccaggacaacacatgtgaggagtaccacacagtggggccccactcctgccacatccccaaggacctggctctctttacgccctatgagatctgggtggaggccaccaaccgcctgggctctgcccgctccgatgtactcacgctggatatcctggatgtgggtgagcccccagtgtctgctaggcccctccctcggcaccagccccacccaccgagcatcccgaggggtcccctgcaccttctcatttttcctagggtcccacctgcccctccccagcccggcaactcccgggttgtccctgctggtcagagggaaggtaggtaagtagctgagcatccgctcatcagtccgcagcccccagaaacagccaggatacccccactccacagagaacacctggcctggccaccaccccctcggcagcccaggtgtgcaggagggggccctggggagaggggagggggcgcccaggtcgggaggcgccccaggaagccgaggcctggagctggggggcgcagggcgggaggcaggaaatggatgatctgtgagcagaattgagcctaatctaattagggtgtttctcagccccaagcaggcctgtgccttaaccctttaggcccctcaccaaggcctcagggggagaggccagctcaccctgctgccctcaggggcccccagaaggatcctcagaaccccccaacacacacatacgcctgggttgtagcccccatccctgcccccgcagcctgcctcactcttccccacatcctaacgctacagtgggaaagttctaagcctcagttgcttctctgcacccagcaaaatgtcacatcaaagatttcagtaagagtggaagggagggccgggcgcggtg

SEQ ID NO: 35653 - DNA, 1876 bp, Artificial sequence
  DNA replication origin
cctcggcctcccaaagtgctgggattacaggtgtgagccaccgcgcccggccctcccttccactcttactgaaatctttgatgtgacattttgctgggtgcagagaagcaactgaggcttagaactttcccactgtagcgttaggatgtggggaagagtgaggcaggctgcgggggcagggatgggggctacaacccaggcgtatgtgtgtgttggggggttctgaggatccttctgggggcccctgagggcagcagggtgagctggcctctccccctgaggccttggtgaggggcctaaagggttaaggcacaggcctgcttggggctgagaaacaccctaattagattaggctcaattctgctcacagatcatccatttcctgcctcccgccctgcgccccccagctccaggcctcggcttcctggggcgcctcccgacctgggcgccccctcccctctccccagggccccctcctgcacacctgggctgccgagggggtggtggccaggccaggtgttctctgtggagtgggggtatcctggctgtttctgggggctgcggactgatgagcggatgctcagctacttacctaccttccctctgaccagcagggacaacccgggagttgccgggctggggaggggcaggtgggaccctaggaaaaatgagaaggtgcaggggacccctcgggatgctcggtgggtggggctggtgccgagggaggggcctagcagacactgggggctcacccacatccaggatatccagcgtgagtacatcggagcgggcagagcccaggcggttggtggcctccacccagatctcatagggcgtaaagagagccaggtccttggggatgtggcaggagtggggccccactgtgtggtactcctcacatgtgttgtcctggccataccacctgcggggatgggagggcgacaggacgcatgagggttccttgtggcccccagacctcaccatggcagcctcagggtgcagacaacacatgggggctcagagagggtccgcgttggtcaaggtcacgcagccagcctgggacacacacatcgccctcaggccaccaccaacctaagcttgtacttgagggagtagttggtgtggaggaaggtctccccgtgggcccctggcgtccagcggcaggtcaagtccttcatgttcttggaccagcagctgatgttgacgggtttctctgggggcactgggagaaggggagggtgcaggaagcaggctgagggtctggactagctgagcctcggctgaggggttgctgcccacccaccaggcccccaccttggagtggaaggagggcagacaggacagtctcagccctgtgctgagaaatgccagcacagttggtgtgacaactgcaagggctcttgagaggctggtgactcgatctccgggttctttttcttttttcgaggcaaagtctcgctctgtcccccaggctggagtgcaatggtgccatctcagctcactgcaacttccgcctcctgggttcaagcaattctcctgtctcagcctcccaagtagctgggattacaggtgcctgtcagcacgcctggctaagtattgtatttttagtagagatggggtttcgccatgtaggccagcctggcctcgaactcctggcttcaagtgatccacccacctcagcctcccaaagtgctgggcttacagacatgagccaccttgcccgaccgggtctccaggttctcattcccacctgaaagacctgcatagccatgccagtgtgcccacagctcatccccaggccagaaggcccacaattcatgcctcactccagagggagatgccgctcccaagagctacccctggggtgtcctgggtg

SEQ ID NO: 35654 - DNA, 1526 bp, Artificial sequence
  DNA replication origin
ctctgagtctcagtttccccatctggaaagtggacatcatggcgtcaatgtcatggggttggctgggtgcggtggctcatgcctgtaatcccagcactttgagaggctgaggtgggaggatcacgtgaggtcaagagtttgagacagcctgggcaacatggtgaaaccctgtctctaccaaaaatacaaaaattagccaggtggggagggggtggtggccccatgcctgtggtcttagctacttgggaggctgaggcaggaggatcgctggagcccgggaagttgaggctgcagtgagccatgactgcaccactgcactccagcctgggtgacagtgagaccctgtctcaaaaaagaaataaaaaatttagatttaaatttataaaaaccaacaaaacaaacctcatgaggttgtttgagaggagtgaaaatattgttggagacaatattttcccatgagatctttaaaccaagttgacctggactcgaatgcccccagcctgactcagtgttctacttttttttttttttgagacagagtctcactctgtcacccaggctggagtgcagtggcacaatctcggctcaccataacctccacacccagctaatttttgtatttttaggagagacggagtttcgccatgttggccaggctggtctcgaactcttgacctccagtgatccacccgccttggcctcccaaagtgctgggatgacaggcgtgagccactgcacccggcctcagtgttttacttctttgagcctctggaaaggggcttctcgttccacacagagtggttgtaaagactcatccacgcctttgttcgttcacgcgttcatctattcattcacagggtacctatagtgtgtccggatctgtgggcactggggtgatgcccaagacacacaaaagtcctgcccttgtgggcatcaaatccaaggaagcagcaggaaaaaggaataaataaatatctaagacaataactaggggagaaagtaaagcaggggctggaggaagacagagcagcggcagaagcttgggaggcctgtctggggaggtgacctttgagcagagacctgaataaagtaagagaagtagctgtgacattatctaacagagcatgtccaggcagtgggagctgcaagtgccaaggtcctggggcagaagcggtgggaaatgaggtttgagaggtcagagaccctgacctgcagggaggagggattccagggttctcagccggggagggagggatgcggtgagatatgcgttaaaaggactccccaggcggctggaagaagggactgcaggaggcaggggcagcccagcttcgcagagatggcagccaaggacagggtgatcctggcccccagggaggccccctgaatgccagcgctgccctgcacttgccctcactgccccagatgggcgaggtggggtggacacggttcttgggccggccctgatgattttccggggcaaacttggctcgagggctctgtctcgctggagcctggaatcgcag

SEQ ID NO: 35655 - DNA, 1523 bp, Artificial sequence
  DNA replication origin
acccctgccctggagggacttctggcctcaggcactctggggccccccatccaaggaacacccccgcaaggatacgtctccgtatgcagacccgctctgggacacacccagagacacacaaagaatcacactggcttgtggcccgtcaccctcgccctcaaactcgcgcacactgcatcccaggtgcacattcgcgcaccatcgcggacgcacacacattccatccccgacacacacattcacggtcacacacatcccacaggggaggcgacccaggggcacagaggcaggcaccactcgccccagatgttcagtcactccacgcaccccatccaggcgcacgggccaccccgggggtcgccgggcacacactgctcccaggctcatccaccctgtgctgggctgtttgcgggctgcctgtagggctcctccgggaaggggcagggtccgggcatcttctaggggcacttgctgaaagcctggctctcccctggctttcaggtgaggggctacctcgggccctcccagggcccctgacggctctgccaggcggtgggcagcgcctgtgagtgccactgtgagcgccaagctttgttttcagccagtagagcagcaggcgaaggtgtagggggtgggggggcactgtaagtgtgttttttcctttaaggggggaagaaattaaataaaagattctcacacctcggcaatatgtttctacttacggtgtgtcttagcacctgaccagcaggcgggtgggtcgtaaagtgtctgcaggtaccagcgggacgggagatggggacccccgtggggaccctgggatggaggccacccttccgccctgcttgcagagaatctcacacttttcccttttaaaacacatggtgttcctttttaataacggcagtggctccagattgggaaaagaggagagaaaaaacttttaaaggccccagctctgcgggaaaggaggggaggcagggagtgaaaagggagctgttcaaaagcccaacctagggatctgctttggggagccctaggaggccctccaaaccaagccaagcccccaccaactccggctcagtgggctgttcccagctgctcccctgcctggcctggagtgcgtgcatctctgtccccagcgccttagcccattgtttgtggaggcctggagggagtgcctagtcagccgggaccccagagctgggaggggctgtcatctttgcagctcctgggggcttcaggcttctgagccctctggacattggattgcaatcacatctcattgatctccccagcaagtagaacgtatttctcctcccattttatggaggagaaaattgagaactggagaggggaagtcaattggccaggttctcccactggtgttgcgcccatatcccgggaggagaaagtgtccttctgaccttaccggctggggctaagggggtgggagattggtctgtccaggcccgcctggccttgccttccccctacaacccgtcgccgcccggtgtcccccgccc

SEQ ID NO: 35656 - DNA, 1058 bp, Artificial sequence
  DNA replication origin
gggggcgcgggcgccacctggacggccggggaacaaaggaaggcgcccccggcgcagccctcggggcgccctcacctgcggggcacacggcgccgcagtccactgtccagagagtcctgcttccgcgcccgaggccctgttacctgggcagctgggccgagggcgccaggccaggcccccgggggctggggggatcgcggcctgagaccctctgcatgccaggacgtggcgggcgcacgcgtctgcttcggtggactctgggcccctgggactgcagggcaccgctcccaggcgggggcgcacgcggttggcgcgctgggtgcgggcccccagcgggcccccccaggcggagggatgagccccacggggagggcggggctgcaggggggccgctctggccgcctggcgcgcagcccggggtcccgggggacttgtgtctccacgggccggcgccaccgccctccccctgcgggacccggcgcacgggggtccgcggagtccccgccaccggcggcgcttagaaccgttttcagccaggctgcgtcgggcggagagcctccagcgagaggaatctttgtgagcgagtgggtgagagggagagggagcgggagccagtgagtccgggcaccagcgggcccaaactttgagggggcccactgggaacccgctgccctacgggccaagacccctgccctggagggacttctggcctcaggcactctggggccccccatccaaggaacacccccgcaaggatacgtctccgtatgcagacccgctctgggacacacccagagacacacaaagaatcacactggcttgtggcccgtcaccctcgccctcaaactcgcgcacactgcatcccaggtgcacattcgcgcaccatcgcggacgcacacacattccatccccgacacacacattcacggtcacacacatcccacaggggaggcgacccaggggcacagaggcaggcaccactcgccccagatgttcagtcactccacgcaccccatccaggcgcacgggccaccccgggggtcgccgggcacacactg

SEQ ID NO: 35657 - DNA, 1286 bp, Artificial sequence
  DNA replication origin
ttaagtaggagagggtggggcttcagtcttgggcagacaaatgggggctcctgagcccccctcagacacttttacccccttggctggttggggaccaggagagagaatccaggcctctaagggactcctggaaaaggggacttggagccgttcccttccctgggcgctgcagctgggggcggggctgcgaccaaaagtgggtaattgcaccccccaactctcatttcaggcacccccatccgcagcagccttggaggccaggaaccctttattcctgggcgcccgcatcgggtggggaccgggaggagggagatgagacgcccggaccgggaggggtcccgaaactcgagcaatggccaaaaataataacacggagaaggctctttgcgcaaaagaaggaagacaaactatgcgtcgctccgggcagccggcgttacctggagtcggcgggcggtggccgccgaagcgattactcaccgcgtggcgcaccccacccgcgggccgctgagtggatttttccgtggcggggtgtgaataggtcccggggaaagagcttcttaccgctctcctcctgggaatccctcttactgcggtgcgggacccagttcccgcgcaggcctgggtcccggctcccacaggggactacatctccccgtctgcccacgcaggagctccctcccgaggcccccggggcgcccagagcaacctcaaacccatcccgcgcgcgaaggggacagcgcagccagggcgaaggcgagggactccgtgccttcctgctttttctcctttcttccagcaaagcctggggccgaggctactcgcggagaatcgaaaagaggcaggatgaggtgggagggctggaacccgcgcgccgagggcgtggggctgggggtgacttttaggcccctgggaaggctgaggggctggagatgggggtaggcgggactcaaggaccgctcggtggggggggcggggccagagctggggtgggggccgagacagaagattgggccgtggaagggggaatggaggagtggggcagggttggggaccaaaggggccactgaagaggcactgggctgagaggagggtgcagggaagtgggcagggttatggaaacgggattgggggtgccgggtcccagactgggggtgggaagcctggagctggcagggttggagagggaggtcctgggccggtaggggttgagttagggggctttgggccgcgggatagggcgcgcgcggttctcggtggggcggaggcgggacgggcggggcgcgcgg

SEQ ID NO: 35658 - DNA, 1916 bp, Artificial sequence
  DNA replication origin
ccttacacattcccagccaacttcaaggacttgggtcaatatttgccagaagttccattgacgctagctcccttttgtcctcaaggagataatggaactggggagtaaagggttaaacttctgggggccctaagggccgggaaggatgcactctggggtcaattccctttccctgaagtcaaaggtgtggggtaaagatcacccaagggcagaagtcacactccagggtggggctgggcaggattggaaaatggtccttcccttctgttggtaagaacaagagagggatgtctactggctagggtcacacagcaagacacagagtgtgggccaggctaggaccccaggcagcatgacttgctaggactgagttttcttgctacttggagggagtaagagttctccatcctttacttttacaaatatttagtgagtgcttcgctttcagccctcactgggcccaccactggggtccaaaggggctgaggctgcccacagtctaaagaaaatcagttgcacaagaaatgaaatggttggaagagttgtgtttcaaaaacaataaaacaaagtgaaggagagggagagtgctgggggaagggtggagggcctctctgaggaggtggcactaatcctgtgaagtgatggaagagaaagggccaactggggaagatgtggggaacagcattccagcagagggaacagccaacacgcagaggcccttctatagtaacaagcctggtatgttttgggaaacagggctccagtggctggggcggaatgagggagaggagggggaagaggagagggaagaagaggaggggagaggatggcgagagggtggcaggacaaagatctgctttttcttcttttaaaagctccctctgcctggtgtgccgagaaaggcagaagggttatcagggaggccctggaggaggccgggaagcatccctgagggagaccgtggggcctggatctgaatggggtgggaaaaaggggtcagcatctcagaatggagatgtgttttagaatcagagccaacaggatttgctgatgaattggacatgagggatgagcaaaggagagagttgtcacgtgcgcttccaggtctctggcctgagcacctggatggatgggagagccctttcccaaaaccaaaatgactggaagagaagcagaaatggagggaggaaaaaatcaaggttttgctccagaagcctgaagtcctcccaggagggagtgaggcgtctctatccacacagagagcatctgcagacaggagccatgggggagtagtggtgagtatcctaaaaactcaattccagccaaggactgccacctccacttaaccctctgggtcccctggcaggtgggactatggctccatgtttcagaggggacaagcagggctgggggtcacctctgctccaggatatcctccagtgctgtgctaagggcttggattgtagagacttctgctgccctgcgtcttcccacagaagctcctagactgggtggtgcccactgtgcagaggaagaaactgaggcacaaaaggcctggtttcccgaagtaaatggcagcgtctctccttgtctgtcttctccatccagaattcagatggagcaggggcgccctgggcccctataggctcccatcccccaatcttgttttttgacagtctggagtctgaactggagatttaagtaggagagggtggggcttcagtcttgggcagacaaatgggggctcctgagcccccctcagacacttttacccccttggctggttggggaccaggagagagaatccaggcctctaagggactcctggaaaaggggacttggagccgttcccttccctgggcgctgcagctgggggcggggctgcgaccaaaagtgggtaattgcaccccccaact

SEQ ID NO: 35659 - DNA, 1077 bp, Artificial sequence
  DNA replication origin
gaggtgacctttgggcattgcttaaaacgcatcagggaggagggacaccccgcgcccttttgcagaaggagaaactgaggctggaggagtgggtcgatcacccaggtcgcctgaggggagaagggaaagaggctgattgccgcacacccagccccctttccgctgcactaggccgctgggggggtgagcggaaagaggacttgaccccggcccccaaggtgagcccccgcgcccctcctgctgttcccgggggagccggtccaggtgaggggcgggagggccggcgggcggccagggtcgggtttcaggaaatccgccgacattccttcggggcttaagagggaaagttgactcggcgccgccctcgcccccccccccacttcctaccccccggggcggcctggctgggggcggcaggcggggggcgctgaggccggcctgggcgtgaatcagcggcaggccaggcgtccgggaagccacagcagccgaggtcaaggcgggcagcggacaagcaccctttgtcccttgccgccctcaccacgaccctgctgacccccacctccaagcagggtacaggccagggaggaggcagagcaccatggcgccggtggtggttgctgagggttgttgggggaggacggagggatgtggctgtccccctaaagcagctggtgcctcctgggacccagacttcagaggcttctcagggtacagacgggcagggaaactggcctccctggggcaggcctgcaacttcccaggcaggtcccctaggcaggtctgcaactccccaggtcccgcctccagtgcctgaagtccagtgtgcattacactgagcacccaggcattgcttctccccaggctcagcctccagggcagaaattataaagcctaggtacacacgggccccactttcctgtgccacagaccctgaaccaggtgtccagaccctcactgccccttaattcctgaaagcacctgcctggaacaccaggtagctaatcccatactggggagccctgagcacggggctttcagaatgggagagacagctctcagccttcctcactcccagtg

SEQ ID NO: 35660 - DNA, 1111 bp, Artificial sequence
  DNA replication origin
agggcgatggactgtagccccaggagccgaatctcggttagagggtacccccagcttcctctccgccagataagggagtggggacgcccctctaaacccggatcctctgcaaagatgcccccgctttcgctggcatgcctggcgcaggtgcctgcagcgccgcgcagcagcccgcaggtcccccacctacgctccgcccccgcagacggggcggcagcctcgcagggtctgcgggttagagggcggctcaggtttcggcctgggaagagggtgtcccgggtgggggcccggcgcaccccctactctggcctgcggccgcgctttcatctcagcggcccccggccggcccccacgtggcttaatcaggcgcggctgtgcctggcggaccccgaacatctggatcccggtgcggcccctcccccgccccgccccgcccctcccctcccctcccatgctaggccgctgcgacccggcggcgagggcctccagcccgcagtttgcgccagaatccagcaggagaattccgcttctaacccacccgcgcgccaggcccgcaccttgggaaacagccctgtgcgttatgaccaatactgtcccccatttcacaggtgggaaacttaggctccgggacgcgttggcaaagtcaggattcaagcccacacatgctaattccagaggcccgcgcgcgcctaacccctccacaattactgtctttcattcattccaacgaaacactttttcttgcaacaaccgtataagacaggtaccggtagcgttgcccttttatatgggtgaggaaactgatgctcagactgcaaagtggttctgtccaggtgacagggagagaagcaaagaaaagccggcagagccctgccaatgatgggaggtgacctttgggcattgcttaaaacgcatcagggaggagggacaccccgcgcccttttgcagaaggagaaactgaggctggaggagtgggtcgatcacccaggtcgcctgaggggagaagggaaagaggctgattgccgcacacccagccccctttccgctgcactaggccgctgggggggtgagcggaaagaggacttgaccccggcccccaaggtgagccccc

SEQ ID NO: 35661 - DNA, 1254 bp, Artificial sequence
  DNA replication origin
caccaaagtctcctgctgtcatccaagagaagcccatcccaacgcctcctccttcggagagatcccgcgtcccccgctggcacctggcaccgcacgcgcctcacctgcgagggctgcgggccgaggtcgcggtcgcggcaccgcagctggcagttctgcgtgtccccgagctggggggcgaagggatcgcgggcggacggcgcggaggcggcgggcggcgacgccaacagcagcagcagcagcagcggcggtggcatcagcgccaccgcagccatggccgggcggaacgcggggggcgcgggggactccagctcaggccgggcacggaggatgcagcggctgcggcggggaccggggcgctgacgtcacccgagcgaggcagcctgggaagcggggggtgggagatgcggagagcgggcggggtagctgcgctgcggcacccgaggcgtgcgggtcgggcggggcaggtgcatcgcggcccccaccgtctatcccatcgcgggggtcccaggacacctccctggtgcccacgggcgggggatctctgctggcgcttggggccaaaaggaaatatatagggggatgggatggaggggactattccccaggggtgtcgaggagagcggagagcttggcggaggaggcgacgtgtgagccgaccacgcgggagagaggagaaaggggtgtccaggctacaaggatcagcgaggatcctgagagaaagagcttgttgcaggaggagggagggcgatggggctggagtccaaccagggaacggagagggaggaaggtgagagccgcaggacccggcagctgagtcctggcatcttctcttttgacacccaggttagaaaggagacaacttgcgcgcagtttgcctcctccgggaagccctctgagcccctcccttgctccttcagcctcgcctccctctggcccagccctgatccactgacctagggaatctggccctgtctccccaaggctggagacccctgggctggggcttagtgggaggggacacagaggtatgctcaggagcaaggggagggggtgatgctgacatgtctaattctcatgggaaaacggggcaaatagcgacacttctgacttccataaccatcacaccccagggcgatggactgtagccccaggagccgaatctcggttagagggtacccccagcttcctctccgccagataagggagtggggacgcccctctaaacccggatcctctgcaaagatgcccccg

SEQ ID NO: 35662 - DNA, 1191 bp, Artificial sequence
  DNA replication origin
atgacggggctggatggaggttgccctgcaggcctggtatagaacgcagagtctggcagagcctctgcacgtgaatgaagatttcccacggggtgaagagggtgggggtattgggaaaagggaccccaggccgcagtgggaggcccaccttctgctccggctcaggctccgcgggctggctccagcagccgtggctacaggcctgctgctctgcctccttcacataggcttccacgcaggctgtgggaggtgggagcgggtgactggggacggcccttcccaggccacctctccccacgctggcccaccctgccggcgggccctcacctgcttcacactcagtttgggtggcattgggcttggagcttctggccacaaatcggcagatggagaagaggcggcagccacgctcgcaagcgctgatcagaacggctctgtcatagggagactcggaggcgccctccagccccgcctgggggaggggaggacagggggctcaggccatggggaggggcaggaggagggtggggggaccggagcattcagcagaggcagggaaaggcttccccgctccccacgacatctagccagatggagatgaagttgggagaggctacaaatattagtgggggctcttagctctgaggagggagatggggagggagcttgagaagagaaatggacagtgaaggtggagagaaatgagccttccccccactaggttccagggaggaggggagacatggagaaggattctcagacctggaggaggagggggaggctcagaggagggggttttggtcacacgcagatcaggcttgaatcctggggagtggtggtatgagtaggggctggtagctctgagtggggagggaacacgatgtggaggaggaggaatgaggtggggggaccatcaggcctgagggagctgggggttgggtgctagagggtccttacccagcagagtgcggaaggagcccgggaggtggtatcggccccttatcgcaaggacctgcatccccaagcactcccccatcagagggaaccccagcccgtcaactactggagagatctccccattcccgacccccacctccccacggacacccccaccaaagtctcctgctgtcatccaagagaagcccatcccaacgcctcctccttcggagagatcccgcgtcccccgctggc

SEQ ID NO: 35663 - DNA, 1790 bp, Artificial sequence
  DNA replication origin
gagcccctcggtttcccttcagacccccaggattctcaggtccctagggccgcctgcagacgcctcgaggtcctggggcacccagcccccctccagccaccccctcagtagccctcggctcctccagtaccccacggccccgtaaagtccaaattctcagcgaaagaccctcgagccgtgccaggcctcccctcaacccctcaggacgcccaagactgcccacaggtttcctgggctccaagacaggtgcaggtctatcctgcgggccgggtctcacctgttcgggcgctcggggcccgggcccgcgccgaaagcgccgccgccaccagcaccaccgctgctaccgccggactccgccatcttccccccgccgtcgcgcgttcgagtgacgggagccgcgcgcgcaggcccgggaaaccgagacgcggggggcggggcggggccaggtctgcggaggggcggggccgggaccagaaaccaaggattggggcgggcccggaatcggaggggcgtggtctacggagggccggggcgggtctgggataaagggaggggcctgctatgcagagaggtgggtccagggcggggcctgggctaggggtgccggattggggcgggaccctggcgtgaggggcggaaccaagtctgaaagggaagcggttctgggctgagagggcgtattgtctgtggataggtggggacggggcgaagcaggacaagtaggcgcaggatggggttggtccctgggctgaggagtggggcggggtctgaagaaggggcaggcccagggcaagaggaggagggacaagggtccggcctgcggaggaggcggggcgcaggataaagggcggggccaggtgtgagaagggacaaggtggaggttaggaatgcggtgggggagtggtcggggaggtagaaaggagaagatgggtctgaggttgggcgggtctgggcaggagagaggaggaatctggggatggatgtggtcaagcgaagagagggcctggtctgaggaagggcggggcctgggcgaggggtggagtctggttggaaggagggcggggaagatcaggggtgtgtgcgtggagggggcgagggattggcggggccgggggggcggagcctcatctgatgggggtggggccgggctaagtgagcggcggatctgaggaggggcggggcacgtgcaggtgttaaggagtgtctgtgagtgccctggggcgctggcaggcgtgccccgggcgttggctgggcgtggttatactttgaggcgttggagccacagggaagtgagttataggtagggtgggagggagggtgagatggagcatggagaaatgggtctctaagctctgagaaccacaccctccctctccccaccctgcacaccccgactccagtcttacctccttcccaggcctctctcaggggcgaaactcacccatgcccaggcctcagacttccagcccctcatggttccccaccctcccctgacataccctcttcagagcctccaccctgagaccccaatcatctggccttaggttcccaccacctgcttcatacaccaattctggtttctcatactctaaaaccctgcacatccaattatctcccattctctactcaaaactcatctcccactcccccaaatccctgcccacagatccttcaaaccttacactcccaaagtccattccaccggacccaacaccctcagatccccaagcaccagccctcccaacacactgaccctcagccagggctcaaagtcctgcatctataggcgt

SEQ ID NO: 35664 - DNA, 2017 bp, Artificial sequence
  DNA replication origin
gcctacttgtcctgcttcgccccgtccccacctatccacagacaatacgccctctcagcccagaaccgcttccctttcagacttggttccgcccctcacgccagggtcccgccccaatccggcacccctagcccaggccccgccctggacccacctctctgcatagcaggcccctccctttatcccagacccgccccggccctccgtagaccacgcccctccgattccgggcccgccccaatccttggtttctggtcccggccccgcccctccgcagacctggccccgccccgccccccgcgtctcggtttcccgggcctgcgcgcgcggctcccgtcactcgaacgcgcgacggcggggggaagatggcggagtccggcggtagcagcggtggtgctggtggcggcggcgctttcggcgcgggcccgggccccgagcgcccgaacaggtgagacccggcccgcaggatagacctgcacctgtcttggagcccaggaaacctgtgggcagtcttgggcgtcctgaggggttgaggggaggcctggcacggctcgagggtctttcgctgagaatttggactttacggggccgtggggtactggaggagccgagggctactgagggggtggctggaggggggctgggtgccccaggacctcgaggcgtctgcaggcggccctagggacctgagaatcctgggggtctgaagggaaaccgaggggctcttgactgtggtgggccgtggggcaactggggatgccaaagggcctgggcagcagagagggcctgagcaggggccatgccatggccagtctgagggtggtgaggtgtcttgggggctctgaggaaggggctaaggcccaaggcatcctgggaggtgctgaagggccccaaggtggctaaaggtggtcctgagagcgtgctgaggggcgctggaaggagtagagactgtgggaggctctgggtgggggacttaggtgaatctgggagtctgagatggggaggctgagggggcctggggtgggtctagggaacctgaggggggtgagagaactccagggggtttataaagaacatacagagggttcttctttggggctcctcccttccatccccatggggtccaaatccacatccccaacaggctaaaggacttacagaaaggtcttgccctcagacaaggggacagaattcacccctttggtcagagggaggccccctttccccatggcccagtcctgacatggattgcttgaacgtccaggtttgcatgacaattagttatcatcaataactaatgatatgtgtgtgcatgcattgtattggattgtcagagggaaagaacacctgccttaggagtgtgatctcctgctcttttcctattgggcaaagccagaccctcccaccccagctcctcctctagcccagcacccaggtcaggccaaggaggaaattcaggctttttcttgctggtgagcttccaggagccagtaatttcaggcaacatgataaatgatgaagttgtttgatacttacgtgctgtggagttttggacctgtgggctgattgttggagggaatggcctgatggcctggctgtgtgatttggtactgaatggaacacgcatgggatgggtggggaagggaggagggatggctgggccagggcacagaggaggcaaaggccctgcctgttcctgaggatgctgagtggcaccttgagacttaggtctgtgggcattgaatctggtctgccagaggggccatggggaacccaggaggtgtgtgtccagaggggtgaccagcctcctggggtaggtgtggggcaagattgtcctgcagtagggagccaggagatgtcagaggattttcagagatattcagggagtggccagggcttgaaaattgggtatcagttggcaagtaagggacagggaagagggacagtgaaccccaggtccctgccttgggcactggagtgggataacctggggctagggctttttttatttttattt

SEQ ID NO: 35665 - DNA, 976 bp, Artificial sequence
  DNA replication origin
gataggtgggtgggtagatgaaagggtgggtgtgtgggtgggtgggtaggtgggtagatggaagggtgggtgggtggatggaagggtggactgatggaagggcggatggatgggtgggtgggtgggtagatggaagggtgggtgggtgggtgggcaggtgggtagatggaagggtgggtgggtgggtggatggaagtgtggactgatggaagggtgggtggacgggtggatggatgggtgggtgggtgaagggtgggtgggtgcctaggtgggtagatggtagggtggatgggtgggtgcatggaagggtagactgatggaagggtgggtggatgggtggatggatgggtgggtgggtagatggaagggtgggtggcatgggtaggtgggtggatggaagggcaggtggatgggtgggtggatggaagggtggactgatgaaaagatgggtggataggggcaggtgggtgggtgggcggatgggtgggtgggtggtggggtggatggacaggtggaggtatggatggtcaggtgggtgggtgaactggtggacataggtgtgaacaggtgggtaagaaggagtgagtgggtggcagatagatgaatggtggatgaagggtgggtggatagatggacagataaatccacatctttgtgctgggccggccctgaagagcccctgtcttgctcttcctgctgtttagctccacatgcatcctccaggctcaggcagagccttggtgagcagtctcagccctctgagcctcagtctccccatctgcatcatggtgatgatcataggacccacccacttgggaccatgaaaaggccaaaaagcacctgtgcactggccaaagaaggtctctgctggccatacctagtgtccctctgcctcttgtttactgtgtggccttggatgagcccctgaacctctctgtgcctcaacttccccatctgtaaaatgggatgatagccg

SEQ ID NO: 35666 - DNA, 1668 bp, Artificial sequence
  DNA replication origin
ggagcagagggaggtgggggctgcctagggggacaagagtgaggggcacgcacctgtcagggcaggcgcccctcctccggccccgggctggcctcatctccatggtcggcttcccaacccatgagaagcgatccaaagccccagaacggttcttttcattggaatgtccaaaaaagaaaaaaaaaaggcaagaacaagaaagaatttcatggaaacatttctttggggttttgtaaaatcctttcccacccccacgcggagcccagcgctcgggccagaacggagcctgccggcattgcccctcataggcggttctgacgcgcgcagtccctcacttcccctcaaagaggagagcacttccactttcaaagccaattttggttttattgtccatgtggctcgaaggagcacagcagcacagcacagctggttggctcccaccccggctgatgcgatgccgccccagggtctcagtgcatgggtggggaagaggctgtacttcaggggacagcaggggatgtcagggccggctgagaagccactgcccaatccctagcctctctcccagccagtcccaggctggcaactggaccaagaccatcctgagagccttgtctgagatccagcaagagagggaaacagagactcggagagggagtgacagagacttggaggggacagagacccagagaagaaccgggacccacagaaagaaaaacaggacccagagagaagtggacagatacccagagagagaaaaacagattcagagataaagggacagagacttagagggtacagagacccagaggggaacagggacgcagagaaaggtagacagagacccagagagaaggagacagagacccagagagaaggagacaggcacccagagagagggggacagggggacagacagagacccagagagaggggacagagacccagagagagggagacagagacccagggagagagggagacagagacccagagaaagggagagggagagacggaggcccagcaagaggagaaaaaaacccagagagagaggaagacagatacctagagacagggagacagggagacagagacccagagagagggagatggagagaaagatccagagggagagggaaagagagacccagcaagagggagagaaagagacacccagggagagaggaagacagagacctagagacagggagacggagacccagggagagagggagacagagacctagagagacggagagggagacagagacccagggagagagggagacagagacccagggagagagggagagggagagacagagacccagagacagggagacagagacccagagagacaaggagagaaatacagggagagaggaacagagagccagtgaaaggaagggaagcagaaatggtggcaggggtgggggtgacagcgaccaggcagtgtgggaggtggtgtggggctcgagtgccagagctgtggggggcctggaatcccaccaccaacctctcagcctcacagccaccaccctactctccaaccacactgacaccttctctcatgacccttcccacccactctgaccttgccaagcaggcacaggtcttcacatgcagcctcacaaatccccagcagccggggagatcacaggctcagta

SEQ ID NO: 35667 - DNA, 1037 bp, Artificial sequence
  DNA replication origin
agggtgcccgatgacattgctggggggatacagcggcaagcgggtgtcagaatggcccctagcccgggccaggcctgtagcgggggcgtgtggccactcagaggccagattcgggcagagggtgcagccagggcgggcagcaatggcctcttgagacggccctggccggggctgctgacgcattggctccgatgactcacgtgcgggtgaccgtcactcgagtggccgtctggagactcggaccggctcagggccaccgccttcctgggggcctgtggccccgccgtgccggccgccccctgtctggaccagcctgagtaatgggtccttcccctcctcccagtggccggctggagaggaccttagtcatcagccctggccccggccctccctcctccgcctgcccacctccgcccaggctgcgtctcgcttctccgtccaggctgggggactcctgcccctcctggcctcctccctccttgagttccccaggaggggctgcagtggggtgggtttggcttcacaggggcggcagtgagggtgacgtcaggggcctcagggacagttgtcccatccctaagatgagaggaaggaaacagccatgtggaacgcgtcaggcatcaccagggcatgaggaggaggcctggggaggacaagctgcttcctcccctctttggtccagcgtgggccctgtgccctgtaaccagcagtggatgggcctcaccctgctttctgggcctggggtgtcctaaattccagatgggagcatccagattctccgagtgtgtagtcgtcacgtgctagtggcagcctgggtcccagggctctgcgtttgctcatctcatcctccagcggccctggggctggggagctggatggtcatttgcccctgctttgtagctgaggcctgggtggttgagtgactgctgagttcccagctaaccagagctggcttggcccaggctgctggcccctgatgtctcctctgagatgccctgccagtcagctgaactgatcctgccttctgggttccgggc

SEQ ID NO: 35668 - DNA, 2454 bp, Artificial sequence
  DNA replication origin
ggctttcctgcatggcctgcaggcgcagccagcgattcaggtgggggtcgtagcggtagcaggcgtccactgcgccctcgccgctgcggtactgcaggtgctgccccccggccacgtacacaaaattgtccagcacggccacgcacgtgtggctgcagcctacctccatctccgtgagctcgcggaagtggcgggctcccggctcaggcagctggtagaccttgctgctgaccgagcggtcgctgtcggtgtagggcgtgccgccgaaggtgacgagcgagggcacatccgagcgcacggcggtgcgcggagactgcatctcgtgctgccggaagggcagcacctggtagttgaaggcctccagcagatactggcggcacagcacgtcctccaccatgatgtccagcgtctgcacgctgtccaccagctcggacgactgcatgagcgggaagcgaatgtggcagagcacgtggctggcgcgcggccgccgggccgggtcatgctgcagccagcggacggccgcgcggaacaggtcgatctcggcacagctctgcagccggttgctctgcaggaagaagaccaggcgctccagtggcaggcgcaggaaatcctcctcctcggcgatctgcaggaagtgccggaaggtgaaggcatccaccgactctcgcagcgaggccaggctgaaggtggtggccatctggccgatgttgaggcaggtctccacgctcatggccgccttcaggaactcctcgcacagctccaccacgggcagcatctgcaagaacacggccgcgcccagcacgtcctgcacgcagtccaggtccagtgtcacctcggcgctgtaggcgaagtcgatgatgtgccgcaggccacgggccgacacgcccttcagctcgatgacgtcctggcttgcctcccgcatgccgccggtgaacatggccctgaagggcagaaacacaacgtgtggctggcagtggctgaggggtgttttggccagccaggaatgatctggcctggggaacagtagcctggggacacagaacacagggcacagccagcaagaggaaagtaggcggaatgctcattaaaaacatgcaaaggggccgggcgcggtggctcatgcctgtaatcccagcactttgggaagcccaggcgggtggatcatgagatcaggagatcgagaccactggcactgcactccagcctgggtgacagagtgagactcagtcacaaaaacaaacaaacaaacaaacaaacaaaaacatgcaaaggccaggcacagtggctcacgcctgtaatcctagcactttgggaggccgaggtgggtggatcacctgatgtcaggagttcaagaccaacctggaggttgcagtgagccgagatcatgctgcactgcagcctggacaataagagtgagactctgtctcaaacaaacaaaaaaaacatgcaaaaaaaaaaaaagattttgaatccacccaagccatgcatcttcctataaatagcaactccctgcttggcccctctgcagaggaccctgcccctgccccttcatgactagatcgtgttggagctgcaggagcggtggcccgggtcagcctcacccacaatgtgcctgtcgggggtgcggttagaggggccaggtatggcagtgcaggatgagaacacaccctgtggctctggggacagatctgcagccccacttgacacctgagctcaggaactgcaaggccagtgctctggaggtgccatgcaccacagttcaaccctcaccttgttcactgacctaagcaggcagctctgatatgcccagcctgagtctcaacaaccatcatgtgaagaggggaaggtaatgagggtccccaggaatggagcccccaccaggaggctgtgctggggtgactgctgtctccagagacaggctcaggtggtcggggaagcacctcccacccaacagctacgtccccagcctccattgagaccccagctccgcccttgtactgctgtgctctgcgaggcagaacatgagagtgggaggggacacaggcccccgtgagggagggcagcggggaggcacacggttctaggtcacagttcccctacagcgtttagggtgttccccagcagaagaggggagagcaccccagctccaggggaatgggcggttccttccaggaggcgcaatggcatggcatagtaactctcactcctgccagtgcacctcccctgatggccgtccgaggaggagggaacatcccttgtgcatttgacccacagaggcctgtcccctagtcttgcacctcctgtgagccaggctcagggctacaggggcaaggacagctgccagggcactatctcggggccgcccactgacatctgcccaacaagcagctcttcagcatctctgagcggtccaggagcagtaagtacgctgccagctccccagaccctgccccg

SEQ ID NO: 35669 - DNA, 2699 bp, Artificial sequence
  DNA replication origin
acttgcagctggcaaagcttctcactgctcccctgaaggggccatgcctccagtggggaagggttctctttgggggagctcaggtcgggggtggggctggaatgttctggtaagtccccagggaactcggcttttgtctcgatgcccctgacagtgtgggcttcttttaggttcccaaccatgttcctattttagcactgcccaccccctcagcctctagtgttaccccagccccgatggctgccacacaggagcgccaggcatgcaggcacagcaacttatggagatccatgtgtgtgtgatatcccagggcctcccttctgggaaggccgtccgggaacatcaggctttctctgctaacctgcaactgataagtggcctgctctgggcagcccagttcatagtttggccggccatgatgagaatagggggctgaaggctcttccaaagtgccaaggttggtccgggcatggtggctcacacctgtaatcccagcactttgggaggcagaggcaggtggatcacctgaggtcaagagttcaaggccagcctggccaacatggtgaaaccccgtctgtactaaaaatacaaaaattagccgggtgtggtggtgtgtgtctgcgtctgtaatcctggctacttgggaggctgaggcaggtgaattgcttgaacccaggaggcagaggttgcagtgagccgagatcacgccactgcactccagcctgggtgacagagcgaggctccgtctcaaaaaaacaaaaaaaccaacaacaaaaaacgccagggtgaaagtcctggccacgcttcctgctgcctctgcgcccctgagccaaagcccagcccactgccgactcctctgaaaggctggaaaaggttgaggcgggggagaggagcccccagacacgcggaggacacacgaggaatctgtgaccaatcagacccaagccgcacaagctcagtgctgggccggctccatctcttcaccataacatttttattaaataaagggaaatattaggagacgatgtctgctaagataggaggttaattctttacatggtgagtgggtcacagagacaagacatcaatcgtctgttagcagcgagagagacactttaagttgccccaagagtacaaatcccatctatgagacagcagtgctggcttcttaaaaacagtaaaaccaatcaaaaagaaaagatttagaggttcagacattagaacaaatgtggccagagataccacagagcccttgaagggaaaggcctcactgctggctccgtagcaatgttgacccaaaaacagggcaggccagggagtggcagggcgcggaggggtggaaaggagggaggagaaaaaagacaccccaccagacctgcggcaagcgccactatgggattctgaagttagcgtcgccctccaattgcgggaaggggactgcctggccaacagggcaaatgtagagggccgggatgtctcagccagttaaggccccacaagatgctcagtgccaaatggaaggtcccaagcccctaaggagcgtttctaggagttgatatggtttttcctccggaaagcagatgaaggcaggaactgaggcatgaccagggcctcccctcagcagcttgggatgggggaaggagggcaccccaggggaggcagacacgtgccctcctcctccacccaccccaaaccaggggcttctaagccacctctcactgctcctggaggtccgtgtgttacggacgtttcgggtgagtttattttaaaaacacgcgcgcaggagacttggaaggagggtgagtcatataccaccgactttgggttcaatgttgatgagctcacatctgaatgcctgaaaccgtggggctgggaggcagtagagaagtgagatggagctgcacagggaccccctggagacctgggattccacccgccagcccgtggggactcgggggccaggcgaggaaaccaccccggggacgaatttgctgccaccacatgtcagacgctttgccggcaggctccctcggatggactcgcagccaggatctgctttgggaaggagggagggagggacccctgggaggggggcttatcaacgcagcaggcccctcaagggcagcccgggcgaaggggggcactggggttctcaggcagacgtgcattcgccaagccccacttggagacaacatgcggtcaggccagggtcccgggggtcttgggggctacctcctggtcccggcccggggcagcaggacgggggcgcaggctatgcctgcgaaggactccgggaagtgcaggtcccgctcccactcgtcggtgtccgtgttgtacacctgtacgatgcccgtgacgttgttgagacgccagttgtagcccccgacgatgtagatcttcctctccagcaggcagcagccggcctctgactggccggcccgcatggggctcacgctggtccactggtccgtctccggcacatagtactccacagccagcacgtcgaagcagcggtccacgtggtccatgcggcccccgagggcatagatgcggccgccggcacccaccatggcgtgtagcacgcggggttcgctcatgggcgccttgaactcccactggtcggccacggggtcgtagcagtgcagggccttcttgtcctccactgagatcccgtagccacccgagatgtagaggcggcc

SEQ ID NO: 35670 - DNA, 1276 bp, Artificial sequence
  DNA replication origin
cccccgccgcgcgcgccccgcccccgccgcgcccccccccaccccgccccgtgcacgcgccggacacgcgccccctccctccctccgccggccctgaagggtcggcgcgggcagcccccttacccgcgcggcccgcgtcaggctcaggtccttcatgacctcctcgaaggccgccgtctcctccgcctgcttctgattgtgcagcgcgatcttctcgctgaatttccgcggattgttcgaagtcgccatcttctcgccgccacctcctcctcctcctcctcctcctccacctcctcgcccccccactcgcccgtgccaccgcgcaagcgccggctgggcccacgggcggcgagcagtgcgcaggcgcgccggcggtcgtgagcgcggcgcaggcgcacaggagcggcgcgcggcgcgggggcgaaggcgcatgcgcgcgcccaggcgcgcgctcggggcccgcgggaagggcggtggagcgcgagtggaaatttcaacgccgacgcagtgatccgcctcctggcccgctggacagcggcctctgggctgttggacaaggaccgcggatcggctggggcactggagcccccaagagggagacggcctgacccagatcctcccaattcacaagggtggggccaggcacccccccccgcaaggattggtggcaccccaagttgaacctgggtttggactaagagctctgaaaacagactagggcgttggtcactcatgcattcattcattcaaggaatatttactgagcacctactatgtgccaggcaaactggagtacaggcgtgaacaagcagaggtgatccctgcccttatggagtgtacagtcagagagggggcagacatagcacacaaataaccaagaacttttcagatggaggtaaatgtgatgcggtaaataagaccagtggccagccacagaacattagggagggaggctcctgcagccaccacagacagggaggcggaaagttatcttagctaagacctgaaccctgcaatcggctctctcagtccataaacctagctgttgcccttaacgactttcttttttttttttttttttcccttgagaccgagttttgcccttgtcgcccagactggaatgcagtggtgcgatctcggctcactgcaacctcctcctcccaggttcaagccattctcctgcctcagcctctccagtagctaggattacaggcaggcgccaccacgcccagctaatttttttattttcagtagagactaaagaccatgttggcca

SEQ ID NO: 35671 - DNA, 1874 bp, Artificial sequence
  DNA replication origin
ccgcgcgccgctcctgtgcgcctgcgccgcgctcacgaccgccggcgcgcctgcgcactgctcgccgcccgtgggcccagccggcgcttgcgcggtggcacgggcgagtgggggggcgaggaggtggaggaggaggaggaggaggaggaggtggcggcgagaagatggcgacttcgaacaatccgcggaaattcagcgagaagatcgcgctgcacaatcagaagcaggcggaggagacggcggccttcgaggaggtcatgaaggacctgagcctgacgcgggccgcgcgggtaagggggctgcccgcgccgacccttcagggccggcggagggagggagggggcgcgtgtccggcgcgtgcacggggcggggtgggggggggcgcggcgggggcggggcgcgcgcggcgggggcggggcttggcacggcccgagggggacaggtgtccccacgccccgggcgtcgtgggcgggacaggtgaccccacaaaatccatacctgatggggtacaggtgccctgcatcactgctccccggaggagacaggggcctctatatcattactactaggagggaacaggtgctagtacctcgtcgttacctgacaggggacaggtgtccctacatcattgttacccgagggggacaggtgccccacattattactacctggaagggacaggtgcccccgcatcattgctacctgggggggcaggatgacacaggtgtatgagctgggtgctgcttgcaagcaccattggtagctgggggtgagggtgcaagtgcccccgcatccttgctacctgggagggacagatgccctcccattcttgctacctgagggggaccggtgtctctacgtcatggttacctgtgcctttactccctgggtgttgggggaggaacggatgtccccacttgcagagctgaggtgggacagggatctctccctcttggacagctgagggaatggtcagatcctgtcccccagggggtccagaggggggccaagaaggcagattgtgctcagtcctggaacttggagtggagacagctgccccttctccatgtagcccatatggtgggggccaggtgatgttcctcccagtggaacaggggatgctgaccacagcccctgccctctcaggaccagggtggagggccaggtctgcctcaggtggctgggcgcatttggtgtgcaggggcaggccaggttctgccaggctcctgtctggcagagcagataccctgcaaatctcacctgggaagttgctgtgggccaggagcaggggcttggggctggtgtctgagcacggcaaggcacccgagttcctcaggcctcagtttcttgtcaggcattctagcaagaccttcctcttggggcagggtggtgagcacactctgcaaaggtgatgctgaatctccactttgttcttgcagtgtggtgagacctctctcctgcatcctggggccttggggagggtttgggtgggctttgcagatgctcgtatccctggtttccagattcagccactgatgtgactggctcaggtagacttaacctcagtctctgattccttaggtagcactttcagtctgtgttactttgtaactagttgtttgtttctctgagagattgtgaccttatagactaggatttgtgtcttcatttctgtgttggtaatgattgggagctcactgtcacccaggtactgctttaggcatgctcggtgagtgtgccacatctgtcctcccagctccaagcagctacattcttgctcaggatgtagagaaagagatggctggtgaatgaatgaatgaaaaaaaaataagaaaatggccaggtgtggtggctcatgcctgtaatcccagcac

SEQ ID NO: 35672 - DNA, 1033 bp, Artificial sequence
  DNA replication origin
acagtgaggtgggccagggtgtgagctttgcacctggtcaggtagagttccatcctttgctcccacctatatggctgtgccatctctggcaggctgcgaccagggtgggcaagcttattcccagtttgactggccactgcacagtccaagtggcatgtccgccgtgcctggagcaggtgaatgaacctatatgatgtgggcttccctcctgcagccatggcgcgctgcctcccatactgtagacagcaggggtttggccacacctgcagccaggtgaggcatgatcgggtcggcacctgctcctctcctttgaattccaaaggacagcatgtcactcatgcgtgtctgttcacagttgccggtggtgatggcacctgaggtgtcttgctgccgtggaaggccagtcagcagatgtttggctagaagacagggacctcaccagggcacaagcactgaagggttgggggacagggcgtaaagtcgggagactgtttgcaggtcttggggcggaggggtgggtgtgtgggcgttccctcccactcttaggcttgggtcagcgtgacaggcaggctgtctatggcgctctgctgtgtgacactgggtgggtttctcaacccctctgggccgtagaatcctgagttgtaaagttggggcagcgcgttcattccatcaaatgacaattttcattgtctggcatgtctcaagagcctggggtgctggggctcctgcagtgtacagggcatacggggctgtgttcttggggagccagcatagttttaggggggacaggagagcatcaatgcatccgaatgaagcagacgccctcagaaggtggcacacgctgggagagaagtggctcagccacgtgctaggagtggctgggacaggggtgacacagcatccccagagagcagggaagagcacttcagattggggacaggcacagtcagagccttgtggtgggaatgacttggcgagtttgagaatgggtggaaagcagggaggagggcaggtgaggctgcaagagcttgga

SEQ ID NO: 35673 - DNA, 1048 bp, Artificial sequence
  DNA replication origin
gcacagtggattgttgcagtaactcatgagaaagggcctgttgcctgcccccatggcacagatgagaaattgaggcacaggaggtcacatggctgacggtgggaggaggagctgggacttgaacctgtgtctgactccaaggcccatgcggaggaccttgttgtacgctgagcctcagttcatgttcatctgttgagaagcatagaggttgtccctggtttttctcaacctaaacattctttgtgtttgtcccagtgcatgtactgggggagtggggacctctccaaggtgcctgcctgggaatggccccacctgtgtgtccctgagccccctccagtagggaggagggcgagcagctggaggtgtgccactcacggaggaagactcggggcatttaggaggtgatggtgacagggattattgggagggcgggtgggggagtcccaggctgcagcgtgggaaccagaatcacaggggaggggtggggggtaggagagtcctgcttcaccttggagctcatgggatagaacacacccccactttatttctggttggggtatgtctctgacctccaacaggtcctgcgtggcccctgggtggaggtgggtgccctgttcttctgggtgtggctgtggtgccagcagctggatgggggtccaggtgtgtaaataaggaagtgccgcgtgcctcgagggccagggatgcccgagagccaatgtttattatttgccaactggaaacgaagcatggccggggcctcctccttggggttcttgcacggagggattcagaagcacttggcaccggggggagcagcctcatcggtgtccagccagggccacacagtcagcctcagcccccacctcgcttccttctgggcgagcttagacctgggaggcctctttttttttggagtgccgtggtgcgatctcagctcagcaacctctgcctctcgtgttcaagcgattgtcctgcctcagcctcctgaatagctgggattacaagcgtgcaccgccatacctggctaatttttgcatttttggtagag

SEQ ID NO: 35674 - DNA, 1009 bp, Artificial sequence
  DNA replication origin
gtcttcctggagctcacatttttctaagcaaatcctgagcctgtatacttgtacggaacacagtgtgttccagggtcaaatcctcggggtaggatggccctggggctgcatgatggtgcccacccagccctctgagtgcctgaacaagaagcactggggtggcccggtgagttctccctgcagcagtgagggtttggataggaaagtccattcctcgagtcagttggtatttcctgagcatctcctgtgagctggccccggagacaccttggagagcaggtcagctggagaccctgccctagggagtgacaggaagccacacctgtgccagctggccctgcccctgaggttgcggctctgagccaaagcgaagagcctggcctcgcctggctctgggggtgatgcctcgtgggccagggtgaggggttgagatctggtcctgggatggggagggttttgagcagggcagtgatgtgggatttatgctttgcaaggatcccattggctgccatgtggggacaggcctgggaggaacgagtagggagcagcaggaggcctaggaggggccagggcaggtgtcccccggagatagtgggtgctggggctctgtgatgacctggggcttggcaaaggcgggcttgtgacagactgagcctcatctcggcagctctcacacccatggatcctgagcctgattccccaggagggttggcgacgggagggttatgttaagtggctgcgtcttccatctcagggagccccacactggggaacgtcaccactatagcggctgagaggctttgggtcctcatttactacataaaattcccccttctctgtacttgggtcctgacgcctccgctggtcccaggagtttcactccgtggggtggggttgaagggtgcggtgaggcccagaggggctgagtctgcttggaagggtgggccttctcccactgcgggtgctaataccctgtgcccatatcctagccaccctgtcccttatccac

SEQ ID NO: 35675 - DNA, 1347 bp, Artificial sequence
  DNA replication origin
taagttttgaaataacaaagtgtgagtcctccaattttgttatttttcaagattgtcttgtctatttcagattccttgagatcccatatggattttagggtggatttttttctatttcttcaggaaatggtattttggtagggattgcattgaatctagactgttttgggtagtattgccacctctgaaatattaagttgtggccgggcacagtggttcacgcctgtaatcccaccactttgggaggccaaggcaggaggatcacttgagcccaggagttcaagaccaggcagagcaacgtagtcagatcctgtctctatttaaaacaacaacaacaaaaagaagtcacactctcctcctcccagctatgtgaccctgggcaagcccataattggcccctgcctcagtttccccatctgtaagatgtgccatgaagggggctaactctgtcaatgcatgaacagtcctcaggactgtagcttgcacaggtagtgctccatgaaggcagccatgtctcctgggagggctgcctggaggaggagagctctgcagtgggacattaggggtgaggtccgagttgccggtgcaagaggtgggtagggaagggaaggctctttgggtggaggagaaacagcatatatggggcccagaggcctacaggaggcagggaaggaggaaggagagaggagacccagatctggaaaggcccaagagccaagctggagagcttggacgtgatcccacagccagctatggggtggggaggggtgacccaggatcagctttgagctttaagaaaggctagagaaaaggtggtggggttggagaggagaacagggaagggagttgtgggttctggaggggctcaggaactgcagaggagaggtgaacccagggtgcccgagagaggaacggggccaccccgggtttctggcttctgtatcagcatcaggaagatcatggcactgtctgccagggccaggtgaattgggcacgttggctgggggaatcgggaccatgacgagcctggtgaggggctgctgggctggaggagtctcctggggcatcacagggaatgttctggaagcagggctggggcggcacttgggagttagctgacagtaaggagtgacgtgagaaacacagaggccaagtcctcggggagccaagtttgagaggcagacggagcgtggggaccgaggtcagggctcctgtggggccggcctggcccttcccttcccaccgccgttcgggaccctgtggtatcttccgtgggcactggccctgctcccagctgagcggtgcccagaagcaggaggaccctggtttcctgcccctactcagcca

SEQ ID NO: 35676 - DNA, 1186 bp, Artificial sequence
  DNA replication origin
ggccaggtgaattgggcacgttggctgggggaatcgggaccatgacgagcctggtgaggggctgctgggctggaggagtctcctggggcatcacagggaatgttctggaagcagggctggggcggcacttgggagttagctgacagtaaggagtgacgtgagaaacacagaggccaagtcctcggggagccaagtttgagaggcagacggagcgtggggaccgaggtcagggctcctgtggggccggcctggcccttcccttcccaccgccgttcgggaccctgtggtatcttccgtgggcactggccctgctcccagctgagcggtgcccagaagcaggaggaccctggtttcctgcccctactcagccaccctgcccacgccgtggcaagcccagagctgtgctcagttcaggcagccgtgtggccaccctggtgactcctccctgccgctccctgctgtcctgtcctccgtggggtgctgtctctaggcccgggaggaaggctgaggggaaggcctcatgggtgcagtgggtaaatgtccacccggtacctcctctgagcccgcatggtgctcggaggtgcagggtcccagggctgtttctggagcagcaggtgccaggcatggcatgggaggggccttgtggagcccagagtcgcaggtgcacctggcagtgggcagagcagctgcagaggcttggtgttggcagggtgcacatgaggaggtggtagccaaggggacagggcctcccagcctggtgcccgcagcctccctcacacagggaccacctttcccctcacctggcccctcatcctctgtcctgatgtcccctcatggtgcctttttatgcccaccttgcccccacacgtaaccctcaggcagtgggagaagggctgcagcaggggggtgtggctcctggtgcaggggacaggccaggtggcaggagccaggacagcttcagagggagaagcctccaggcccaaaatggggcctagacaggaaggagggagcgggcaggttaagaagggcagtatctgcatggggctgagagggagcagagagggcatctgagggtggctgggggctgtgtctgagcaaggccatggatgggagttgggatgagcctctgtacctgcggacacccctgctgaggtcctctgggaagccggcagtgcacctaggactc

SEQ ID NO: 35677 - DNA, 944 bp, Artificial sequence
  DNA replication origin
atggcaaaacccaaaccccatctctactaaaatacaaaaattagccgggcacagtggcgggtgcctgtaatcccagctactggggaggctgaggcaggagaatcacttgaacccaggaggcggaggttgcagtgagccgagatcaagccattgcactccagcttgggtgaaagagtgagactctgtctcaaaaaataaataaataataaataaaaaataaatgtaaaaaataaacagtcaagggtgcctgagagtgtgaccctcgctaccctctgacccaaagcccccatgggagggaacagctcaacacagccaggagcccggccggccgccgactcacactggctcctggctcccaccccctccagcagccccagaaaaccctgcatgtccagctcacccagagggatggtccctttcaagaaggatctgctggccagacactgcccccaggcagtaggacgggaggccagggagggacgtcgaggaacggggagtccacagcaggggaagccacaagtccttgctggcccaggacaagctgtgctggctcagatgggcatgggccgggcagctgggtgggtagatggaggaaggaagtgggagacttccgagtgagtggggctgtgcagaaaacaagctggaaatggggtggggggaaggtggccaaggaggtgacgctggagctgggaagagcactccaggcaggaggccccgtgagcacaaaggccctggggtcacagagtgaccatgacagtggctcgccaaggaagccagggtgggcaaagaagtgtgggggggcgggtgctgggctcagagcctcaagagagctgagctttgtgggaccccatcctgggtgggacgagaagccgctggaaggatttaaccaggagtgacctgagctgtcctccctgtggcaaagtcaccgctgctggaggaggcag

SEQ ID NO: 35678 - DNA, 1213 bp, Artificial sequence
  DNA replication origin
tcccagagtcactggtggcatgtgccccccgctgccctgcccagtgccccgccctggggaccctgtagtgagtgcagcagccacagcccacccttgttgggggctgtggtcttagggtggggacatcagcctgagggtcattattggaggtggggccagaatgtggctcccgaatgactctttttttttttttgagacgcaatcttgctctgtcacccaggctggagtgcagtggcacgatctcagctcactgcagtctccacctcccaggttcaagcagttctctgcctcagcctcccaagtagctgggattacaggcgtctgccaccacacccagctaatttttgtatttttagtagagatggggtttcaccatgttggccaggctggtctcaaactcctgacctcatgatccacccaccttggcctcccaaagtgctgggattacaggtgtgagcaactgtgcctggccggctcctgcatgactcttagcccaggtgcagcccagcaagcattagcgtgtggagagcccagcgggcattagtgtgtggagagggcatggctagtataggggctagcgagtagagcatgctgtgtcgtctttcctgtagagctggagtgacctgctcaggtgggaagtttggagagactccagctgagtggtttgggcgctgcagggttaacttgagaccccagtaggaggcttctgtatttgtccaggcaagagaagatgtggcttgggccagaatgaggacagaagaggcgagagggcagaagaggtgctgggacatgggggagccaggtggggcatggggggttcctaaggaagggacaggtttgggcagttgtgaatgtgctcgtgtgtgtgcaagtgagtgggagctggcgtgcaggcaggacaggagtgcaggcaggacaggagtgtgagcatgtgtgtgtgcgtgtgagcatatgtgcatgcacgtgcatgaatgtgtttatgtgactatgtgcattgctgtgagtgtgcacacatgtggctgggtgcatgtgtgtgaacacgtgtgatgtctgtacagcctccctggtgggtgactggcgctgggctggagacatgagtttggggagctttgagtgaggggtgatggtggcactcccagggtggggctgagagggggctgctgggcttgggagtggagggcccaggggaagtctttcccctagcaccctctcc

SEQ ID NO: 35679 - DNA, 943 bp, Artificial sequence
  DNA replication origin
gcctgattgccatttgtctggggcctggagagggagccttagctatgtgtttcgatgtggtcagatggcctgtgggcaacagggcagttgccctgcagggacactggtctcagatggagtgagacagcccctgcgtcgacccaccttgctgcctgtgccagctccacagcagcctcgtcagtgtggggcacattgcacacgccaccgtcatctcagttgtccccgtgcgcttggagcctccgggagggaggatgcacgttggcgtgttaatggcgatggcattccaccgtcaccccaggcagaagcagacactgtatgctgcacttatgagacatgtgaaacctccctgcacagaacagagcatcccacatatgtggtcatgggagttgagagagcgacaccgtgagcccaggcttgttccctgggctccaggcgggaaccggcggggcggacaggctcctcggcagcatcgacacggctccctcgtcccctctgcagatggtgaggccccaggagggagcagtgacagctgatcagtctgtggggtggggtgtgtgggtgcgtggggtgttgttctctgcactcgctaggagtcaatttcattttcatcttagaggtgatgggttgttgctgtgtgtggggggattccatgatgagctggctctaggatcaagggacctggggtgttcaggttctcagccctgccctggaaggggagacagcagcacctattgggactggggggccatgtgtgagtttctggtggctgctgtaatatattaaagtactacacctgggctgcttagaacaagaatgtcttctctcatggttctagagcctggaagtctaaaatccaggtgtcggcagggccgagcttcctctggaggctctggggaggaatctttcctgcctcttccagctttcagtggctccagccgttcct

SEQ ID NO: 35680 - DNA, 1099 bp, Artificial sequence
  DNA replication origin
agaccatgcaggctgtgttgggggaaggtggcggaatacctgagccacgcgagaaagacagaattagactcagaagaggagaaagaagcccctaacacaggccagagaggtgggaggctcaggaagagggaggaggggctggcgccaaggacggccaggcctccccagggatgcaagtggccaagccaggtccagccggcagcctggtgcccctgtgagcacgcatagccacaggtctggcactgatgccttctccaacgctgaacccaggggcccgtgtgtggggacggctggccaggctgccccaacctccgctccaggagggtggccgaggcctcctaggttctgggtcctcctccttctcctctccaggatagagacaggcaggaacccagaaaccaagcgatgacagagagcaaggattctgggagctggacaggggctccctggaggccacagggagggacaactgagatggatcaagccacctaaggggtgctggcctcaggcccgagctgggggagagaaggggctggaggtgcagaggcctgcagaggtcagaggtcacaggaggcctccccctcagcattgccatgaggggccaggcaggggcactagggagcaagggggtctcgcacagggacgctggcctagagtgctatgaagaaaagatactgagctccccaaggtgaagcatacaggggtctcctgggtgtgtactcaggacaaaggggacaccccccagctccaggcgggtccaagggacggaccaacaggagcgctcctgggtggggccagtgtgctgagggaagctgggcagggggtgacagggtcagaggccttagggaactgccaaggcaaccaagagggtgagaggcagatcccaagcgctcgatgcaggtcagctcagctactggggagtgaattcacggtgtccccaaaaggttatatccacctcctcatccctggaacctgagagtatgaccttatttgaaaaaacagtcttttcagacataattaagggaaggatcttgggatgaagaaatcatcctagattagccgggaggaccctacatcgggtgactgctgcccttttaag

SEQ ID NO: 35681 - DNA, 876 bp, Artificial sequence
  DNA replication origin
gatggcgacgggcttctgagcaaaatgcgtgagatctggggctctttgctgggcccttggaggagcacaggaggaggcttgagggtcagacatgggaagttctatgtccacaagtcaggggcagaaggctttgctgcagcctccgacatcacttggagctttgggggtacctgtcagagacttggatgccccagggctgggcagaggcctgagggctcttgtccctgtctcccttctcacactggcatcagcccctcctggcattggggatgccatccctgctggtgcatctggttaaaagctggcctggagggtgttcacctcctttgttctgcttgatccagggcagtgacaaggggaccccccggggagcgggggatcctgagcatggcactggatcgaggcgcacgccagctcctgcaggcctcgttttgaagccgaggtctcaactgcagggagcagatggcgtgtcccctgggagtgctggggtgggggcggtgacagggctgtggggccggctctgggcagcatgggcaggtgcggcctcacagtagaggcctggagcccttaggggaagagtcctgctctggctgttgatggtaagtggctccagaagcttccgttccctcgatgaccgtatttcacccctggtggcccatctcagaccctatgagctcccagtcctgggccttggcacctgctgttcctcctcccctgcaaggctccccagtgctgtgtctctgccagtccacggccgcacagtggctcaggctgaagctcccacagtcaccacttgcctggagatctaatgcttgctgcccgctctgggctgtgggctcgtgtgagcagtgcccatctggctggctggctgccatg

SEQ ID NO: 35682 - DNA, 1197 bp, Artificial sequence
  DNA replication origin
tgctctcaggcagtctctgtgctttcttgagcctcagtttccccatctggactgtcaggggaggggctgtgcagagggcggccccttggaggaggctcagtgctgggcagcggtgggcccagggggaagagccttctggtacaggcagcacccgtgcaaaggcccggaggtagcgactggtggctccgggaggaagcatgtgagctggagcctatggtcatggagagtggagactagactttgaagcctagaggtggagagggggggaaactgaggcctgactggcacagacagcacttccctccctggcccccccacagggaggccctgggtctgccacggctttgcagggccgagctcagccatcagcccgcctgcttccctcaatctcattagaaggttggccggttgccatggcagttgcttctgggcctgaccaaggctggccggtctgcagagcgagccccaggaagggctggcaggtggaggtgtcgctgtgccctgtgcaggattcctgggagactgagtgctgcccgaacatctctccacatcctggagaagtagccacaggcgcattatactggggccacccggcctccattcccctacctaggggctcctgctccatccagccctgtggacacttcctgggcggggcaggggcgtagacttagcaggagtgtggacgtgggcacagacagaggcagaggtgggcgttctccagggcgagggtcctgtcagcaaggggtgggggtcagcggaggcctgagaagccacctttacgaagggctctatagaggggtcaggtgggggggtaggactttgtgtgagggggtcccggcgcaggctgtatcaggagcgggggtccctgcggtcagcttggtagtgtcagagcttctgggtccacatctgcctcccacgtgcctccactgatgctggcaagctctcatctgagatcgggtggcttcagtaacacttgtcccaggaggggccatgtgacttcagtcatgctggtcatgcaggggttaagtttcaggcatgtggggcctcagttttcccatctggagagtggcatgtactggtacaccctcaaaagccctgtagaggggtgaatcatgtcccacaaaaagatacgtccacactctcactcctggaacctgggaaggtgaccttacagttgactcttgaatcaatggt

SEQ ID NO: 35683 - DNA, 1378 bp, Artificial sequence
  DNA replication origin
ccccgtgttgtctcagggtcaactgtagttggaaatagggcctccagatgagaccgtcctggattagggtgggcctttctctttaattgtaagagaaaggagagctgagccaggcccagtggctcactcctgtaatcccagcactttgggaggctgaggcaggcggatcacctgaggtcaggggtctgagaccagcctggccaacatggcgaaaccccatctctactaaaaatacaaaaattgtctgagtgtggtggcacgcctgtaattccagctactcaggaggctgaggcaggagaatcgcttgaacccaggaggtagaggttgcagtgagccgagatcgcgccattacactccagcttgggcaacaagagggagactccgtctcaaaacaacaacaacaacaacaacaaagccagaggctggtgcgattgtgacttggggggctgcttcttgagcaggggtgttggggatgcccctctaaggaggggccgtcaggccttgcatgaggggtcagtggggaaaggacaagctgggggcactttggggcttgggcggctggagggagtgaggctggggaggctggaggcaaagcccacccaccctcagcagggccctccaaatcgccagtggggtccactctcacagccaggcagccaggaccagatgcccatctatctggcccacaggccatgagtgaggggcgccctgggagctgcagttttcccgactcctaccggacgccttctccaggcctcagctgtttcacctgtcgccccgcttgttgacagccatggggatggtgtggagatgggacacctgagtcccaggtcagccccgagcctctgtgtagggcaggctggagctgctgtggcatcccaggagctccctccagagctagccgctggctccaagtgagggttacaccttgaggtggcttgtgttgcctgggccagctgaggaagggggtggccaagctgccgcctgaggcctcctgggttttaatcttaagtgcttgtacagcctccagacgggcctgtcacctggcttgtgaagtcagctgtggaggaggtgcagcagcgtccattcattcattcattcaccccctcacatctttgttcacttgtggattccgccggcaggcgctgctgagcagcgggtcctgggctggctgctgggttcacggagctcgtcctcagggtctcagtggtttggggagcacagcatggtggggggcaggggactgtgatgtggcgatgagaaaagctgtgatgttgcctgcagtgcagtgacatctggccgttcttccagctgaggccagaggtctgtgggggcagagcccaagctggcgtcccaccaccctgagaccccagagaaa

SEQ ID NO: 35684 - DNA, 2935 bp, Artificial sequence
  DNA replication origin
caaggtgcccagagagagactctcctccagggaagaggggacaggagaaacaggaaagggagagaagggcaggaggggagaaaacctggccaggaagggctgtgacaaagaacacgcccagcatcagtgatggcccgcactctgtatgccggaggaggcgcaccgtggtggccagcccaaggatccctgccctgtccagcggcggtgcaggtggcggtggagctggtgggtgacttgggaggggccccggctccatctggcctgtcagtggccatggctgtgtccgaggtggttttctcagccacagagtaggtgtgacccccccccagggggacctgtccatgcagagcccagacaccgtcctgggggtggccctgattcataggccagctccctcggccccaccccatccccatctccacccgcagaccagggacagggaagagggccgctgtgggccttatctcctgtttacgataaggctgtgcacggcggctgtgcggcctgcgggagccgcgctgtgtgggcctctgccaagaaacgtttgcagacaagtggggtcaggccgccgggcctccttctgagaattgctgggcttgcggattagtgaggcaggacagagccaagccccagtggccccgagcggttcccgctgccgcacagccggccaacaggtgtagcggctgccgaaatgctggaggccagatggagggctcgcctcggggtctgctgatggggaatgggctgcgggggcaccctggtggggccactctgcttcctctggttcccagggcagacaaggagaaggcagtggttgggtgggctccgccaactgtctgataaccccagctgtcctcaatgtctggcccccagtgggaggctgggggaagctccccacaatggggcagggccagggggcggggcactcacctggaagggcaggtccatggtgccactcccgatctggttcacgttgggcagggacccgccatagtactggcctcggctggggcccagttgcaggtactgggatttctggagctggagctgcgagagagaagccagcagctgcgggaggggtcacctcccaggctcacctcagagtgccagccccaaaggcacaaaaagacccaagtggtgggattgacagcctaagtgcagaagtttgcaggacctcatgacccagatgcttaaggaaaccaggtgtccctccaccaaaaatggcagaatcagaaacccgaggtgccgggacggctccccaggcggggcaatgcaccatgcagaaacccatgaccgtgaacctggggagctggctgccttgctgctgattcggtcagtcagtgaatgggcaagagaggcactggcgggcctgcagcctgccaaggaggcccctcaccagcccaggggagccatttcttatcacggccagaggctgtgacttggcaggccaggcggcttcccactggcctgaatcggaggaagctgtctcagaagcgtggtgatggccttcaaagcgtgggacttgtgatcccgacggcagcccacacagagccagggcagccaagtcagtcccccagacccagcttgagttctagagggtcctgagccccatgttccttcctcatggtccttcccagcctcttgggggctgggcccagctgagcgccttcatctcagctgcatccctgcttcccactccctgatggcatcggggcacagaaccaggggccaggagctccctgatgggtcacgctgactctgaacagggctggaagctggcctcctccccttcatgtggctgatgctgatttgccagtaacagaggcccctgacccatgtggcacgacccgaggcccttggggatgctggtccatgatgcctgccatgcaactgggggaggcagccaccgtgaggagaggtggggctgggcaggcaggaaggaggggtggttgtccactctggcccggcaggggcggttgctagggtggacactgtgtacacaacaaggccgactcgttccttacaaacagctcctggcagtgcgtggagagctggctgccccaccgccccagcttcctagggggccctggacaccggaggcggaagtaaagcccgggaactggccacctgcccggctgagcacctcgcccaggtaaacagctgtttcctgtgagctgaagtggagccgatggtaagattaaccttgtgtgttattgggtggctctcgagggcctgggggtgaggcccagggtctgtgctgggagcccttggtggccgctggccagacacatacacaatgaacatccacagtgtccctcccagcagtcacaccagatgaaacaggccagctccgggctgtggcagagggagggggtgtagggtgggggtcctacagctcccaccccacacctacctgggcataggtcgcctgtggcctcccgtgactttctccaccctcttctgtgtccaagtagcatgacagaaacctgtgctacattcacctctcactgactatatggccctaaaggctgtgacccctcctggacctgtgtccccgacctagagtgagtgctacaggcgggtgtgagagggacacacgacgtgtgacacagcaggtactcatgccacatgtgctttctacacgggctgagctgccagctcccaggaggccagacatcaggggcaagaactccctgaagcagctttgtttacactatgtccccgggccacaggaaacctgggatgcggggacaatctacaggactggggacacacagaactctcatggttcccaagccccatctctgtccaaaccttgcccacaattcccagctcctgtccactttgctggaggcactcaggcttcggagcacagcccctgggccaggagtggacactgagtggggactctgcttttcttttttgttgttgttgt

SEQ ID NO: 35685 - DNA, 1132 bp, Artificial sequence
  DNA replication origin
atgccttgaagcccagagggaaactgaggcagccaaagccaagtcagaggcagaatgaagcgggggctggccacacccgggctcgccacgtcctgcctgctggcctggtttgggagatgcgtgcacacgtgtgtgtatgtgtgtgtgtgtgtgtgtgtttgtgtgtgtgtgtatatagggacggaccatgcagctttggggcacatgctgggattctgctctgctggaccccagatggggatgcgcggctatggcatctgccccagatggaccccaagagtccccagggcctctcgacgcgaccatacgcacttcccgagatgggggtgcggagtggatccatttccatttggcggacgggacacctccacctccctgggagccgcaggggcggccgcttggggagctcagggatccccagcgcccgcacacgggtcggggtcttgcaggctggcgccggggacgccgcggcctcagcctgggggctcatttaccagagagacaggagccgctgccagggcctcccccagaaatccgctgggctgaaaatgcaaagaaccgagactttgagacgctgctgccttgcctggccccaaaggcgggatgcgtgggacctccccccgggctgtgggcctcgggcgacagacacccaacagggtcctgtgcccctcagccccactcaggctgagcttgcaaggtgcccagagagagactctcctccagggaagaggggacaggagaaacaggaaagggagagaagggcaggaggggagaaaacctggccaggaagggctgtgacaaagaacacgcccagcatcagtgatggcccgcactctgtatgccggaggaggcgcaccgtggtggccagcccaaggatccctgccctgtccagcggcggtgcaggtggcggtggagctggtgggtgacttgggaggggccccggctccatctggcctgtcagtggccatggctgtgtccgaggtggttttctcagccacagagtaggtgtgacccccccccagggggacctgtccatgcagagcccagacaccgtcctgggggtggccctgattcataggccagctccctcggccccaccccatccccatctccacccgcagaccagggacag

SEQ ID NO: 35686 - DNA, 1293 bp, Artificial sequence
  DNA replication origin
ggccaccacggtgcgcctcctccggcatacagagtgcgggccatcactgatgctgggcgtgttctttgtcacagcccttcctggccaggttttctcccctcctgcccttctctccctttcctgtttctcctgtcccctcttccctggaggagagtctctctctgggcaccttgcaagctcagcctgagtggggctgaggggcacaggaccctgttgggtgtctgtcgcccgaggcccacagcccggggggaggtcccacgcatcccgcctttggggccaggcaaggcagcagcgtctcaaagtctcggttctttgcattttcagcccagcggatttctgggggaggccctggcagcggctcctgtctctctggtaaatgagcccccaggctgaggccgcggcgtccccggcgccagcctgcaagaccccgacccgtgtgcgggcgctggggatccctgagctccccaagcggccgcccctgcggctcccagggaggtggaggtgtcccgtccgccaaatggaaatggatccactccgcacccccatctcgggaagtgcgtatggtcgcgtcgagaggccctggggactcttggggtccatctggggcagatgccatagccgcgcatccccatctggggtccagcagagcagaatcccagcatgtgccccaaagctgcatggtccgtccctatatacacacacacacaaacacacacacacacacacacatacacacacgtgtgcacgcatctcccaaaccaggccagcaggcaggacgtggcgagcccgggtgtggccagcccccgcttcattctgcctctgacttggctttggctgcctcagtttccctctgggcttcaaggcatctctggaaggagatgaattgcccctaccctgaggagcctgtgcactggacagcacagttcccaccctcatcgtcacaggcccacgtctcccatgcccacagccttttgggggcaagagccacggaaagacccaaaccagcagagttcatgctggatcgaagaaagacttgggggtccccagggctggggacagtagtcagccctgaactctggccgaggctgggacaaagcagcaatcctagccatggacaggcttctggagaggagactcactttagtatcagagtctcattttgcccggctgcccagagaaggcataagggctcaggggccagatggccggactgggggattggctgcatccaaagctggcagagcctgctgatctcaccccagtcagatggcaagtgggcaacacagggtcagg

SEQ ID NO: 35687 - DNA, 1215 bp, Artificial sequence
  DNA replication origin
ctgggatgtgacaagtaggtggtcactgtcagatgtcgggtggaggaagcaggtcaggcctggtcccgccccccaatgaggggctggggtcgaggaggggcggagggaaggcctggcccaccccagctgcgttaaaactcccagggcttccctcctggactccccaaagcaccatcacacaccctcaaacccactgtctggtgtctgggggcaccaggcactcctttccaccaggcctgtacccaggccccacccctacctgggatgcctgtgcccgctgggtcagcctgtcggccgccccccagccctgtcccccatgccctagtatttggaacgggactctgccaagtcatcctgcagatgcccgtgttgtctccacaagccagtgctctgtccgagggcggagtgtccctgccttaccctggccggcgccaccgatgcccaggtgcgtcaggttggccgcgaggttgccggtgctgctggagctgctcagtgcagggaaggtgggctcctcggggtccagcggggtcgggagcggggaggggaagtggatgttggtcaggtcgggcagggacccccctgtgttgtgggtggcggggatcagggctgtagtgttttcctggtcggcagacgggaagatgctgggaaaaggccagaggcaggcaggaggtgagctcatggggcggggctggcggcggggacagggggctggcgggagaaaatcagcgggtgcaaaaggccaccccccatcaggtgccgtgtgcttgggaaaccactgttggctggcaccaggctgagaccttggaaagcagcctatcacccggtgaggacggtggggggcctgggggcagcaacctccctgaacccaggagagggcatcatccctgggaatgaggtgcctgaggggtgggcatgtgggggctctgtcactggcctctggtcacacagtgtccctcttgcagggacttgcaacctcaagagagtggacagaatgccccagggtggacggagcagcgcagcagatgcagtgtgcggggtgggccctgtggagacttacttgattccggggacctcacaggacttgggcctggaccccgtctgaaagagaagacaggagagcctgagccctggggcacaccctgtggggccctcctcctgggcactgggcctccttgaaacggctgatcttcccacaaagcccagagatgcatcatg

SEQ ID NO: 35688 - DNA, 935 bp, Artificial sequence
  DNA replication origin
ggacgcaggcaacagctaaggacggagcagcaacgtgggccagggcaggggtgcaggaaagcaacgcggcagtagaggccagggccgggacggccttgccaaggggactagctctgaccagggcagggcagggcaggggagggagggaggcctgcagcctcctggagaggaaggactacatgtgcagaggccctgaggtgggactggggctaagttcagagggtggagggtgggccagggtggacatcccagaccctggaggcctcaggctttcactgagagggagctgggggccgtgcgaggtcccaagtggaggaagccatggctggtggctgttctaggtggggagggggctgggggcctggggagaggagccaggtcaggccaggtcctgagggcggaaccgacaggacacgctgacaatgggtcaggtccatgtctgggaaaggacagaggagttgggggacacctctgcaatcagtgcagccacaggaggggggtcccgggggagcagggcggcagcagcgccaggagctattgggacgggcgaggggcctgtgcgacgtccctgtggatgtggctgaggaagaaaggagtgtggagctggagacgggtgggggtggtggtgctgggatgtgacaagtaggtggtcactgtcagatgtcgggtggaggaagcaggtcaggcctggtcccgccccccaatgaggggctggggtcgaggaggggcggagggaaggcctggcccaccccagctgcgttaaaactcccagggcttccctcctggactccccaaagcaccatcacacaccctcaaacccactgtctggtgtctgggggcaccaggcactcctttccaccaggcctgtacccaggccccacccctacctgggatgcctgtgcccgctgggtcagcctgtcggccgccccccagcc

SEQ ID NO: 35689 - DNA, 1453 bp, Artificial sequence
  DNA replication origin
gggagagaggacggtaccgtgactgcaagcgggggcggctgtggcccacgagtcaggctggcgctgggcaacagggggccaccagggggcaggcggacgggcgcctgtgggggtggcgggggtggtggctgctgggacgcgggtggaggaggcggcgggggctggggctgcggcggtggctgctgggagcccgcctgggtgaagaaggcgtagggcagctgctgctccagagacagggcgtccatggctacagcctgcaggagaggagagcgtcaggcagggcgggccctggttgtcagcgcctggccccctcgggcccccatagcctggcatgctcagcaggcgaggtggaagggccctgtgatcacaggcagcccctgggctgggtgctcctcacgatgagggagcccaggctagagagggtgggcctcacgcagggccccaagggggtcagctggagctgggcaggacctgacctcctccagcttgttgtgcctgcacccgcactacatgccgtgcagctcaggccagtccaccagctgcagggcaagcccaggatggccatccctggtggctcagtgagcagccagctcccagcccctgtgggtgctgcggggaaacctcaagtgatccactggccttgccttcccaaacccccccgcccaaagccttgcccactctggggatgctggagaggctggggttgctggagataccagcatggcccctcaccaagggctggctcaggccttcgcagagctggaaagaggaaaatcaataagagggaagtgtgtgacgttcactgtctgtgtggaaactcacagccaggggctaccaagctgacagtccttgggaaaggtggggtccctgccctctaagaaaggctgagcgtgcccaggagctatggaacaaaaaccacttagcaggatgcccggcctctgaggaccagtgggtcatttgtgaagagaaaggagtttccagatagagggaaggggcaggtgtcagattaagacagcctagctcacaaagtggctgaagacacagctgccaggagccagcgcccacagctctgtctggatcttgatctgaataagacacctttgtaagcagacaggagacatgggggccgaggggcggggagaaatggagtccgggccgggcattgccaggtaccaaggaactaccattaacttcgttgtaggtggacaatgccactgtggttacattaaaaacaaacaagtgacgggcgcggtggctcacacctgcaatcccagcacttcggaaagctgagacagggtgatcacttgaggttgggagtttgagaccagcctggtcaacaagacgaaactctgtctctactaaaaatacaaaactcagctgggcatggtaggcacatgcctgtaatcccagctacttgggaggctagcacgaaaatcgcttgaacctgggaggc

SEQ ID NO: 35690 - DNA, 1295 bp, Artificial sequence
  DNA replication origin
cctgggcaggtcccctggctctctaagcccctaagtctgcagcccagcaggtctggcccacctctgggggtggggactgagtgaaggccatcttgctggtagcccaggctcccagcatggcgcagtcactatccctgccctgctgcaggacaaacctgcctgggttatgccatctgagacctgcaaggggcagtcacttcctccacctgctcgagggacgaaaggcccgggcatctcactgctatgacccagaactttcagaggcaggtcgggccaggccaggccccggattcagaccactctcttgtcctagcacggcccagccatgctgtgtgcctgcagacaacttgcctgacctgtctgagccagtcactgaatgaggcccagcctgaccggtccagggcctataattgctgtctcccccatgtccttggtggcgccttctgggcagtttggggtagggcttgagtccaggtggggcggggtggggtagggcggggggtggcggtgagctcgcctgcgtgggtgatggaggtgccagcactgttacttagggatggctgacttgggccttcctggagttggaaaggacaaagggatcagagggagattctcatttgggtgagtctgtgcaaaaactcaagagtcccccctcaaccccaggaggctagaagtccttgaagtgggggcaggaagccgtctttgttgtgtgagggtgctggacatggacagcctgacccaagagccctagaagggccgtccctgcacctggcccagacaccctgtgactccaagaaccacccagctccaaggcgaggccccaccttgggagcctcccccaggacctgctgtgtttccaccaaagaaaggacttgggcactcttccacccaggggccgtgggtggtcccctccgtgaggtcagagcagcttgggaacatgggtgtctacccacaggctcacctgcctgccccacccagctcaggcggctgttctttgcagagcacacaatgtttggaggacatttagcctggggctggcagtcggggtcaagtgggaggactcattgtgcccggaacacaagtccctgtttccctggatgtggcccaatgcagctgtttgccacccagcccgcgccgctggagcaagcaggtggtctggacagtcaggaaggtttgtgggtacagggttaaagcccagcctttgtctgcctgagccggccctaggcagaaaagtccaatggtctgagctgcagcccccagccctgggccccaggcgctgtgcccaacgggctgcc

SEQ ID NO: 35691 - DNA, 2751 bp, Artificial sequence
  DNA replication origin
gccagcctggctccccactcagcctcctcctgttgtactttgacatcaggtgtggccagtagaccccacattccatctagaacatttgtccgggagaaggggtgcccacaaggccaacatccagccgccaactttttttaccctggcagcagagcctccccagaaccccgctatcctgggaccatctcatccctgaaatttcaccaagctgagaaacccctagcagccactgctgtgcccggggccctgaagccatccctgtcccctgtagaggggatgctctcgtcctacttcccagctagataaaagagtcgctcctccagggctgaggtcgggctcccttgtcccagggcaaaccgtgagcgccacagacaaggacagtgaagcccctctgcccccatctccagctctcacacgtgtatagggacatctgccccatcagccaagggccgtctgggaccactgcctgtagccccgtgttctggaggcaagttggtgggcagcagtggtctcggggaggcatgggggtcagcctggtgtctgcgcatgcttggtctgcccgcactggctctctgagctctcgggctctggcagcgtgtctggtctcgtcgtgtggtactgttggggatggggctggaggggctggagaagcggcaggtgaggcctgtcccaggtgggcagcccaggtggggctggttcctgagtgaggtccctcttgcatgtgagacaggacgggacaggaattaggagtcgagccagtttctctcaggagagagtcactggaatggttggtgaatttttgggccccaagccaaagcgggttagtctgctgggcagcgagcaggtggcggtgttgtcaagcccatgtctgtgtgtctggtgtccgtcgtgcgctgatgcaggaggcaggcggctcatggaggtatagggacatcagtacggggctctcaggggcagatggttctaggtggagccgagacctgccttccctctgcactgggtctccgaggactcacccatcggtcccacaggcccagaccaccccacacctgctgtgtcctgccttgagtagccactgtgtgcaccctagccaggccctgggccacaggcagctaccatttggtccagtttgtggctctctcccaacttcaagctcacctttctggcaagccctcatggcaggctcacagggaaacctcagcctgtgttcccctgtgtatgccaggcctttttgagcccaagccctcagggacaggatcaggcgctgtcctggaagcctggtcccaccccacaccccgagccccaggacagacccagcttcagaccagctctacgacagccaggacattacctattgcctgcctgcctccctcgcctcgggcaaaccaagccgcaagcttgcggtccttgtttccaaaacctgaagccgttgatttttagggccaagatagcatttttgccacacgtgctggccttcccttccttgggtcacctttttacctcttctctggcgtttgagtgggacgtccaacctcacaagcctcctcgccccagggtgagcgtgtctgtctctgttgtctgcccactgaccaccaggagcaactggtgggtttgtggccggcccctctctgggattgaggccagagactcaggcgttgggatcttcctggaacaaaggggatctctctagaacaaagctcagatggggagctccaagggagagggccagggctttgggtctgtggagacattcacctggacgccttatagggcacatgccttacgctatagctctgagaatggctgtggggcagtggcttcctggggacactagccagagctcccagccccctggatgctgccaggcctccagcagccacaaggtcacactgcagctggggttcccgaggcctcgtccacggccaccccctcctcgcctccacaccccagccagacctcatcccaccatctcttggggaggggctccgagtgtctcctttctagcgtctccaccacccataaggtcccctagccccctgctcctgtcaagggacagcccctgtcaccctgcctctgagagccctgctggcctcagatagcaggagtagggccccgggtcctgcaggctggcagccctgggcaggggctctccctgtgcctgtcctgtgctctctcagctggtggctggctctgtgcgcccatcctgtccatgtacgtggcctgcgtcgtgtcctttgtctcctgtcaggagtcaccaagtgcactttctgtcctgaatgtaacgtctgggcacttcccgccttggccctggtgacaggttctcctctggggcctgttgggtgggggttcctcatccctgtggcccccaacttccctgtgatggagatagaggctgccttacccaggcttgaggagaggagatggggatggggccttgggaaggggctttcgggttgcagaggcctcccaggagcaggtggcagaaaaaaagtcatccaggattggggggcacttctggaaccccaaaataagcatcatcatcagcctcctgccgtctgggaggttccaggggcctcttgtcttccagccgggcttgggaggtgccgacttcccacctggcctcaggccgtgaccacagcaggcctctcttctgtctgcagcacacttccaccctgggcagcgtgtttggggacgcgtactatgagcagcagatggcggccaggcaggccaatgctctgtcccaccaggtga

SEQ ID NO: 35692 - DNA, 992 bp, Artificial sequence
  DNA replication origin
tgccgtctgggaggttccaggggcctcttgtcttccagccgggcttgggaggtgccgacttcccacctggcctcaggccgtgaccacagcaggcctctcttctgtctgcagcacacttccaccctgggcagcgtgtttggggacgcgtactatgagcagcagatggcggccaggcaggccaatgctctgtcccaccaggtgagcgggcgcccaggctgccagccggccggtgcccaggacagatgcttgctgggaccctcgctgggacccgggccttgcgagtcagagctgcacgtgctcggggggcccgtgcctgcccctcagctttgcccctcggcccccgccccgtcccatctgcgggctatggaggctgagtccccggcaggggtggcctagcgctgcctcccctggcatctttgcccacctacagagcggaggccgagggcagagggtgagggggggcaggcagcaaacgccgggccagacagggatgggaccgtggctgtggacgcggcgcctcggcatggaccgtgcacgcgggtttgccgggaggtcgtgctggctttgcgtggaggccaggatcgggggcatccagggggcttggtggcagcctggagctgctcactcatttgctcatccattcatccattcatccagccagtctctagggtggcggggaggccccaggtggcgggtggagtggggttcgtgcttggcagcctgggtgccgagcatcctgcagggacagagtccccagctgcgggcaggacagccacagcagccaagggcttggggtggccagctgggcaggcccgcggtggccctcacagcctggtgtgcctcccttcccagctggagcagttcaacatgatggagaacgccatcagctccagcagcctgtacagcccgggctccacactcaactactcgcaggcggccatgatgggcctcacgggcagccacgggagcctgccggactcgcagcaactggg

SEQ ID NO: 35693 - DNA, 1994 bp, Artificial sequence
  DNA replication origin
ggcgcctcctccctggggcggcgtggggctcactctctacctgaccacgggctggggatggcggatgggctgggggaccgggaaccaaggaaggcagtgagagctggacaaacagtcggaaaatgcgccacggcccacagccctggcggaccatgcgcgcccctcccctgagcctgcccgccacgccgggagctgacacttcccgcatcttacaggggacggctcaggccccggggctgggggcgagggagccagtgcagggagggtctgcaggggcgggaggctcacggcctccgatcccagcccagccctgggcgggcgggtgggtggacggcccggctcgcggcctcgcgattgggcttcgcgggaggtggacaaccgggggcgggctggcggggggcgcttggcggcattgcaagctcagaatcacaagctcggccgttggcgagggacggagcacggccgtccccgggctggggaggcgccgtcgggacggctgagcggcagggtgccggcgtgcccgctcacaggcggtccatccggaaggtgtcctcggtggctgggtcggccagaaccatgtcggggtcgttgagcatgtgcagtccgtcgagggtcagggggtcgatcttgagttcgtccaggggaaactggctgtcggagtcgaagctgacgtcgccgaccccggccagagagctggtcagttctttagagaggctggggggggactctcctgtcactgggggatggggtggggacaaaaggcactgcttagccctggctccatcgctcgcatccatgtgtcggaccaggcatgcccgccgggcgactctgtcccctgggtatgctggcaatgtctggggacattccagctgtcatgactgggggaggggccagcacatgagatgctgctcagcaccctacagtgcctggaccccagagaccagtctggccctagatgtcagctccagatgtcaggagcaccaaggagaagcctcgggccaagggctgtgtcactgatgcacgtcagcatgacctggcgagggcagggacctccccggctccctcagccatgagggctgctcggcacgagtcactgagaagcaggctggagtgactgtggggacccagctgctgctagggctggagggaatcctcagttcccccacaaagacccgggttcaaacctaggcttccacctacactcaggttccaggtctgagaaatggggctgaaacgccctgtctttctgggctcttgaggccattgcgggggtcagattctgattcttctcctgagtctgaggctggcgcgtccacccttgaatttctcgtcaactgctgcctacacccgaggggtgggaaggaggtgctggattctgcactcagagcccaggccacagtgggggagcactaaatacggacacttccagcctggaagaggccagtgaggactgccagggggcgcatcaccctcaatccagcagccctgactcataagggaatcatcttcttcagcagggagacagggtctgggttctgtgctagatggagccgggtcttcctgatatgtgccatgcaggacggggctggcttgtccccaggagcccaggcgccgtgctcagactgcttgggcgtggttgtcacggtgcatcacggccctgacctgttagctggctgcccaggctgggctcaccagacagggcccaccccacagccgtccctgaccctggtgcacattcagctgacaggtcagtggcctgggcagtgggcaccgtgtacccggctgcttcacctttacccgggctgcttggccagacaggaggccgccgagaggggagagtgaccgtctctatcctatgcacgggacgtctggtccagaggcatctccctggcctggcctggcccgaagcccaggagtgagtcaaattcaggggagagggggtgtggcctcctcaggcccccatcaagcttgggtcacaaccccggccctgtcaa

SEQ ID NO: 35694 - DNA, 2167 bp, Artificial sequence
  DNA replication origin
tctaaagaactgaccagctctctggccggggtcggcgacgtcagcttcgactccgacagccagtttcccctggacgaactcaagatcgaccccctgaccctcgacggactgcacatgctcaacgaccccgacatggttctggccgacccagccaccgaggacaccttccggatggaccgcctgtgagcgggcacgccggcaccctgccgctcagccgtcccgacggcgcctccccagcccggggacggccgtgctccgtccctcgccaacggccgagcttgtgattctgagcttgcaatgccgccaagcgccccccgccagcccgcccccggttgtccacctcccgcgaagcccaatcgcgaggccgcgagccgggccgtccacccacccgcccgcccagggctgggctgggatcggaggccgtgagcctcccgcccctgcagaccctccctgcactggctccctcgcccccagccccggggcctgagccgtcccctgtaagatgcgggaagtgtcagctcccggcgtggcgggcaggctcaggggaggggcgcgcatggtccgccagggctgtgggccgtggcgcattttccgactgtttgtccagctctcactgccttccttggttcccggtcccccagcccatccgccatccccagcccgtggtcaggtagagagtgagccccacgccgccccagggaggaggcgccagagcgcggggcagacgcaaagtgaaataaacactattttgacggctgtcttttatatttctgagcacacacagagccctggcgtccaccggggcaggcgcaaagtggacagagcatgcagggcggcggacccccccacgaccctcctcgccctgtctccatcccctcgaagccctgcctcaccgcaggcaggcccatcggtggccacctttgccgggaagtgaccggaaggccccgtgaggggtcgaacgcggaggcaggggttacctcttggggctttacaatccgtggcccctcctgtcctgcactgtggtcaccggtcctgtcatagatgctgttaatttaaggtacaggcagaggtggccaggggagtttcattgtggtttttttttccttttagtttctagttacattttggttgtagatgactcgcttaatcttttaagccaacacttgcctgagagcatgtttttatttcagaaatccaactttacctattttttaagctaactggaaatggaggccatgcgccccaaagcagcccgccacccacctgagtgtaagaagtgagtccggcttttgggtttcaccccaagttatctcaaaacaaaagggctggtcaggctgggcagggccttgtcaggagctcacggtaggcagaggtgcctctgccagggccacagaacagacttccgggaaggggccttggcttttattgagggtctctcaaagacccagcctgccagcctctcccagaggtgcctgctagtccttagagtgtgtgtgtgaagatgccatgaccagtggcagctgagacctctctgccccaagagtgtgggggactggcagggagcgagggtccccgagacgaggaccacggtcctccctgagaacctgggtggaactggcatttcatcccctctccaccctaccctctggctcctagcccacaccccctctcttgggcagcgtggtctgctggctgccccttcttggcagctcagggtcgtggcaggtggacttggagacacacagcagtgtgtgttttagtggcaggtttcaggagcacctctaagaccagggtgacagggtacttgggagctgtcctggaccctccccataccacgggccctgcaagggaggcatcagggctggctttgttttctgctgttcttggaataggaactgctgttctgatccccccaaaactgcattgcggctctcgctcgctcctgcctgccgggacagcgccttctgctgagtccgtttatttgtagtgtcatggctgctgctttcactggggtcctgggcaccctggcttctgtcctcagagctgggtttgatcctagcaaccatcccttcctctctttgcccggcaatgcctttggcatgtgtctgagcagccaagtggccactcataggagaaggctccctggtcacgttgctcctgctgccgt

SEQ ID NO: 35695 - DNA, 1114 bp, Artificial sequence
  DNA replication origin
tccctgtttctcagcctccattccatgctgctagcaagcccaggtgctctgtttagcaccaactatgtccagggcccttgatgtccaccacaccaggaaactgaggcccaaggcagaggcctcacttgctcccagtgcagcccagtcaggggtacccatcttccagggctggccactgaagctctgagagggaagggtctggcccaggtcccccaggcctcaccatgtctgaccctcagggtgcgattctatgagggccctgagctggtggccgacagcaacgtggtcttggacacaaccatgcggggtggccgcctgggggtcttctgcttctcccaggagaacatcatctgggccaacctgcgttaccgctgcaatggtgagccgagggccagcgggccgtgggcggggagtctgcacacaggccctgctggccttctcagccctcacccgcctgccctctccctgcagacaccatcccagaggactatgagacccatcagctgcggcaagcctagggaccagggtgaggacccgccggatgacagccaccctcaccgcggctggatgggggctctgcacccagccccaaggggtggccgtcctgagggggaagtgagaagggctcagagaggacaaaataaagtgtgtgtgcagggagtggcggctgtggtttttgctgcatggagacagtagggacgggcctctgagggagggtcgggccagggaaccccaaaccaaggcctcagtgctgcagctgctgctgagtgccagtggcctgccagggactgtccaactgtgatttgggatttggggaggcccctgggtccacctccacgacccaccacctcatggtcacaggcctggatgccagccatggaagagctgagaccccgatacagtgtccgccccaggattctggggggcaggttcccagttgtcccagctttggggaccccttcccttgcctggtctggggtgtgtgtgtgtgtgtgtgtgtgtgttcggaagggttgaggcacctgccagtgcacctgccacgcccatgtgtcacccctgagggaggagggaggggctcagaaaaaagaggaagagccagtgacgaaaacgttgg

SEQ ID NO: 35696 - DNA, 1378 bp, Artificial sequence
  DNA replication origin
cgaactcctgggctcaagcgatcctcccatcttggctttccaaagtgatggggttacaggtgtgagccaccacgcctggaccagcataggctcattctaactgccctgtatctttcctatcgtacagatgaggggaccagggtcacacagcccctgcctggccagggcactcccacctgggcctgtgtgtccccagcccagcccaccacagagggtggagtccccacctgatgtagcccacttggggccggtgctgcaggaaccaacgataggacttcttgtccttccaacccacgtttcgcgggtccttccacagcagccgcacctgggactctgtgtctcctgtatgccacagagcgttccgcagctgttccccggggcctgtggaagacttcacagcctgccaatacccaggaaaggtggtcagagacctcgtgggccaccggagcccccctagacaccttcctggagagacagttgggagcagcaggtggtgggcggccagggggatccggatgagagacccacaaggaagccttcttcaggggccaaatggcagcttggggataggtcacagggggcagcagtggtctgcaggttcatgagaggatttgggagtccgtggacagattcagggtctgggaggatggggggctctgcagaaggacttggaaactaaggaaaagtttagggctgtgtgagagggtttagggtccataggaagactggggggccctgagaatgtttgagaatttgtgcaaggaactgggaggatttggggactgcgggagcccagaggagggctgggacagctttgaggtccatagtatgaggctagggggctggggggctctaagggctgtaaagggttttacggagggtcatgggagggcatgaggaccgcagaggtcaggcacggacggccctggcaccttgagttggatgccaggctcggccacagcacggaaggggttcgcctgccaatacgtttgctccatctgcttccacatgaccacgtagaagctggagctgtcctggtagccaaagatgaagcccgcatagtcgtcatccgtgaccgtgttcacatggaacgtgccctcgaagtccacgccattgaaggcagtgtaacctagggatggaaagagagcagtggcctttccgaacgccagccccagcccccggaacctggcacccagaacccaaacctgccccctgggtcccgatctgcctgcagacctgcaccattcccactcgcagagcccggactcagccacgccccccatctaccattggccacgcccctccagagtccacctccacttggccccgcccttcccgagcccgcccctcctctggccccgcgccttctcctcccggg

SEQ ID NO: 35697 - DNA, 1179 bp, Artificial sequence
  DNA replication origin
gcacccagctgagccaccctgggagtgagagcccgtccccctcactagccttcccttggatgggaccattcattcttaaagttcctgtgggccggacggggtggctcatgcctataattccagaactttgggaagctgaggcaggtggatcacgaggtcaggagttcgagaccagactgaccaacatggtgaaactccgtctgtactaaaaatacaaaaatttgctgggcgtggtggcgcacacctgtaatcccagctactcgggaggctgaggcaggagaatcatttgaacccgggaggtggaagttgcagtgagccgagatcatgccactgcactccagcctgagtgacacaatgagactgtctcaaaaaaaaaaaaaaaaaaaaaaaaaaaaagcttccatgaagttgggactctgttccaggccagcctcaggctggcctcatcctaatgaagtcattctggcctggtcccaatcttggggctctggtcccgtggatttctgcagggatccgcaaccaggccgacaactgccctagggtacccaactcagaccagaaggacagtgatggcgatggtataggggatgcctgtgacaactgtccccagaagagcaacccggatcaggtgagggcaggccagactccagctgggtaagccctctgggtgaactgcaagttggattacccagcccacagcccagcttagagcattttacactgccagagaaatgacctctcggtccgagcagcctgcggtgggggtttccttggggtcaggaggaccttggctgtgcggctgggttgggtgggaggctttctgatttcctctgtctgattatggacccccgcatgctgccctccgcaggcggatgtggaccacgactttgtgggagatgcttgtgacagcgatcaagaccagtaaggaggccacctggggtgggcgtccgggtagcctttgacaaaacgctctggagagctcattgtctctggatcccacctatccactctagggatggagacggacatcaggactctcgggacaactgtcccacggtgcctaacagtgcccaggaggactcagaccacgatggccagggtgatgcctgcgacgacgacgacgacaatgacggagtccctgacagtcgggacaactgccgcctggtgcctaaccccggc

SEQ ID NO: 35698 - DNA, 1425 bp, Artificial sequence
  DNA replication origin
actgcgtgactgtgcccaactcagggcaggaggatgtggaccgcgatggcatcggagacgcctgcgatccggatgccgacggggacggggtccccaatgaaaaggtagatctacggctcggcacggtggttcactcctgtaatcccagcactttgggaggccgaggcgggcggatcacgaggtcaagagatggagaccatcctggccatcatggtgaaacccctcctctactaaaaatacaaaaattagcggggcgtggtggtgcacgcctgtaatcccagctactcaggaggctgaggcaggagaatcgcttgaacccgggaggcggaggttgcagtcagccgagatcgcgccactgcactccagcctagcgacagagcaagactctgtctcaaaaaaaagaaagaaagaaagaaagaaagaaagaaagaaagaaagaaagaaagaaagagaaaaagaaaaagaaaaaagaaaagacagagctgtgagcggggcctagggaagtgggatggggcgtggcttggatgaggggcgtggcctccgtggtctaggaggggcgaaaggttccttgaggaggagacgcgtcctcggagatttgggaatctgaggagtgtgacctttgccttctcgacctgatctcacccttaacccaccctgtcatccaggacaactgcccgctggtgcggaacccagaccagcgcaacacggacgaggacaagtggggcgatgcgtgcgacaactgccggtcccagaagaacgacgaccaaaaggacacagaccaggacggccggggcgatgcgtgcgacgacgacatcgacggcgaccgtgagctcgatgggggttggggggcgaggagaggcggcgggcaccgaagggcgggattcggctccggggcggggcttggctggttttggaagccggatggggtaagctggactagggcgccctggaccaaagaccatggtggggcgccagaaaaatgcaagctgggctgcaaggccaggaaaaacgcagggatatttggaagggaaggtggtccctgtgtcaatgccgcaggcaggaattaagaggacaagagattcgagcctggggtttaggacctgggaggtgacaactttacagatggggacataggggctcagggtggcacacacgggcacccagctgagccaccctgggagtgagagcccgtccccctcactagccttcccttggatgggaccattcattcttaaagttcctgtgggccggacggggtggctcatgcctataattccagaactttgggaagctgaggcaggtggatcacgaggtcaggagttcgagaccagactgaccaacatggtgaaactccgtctgtactaaaaatacaaaaatttgctgggcgtggtggcgcacacctgtaatcccagctactcgggaggc

SEQ ID NO: 35699 - DNA, 870 bp, Artificial sequence
  DNA replication origin
tcctcgccgcaggggatcgccagtcccaacgacccttccacagccagggaacgcacgcccagaccccccgccaccgccgggcacgcacgccccgacgacccctgcccccctctgctggggatgcccgccctcatccttcctcccctcgcccatgagggaacagctctcctctcctctcccggttgcgcccttgccgtcatcaaggcaaagtcgtgcctgacccctgcgacaattgcttccatctcagagctccaagcactggcatatggcccttgaactttccacatccgagacactacgaggtgcggcccccagggcccagctcgaagccctctgaccctctgtggcccctcctcccccagtgcaacgcccacccctgcttcccccgagtccgctgtatcaacaccagcccggggttccgctgcgaggcttgcccgccggggtacagcggccccacccaccagggcgtggggctggctttcgccaaggccaacaagcaggtgagaggtgtgggggccccatttttggagcagaagggaagggggcgtccattttgtttaccagtaaactcctcttccagcctccttccagcgggaggggtggggagaggaggggtccgctgcgccagggctgatcggtttggggcaggatggaggggagaggcaggatgcggaggaagtgtggaggaggtgggaggtccggaggtgtctgcgtggggtggtgacctctgagttcccctcccctaggtttgcacggacatcaacgagtgtgagaccgggcaacataactgcgtccccaactccgtgtgcatcaacacccgggtaaggcccgctggggaggaagaaaggatcgcgggaggtggggcgagcg

SEQ ID NO: 35700 - DNA, 1199 bp, Artificial sequence
  DNA replication origin
ggaggtcagcgcaggccgcccgccgctcgccccacctcccgcgatcctttcttcctccccagcgggccttacccgggtgttgatgcacacggagttggggacgcagttatgttgcccggtctcacactcgttgatgtccgtgcaaacctaggggaggggaactcagaggtcaccaccccacgcagacacctccggacctcccacctcctccacacttcctccgcatcctgcctctcccctccatcctgccccaaaccgatcagccctggcgcagcggacccctcctctccccacccctcccgctggaaggaggctggaagaggagtttactggtaaacaaaatggacgcccccttcccttctgctccaaaaatggggcccccacacctctcacctgcttgttggccttggcgaaagccagccccacgccctggtgggtggggccgctgtaccccggcgggcaagcctcgcagcggaaccccgggctggtgttgatacagcggactcgggggaagcaggggtgggcgttgcactgggggaggaggggccacagagggtcagagggcttcgagctgggccctgggggccgcacctcgtagtgtctcggatgtggaaagttcaagggccatatgccagtgcttggagctctgagatggaagcaattgtcgcaggggtcaggcacgactttgccttgatgacggcaagggcgcaaccgggagaggagaggagagctgttccctcatgggcgaggggaggaaggatgagggcgggcatccccagcagaggggggcaggggtcgtcggggcgtgcgtgcccggcggtggcggggggtctgggcgtgcgttccctggctgtggaagggtcgttgggactggcgatcccctgcggcgaggagggtagctggggcggaccacccctggcggtgagggagtcgtcggggcgggcgtcactagctatgtagggggttgtgggggcgggcgtcccgggtggtgacggggatggtccttgggttgggcgtccccccgcggtaaggaggtagtctggccgtgcgcccccggaggtgagaggctcttcggggcgaacactcccagtggaggaaggggtctcccgggcggcgagagattggggggcggtagagggagtcgtcagggcggtggagtgtcggggctagcgcacctcgttgacgtcggtgcagtgcga

SEQ ID NO: 35701 - DNA, 1033 bp, Artificial sequence
  DNA replication origin
gggcctcgtgggcggtagaaagcgagcagccacccagctccccgccaccgccatggtccccgacaccgcctgcgttcttctgctcaccctggctgccctcggcgcgtccggacagggccagagcccgttgggtaagccgcgttagcacccgcgccgtgcccacggccccacaacggactgtaggacccgtgagaggcccgggatccaggctgtttggggctcacggactgttcgtaggggacgtgccgggcgcagaaagcaggtggcgggaccgagactagaggagcgcagtggggcctcggaggtccgggttcgctgcaacggtgggagttggtggtgggattccccggccccatgacgcctcaccaggtcccctgccgccgcaggctcagacctgggcccgcagatgcttcgggaactgcaggaaaccaacgcggcgctgcaggacgtgcgggagctgctgcggcagcaggtgcggggcccgggtgcggggcagggagtgccagggaacggaagggggtctcagttcccagcgaggagagaggaagtacccgagaaggtggagaggagatggggagggaagggggtcggcgggtagggagtccttggcgaaaagaggctgtagaaagggaccccggggtagagagaggggagacccgagggatgaggagaggttgggaccccgctgattccatcccacccctgcaggtcagggagatcacgttcctgaaaaacacggtgatggagtgtgacgcgtgcggtgagcgcggcggggcggtcgggagagagaagagacgggagacagagacacagagacagagacagagagccagggaaagctggggaggaaaagagacggaaggagatggaggctgacggagaggtggacggacgaacgggaatgggatggggtgtgtagaaacagagacaaaaagagacagaagcggtgagagagttttggggaagtgagagacgccacggggcagaaaagcgggacagagactcagagaagagaccggggagaccccgcggt

SEQ ID NO: 35702 - DNA, 1144 bp, Artificial sequence
  DNA replication origin
agcgccgcgttggtttcctgcagttcccgaagcatctgcgggcccaggtctgagcctgcggcggcaggggacctggtgaggcgtcatggggccggggaatcccaccaccaactcccaccgttgcagcgaacccggacctccgaggccccactgcgctcctctagtctcggtcccgccacctgctttctgcgcccggcacgtcccctacgaacagtccgtgagccccaaacagcctggatcccgggcctctcacgggtcctacagtccgttgtggggccgtgggcacggcgcgggtgctaacgcggcttacccaacgggctctggccctgtccggacgcgccgagggcagccagggtgagcagaagaacgcaggcggtgtcggggaccatggcggtggcggggagctgggtggctgctcgctttctaccgcccacgaggcccgcggggcctatttatccccaaggcacggccggccccagggacggcccaccacagccctgcccaacgtccagcctcaaggtaaacagatggcgctggcccctgcgttcaagtccccgcccggaatgccccgcgaagtcgcccgcggctgaatccgacatggtggggaaactgagtcccggggtctgtggagagagctggtggggcagggagtcagggggtactgcccccactttcattcactgtgtgtgtgcgtctgtgtgtgtgtgtgtgtgtgtgtgtgacggggtgtggctgtatcgcatcctcttgcttcagtctcccatgtagctgggactacaagcccgcaccaccaagtccagctaatttatttttatttttatttttatttttagagaccgggtctggctatgtcctgcaggctagtagtctcaaactcccggcctcaagcgatactccccacataactgggattacaggatccagccatagcattcagctcattgattgattgattgattgagtgcttgctgtatgccaaacctgagttccagttccaaacaaggcaggctccatggccacgctctcagctcacacttcgggaaacagagtcaccagcgtctgaaaaaataggtccacccactatggatcagactgactggccctccactcctcctgaagtgcttcaaaactgggtaagttgctg

SEQ ID NO: 35703 - DNA, 887 bp, Artificial sequence
  DNA replication origin
tcccgacctcccctgggtaccaagccaccttaagcatcacaaggaaacaggcattacctggaagagtccccaccaccagtttctttccaaattgctgctggtgggccaaggtgcggaggctcatgcctgtaatcccatcactttgggaggccaaggtgggtgtatcacctgaggtcaggagttcgagaccagcctggccaacttggtgaaaccccgtctctactaaaactacaaaaattagcggggcgtggtggtgcctgcctataatcccagctactcagggggctgaggtgggaggatcacctgagcctggggaggcagaggttgcagtgagctatgatcgtgccactgtactccagcctgggtggcagagtgagatcctgtcacaaaaacaacagcaacaacaacaacaaaaattaaggaagggaattccaggcagagaggtgagcttgtgcaaaggccctggggtaggaagtaattttcttgttggaggaggtgaggaggccgatgtgactggagcagagtgagggaggaggggggagatgggttagagagatgggccaaggtgggatcacatgggggccttgcaagctgcagcaaggaggtgggttttattctgagagcaatagggagccatggagagtgtgtgagcaggggaggaacatgatttatgattttaagccatctcttgtggctgcaatggggaagaggccaggcaatgtcaaggcaagagctggtggggccagggccagggcacggccacagggtggggaggagaggttagatttgtttgttttgaagcctgagaggactagagctactgatgagcttgggaaggaagggagggaggagtctcagacgcgcccagatcttgaacccatcacaag

SEQ ID NO: 35704 - DNA, 1203 bp, Artificial sequence
  DNA replication origin
aaatggagggtgcctcgcacatagtagatgctccctgtgcattggtttaaaaagggagtggggctcggcgcggtggtcacacctgtaatcccaacactcagaggctgaggcgggagaactgcttgaactcaggagttcgagaccagcctgggagacagagtgagactccatctctacaaaaaatataaaaattaggccgagcgcggtggctcacgcctgtaatcccagcactttgggaggccgaggcgggtggatcatgacgtcaggagatcgagaccatcctggctaacatggtgaaaccccgtctccactaaaaatacaaaaaattagccaggcgtggtggcacgagcctgtagtcccagctactcaggaggctgaggcaggagaatcgcttgaacccaggaggcggaggttgcagtgagccaagattgtgccactgcacaccagcctgggcaacagagtgagactctgtctcaaaaaaaaaaaaaaaaattagctaagcgtggtggttcgcacctgtagtcccagctactagggaggctgaggtgggaggatcgcttgaccctgggaagttgaggctgcagtaagccgagattgcaccactgcactccagcctgggtgacagagcgagaccctgtctcaaaaataagtaaaaataaatgaatggggatagtcttacgtactgggcctggcacttggaaatgatggttgctgctgttcctgatgcctctgccactgttattataccattactatttttgctatgattattatttagtggacgtatacagcaaaacaactggaagcacatggtctgtggtggactctagacctgaccacttaccagctgtgtgaaattatacaagtgacttaacctctctgagcctagggtttctgttgccattaaggtggcataggaagcctgggcaaggtggctctttcctgaaatcccagcactttaggaggtagaggcaagagaatcacttgagctcaggagtttgaggctgcggtgagctatgattgtgccactgcactccagcctgggtgacagagatcctatgtgtgtgtgtgtatattaatatatatttatttatgttaatataaatagagtgactagtagctcatttattcctctcatactctcatgtgatatatggttgctgctgatatatatggagcccggtgcggtgtgtcacgcctgta

SEQ ID NO: 35705 - DNA, 884 bp, Artificial sequence
  DNA replication origin
ggaaagtgagagtctgcgagctgggcccgtacgcctccacgctcatggtgcctccgggtagggccctcgggccggttccgcgctgcactcgagcccgccgccgcgctgaggcctaggccgcaggcctcgggtcgctgccgctgtcgcccccgcgcgcccggaaaggaccaaaccgcgcgccccggcgccagccggaccgagaggtaacagtgccgagccgccgccgctgccgccgagcccctccgcgcctcagctcccctcgaagccgccagccgctcgcagcctagagcaggaactgccgccaccgccgccgtcgccgtgcgcgtgcgcgagcccgacgccggcggaagcgcgcgcgctcttcgcgggcgcctggtgcccagcaggaagacgggacgcgcaccgcgcacgcgcagggggtggggctttcaaccgccgctgcggcggcagctcgaggacttggtcccgccccaactgctaattggggacgcccgggcggctggcggtgtggacttggtggtctgcacctgtggtcgctgcgacggtgtttcggtttaattgagcgctagccgaataccctacataggtggtctcggaacgcccaactggagagactgggcagggacggtgcgctcccactcctggcaaaagctgcttggaactcagtttccccatctgtaaaatggagggtgcctcgcacatagtagatgctccctgtgcattggtttaaaaagggagtggggctcggcgcggtggtcacacctgtaatcccaacactcagaggctgaggcgggagaactgcttgaactcaggagttcgagaccagcctgggagacagagtgagactccatctctacaaaaaatataaaaattaggccgagcgc

SEQ ID NO: 35706 - DNA, 1516 bp, Artificial sequence
  DNA replication origin
gcgtttaggcgctgaggcttgttaaggagtcggcagtgccgtgtaactcttttggggcgttctggctaagtcataaaaacaattctgtaaaaacaaagtctgttctgagttttaagagttcagagctcaagtgcacagggagatgcgatttattactaacagtttgaaggtaatgtgatcacataataaaatgcagggcatgcccctttgggtgaaaggtcagcatgggagggggccctccctgctccggggcttcagggacgggagctggtcctcacggccccctcccgctctgcaggcagccctgtgccagccagagcagcctcaaggacatcaactgggacagctcgcagtggcagccgctgatccaggaccgctgcttcctgtcctggctggtcaagatcccctccgagcaggagcagctgcgggcacgccagatcacggcacagcagatcaacaagctggaggagctgtggaaggtggggctgcccagcgggccgacccgtgccttcgtgtggtttctggttgcggggaggggagtgtcttcagagacggcttgacccagtgagaccgctggagattctctgaaaggaattcaggcagacctctgccacctctacgtggaatgacctcagggcaccttggtcaccttccatccaggcagccttacctgaccgagaagatcctggccttggggaaaggaaagctctggctgctggaatttttcttgtcttgccggggtgaggatgggtggtgggaggggaagaatggggctggctgtgggcagacttgtcctgcagagcctgaacctgcccagacaggtgggctgcgagaatgtcctggggaaataggttggtgtcgaggtcggcacagtcagctgagacagaggggagaggagagggtgccgggtcaagtagtgggtgcctggccctccttccacagacagccctcacttttccccacggaagcctttctgtgcttccagctgtttaggattttgtgataaagtagttctaataactaggctagaagttttcatttgcctcccattcagtcagaaatctcacataggaaatgaagtgcaagttaaaatatttttttaagcattgttcagccgggtacctttccacttggattttccggttgccagatgatttcatgattcccgtttatatctgaacagcccagaaaatgtcctgtccccaccagcatggcactcactgagggagctggcccccaggggaagagctgcgggcccatgttggtctggctcagggttagcagacgtgggagacaggcctcccgggctgtggacacagcgagagaaaccggtggtctttgtggcagcctgcgaggcgggttagctgctctcgttcacaagctgggcatacttggaggaagcagctggctctgaaggtgccctctgctgtggacagtgtgtcaggctggtgcctggggctttgtaggcaggttcacccaagtaccggaaccccgctggggtgcggagcagcagctg

SEQ ID NO: 35707 - DNA, 1419 bp, Artificial sequence
  DNA replication origin
cctccagacgggattggcctgtgtgtgttccggggactcctaatggcttctctttcagatgtgcccttggtggcatttggggctgcaggtgccactcacggcgcctgctctcacggcagaggcttgctgtagggcccgcctcatggggcctcgggcatgtggaggccaggcccgggcctgtgctggaggctaaccggggctcttgtttttcatgtgctcagactcaagataacatcactgtcaggtgggacctgggccttaacaagaagagaatcgcctacttcactttgcccaagactgactctggtaatgaggatttagtcataatttggttaagaggtgattttaagttttaaaatatttgtgaccataagtagcataaattcctagttccacccttgtaaagtgccccttaatttgaactctccctggtggaagcgacggcgtgggttaaaatggccacctctctcacttttttacctcaagacatgcggctcatgcagggggatgagatatgcctgcggtacaaaggggaccttgcgcccctgtggaaagggatcggccacgtcatcaaggtccctgatagtatccttcatgtgaagagggtgtggccggctggtgggagaggaaagtgggggcatcaggtggaggccactgtggatttgatgctcactgctgggccagcatctcatgctctgtggtgggtgctggttggcatcgccctccactgctcttaggagaatcacagggccttcaccttcaggggacagctggttgtatggttgcttcccctctgcccgaatggtgatgttggtgatgccacttgtgtggcgcgtccctgggctgactctggaagttaatgtatgccgcttgtgtggcacgtccctggactgactctggaggttaatgtggctgcaggagcgccttacctggacgctgactctgcacacggaggttccagaagccagtggtcacatgcagaccctctgagcacacacttgctcccaggccatgtttgggaatgtgcagtgacctcatggtgatgcagcctgccggccagagtggggcagctgtaaggcacaggtgcagtcagaggcttgggtggggaggagtcctgggagaagacaccgcgggtcagactcaggctgcctcttggtgactggccaatgctgctggggcctgaccattcagcggtggcctccacaggggtagggagagttgtctcccacacccaccctgggcctgacaagctcatcctgaacacgtgagaccggttttggggctcggggtcgagggaagggtgttgcctaccggccacagcctcctggagggcagtttgcttgtgtatgtggagccttttgcttggccgtactgggaggggtgttgtttctgtggaactgtgagaagagctgctgtggc

SEQ ID NO: 35708 - DNA, 1213 bp, Artificial sequence
  DNA replication origin
agagtggggcagctgtaaggcacaggtgcagtcagaggcttgggtggggaggagtcctgggagaagacaccgcgggtcagactcaggctgcctcttggtgactggccaatgctgctggggcctgaccattcagcggtggcctccacaggggtagggagagttgtctcccacacccaccctgggcctgacaagctcatcctgaacacgtgagaccggttttggggctcggggtcgagggaagggtgttgcctaccggccacagcctcctggagggcagtttgcttgtgtatgtggagccttttgcttggccgtactgggaggggtgttgtttctgtggaactgtgagaagagctgctgtggccaaagctgggttctgcgagctctgcctgcccctgctggccacatgtgcaggagctcccggtgaggtcctggggcccaggatgtggctgctccctgctggtgagcgctgctggcttcgctgccgccctctgcgtctctgaaaggggcctagatgggtggctgggagtggcaaggaggaactccaggctggctgggggtgggacaccggctcatggtgaggtagagtctttcttcaaggatgctgtccttctggtctctggtctggtgttggctgcacgtttttagcgtttggtgcagagccagcggtgtcttaagtaactaaattttaaaaacgctgtttaaagagcgtgtaccaagggtggcccagaaaggtcagcccggcttttgacaaggatgcaaacttaactcagcacacagattatggcgatgagatcgccattgagctgcggagcagcgtgggtgcacctgtggaggtgactcacaacttccaggtggattttgtgtggaagtcgacctcctttgacaggtacgtcttctcccatcactgccccctgttccctggttgccacctgtggcatctttatgagccctccccgtcactgtggagtggggttccccacccagctctgcaaactcaggatgtcggagaggcggccacagctgtgcgtgtcgccaaccccaaaccctcctcacaggatgcagagcgcattgaaaacgtttgccgtggatgagacctcggtgtctggctacatctaccacaagctgttgggccacgaggtggaggacgtaatcatcaagtgccagctgcccaagcgcttcacggcgcagggcctccccgacctcaaccactccc

SEQ ID NO: 35709 - DNA, 2440 bp, Artificial sequence
  DNA replication origin
tcccaggctccgtctatgatcggagcagccagggtgagtcgctcagcaggggacctggccgaccccttgtcctcacaccgggatgctggccgttcccatggctgcagctttaggtgcccccatctttccttcccctcaagggcggtgcctggctcccttggcctccccgcccctagggcatctctagccccggaacactcctggggtgtttgtctttaaccagagtttattcatttgtgtttcctggtgatcaagctagttagctttttcttgccttttggtagggcagggactgcatgtagtacaaatagaacattttcataaaaaggattttttttttcctttggtaaatgcagggtgattttcatttattttcttttttttgtttagagacagggtctccctatgttgtccaggctggtctcaaactcctgcctcaagcagtccttctgctcagcctcccaaagtgctgggattacaggcgtgagtcactgcacctggccaatttgcaggtgtttttttttttttttttttttttggagaccgagtctcgctctgttgcccaagctggagtacagtggtgtgatcttggctcactgcaacctccccctctgggttcaagcgattctcctgccttggcctcccgagtagctgggattacaagcacccaccaccatgcccggctagtttttgtgtttttagtagaaacgaggtttcgccatgttggcctggctggtctcaaactcctgatctcaggtggtccacctcggcttcccagagtgctgggattataggcttgagccaacacgcccggccccaattttcagtttttaagatctgtgtaggccaatgattcccagcagactctcctcggggaaggtgcctgcccaagcacccagccccaggcaggctgctgtagttaacatggagtcctgcgaatccgcatcttcagcctgggcagagccaggacagatgtgcagctccggctgactggctggtggggtgggtggggtatcgctggggtttgaccgaggcaggtgacacctgccgtgttccactgtgatttgcaggccggccttccagcatgtacttccagacccatgaccagattggcatgatcagtgccggccctagccacgtggctgccatgaacattcccatccccttcaacctggtcatgccacccatgccaccgcctggctattttggacaagccaacgggcctgctgcaggtgagcatctgtggctgcggctgggtgtggccctcctgagagctcttgagggtgtgcttgtctgcgaggccctggcctccttcggatcaccctggactgctgtctttcagggcgaggcaccccgaaaggcaagactggtcgtgggggacgccagaagaaccgctttgggcttcctggacccagccagactaacctccccaacagccaagccagccaggatgtggcgtcacagcccttctctcagggcgccctgacgcagggctacatctccatgagccagccttcccagatgagccagcccggcctctcccagccggagctgtcccaggtgagcccgcccctgggacgggacttacctgagtgagggtggggctatgcacctgaaacattccctctgaagagccccagagagctggcctggcccatgtccactgtctgaattacctgtccctgggctggggtcatcagagtgggtctcctgggtcttagtttggggacgggttttccattcttttctctggggctgctgagggctgggtggatgtgagcacccttggcctgtggcttgcttacctcctgaccttgtctttcaggacagttaccttggtgacgagtttaaatcacaaatcgacgtggcgctctcacaggactccacgtaccagggagagcgggcttaccagcatggcggggtgacggggctgtcccagtattaaaaggcaagcccccctggagcaggcctggccccaccccagcctcaaggagaaggatgggagggggctctccccagggagctgcactggaggggtggtatctggaaatgtgtgctgtgcctggtgggggtcataggccctcagggccagcttggcctgtgcccttcactgctagtcagggtggctcctcaccccaccctaccccatcctgtctgctccggggaccaccgcgggacctcagtttcctcatcagagtcggggagggcagctcgggctctccctcactgtcctgtgtgctgggtacctgtggggctcaggtcgcagcctctcaccgcctcctgcccttctccctcctgacaggtggcggcggaagagctaagcaacgtggcttagtccatcagcatcttattctgggtaataaaaaataaaaataaacggatacctgttttccactgctaaaactgaagcaccactgtgtgagcaacaggaagggagagc

SEQ ID NO: 35710 - DNA, 2088 bp, Artificial sequence
  DNA replication origin
aaaataaacggatacctgttttccactgctaaaactgaagcaccactgtgtgagcaacaggaagggagagcgcacgagggagaggagccgaggccgagcgccccctgctggcccgcggcggcgaggagcagagggagcggaggaggggccggcccgcgggagccgcggccaccaggaggccccgctccgtcccatcggggctgcggccagggcggagggaggaagaccctcatctcagagtagccctttcctctgttcttttatttctttttctctttgattgaaaggggactacgtcttagcaggaaaaaaaacttcgcatttctgtgcccgagcaggctccttgcaaagacagcagcgtgcggggcagagccccgggagggcgcgtctgtccacgcctaccggacgcgccgaggtcgcgctgcctgtgttctccgagggccttcatttaaagaaaataagggtgttttgggtttttctctttgtttttttcaagattcttttaaaggagtactgaagaatactttcctaagtttgtctgtaaaatcttagcggtggacctgggagatttgagaagcttccagaaacagtttaaacaagccagcgctactggagaagaggagcaacacctgtgccgcggccggaggagttttgttgttggttttagcttccagtggcttctttctgcggggcatcaggctgctggggtagccgcccgccgagcctggaagctgctcgttctccgctggactcagaagccaagctgcttcccgcctagactcggcgcagggccccgcaccggtgaggaaggtgcttttggccccattgcgaggggccttggccaggactggccctgtggccaggaggcgagaaggtggctgttcccggattgacggctttttcccgggggcctttggaagatttggtggaaggacaagagggcctgtccctgtccccgtccccaggaggtaccgacagtccctgtgctggttagacacggagcgctgcacaccgaaagcccaaattgggagctctgcctgccggcaactttgctgatggggtgattgctgcttctggggggtaaggaaacaagttacagaaattaccgcgttctgtgtgaagggactgagggtgtggtgtcattggcagagggtcattttaggagagctgccccagcccctcgaacgcctggcttggggtgtcattctgcctggcggccaggcctccagcttcccctgccccgggcctggggctgtcactggccctgatccgaacacctccagattccggcttctacatgggacagacggggacgcacaggccaccttccttctggcagggactcttatttattcccattgctctagggctttcggtttccccttcttccggtaggccgcgtagaggcatgcaccgggtaggtttccgcggtgaccccgcggcggcctgagggacgctccctgccccatcccggctgttgggctgggccgctttgcctctgcttcgccctgtgctgtgttctccagctttgtagcagcagccttgacaaacccaggcgcactgtaccaaggcaatgtaacttttgattttcggtcaatttaagttcttttgtcaccaaatattaataaacagttttgacttcacaccaaggttggataaactgcagggggtggagggtgctggggttttgccttggctgagtgacgggttggggtgtgaaggaggccagagggagacaggcaaagcccagaagggacaggtctgccttgcaggactgaagggcgacccctgcccctgggcccttcccgtaggcagcacctgggcctgtccgggcggctccccggagtggcgcgttaggcctctggcaggtggcctggaggtggaaaggcctatccgatcaccaagactgaggggcgccctccccaccacccaggcaaggagtccaaggagaccagcggagcagaccacgcggcatttattgttgggcccgcgtccctgcccgccccgggttagcggcagccgcactcgtccaccaccatgtcctcatactgccgcagcaccacgttgtcgctgttgtcaaagaagagc

SEQ ID NO: 35711 - DNA, 1228 bp, Artificial sequence
  DNA replication origin
aagctcacgtacagccgccgcgcgcgacaagcgcccccggggccgccgcccaacacgggttcggcgtcgcgccgcggccgggccagggggtggcacaggcgcgggtcgagggtcaccagcagcagcgaggcctcggccaggcgcgcgcaggcggcaggggcccgggggcgtagcgccagcgccaggcggaggctgcgcggccatgaggcgttgcgagcccaagcggcgcccagcagctccgcgcgcactggcggccccagggcgggcaccaactggcggagcagcaccggcccggggtccgcgcccgcgccctggcccgcttgcgccacgctcagctcccagccgccctccggggctgccgccgccgccgccgcgaaacgcagctccaggcgggcccggctcgggcgctcagcgggttccacagccgacaggtcgaagacgactgtccactcagggcaatgccccgcggccgaggcaggctccgaggcccgggtgggcgcacctggggaggtaggaacaggaactcggctcgcgctgcgtccccggcctgcccatggggtctcggttagggacagggaggaaggtgaacgctggggctcggggcgcaccgtctgtgggaagggtgtgaagcggcggggtgggctgatggagtgggggcagggcatgagttccaaggaaggcgccctgcggggtgcggcggggggggtgggctgccctcggcggggggcataggaggaggggtggccgaagtgggagacatgagccagaacctgggcccctggggaagccatgctagggtgtggggatggcatctgcaggaaggcattagtgtcaagaggtgggggtgggcatggggtggggacagggcttcagcatcaagcagaaggactggtcttgggaaccccctgacatgtgtccccggcgtgcagcagatgacgaggaaagggtgaggtgcggtggccgaagttgctagtagcctggacagggcgggtggggaccctcggagctgctcgggcatccccgggccactctcgaggctcgccctgcgaggtctggcctccaggaccagtgtccccagcgaaagccccactcaccgcggtccgggatgtggcgcacgatgtttccggcgacccccagctcctccacgtggcacggttgcagggtgacccctggggacgtccgccgcgagccagacctggtctcctgggggtcccggcgtcgaaacagg

SEQ ID NO: 35712 - DNA, 1467 bp, Artificial sequence
  DNA replication origin
attagtgtcaagaggtgggggtgggcatggggtggggacagggcttcagcatcaagcagaaggactggtcttgggaaccccctgacatgtgtccccggcgtgcagcagatgacgaggaaagggtgaggtgcggtggccgaagttgctagtagcctggacagggcgggtggggaccctcggagctgctcgggcatccccgggccactctcgaggctcgccctgcgaggtctggcctccaggaccagtgtccccagcgaaagccccactcaccgcggtccgggatgtggcgcacgatgtttccggcgacccccagctcctccacgtggcacggttgcagggtgacccctggggacgtccgccgcgagccagacctggtctcctgggggtcccggcgtcgaaacaggcgccacatgaccgggggaaccggccggagcctgggggcaccctggggctcatcgcgcagtcctagagcctggagcagggcggcggctgggcctgggggcacgggggcgcgggtcaggggcagcgagggcagcagcagggccaggaggaggaggaggtggtggccgcagggaccttgctgcggcggtggcatcttcctcccaggcgatgaccagagagtgcgcagggtccgcggcggcccgggaccagtgggctgagggcggggccggtgtccccggaggggcaggggtcctggggggcgtggccgggaactggaggcaggatgagggggcggggtcccaggggaggtggcggcggccctagaggagcagagttggagggggtggaggggcggccaaggacggggagcgtggccggggtattcggggtggggccgggtccacgggggcggggccgaggggttcagaagcgcttgtccttcaccaggccgttcctcagtggcttcctgggggtcagaaccggcgcaggttagcctgggagccccacgcggccgcctggccctctttcccgcttcttctctggccgtttcacaccccctggctccttttacccggccaggcccgggcctcgccttgtggcttcctcctcgccttcaccctgcccctccttgccttcaccctgcccctccttcaacctgccccgtaggcacgtatgtcccccctggcaccctggcacttcctccttgcttccccctctccaattaaaccttcctcttcccctcctccctgcctctccaggccgctggagggcaaaacccacgtaccggcctgggcctgacaactccaccgcctccacagtgggaccctgcacatcctcctctcctctgccacccaccccacgaaggctagtccttgactccagtggccctggctggcatctgctgtctccacctacttcccttccatgttcttttattttccttttttttttttggtcttactctgtggtccaggctagagctgtggcacaacctccaaggctcaatggatcctcccacctcagcct

SEQ ID NO: 35713 - DNA, 3751 bp, Artificial sequence
  DNA replication origin
tgttggccaggctggactcgaactcctgacctcaagtgatccacctgcctcggcctcccaaagtgctgggattacaggtgtgagccaccacgtctggttagtttaaaaaataattttaaaaagcccctattccattcctcagccacacaagccacagttcaagggctcagtggccacaagtggctggtggctcccatgttggacagtacaggtttagaacattcccatagttctagaaagttctataattcaaggctctctagagggcagaatcagatgatagaaccaaaaaggaaggaaggaacagttcatttgaaggtgataagaattatggagaaaaggccaggtgcagtggctcatgcctgtaatcccagcactttgggaggccgaggtgggtggatcacctgaggtcaggagtttgagaacagcctggccaacatggtgaaaccctgtgtctgctaaaaataaaaaaattagctgggcatggtgatgagtgcctgtagtccaagctactcaagaggctgaggtgggagaatcgcttgaacccgggaggcagaggtggctgtgagccgaggcattccagcctgggcaacagagtgaggctgtgtctccaaaaaaaaattgtggctgcaggtgttaggtgttagttggtctgggggtgacagatgagcagatgagcagagactgaaaggagtgaagggaggtgctgaatgccaggcactggcatgctgggtcatggggacagcacgtgcaaaggacctgtggcaggagcccaggagctgtcaggagacagagcaaggaacagggacttggtgagagacacttccccacgtccagggtgaatccaggaccctcgggcagctcatctgtcagatggagactctgtggaaggacaggggatggccttcgggcttattaagatcctaatggggccgggcacggtggctcacacctgtaatcccagcacttcgggaggccaaggcgggtgggtcacatgaggttgggaattcgagatcagcgggaccaacatggtgaaaccccgtctctactaaaaatacaaaattaactgggcgtggtggcacatacctgtaatgccagctacttgggaaggctgaggcaggagaattgcttgaacccgggaggtggaggttgcggtgagctgagatcgtgccattgcgctccagcctgggcaacaagagcaagactctgtctcaaaaaaaaaaaaaaattaaaaaaaaaaaggatcctgatgggctgcggcagaggcctttcctgcagcgatggccaggctgcacgtacagacctggaagtctcatcatggtggtggtgtccaaagtgagggacaagctcatggaggatctggacacagagtaccccaggcctgtgagagtcgggggtcatagagggtcagaggtcaccaagatgaggaggggccagcaaggaacttccaagaccgggcacagtggctcgcgcctgtaatcccagcactttgggaggccaaggtgagaagatcgcttgagcccaggagtttgaggccattctgggcaacatagcaagacccagtctctactaaaaattaaaaaaattagccgtgtgtggtgttgctttcctgtagtcccagcttctccgggggctgaggtgggaggatcacttgagcctaggagtttgaggctgcagtgggcccgatcacaccactgcaccccagcctgggccacagagcaagaccctgtctcaaaagaaaaataaacttccagggagctccctgggccacatggggacactgaggcagggaagatgagggtctggttgggggtgcacggctaagtgggggacagtgaggaaagggcatcctgggaagtggagatgggcagggcaggcgaggcaggaagggtggctttgaagaggcccacggggagcctgaggtgtagcccagggactctgctgggggccttagtgcagagtggaggtcccccaatgtgagctgccctctcctctctgcctgctgctcccccaggtaccacaatgtgggcatccttgtgctcttcctgcacgatatcagtgacgtgcagcttgagttcaccaagctcaacatttacttcaagtcccgcggcggctcctaccatcggctgcatgccttggcagcagacttgggctgcctcagcttcggcttcagctggtgagtggtagggagtgctgggcagggagggaggtgtggcctggtgaggtgggtgtgtccagaaaaggggcgggaccaggcagggaaggaggcggggcccggtgaggtgggtgtgtggcatgacaggggaggggcctcatgatttgggtgggactgaaggggcggggctatacaggaaaggagtaggacaagggtggggccaactgagctaggagtggggctgggcagaaaaggataagccaggtgaggtgggtggatccaggaaggggaggggcctggtgagataggttgggccaggcatggaaggggaagagctagactaatacagagcaagccaggggtggggccaagcagggttggggtagggctaggcagagaaagaggtagggctttggtgtggtggggaagacctggcagagaaagggaggcgctgtgcagggaaggaggtgggggcttggtgaggtgggcggggcctggcagagaaggggagggactgggcagggaaggaggtggggccttggtgaggtgggtggggcctggcaggaaaggggagggactgggcagggaaggaggtggggtttggtgaggtaggtggggcctagcagagaaggggagggactgggaaggggaggaggtggggccttggcgaggtgggtgaggcctggcagggaagtggggggccaggcggggaaggatgtggggccttggcgaggtgggcggggcatggcaggggaggggaaggacagagcagtagtagaaacaggtgggcagaggtgggcaaggatgggataagggggcaagggtgggtctaggacgggataggacagggactgggtagggcaccgtccccctccacccacggcctcctgactcctcccaccgcaggttctggttccgcctctactggttcccgctcaaggtcctgtatgccaccagtcactgcagtctgcgcacggtgcctgacatccccttctacttcttcttcaatgcgctcctgctgctgctcacccttatgaacctctactggttcctggtgagtcggccccggctctcctccacagtggcggtcccgtcctcgtcccaatccctgtcccctcctcaggcagtcccggggaggggcacgttaggtggcagacagcccgtgtggagggcccgggacaggagcacatggctgtcagcagggcagtggcgtgggggctttcttctcactggcacctcccctcccctctcgcagtacatcgtggcgtttgcagccaaggtgttgacaggccaggtgcacgagctgaaggacctgcgggagtatgacacagccgaggcccagagcctgaagcccagcaaagccgagtgagtgtggaggggcccgcaccccgcgttccctcctttagtgtcacccgtccaagcgtgttcgtgggcaggcccccaagacccagcagcagatgaggccgacgcggatgctgccccccaagcctactccaaaacagagactgcaataaaggcgtggacgatgtggccagtaccctgaaggacaggacagtgaggaaggggagggagaggctggggaggggcaggcagggc

SEQ ID NO: 35714 - DNA, 1286 bp, Artificial sequence
  DNA replication origin
gctggagtgcagtggtgtgatctcggctcaccacaacctccgcctcccgggtttaagtgatgctcctgcctcagccttcgagtaggtgggattacaggcatgcgccaccatgcccagctaatttttgtatttttagtacagacagggtttcgccatgttggccaggctggtctccaactcctgacctcaggtgatccacctgcctccacctcctggccaaaaattaaccattttaaagcgaacagttcatcagcttttagtccattcacagtgttgttcaaccaccccctctgtctaggtctggaacattatcatcccccacaaaaggaaaccccgtcccattagcagtcactcaccagtcctctcccccagcccctggcagccaccaatctacttcctatctctgtagatttgcctgttctgggcatttcagatcactggagtctcacactgtgtgaccttttgtgtttggcttctcttactcagcatcatgtttttggggttcacccacattgtagcatggatccgtgcttcattctttttcatggctgcatagtattccactgtgtggaggtaacctatctattcttcatccatccactgatgcacattcgggttgtgtctgccttttggttgtgtgctgctgtagacagggacacatgagtatctctttgagtccccgttttccattgtcaggcacacaccctagtggacttgctgggtcatggtgaccgtttgtgtgtacatggccttcagggctgagtgaggagagtggacaaacagtcatgggggccagggatcgctggagagatgtgggcaggagacaacagtgcctggactggggtgggggtggcatgggccaaagaggggaccctggatgggggtcctagtgtaactcggctgcagaaggggccaggccgagatgaaagttgtcgcagaggcggttcatggggcatctggaggcagctgggctgcagggcaggtcaccaaggcaggggccaggaagccgcagatggaggctggagggtctgtcttgggggtctgcagaaagggagtggccagagaacagggagcaacccagagagttccaggttggtgtgggcagagcacagcatggcttcccgcctttttttgttgtttgtttgtttgtttgttttgttttgagacagggtctggctgtgtctcccaggctggagtgcagtggcaacatcttagttcctgccaccacctctgcctcccttcaggactcaagtgatcctcccacctcagcctcccgagtagctggg

SEQ ID NO: 35715 - DNA, 1264 bp, Artificial sequence
  DNA replication origin
ctcagccttctgagtagctgggaccacaggtgtgtgccaccacccccagcgaatttttttgtgttttttggtagagatggggtctcactatgttggccaggctggtcttgaactcctggcctcaagcagtcctcccacctcagcctcccaaagtggtgggattacaggcatgagccacctcgtccagccttagttgctttttgtaaatgacactcacaagttagctgattatttccatgtctatttattgagcgactactgtatgccacagctgagacacagctagtaacgggtcagagaaagccctgtgccctcatgaagctggccgtgtggcaggggcaacagacggtgcagtacgcagtctatcaacagcaataagtgtggatgagaaaacttgtgtggagagaagaggcagtgtgctgtgttggggaggtggggaggggcagtttttagcagggacaggggtggccccacttaaggggactgagtgagggcctggaggtgcctggagcaggcaggagaggcagggactgctgtccaggcaagtgggggccatgccatccaggcctcggaggccacggtcaggatttgttacttatctgtgggctgggagcagaggagggatgtcaccctgggttgggcatctaccccaggggtccaggagggggctgacagcaggagctggagcctgaagggactcccaccaggattgagctgaggggaggggatgggagcaaagtggccaattttagaaatgtttagaaggcagagctgatagtatttgctgccaccctagaggtggtgtgaaaggaagagggtgaggatgatgctagggtcttgtgagatgggggctggtcagggagaccaagattctggattcagggatggagacaaggcaggggtggcattgagtgtcccaacagcaggtgggatatgagtatgaagaggtgggacaggccaggtgcggtgactcactcctggaatcccagtactttgggaggccaaggtgggaggatcacttgagcccaggagttcgagaccaaccttgggaatatagtgagacgccatctctacaaaaaataaaaaaataaaattagctggatatggtggcgcgtgcctgtggtcccagctcctggggaggctggggcaggaggctgaggctgaggcttgagcccgggaggtcgaggctgcagtgagccaagattgcaccactacattccagccaggttgacagagtgaggccctttctcaaaaaacgagggag

SEQ ID NO: 35716 - DNA, 957 bp, Artificial sequence
  DNA replication origin
agtgatcctcctgcttctgcctcatgagtagctgggaccacaagcctggcgtctttgtgttttaagcagagccctcccggccatcccctcagggcccctaccgtagaagacagatggtgggtcatggaagaaggggtagtcggtgccaaacagcaggtaggcactgtagctccagctgcccaggtagaagagaaacttccaagcgctctcgggcatcttggcggcatctctgggctggaggcagcaccgcttcgccaggggctatgggggagaagacaggcgggcagccattggtgctgggggccagagactgctcctttggggtggggaaactgaggcccagggactccccaggccgggcagcactgggaaggcctgtcccccatgcccacagccacctggagcataaacagagcccacaggcgcctgccaaggctaaacttagtgcccagctgtccggccgccgcggtgctgggaggggagtgaggggggaggccccgaggggagcaggagggctctgggggccagaagggggacacttgggcttacgatgagggagacggatggatgcgtcagcccaagggagttgggctggtgggggtgacccttgaagggaacatggagggggttatatgggggcatcttgggaaacacagagagccccatgggaccgacacagaggggagaggaagaacttgtgaggaagccgccccctcagtgggagattctggagaggctagagggctgggagagactagggggaaggtgtggcggggacatgggaacctgggggcgatgaaaggggaggaggggctggaggcagaaaaaggggacaggaggcggaaaaggtgtcacaggcgaggtgagaccctgaggggacattgggagtgcagaggaagctgctggctccaaggcaggggttggggagtgcggtgggtgggtgggtggcggggcgcg

SEQ ID NO: 35717 - DNA, 1144 bp, Artificial sequence
  DNA replication origin
tgctgcggatgaaggggtcgccggaacgtgggtgggggcctcgggctggagaggcccaggacgttggagccccaggataaggtctctcgggccgccgcgcgcccccttcagacagtgctgcgtgggggaaccgggtagatgcgggggtgtggccgggctggggtgagtctgggacatggggggcccgagacaggtgggatgtttgagacgtgggggaccgaggcacggccctttccggtcagtttgggaccagggggccccgcgcggtggatggctccggccaccgcgcgctctttccggcagggccgagccagacactgagaagcccaggaccgggaacgggagggctcggcgcaccgcggcctgcgccatgcgcctccctgccatgcgggctgcgccccggcccggagcgaggtccgctgcccgttttctgctgggtccgtgcggcggcggggccggcttgcccgctgtaatcgggaagaggcaggagctgcccggtcgctgccttgtgcctatctggggtcagcgccaccctccgaccagggatggcaagggcctgggtgctctggccacgccagtggtcgctcccttggaggtgacatggcccggggcttcagggttggactgtgctgcctccaagaggcgacagcagaattccccagtttctgcggagaccatcgcccctgcgagagagtgaccatgatggtgacattggcgcctgaccccactcacttccctggggaggggtcgctgtggcaggagctggttggaaggtgtttgggcctttagcttggcctggacacccccgtggaccagctggtgtcaccccgcccgtctggctggagggtgcagggacaatgtgcccagcgccaacaaaggggcctttctctgctggccgggaagaggctggcccttgtgaggtcgatgatgggatgttgtctgactgccactctccccactcccgtccccatatcacccacatgagggagagaccccagccacacccctactgtgggagggggagacagggctgtccagggcccctccctgggtccgcagtggtctttatcctgcttgttgcccctgccttcttcccagtttccagctgggaagcccgagacccaggagggcaagccgtccccca

SEQ ID NO: 35718 - DNA, 1867 bp, Artificial sequence
  DNA replication origin
gccatggtgaccagatagtgctggccgagagggtggagggaggtggctgggactgtccacggctgccccacaggcctggctggacctttgagagcatatccccctcgtccccctctgcctgccaggcaggttgtggcgttagtcacatctctggcctccggctggacctgaactattggccaggccaagcctcgtgccccacccctacactaggcccctagtccacatggagtccacgttcaagaataaagagtggggccaggcacggtggctcatgcctgtaatcccagcactttgggaggccaagacaggcagatcacttgaggtcaggagttcgagaccagcccggccaatatggcaaaaccctgtctctacagaaaatacaaagattagctgggtgtgatagcaggcgcctgtaatcccagctactcgggagactgaggcaggagaatcccttgaacctgggaggcggaggttgcggtcagctgagattgcgccactgcactccagtctgggcaacggagcaagactccaactcaaaaaaaaaaatgagctgtatgtatgtaggggcagatggtgacaagtgccaagcagacatgaagacatgaggggcgtgtgacttcagagtcgggggcagcctgagcaggtggcagaagagccatgcaggtacctaggggaacagcatttcaggaggggggaacagctagtgcaaaggccctgaggcaggacagagcttggcatgttggaagaacagcagaaaagcccacaggcggagggaaacagggcgctgtgagggcagccagtgaggacttgggctttccctgagtggaacaggagccatagagggctgcaagcagacgaggaacaggccaacagcgtcgcagccaccttctcacctctgtggggtgaggaggaagccaggataccagacggaagagggtagtggtggtagtggtggtggtggcggggagcggggggcaaggctgtgcagatgcagagaagtggccagatgcagggccacctggatgtgttgtgggggactcggtgtggggcaaggggaaggtgtgttcacctgtgcccctgaagttcaggtgcaggtgttcgggagccagcgcggctgctgcaggactcatccctgcatcctgcaccttgaaggccaggtgtggggacatcctgcgggctaggatggagggggggtgcagcagtgcctggggagatggcggtcctaacagaggtgaccagtgtcttcctcgatggccttcagtggctttgggcacagggccttgtcaatgaacagtgcattggaaagtcacttatggtggtcccaatgatgtcacagtcgatccagattgggagtccctcccacgttggcacccactcctgcagcctctctgcaactcatgtattaacctgatgttggggagccccccccccgggttccccagggtcacagcagcaagtgaccctcagagaaccccctaatctcagcagcccccatcacacctttgtcccagtagcccgctgtgcagacctgcagaagaagatgcctgggaagtgcccagggtacccgcgtccaagctggaaccccattgccaagctcctggtgtagggcagagagctgcgtctccactaggtgcgcctcccaacgccctggcgtgggccgtgtccttttgaagaatgagaatgtttcattgagcctacgcctcctgaatgcgggagggccacgggatggtcccaagactgtgccaaggcgtgccaggcctcgggtccttgagaaggagcgagggctccaagaacggtgaggtcggagcgggccggggcgatggagcgggagcggcgtggcgtgctggagggccgggagaagcgg

SEQ ID NO: 35719 - DNA, 1118 bp, Artificial sequence
  DNA replication origin
accccaggtgctgctcctgccgccccgcaaaccctcctccaaggcagagtcctgctgtggcagggtcctggggccaagcacccagccgcgatgagaggcggccgcaccatttagggagggaggtgggtgggtggcagcagggctggccggagcctcccagatgtcaccattgagctgtgcccacccgaacaacaaaaaggagctgccaggctaggttctagggggacaggcaccctggcagtgggcatgaccggtgcagaggtccctcggtggcacagggctgtgaggtcaaggggcgctggatggggatgcatgccctttgacctctgagcctggcctgggcttatctcccagggaaaagataagactgggtttccccaagccacacccaggcctattcatttgaaaccagaccccgtctctggttgccagggcaggacagcaagcgacccccacccccagcctggtaggggagggaagtggcaaaagaggactccctggacagggacattaggaggggtccaggccgagctttctggagggaggagaccttggggtgggtggggggacactggcctcaagactgacctccgcccagccttgggtgcctggtccccagctgccagtagagccgccttccattcctgccctgcacccacccgttggcagcctcctggctggacccgccaaaaagaaattcgaggctgagctggggctagtgggtgggtgggtggcgcctctcccgtgaccgatgggcgccatggtgaccagatagtgctggccgagagggtggagggaggtggctgggactgtccacggctgccccacaggcctggctggacctttgagagcatatccccctcgtccccctctgcctgccaggcaggttgtggcgttagtcacatctctggcctccggctggacctgaactattggccaggccaagcctcgtgccccacccctacactaggcccctagtccacatggagtccacgttcaagaataaagagtggggccaggcacggtggctcatgcctgtaatcccagcactttgggaggccaagacaggcagatcacttgaggtcaggagttcgagaccagcccggccaatatggcaa

SEQ ID NO: 35720 - DNA, 2317 bp, Artificial sequence
  DNA replication origin
ctcccctaccaggctgggggtgggggtcgcttgctgtcctgccctggcaaccagagacggggtctggtttcaaatgaataggcctgggtgtggcttggggaaacccagtcttatcttttccctgggagataagcccaggccaggctcagaggtcaaagggcatgcatccccatccagcgccccttgacctcacagccctgtgccaccgagggacctctgcaccggtcatgcccactgccagggtgcctgtccccctagaacctagcctggcagctcctttttgttgttcgggtgggcacagctcaatggtgacatctgggaggctccggccagccctgctgccacccacccacctccctccctaaatggtgcggccgcctctcatcgcggctgggtgcttggccccaggaccctgccacagcaggactctgccttggaggagggtttgcggggcggcaggagcagcacctggggttaacgctgaccctgcagggcccctccggctttgctgagctgaggcctgagtttttcctgccctggcccccacttcctccaggccactaggggttctcattttgaatcttggtgcccctcatgatagcggcatgacttctctgtgcctcagtttcccccgatgccaaccagggctgctcagtggcctctaggggccagggtgaagcatggggacagggctgtgctgcctctggcctgcaggagcaggttgtggctgtgtgaggggcggggtgggggtctgcacacctgctgctcgtcacagaccctggtctccaggaacagccctggatgccagtgccccaggactctccctgagcgtcagctcccacacgcccccagcaaagtgaccagagcacatcatcaggtggaacaccctggagttgagatatttattaacagatgggggtgctgggggtgggctcctgcccccagaggggatgcaggtggatgccgggtggggagggctgcagggctggctcctggcctctgtcctggcttcatggtcctgacagctctgggccagcctcaggcgctgggagcgtactgtagcaccagcctgtcaaagtcgttctcctttagcaagacacatggcaacacagggtgggggcagggtgtggggagacaggtggagggagagagagagggcgcatgtgagcccaggctgagctccaggcgccccctggcctggttctcggggacaggccatccccaccactcaccttggcctggtactccttgatgaagggatgggacctgtgggcatccttcagctgggacaggtatcggtttgtcacctgcaggggaggcagggaggcaggtgagccgaacacggggaccccacggtggctctgacctgctggacaggggtggattggggtgagagccacagtaccccagggggctcctcaccctgccttgggactgggctgatctcggagaaccttcagggtgggggtggagggatgggcctgccccctggagaggcgctggcatggagctggcctccgtacatggtgggggatgtattgtggtgttcaggggagcaggtcgggcagggccccaggtgaggatgggttggggggcacagggtttgtgagggaggtgggctgcggtaggcatactgtatacagagttttcccaggggcctagggattagggcctggaccccaggctggggtcccagggtctggacattagggttggcctggagccctgggggccgcttacctcagggggcttgcccaggtgctgggacaggacgatgaggttgaccagcgtctctgggtagccactatcctggagacacaggcagacacggggaggcagggtcagccactccagcccccatgcctgcccgtcacccccacctcaggcagcaccacacaaggtcacctcctcagaggtggggtgggactgacaccgcccaccgctctgcaaggtggagatctcagatgatacggtgccaaggggccagccgcctcgctgagcctcagtttccccatctgtagtccagcctggggtacgaccccttgtttacagagacttgggaaggttgtatttgtcccacacatctcaaagccatggggcccagacccagatggcctcaactcctgctgtacaacgaaccccgaggccatgggcagacctgccacccctgcaccagctcccaaggagccttgaaggagacctcggcaggggaccttgcctgactcactcactctaggctcccagcacacaggaccctaggaaacatctaggccaggagacccagccagagccctggtgtctgcttggagcacagaca

SEQ ID NO: 35721 - DNA, 1478 bp, Artificial sequence
  DNA replication origin
gcggaaggcgtaagtgcgtcacggagagcatctcgggaattgtagtgtgtttctgcaagccaatgggatccggggaaacatgataaggatgcggtcgaggctgggaataggctgagggagctggagagggtgggaccacgcaggaggcagatccaataaacaggaagatttttctcgtgacgtcgtcggcgcgcgccggaagcgcggatcacacgggcccctacaaggggcccctacaagcggccacaaggatggcaggcttcgcggagctcgggctgtcatcgtggctcgtggaacaatgtcggcagctgggtttgaagcagcccacgcccgtgcagctcggctgcatccccgccatcctggagggtgagtatggcccagggccttccccaagaggcctctccgctcctctcgactcctttcccttctcgcaacctttgcttattccggtcccacgaggcgaggggcaacctcgggcgttacaggagatccggggttccggaggacgactggacagtgttggcatttaggttgcatgactgactcgctttgtgttcgtacgcaagtgatgtaatctctgaaattttcatagtctcagcacagggagggtttgatggatgactagtccgatagtatcgcaaaatcctgcagacctggtactgctatctttattttacaaatagaagttgaggctgtcaaaattgctggtagatccaggactccttggtcctgtgattgctcctctaggagaaggtcttctctctgctcctctagcccaacccagtttcgccattaaagagaggcccacaggaagcctaagatgtgataagtcagggattaaataaacaaatgaaggggtcaacagggagcacaagatgcatatgagggaagggaattctggattccccaaattcacgtgctcctggacggagttagaacgaggtggtaggaagctgtgggcatctcgggtcaaatggatatgggttccagtccagcctgccactcactggcagtgtgtcctgggcaaggtctctgaaacccagctgtccacacatggagggtgttgatgctgctttgtccccaacccaggtcgagactgcttgggctgtgctaagacaggcagtgggaagacagcagcgtttgtccttcccatcttgcagaagctgtctgaggatccctatggcatcttctgcctcgtcctgacacccaccaggtaagcccccagcaggcctcctgggtatgggttaaccagctgtgctctcttgggcaagcacctttccctctctgagcgcccttttcccacgtgtgagatgagcatgaaaatcttgctacccgcttcttaggggtcctgcagaattaaacaagatggccccggtgcagtggctcacacctgtaatcccagcactttgggagctccaggtgagcggatcacttgaggccaggagtttgagaccagcctgaccaacatggagaaaccc

SEQ ID NO: 35722 - DNA, 1228 bp, Artificial sequence
  DNA replication origin
tcccatcttgcagaagctgtctgaggatccctatggcatcttctgcctcgtcctgacacccaccaggtaagcccccagcaggcctcctgggtatgggttaaccagctgtgctctcttgggcaagcacctttccctctctgagcgcccttttcccacgtgtgagatgagcatgaaaatcttgctacccgcttcttaggggtcctgcagaattaaacaagatggccccggtgcagtggctcacacctgtaatcccagcactttgggagctccaggtgagcggatcacttgaggccaggagtttgagaccagcctgaccaacatggagaaaccccgtctctactaaaaatacaaaaaattagctgggcatggtagcgcatgccgtaatcccagctactcgggaggccgaggcaggagaatcgcttgaacccaggaggcggaggttgcggtgagccaagatcgtgccattgcactccagcctgggcaacaagagcaaaactctgtctcaaaaaaaaaaaaaagaaagaaagaaagaggcaggcagcagaaagggtactgggacctgggcatattggagccagtttgagaaaggccttgaatgccaggcggagggttagaattgattctgggggtgtgtgagcaggaaaggtcatgagccagggagaggccaggacagagttggttgggggcagaaaggaggctgatgcttgagaccctctggctggggcaactggctggtggtgaggccattgctgaaaggcgaactgggggaaggcacaggtttgggataggaagagatgctgaggtcagcttgggtcgggctggtgaaggagggatgttccaggctgagcctggcgagggggcaggggccacaatggcctccaaggctcagcatcagagcctttgtgaacaggactgggcaagtcaggagcctgggggctcagggaggaaccctggggatggagaggggaatggggggcaggtccagaaccactacctgacccagcctggccccttcacacccacagggagctggcctaccagatcgcagagcagttccgggtcctggggaagcctctagggctgaaagactgcatcatcgtcggtggcatgggtacgggagctgggaggcgggggaagccccagcatgggaccctagcagctttggaccacctgcccagccctgcctctcatgctctgtcccccagacatggtggcccaggcgctggag

SEQ ID NO: 35723 - DNA, 1099 bp, Artificial sequence
  DNA replication origin
tatttttttggagacagagttttgctctttttgcccaggctggggtgcaatagtgcattctcagcttgccgcaacctcccgggttcaagtgatcttcttgcctcagcctcccgagtagctgggattcacctttgctttagaaaggacaactccccaacttgcaaacatggccctgagtagctctcatctgtgggctgcaccctacccacgtcctaccacctgaatttgctgggcaggctggagggacagaggcccaaggctcggcctccccctccactgctcacctgcacgggccgtccggccgactcggtggatgtagatcttggggagcccgggggtgttgtggttgatgaccacctgtaccgtagggatgtccaggcccctggaggcagaggtggctggtcagctccactgtccatgtggggaaaccgaggcaaggactcacccagggtcactcagcagggatgctagggctgcctgacatgcctgaggccagccttctcatctgtggggccttgtagtaaaagagggagtgcccttggcaggagactgggggctgctcaccgggaggccacgtctgttgcgatcaggatccggtagatgctggacttgaacttggctagggcggcaaagcgttctttctgcacagggttgggaagaaaattgggaatgcatgaaggcagggttttctgtgtgaggcctcgggacagggtggaggccgggacagtccccagccgtccattgaggaaggtggccatgagaagtcagaccgggacaaatgaatgacggctaaaagagatgcggtcagggagggcctcttgagctgcgatattctgggaccagaagagaccaggtggcaggaagaaggcgcccggcagaaggaaggatcggggccaatgtctgaggcggggaaggtatcccagggtgaggctggcgggccccagggtggcctcacctgcttcatcatggagtgcagagccacggtggggaagctgaatttgcgcagcatcatgcacagaatctggcaggtcctggcgggaaggatgtgcctgtcaacccctccagctctcaggttctgggaaggtgttcctgcccccac

SEQ ID NO: 35724 - DNA, 992 bp, Artificial sequence
  DNA replication origin
ggtttcggggcagaggagcagggcccgcacaacacgagcgcccacgggttctgctgtggggcactgggtaggcccccgggaagggctgctgcccccaaggaaggttcctccgaccctcagctccatggacgagtcaaggactgggcagatggccgtgtggggctcagaccaggccctgggaggggactgggcctgagtgggacccagacggtgtcctgggtggacgccccttgtggccagccctgccagccttctgtcgcttcagcgtctcctccaccttctccttgaagcgccggttcttctgcttgatcttggccagctcagccttgcgcttggcctccaggtcagggtcctggcacagggaggaccaggggatggctgagctggcggcccccgccagggaacctggccacccaccccctacctgcgggctcggccctcaccttcccctccaggatcagctgcttccgtttgttgatctccttcttttcgtcaaagtgggccgcctccagtttctggtggagggaagtggggtaaggagatgctggtcacgggggccccacctggaagggagcacccccggccctggagagcactttagttcctgcccgcctctgacactcacgatctcacactctcttcgcaccacgttgacctgtgtgaggatctgtagcacctcggcctcttccacggagaactcctccagcttcttctctgtggggacagcaaagccgggggtgggggtggggaggagacgtgacatggagagggagttcagccaagtagtgagttccccatgctgtggggtatgcaaggccatctggggccatatcaggtaagggtcagctgagcaagatcagggatttctgaggtaaggaaggtatggaccgctgtctttcagagtctcacggtcacccaagctggagtgcagtggcactatctcggctcactgcaacatccgcctcccgggttcaagtaattctcatgcctca

SEQ ID NO: 35725 - DNA, 1450 bp, Artificial sequence
  DNA replication origin
atgagggcagaagctaggcccctgtggggtgtgcattttattcctggtgtgttgggcgccctaggatggctctgggcagaagagggacatgaaggtggtcagactctggatgcctcgggcaggactggtgatttgttggggcccccaaccctgcccaccctttcctggcaggacctggagacccgcaatgcggagttggagcaccagctgcgggcgatggagcgcagcctggaggaggcacgggcagagcgggagcgggcgcgggctgaggtgggccgggcagcgcagctgctggacgtcagcctgtttgagctgagtgagctgcgtgagggcctggcccgcctggctgaggctgcgccctgagccggggctggttttctatgaacgattccggcctgggatgcgggccaggctgcaggcggcatagttgggcccattcgtcctggaaagggactggggggtcccaacttagccctgggtgggccgggccgggctgggctggggtgggccccagtcggctctggttgttggcagctttggggctgtttttgagcttctcattgtgtagaatttctagatcccccgattacatttctaagcgtggctgtgtgtgtgtggtatgtgggtatctgggcacttaacatgtcgccggcgcctttccctgcgtctttttgggtgcccctgaatccatgtagcagttataagccgcttgcagatgaggggtgaggcttggagtccgaggggggtccaggccacacagccaggaagctggctctggtgtctctctgcctgtccccttgggcttagcccacattgtctggccaaatttggactttcatggccccttcactctggccacaaaccccagatgtggccaggtgggtggccagggaagcttatagctgcacccattcggcacaggactgacctcaccaaagcctcacagctgcctctggagagcagggcagttgctatgcccattctccagatgaggaaactggaagcccagagaaggggcttcagggcccaaaatcccatggccattcgagcagctggtgtctgcaaaactttgggcctgcctggtggaaatggacatggtgttctgggcagacacctgagaaacaacagcggctgcaccccacctctcctgtccccctgctcttcgaaagtcagactgaggaagtcaaaagacccgtttattaagcacctcctgtatgcggcacccctggggggtgaccttgggttggggtcacaacctcccggtcatgttctttcttcccctgcagcctgaatcttggccagggctcagggaagggaccagccagtggtttcggggcagaggagcagggcccgcacaacacgagcgcccacgggttctgctgtggggcactgggtaggcccccgggaagggctgctgcccccaaggaaggttcctccgaccctcagctcc

SEQ ID NO: 35726 - DNA, 1350 bp, Artificial sequence
  DNA replication origin
ccgctgactccgcccccagcccagtgccactccacccctgccccgccccctagtccaacttcgcgcacgactccgcaccctcgccagccttcgccctgacctaagcccagagctatcccacccctggccccgccccctagcccagcatcgcccgactccgccccccagccccgtgtcacccactgccgaccctcgtgtctctgcagctccgtgggcgaggtacagtgggaggccgagtttttcgcactgcaggacagcaacaacaagctggcaggcgccctgcgagaggccaacgccgccgcagcccagtggaggcagcagctggaggctcagcgtgcagaggccgagcggctgcggcagcgggtgagggcacccctccctccgagagacccccacctggcccgggcaactgtggagaccgcgcctcggcagttcccatctgccctgggttcatggactagctgtgtgacctcagcaggtcactgacccagcctcagtttcttgctctgtaaaatgggtttgagacaatgccagcctcagagggtgatcagacactaaagtccaagctgtgcagaggggggtggtggcaccaaccaagggagatgggtgctcggtcctgggcgtggccagacaggaggcagattccctagaggttgggcgagcaagggagagtgcaggcgggggcgtcaggggctgctattcctgccctacaggtggctgagctggaggctcaggcagcttcagaggtgacccccaccggtgagaaggaggggctgggccagggccagtcgctggaacagctggaagctctggtgcaaaccaaggaccaggtgagtgccaagtgtggttcctgggcctcgccttccctcacctcctgtgggaaagccaggacccccgcaacagaccctgggaactcttctcctctaggagattcagaccctgaagagtcagactggggggccccgcgaggccctggaggctgccgagcgtgaggagactcagcagaaggtgcaggtgtgtgtgggcacaaggaggtggggtgacggtgggtgacagtcacctcaacagacactcaggacaatatctacctaagatgataaagtattgggaggcccagtcctgtggaaggcctgatgcccagcaggtgccgcgtgaacagtggctgttggtacagtttcatatccatctatgggttcaacaagcaatgcttgagttcctgctgtattcccatgccagaccccgtcaattcctcctgttctcagcctgagatcacagagcctgcattggaactaggtctggcttggcttggctttatttttttttaattctttgagatggagtctcgctctg

SEQ ID NO: 35727 - DNA, 966 bp, Artificial sequence
  DNA replication origin
gcagatgggaactgccgaggcgcggtctccacagttgcccgggccaggtgggggtctctcggagggaggggtgccctcacccgctgccgcagccgctcggcctctgcacgctgagcctccagctgctgcctccactgggctgcggcggcgttggcctctcgcagggcgcctgccagcttgttgttgctgtcctgcagtgcgaaaaactcggcctcccactgtacctcgcccacggagctgcagagacacgagggtcggcagtgggtgacacggggctggggggcggagtcgggcgatgctgggctagggggcggggccaggggtgggatagctctgggcttaggtcagggcgaaggctggcgagggtgcggagtcgtgcgcgaagttggactagggggcggggcaggggtggagtggcactgggctgggggcggagtcagcggcaatgctcggttagggggcggggccagggtgggtggcgctgggctgaggcggagtcacgggcgatgctgggctagggggcggggccagaggaggggtggctttgggctagggcacggagtcagggccacgcagggctggggatgtggcgacactgattgctgagcttggggatggggcagtcccgcagaagcggggtcttgtcgaggaccgagtcaaagaagggggcacgtggagtccgcccagtgacactgtgggaatgttgagggagggatgggaggttggggagagtcagccgatgggggcgtggtcagggtggttatcctaagaccagagaggcatcgacggggcgaggttagcagcgagaagagacagggatggggtcaaaacagaggggcgtggccaacgcagggtaggggcggggtcggctctggatggggcagcattcagatcctcatccccttccccaggtcttgagtccacagttagatcccgccgtcctggcactcccttggcttccaagaa

SEQ ID NO: 35728 - DNA, 891 bp, Artificial sequence
  DNA replication origin
ggaccgagtcaaagaagggggcacgtggagtccgcccagtgacactgtgggaatgttgagggagggatgggaggttggggagagtcagccgatgggggcgtggtcagggtggttatcctaagaccagagaggcatcgacggggcgaggttagcagcgagaagagacagggatggggtcaaaacagaggggcgtggccaacgcagggtaggggcggggtcggctctggatggggcagcattcagatcctcatccccttccccaggtcttgagtccacagttagatcccgccgtcctggcactcccttggcttccaagaaccgcctcctcgtcccccacccctacccccgcccctgccacgcccccaagtcccgcccctcacccctcagacaacatcttctttagccgctcgcgctctgtggggccgggggcatcagcgctctggctgcggaacagtttttcctcgccggggccgttggcactgacgagagggctcgggggcacctaggcacggggaaaagaataggtcacgaccccacatcagctgggatcaaggctgatgtgactggggtcgtcacatcgggggtgcaattgacctatgcaccctaagcaggtccttcacagcacaggatccaagtgtgtccctccccacctcacccaccctccatggctccctgtggcccctaagctgggagttccatgcccacgccctcgaccttgccttcctgggctttcaccacccccaggagcaagtctgatgcaggttagtctaaaccaagatacttagaacctgtaaggtaggggaggggtacaatcggacacctccctgctgttcccttccctgaggccgaacttcaacatcacgtttaggatttcagcaggaagccctgccc

SEQ ID NO: 35729 - DNA, 924 bp, Artificial sequence
  DNA replication origin
gagcccaggagaagacttgggcccagtctcatcggttccctccactctccccctcacccggcccacctgtgtcagatgctgttcagaggcaaagcccaggccgtagactgtgttggcgcgactgtcggcccactgcccgaacttctgggaagttttggtgaaggtcatgttgggagtgacagtgctgttgatgatggcctagggtcggggaacaaagttcaaggtagatgggacagatactaacaaacatgaaaccccccaggtattaccttgtattagggtcttgaaggtctttactctgaaccctttcaggagatagagactagggcctgggaaggcttagggtttcctgtcccttgggcacacagcaagccagccaccagacccaaggttgtcaccaggactcctggtgcctctgccccacccagaccccaccctgaccttggcgcctccgatgctgatgatgcggtacacattgcgggtggcatcgtagaaataggagacagtgagtgcgtgcttgcccgctgggatccagtttcgcttggtggctgggtcaatttggaacacgtgcgcccgtgtgctgaagattggctgctccctgcgtggggagagggtgtttggtgggggccaggcacccccacttagaaagctcagggccaggctgggggaggtgggagctcacctggctgtggacattggtcaggctgggatgggcaggctctagggggcagccagagaggtggcaggagcactggtttggcccctagggagagaggagggactatgagtgtccctcaggccaggctgagggaggccaagcaggttccatctcaggacccatcaccaggtgtgcccgtcatggaactttcaatcaaaaaggcaggagaggcccaaagtacacctggtgctttgggaggctgagtc

SEQ ID NO: 35730 - DNA, 1204 bp, Artificial sequence
  DNA replication origin
ctggggttggaggaggcagaagaggtgtcccccgaagttctggacccagagacagggggcgtcgcgggaatctcggaagttccagggtcagagcccgcgtcccggagttggggcgtgcactgggtgtcctgcctcgggtggggatgggatcctgaattaatattaacccccccgtcccccgcactcgggtgcatgggatggggcctcatccaccggccagattggggatcccgggcaccgggcggtgtcggacccccctccgggagccccgtggccggcggcatccgaggcgcatgactagttggtgagtaactttccccaaacgctgcaagtcgcagcaggagctgccggaccggaagggcctgggttccggggacccctgtgttccccaactcccacccggcgcaggacccgcccccagtccaggccagagctgccgccccacccccactcaggggctccggtttcagaccctgtgaccaggacagcagctgcccaggacaggatagggggggcatcccccctttgaccacagaggccgctgggccagggcctcccctcccccacctgtcttccccctcctccaaactcctccttggtcccctgcagattcggggttgctgaatggcccaatggggaggttggggagccctggtctcccagtgtggattctgctctgccctcatggtgggcattgggattggctgtttgtctacatcttgtctttttaacttggctgggggctccctggggatttggactctggacttcaaggtgtgcttctgccctagggtgggagctgctgggggtggggtccctctgcagggtgtagtggggaactggtctcctggtactacacacctctcaacgccccattttttggtggagagccccgctctggccagtcatgggtgaatgtggtggaaagaactcagcagagatttggcctccacagctcagcctgggatggaggggacttcacgggggtgcaataaccaggacaatgagaaatttacatctggatgtcagcggccaccaggctcctctcagagggccatctcctgtacagggtgttgtgggggcttcccctagacaaagaaagatggggtctgcttgctctgagttatctataataattatcttacctttttgtttctttttataatttctttcttttttgagacagggtctcactctcttgtcc

SEQ ID NO: 35731 - DNA, 1224 bp, Artificial sequence
  DNA replication origin
caacccccccccccactccccctccaccgcccctaaccccctccctcaatcctccgtcccttccccagtcccggcccccgcccctcccccttatcccctcccccataccctctcccagtgcaaaaagccggcagggggcgcagcggggcggccttggcggcccggggaggcggggcgggcggcggccgcgtcgggaccggccgcgatgggaccggaggcggcgcgggcggcggcggcgcagacaaaggcacgggcggcgtggagggcggcgcggagggcgcgggcccgggagccagggagcgagcggggcgcccggcagcgcggagtcagcgccgcgggggccgcacccgactcgcgcctggacactcgcggggcgccgacctggcagggtgagcccggcctgccgagcctgcgctgggagcgcgggggcctcgaagtcccagggccaaggggagggcgtgggggttccccagaagtttcggacccgggactgggagcggcgcgaggggtccccaagttccagggctggagggagcgcgggggtcccgaagttctggattcagggtctgagaggggactgcgtgggaggttcccaaagttctggacccggcgttggaggaggctgcgaagaggtccccaaagctgcggacctggggtggggtactggggtgggaggggtccggacgtcccggacccagggactggaggggtggcagggggtcctcgaagtttaggagtctaggacaacgcggaggaccggggtcccggacccagttagaggaggagtcacgaagggagtccccggagttaccgacctggggttggaggaggcagaagaggtgtcccccgaagttctggacccagagacagggggcgtcgcgggaatctcggaagttccagggtcagagcccgcgtcccggagttggggcgtgcactgggtgtcctgcctcgggtggggatgggatcctgaattaatattaacccccccgtcccccgcactcgggtgcatgggatggggcctcatccaccggccagattggggatcccgggcaccgggcggtgtcggacccccctccgggagccccgtggccggcggcatccgaggcgcatgactagttggtgagtaactttccccaaacgctgcaagtcgcagcaggagctgccggaccggaagggcctgggttccggggacccctgtgttccccaactcccacccggcgcagg

SEQ ID NO: 35732 - DNA, 1232 bp, Artificial sequence
  DNA replication origin
tggggaacccccacgccctccccttggccctgggacttcgaggcccccgcgctcccagcgcaggctcggcaggccgggctcaccctgccaggtcggcgccccgcgagtgtccaggcgcgagtcgggtgcggcccccgcggcgctgactccgcgctgccgggcgccccgctcgctccctggctcccgggcccgcgccctccgcgccgccctccacgccgcccgtgcctttgtctgcgccgccgccgcccgcgccgcctccggtcccatcgcggccggtcccgacgcggccgccgcccgccccgcctccccgggccgccaaggccgccccgctgcgccccctgccggctttttgcactgggagagggtatgggggaggggataagggggaggggcgggggccgggactggggaagggacggaggattgagggagggggttaggggcggtggagggggagtgggggggggggttgcgtggggtcgggttgggagcagagggtggggacagagagacagacggagagggacatctgggatgagaaagagacccagaaacagagacacgggggagacaggcggagagataggaagcagatggagagagttgcacggacagcgatgtgacctcaccctcctgtcaccttctcaggagacagctgcctctgtccccactacctgaggtcataactttgggcctgtgagggaggtcaggtccctcccgggctgacatgggtggcccagtgaggttggggagggggcagtgggtctcagggtctgcatacagtaagtgctcaatgggtgttgccaggaaacggaagagatcaacttcgggagggaacgggaagcaagacaaagagagagaagcctctgttcccctgcccgtcccatccctaagcagggacgtctgtccacctctgtccctcccaagacgatggtaaaaatgcccacaatggttggattaaggttatctttgctgttgtttgagggttccaaaatccaaaggctgaggaaatgtctccaacgcatggttgcatcccctcagcctccactggcctgcgtttgtcacctctggtcacagggagcacccccttcccacacttgccaggagagcatccttccggagttgaactaggatccacctccccagccccaagcccatgtgtcccacttgtcaatcctggtgccgccccctctctggcaccgtctccaaaatcacacggtgcggcgccgttg

SEQ ID NO: 35733 - DNA, 1052 bp, Artificial sequence
  DNA replication origin
tgggaggcagaggttgcagtgagccgagatcgcgccactgtactctagcctgggcgggagagcgagactcttgtctcaaaaaaaaaaaaaaaaaaaaatctggaggggttgagaatcagccagctccatggtggattggtttgaagtctttttgttttgttttgagacagagtctcgctgtcatccaggccagagtgcagtggcacaatctcggctcactgcaatctccccctctcaggttcaagcaattctgctgcctcagcctcccgagtagctgggactacaggtgcgtgccgccacacccaactaattttttcatttttagtagagatggagtttcaccatgttggccaggctggtcttgaacacctaacttcaagtgatccgcctgcctgggcctcccaaattgctgggattacaggcgtgagacaccacgcccggcccaggtctgtttttgatgtgataccatggccgggaaaggggctgccagggggtgggagtgggggtagtcagatgggcctggtttcatatcccaagtcccaccagcttgctgtgtgttcctgggcatataacctttcatgaactctttgcacctttcctgagggatgaaacaggtgtaatttaaaaagggtgctttaggcactgggggtcggagcatgggcaaaggccctgaggtggggccaggcaggacatgttgctggtacattagacaggtgtctagagtggagtaagtgggagaaaagcttatgggactgctgagacctagggggtcacaggaactgagcagagccttgtgggtcttggtgagttgtgtgggtttcattctgaaggcactggggagccatggggagtttggagccagagagagagggagtggtcacattgacactgcaggccctgggcagggtttcagctcttaggaaagaacgaggtgtctgtccatgtgcagaatggtcgcagaccctaccattctctgagcctcagtttccccaccctgagcagagtcctgagactagggcagccccagaacacagtgagccctctgccgggga

SEQ ID NO: 35734 - DNA, 741 bp, Artificial sequence
  DNA replication origin
tgtctaaaaaaagaaacaaaatacaaaacttgtgtgtgttttttttaaatatagagtcttgctatgttgcccaggctggtctcggattcccggctttaagtgatcctcccacctcagtctccccattaactggaactataggtatgtgccactgcacccagcttttgatgtttttttttttttaagacggagtcttgctctgttgcccaggctggagtgcagtgatgcaatctcaactcattgtaacctccgcctcctgggttcaagcgattctcctgcttcagcctcccgagtagctgagattacaggcgtgtgccaccacgcccacctatttttgtatttttagtagagacggggtttcgccatgttaaccatgctggtcttgatcaaactcctgacctcagctgatctgcccgcctcagcctcacaaagtgctgggattacaggcatgagccactgcgcctggctgatgtatttatttaaggcatttactgaacgacctggggaggctgtgagggttcatgtgctcttgagagggagggaggaaggtgctgaggaggatcacgggggctggtgctgggggtctgagcaggggacaggtgggagtggctgggagagggttagatgaccctgggcatgggaagcagggtgagaagggcatgctgagtgctgtgagctcaggtctttgggcagtcagccctcatcagcttagcaacctgccccatgatgtcatgcaggcct

SEQ ID NO: 35735 - DNA, 1433 bp, Artificial sequence
  DNA replication origin
cagggaaatgttttgcctccagagcgtccgcccagaagaagcggacagcgcgcttgcgcaagagagccgggccgcggcggcccgcgcctgcgcaccaggactcggcggcggcttgcgcctgcgcggcgcggcgctgcggagaccgttggttcatttgcatgtccccgcctcgcgcggcggcggcggcgggtgaggagcctgaggcggcggcgggggtggctccgcgcgcggtggtctcggggtgaggcccgggccctggcgtcgtcggtgggtggctcccggggtgggaagctcgggctcggccttgggggcccgccccgggctccgtgatggcgtcgcaggctcggccctctggctgcggcggcggccgcgtccccgccgggttggcctgggtggccggctgcggcctcccgggcccggcgcccccatttcctcgcccgcagaggccgggagacggcgggccgcgtccacaaaggctcattggttcagtcgttcattcattcctcccgaactcggagcggcccccgctcgggaggagataacggcgcccagcgctgcatcgggcccttgccctctttagaaccggttcagcccccacaccagcccctttactggctgcccattccataggtggggaaacggaagcacagaaagcttagaatcgtgtgatttgaacctgggtcacctgacccgggaaccctgccctttgccagcagagaacaagggggcgccccgggaaaagggctgaaggatgggactgggggaggcgggtgggggaggcggtgatcgtgatgggaaatggaccctacgggttgtctcttgaagttggaggttttgcgaagcgggatatcttgatggttaaggatgcagcccctggaccccaaaatgttgcttaatctttttactcattcttcggggctttggatgcacgaataccctttttgccaggttcaaatctgggctgtctggtcttgaatgggtcgttgagtctgtctccctttgcctcctcaccctaatgtcattcataacaggacccgcctcttcagtgggtggttgggagatcgcgcaaggacccagcgcagaatgaactgtcactagttcattgtcattggttgggggtcccgccactcactgtcaagaggcttcttttagaagggaaggaagttctcagagcctctgtgccctgctgagtctgtgaatgggaaaagagtgatcctgggccaggcgcagtggctcacggcctggaatcccagcactttgggaggccgaagcgggcgaatcacttgaggtcaggaattcaagaccagcctggccaacatggtgaaactccatctctacctaaaatataaaaattagtcggatgcggtggcggactcctgtaatcccagctactcaggaggctgaggcaggagaattgcttgagtccaggaggc

SEQ ID NO: 35736 - DNA, 1186 bp, Artificial sequence
  DNA replication origin
gcaagccgccgccgagtcctggtgcgcaggcgcgggccgccgcggcccggctctcttgcgcaagcgcgctgtccgcttcttctgggcggacgctctggaggcaaaacatttccctgctgggggcggcgaccaccgtgagcgtcccggaaggggcggcaaagacgcctccgtcgcgcacgaggtggcctcgttggctttaccttggttcgcggtcgtccttggttatcgtgagcgtccgcgagtctctgggaggccaagcctaggggcgccacagcgcctgcgcgcgtacggcggccggaaggggctagaggcggctccctgggtgacaaccgcgcgccccacctttccccacgtggccgcgaagaccgggtgagacgctgcggctgccgaggcctgtcccgcgcggagtggggagtgggggtgccgcagggtcgggctggcgcgaccctcgggtacgtggtttggggggaaaaaaaaaatgaaagaattttacagaagccgcctggggacaaaatcctcggcttccctggcattcgctttattttcattcattttatttattcattcagcacctgtgcactgagtgcctgctgcgtgtcgggccccgtcctaggcagtggggacaaggaggctacagggtacaaataaatgagtgaacgatgttgctctagatacaggtaatggtgtgcaaataataacagagtgatgggacgggaaagcagggctgctctttatctagaagtggttttgaaggctgtctcttgagtgctgggaaggatgagaaaggcggggaagaggaacttggaaggcttagatagagaaggtgcggataaggaggctgggttttgttctgagagggttgggaagccactaccgggctttgagcacgtgagtgaggtggagtctaggctctgggagtggcaggtgacgccgcccttaggggaggctggtgtttgaaccagagtgggtgtggctggtagagggacatgtggatggagtcttttagagtccccagcatgtcatggcacacgtttaattttcttttgagacggagtctttctctgtcgcccaggctagagtgtagtggcatgatcttgactcactgcaacctccacctcccgggttcaagggcttcccctgcctcagcctcccgagtagctgggactacaggtgcgcaacaccgcac

SEQ ID NO: 35737 - DNA, 732 bp, Artificial sequence
  DNA replication origin
tggagtcccagttcagtttctgtatctgcatgaagctctattcccctgcagggccagggcagggctggtgagggtcgtgggcattggctctcaaatgctgacctgcgtatgcatgactttgggtgtcctggagttaccaccagcaccctgcaaagatctgaccaggcctattgcccttgtcacccctaagagctgagctgatatttttgtcaccctgccattattacacaggagttgccagagacccacggaggggaggccgcagggtgttcaccaggggttggtggccatggcaggatgttgtggggggtctatctgctgcatctcagcctttctgtgactggcccctgcaggtgtgtgagcagagctgcgcggccctgtgcttcctggccctgcgtaagcccgacaacagccgcatcatcgtggagggtggcggggctgtggcagcactgcaggccatgaaggcacacccgcagaaggccggcgtgcaggtgggcagggcaggggatgggggcaggcaggctggtgtgggatgtgcaggtaggtgcagagagggcatgggagcaggtgcggtgtgcgggtgggtgatggggcaaaggctcagtccctatccctatccctgtccctgtccctcccacagccgagccccatagggccaacttctttctcatcttgcaaaatgtgctgaattctgccttcatttgcctccttctctgcctttgttttttctgc

SEQ ID NO: 35738 - DNA, 1033 bp, Artificial sequence
  DNA replication origin
atctagcctgagttcagatgagaaggccgaggctcacagacgggaggtgatatgcctgaagtggccgaggggggatggaaagccaggccataaccccagggaaatgtgagatctttggtgaggggcccccacccaacctgaggctgtccaaacatgctagctgcatctactgaagacacccacttccttgggctaaggtgggagggacagataaggcagaaccaccccttcctgaagaagcctgcagcttggcccaggcccaggggaggacgctggggccacctggcagggacctcgagtgcttgtcagtttattcaggtgaacactcaaaaacactgacgggaagctgaaggcacagcaagtggggacaggggcctccctgcagggagccagccgatggtgggggcaagacaaacaggagagttcacaaatgaggtgacctcagatggggcccagtgtcagagccagagcacatgaggtgatgagatgggggtctctcctggagaaggcaacgtgagctgaaacctcatgtgctaggaggagccggccacggggaaggccaagggaagggcacttctaggcagagggcatggcttgtcacatgggggcttgtgcaaaggccctggggtgggggaatagggagtgagtacagtggaaagactgggaaatgggcaaggcctgggccatactgggtctgcagggcatgaagtgcatttttttgtttgtttgtttgtttttgagacaagctcttgatccgtcacccaggctggagtgcagtggtgccatcctaactcactgcagccttgactcctgggctcaagtgatcttcccgccttagcccaagttgctgggaccacagacaggtttggttttatgtagaaggcaaaggggagccatgggcagactgagagcaaggctggagcaggaatgacagggccagcactgcaggccgtcctcgaaatagctcaggagcacctaccccgccacatgacagatgaagaaatgcttgagaactgcccaaggtcacactggc

SEQ ID NO: 35739 - DNA, 1165 bp, Artificial sequence
  DNA replication origin
ggaggggtccacgccacgccccgattggctgctccctggccagtcagcgctggaagcgacagtgattggcgagtatgaagcagatgggcagcccctaaagccaatcgctgattggcagaggtggggctattgggagaggcctggggtgcctgagtggtccctcagggtgctaggcgctgggaggcgagggcctggaggcaggcgaggattggaatcttggcagaaaacaggcagaactgtcggccaatcgctgggggccaggggcggggctacgaagaaactggcgctaccggtggggcagaggcgagaggaacggagggcgtagcttggggggagaccgggattggccgcaaagccgaagactggcaggccccgcggccagtcgcagcggccgtgggcggtacgcccccaggggagggctggagcgttcaaggtgcagtccgacccggagcgcggcaacccgacgtggcctcggacgcctggcgcagggtcccctgaggctctcgtgtagagcccgccctctggccacctagcacagaagcggatgtgaacttggaccatcaaggctgaaggactcctggataattctctatccccttactccccactaatcccctgcagacgacacggagagggcagattcgctggaggtcactctgaactgccctctccatctcgaggtggtgtgaagacatggaaataaggggcggaatcctactgaaacgcgctgcgtggttttctgagtgtctgacctctctgcgtcccagctttccccgccacggtatccagtgacatccctgttgggccttctccctgccaagtctttttttgaattaactgaatcttaaccacaatcccatgaggtcagagagaccactggctccttttacagaaaccagagcacagagaggtcaagctccttgcccaaggttacacagcattctctggttgctaaaccagagaatgaatctagagcagcctgctttttggaaagagtgtgtcagagaagagccactgggggcctcagagacctgggtttgaatccttgtccaatcactggcccaccacacaaccttgggcaaaagcccttgtgagcctcagctgtttcatttggaaaagaggggggaaaatgattcctatgccttgatctttcctctctggggtt

SEQ ID NO: 35740 - DNA, 807 bp, Artificial sequence
  DNA replication origin
gacccagctgtgcggggcgccggggacaaggccccaggggtgtgggagatgtcagcaaggacagtctaaagtgtatgggggatgtcaacgaaaagggacgtggtgtcaggcgtgcgtggactgcgggtgacgggctcaaacctggatgcagtagcccccagggggcagtagacgtggagtgtggggttggggggggtctttaacctcttcctgccctcgcgacgctactgtcatgccccgcctcatccgcccctcgccccgggatccatgacaggacccgtgcctcacctcagttcagcccgacaggcgcgggccgctgacgcttgggcccccccggcgccccccgcgccccctcaccggcccggacgcgtcgccgccgccgctacctccagccgccacggccccgcctcgcgcacccccagagcgcgccacgggaggggtccacgccacgccccgattggctgctccctggccagtcagcgctggaagcgacagtgattggcgagtatgaagcagatgggcagcccctaaagccaatcgctgattggcagaggtggggctattgggagaggcctggggtgcctgagtggtccctcagggtgctaggcgctgggaggcgagggcctggaggcaggcgaggattggaatcttggcagaaaacaggcagaactgtcggccaatcgctgggggccaggggcggggctacgaagaaactggcgctaccggtggggcagaggcgagaggaacggagggcgtagcttggggggagaccgggattggccgcaaagccgaagactggcaggcccc

SEQ ID NO: 35741 - DNA, 1454 bp, Artificial sequence
  DNA replication origin
gagccttacaggaaatggcacgttattgcttttcaacaacaaagccactgtcctccttctatgctgcatgcttgcaaatcagactcaagggaactaaaaaattccagaagaatcattcctagcaccacccaggctcgttttgcaggttagctttaaacagctgaaacattagtttgcctcactctaaagagtgtttccttactctttatcggcttcaagggcccagggagtgtcggagaggggtcccgggtctgcaagagctgggagccccggccccggcaaccccctctccggcatcctgcaggaggcacccaagatgatgagcccccctcctccggcagcgtctccaccgccagcctgccccaggactccgagacacacgcttggcagaggggccgtcccttccagctaagcctttccggacccagtcaaagtcacgactcctgccaatccctctgagataaacataacagatgggcccaaacgcggtgggtccacagcagagggtcagcgatgcccagggtagaataggctctgcctctagcattcaagtggtttaggtctgtggctggtaaaatggagatgattccggtttggtctgacagatgggattattctaaggtccggaaatcactttatagactgtcaagcactgttagaaatgaacactggggtaagcttttgtttggggaggggagggtgcagcgatcctgagataccaaggcttgggggactattggaggacctgggggattcggggggattattacagagggtgtgcgaacacaggtgcacgtggaagaaagcccaaggtgggagagagaaaagggggagacagaggtgtggggctgccagggcagagggcaggtgccagggggaaggtccctgagaagagagacacaggttgctgggggagtgggcacgagagtagcgagcagatacctggatatgaggaaaggcagtgggggacgggactaggtccaggtgtgagttgcgaggccatgagttaggagtcacaggctcaggtgtgggtgtgggggtgtcatcgacaaggacagactcaggtgatgtggggggtgttcgtgagtgggggcgggtgttcgtgagtgggggcgcggtgtcaggtgtgtgagggggatgtcagacccagctgtgcggggcgccggggacaaggccccaggggtgtgggagatgtcagcaaggacagtctaaagtgtatgggggatgtcaacgaaaagggacgtggtgtcaggcgtgcgtggactgcgggtgacgggctcaaacctggatgcagtagcccccagggggcagtagacgtggagtgtggggttggggggggtctttaacctcttcctgccctcgcgacgctactgtcatgccccgcctcatccgcccctcgccccgggatccatgacaggacccgtgcctcacctcagttcagcccgacaggcgcg

SEQ ID NO: 35742 - DNA, 1494 bp, Artificial sequence
  DNA replication origin
tactctttggaagcagcccagtctgatgggatggggatgggttaagctccacctcccggaaaggggagcatcgatggataggacttggaattattccacagggacggctgtctctcctcccccatttattttttcagtcattgattcctatctgtgtggccttgtggatattcactttgcactgtccattaaacccaaatgctccattaccctctggggatgtgatgctatacatccaccgccatagacaaagaagcgggtttggggagggaaggtgggtggagatttcactacgatgaagaggttgccccaaagactcaggtggctggagaagctgaactggatatacctatgtcagagcatctgtgggccccaaacctgactatgcagatgtagaggggaggtggggcctgtggtggacgctgggtgggagatggtgtgtgcaacaccccaaaggtgcctgccggggcacactgtggtggtgggatgcaggcaggtatgtacagggtccaggcatgttgcggtggtggggtatgggcaggtgtgtgcagggccctggaggtgcctgcaggggcacactggggtggtggggtgcagtcaggtgtgtgcagggccctggaggtgcctgcaggggcatgctggggtggtggggtgtgggcaggtgtgtgcagcgccctgaaggtgcctgcaggggcacgctggggtggtggggtgcgggcaggtgtgtgcagggcccaggaggtgcctgcaggggcatgctggggtggtggggtgtgggcaggtgtgtgcagggccctggagatgcatttagaggcagttgggtgtcagatggtgtgtgcaggggccaggaggtgcatgctggggcagtggggtatgcaggagtgaggtaccctttcactttttctggggctctctgccccttgcccaggctgtacctctgctctgcatcctcactgctcctgtgacttccctccacgacactcgttcactgtgctggcctggcctggtgcctgtgcagtgagtgctgagggtttgccaattcaggccttcgcccttgaggtaagaggagccccagaagaggctgaatgacgctgctgggcagggcaggggcaggaggccagagagccgaggctggagatcctgaaaccctcttgtcctgacatttggggtgacttccctggaaaggggaaccttaaggaccaccataatgggctgcgttagactcaataatggcactcaaagatgtctgcatcctaaaccctagacaccatgaatatgtgatcttacatgacaaaagggaatttttagatgtgatgaagttaagggtcttgagatgggggagactgtcctggattatctggatggccccaatgtaatcaccagggtcccgatgtggggatgcaggagaggccaggtgcagtggctcacgccttgtaatctcagcactttgggaggtgggaagatcacttgagggccaggtgagagcagcctggg

SEQ ID NO: 35743 - DNA, 1823 bp, Artificial sequence
  DNA replication origin
ggagcacccgcacgtctctgctggggcggggacaggggtggggaccgaggaacacgaggcgggtttggcttcctcctggccaagctgatggggtctctggagtgggcctcattttgaggtttacatggctgccttcccttcccccctgctggcataaattaatgatgcgtattttccctacggccctgggggcatagtaacctgcccctctgggatttatgcgtgggggtggagaaacgtctggagacaaacgggcaaaggagaggagctctgaagacagaatagggcatgtgacagagtcagggggtccctcaggagggcctgggtgaggagtctcccagtgtttcgttgtgggaagagggaaggcagggctaggggcaaggcacgaagaggagggagcggggcgtgcagaagaaagagagaggggcgggcgtgggcggggcgattctgtggcagggcggggcggggcctcactctccacggaagccatagtagctgcccaggatgcgcttgtactcctcgtgtgcgctgaactggatggcggcgtagggcaccacgcgcaccatggtggccgagttcccgcgccacaagctgagaaatccctcgttgaggtaggtgtagtagaggacccggaaggcctcctggagataagcgggaaggtcaacatccctctgcctctgcctgccctccctgcgggcctctgtgaccagcagagcgcccaaagtgcggaggcggggccggggtgaccccatctccatgcacagcacataaccccacccccatgtgagggccccaccccgatttgtccagactgacattatcaaccccagccccgtccttcctccctatgttttctgggcctcccaccccaccaagttctcttggggactgcaaagcgaaccaggctgcaaagcagctcggagccctgcccaagggcatgtctgttggtgtttggcatcccagcttttacagtttatcttttcctttattaagaaagtagcacctgctctctgtttaacaataaatcaaacatgaaaaggttgttttagagctgttgagtctccccaccccactgccggaaggacactcgggatgtcccgtcagttcccaggctgggctgtgtccaggcagagctgggaatgggaagacaggtagtcctgtccccacccctgagactctcctcagaccacctgcctaactcctgccagcccatcagggtagtggtgactgtccccaggccggggcggtgacatagtggctcaccttggcagaaaatctttttgaagacactggaaaaaacaaaagcacaaaagccactgagatgcaaaggacagaacctcccatctgcgtggccccacccctggcacccactagcagagtcaccctccttttccccccaatcttgtcccaggaatgggagctgagctgacacccaagccccagaatagtgagggtctccattgagaggagaacgtgtctgagatgggttgacactcagcaccctgcccctggactagactaccattcacccaaacccctgcagggaaggtgtcccagcctccaggcacttgggtctcagctgagaagccctggctctctcagaacaaggcctgcaggggtctacatgtggggtctgccctctctcccggacatgcccctcccagggtcccagcacaggcaccgctatcctgcctctcccaccccctgtggctgccaggttccctttctggctctgtgctgcccttgggcatgggggacccgagccatggtgggccataagcactcttgggagagacccagaaaaacaggccacaaacggtcac

SEQ ID NO: 35744 - DNA, 905 bp, Artificial sequence
  DNA replication origin
gcctcccaaagtgttgggattacaggcgtgagccaccgtgcccggccgtattcttacatatttttactgcatctgtgcccagttcaaaatgaagacccttggtttgatctaagcagaaagtgacccccaggctaagagaacaaattgctgcctttctggaacagctgcagaatgacacatcaggcctgccctgtggacacggaggcccagatgcaaacccctggggcccgatagagagagggattccgacctgggagcccccgagacacagagcccccggggctgatgcgcatcaccgatgtaaggactcacatttccttcggggttacggccatccgcgctctgaccaggtccagggggtaggtcagtgaagcggctgtcgttccagccagtgcgccggcgaagaggcgaggccaagggggcagggctctgaacagggcaggaggagaaggcgagacggcagtgagggggttgcagatgcacagaggcccagcctggagcacccgcacgtctctgctggggcggggacaggggtggggaccgaggaacacgaggcgggtttggcttcctcctggccaagctgatggggtctctggagtgggcctcattttgaggtttacatggctgccttcccttcccccctgctggcataaattaatgatgcgtattttccctacggccctgggggcatagtaacctgcccctctgggatttatgcgtgggggtggagaaacgtctggagacaaacgggcaaaggagaggagctctgaagacagaatagggcatgtgacagagtcagggggtccctcaggagggcctgggtgaggagtctcccagtgtttcgttgtgggaagagggaaggcagggctaggggcaaggcacgaagaggagggagcggggcgtgc

SEQ ID NO: 35745 - DNA, 1799 bp, Artificial sequence
  DNA replication origin
ggtccaccgtcctgagagcagctcagggtcccctagctctgcaggtgccgcagcaggatctgcatgaggtcgaaggtggtgaagctgatgcccacggcgatgggacccttgacccagttcatgctcaagcctttgtagaggccgcgcacggcgccctcctcccgcacgatggtgcgcagcgtgcgggcgatggaggcgcgcgggtagcccgtgacgccggccgtctgcatgcgccgccgcaccacatccagcgggtacgaggccgactgcccgatgaggccagcgcaggcgccgaagatcatgcgctcgaaggggtagggctgccggcggccgctgtactctgcagggcgaggggcgggagggccgtgaaggcgccgcgagggggcgcgcaccccgcacccgtgcgcgcgcctttgcacccctaggagcaacctgcgtgcacatacacacatgcacttgcacccccacgtgtgttcgcactcatgcgcacccacacgccccactgcctcacctccgggtcgctcctttcactcaaactcgagaaataaaaaaaattttttttttggagatgtaatttcactcttgttgcccaggctggagggcaatggcccaatctcggctcactgcaccctccgcctcccgggttcaagcaattctgtctcagcctccaaagtagctgggaatacaggcatgcaccaccacgcctggctaatgttgtatttttagtagagacagggtttctccatgttggtcaggctggtctcaaactcctgacctcaggcgatctgcctgcctcggcctcccaaagtgctgggattacagacatgagccaccgagcccggccgagaaataaaatttcttaaaaggcagaaacacagagaatcatagaaccaactcctagagccactgctcacatctaatcagctctactccacgtctagtaaaggaacattctaggtgctcccgtgcctggtccccgacctgcgccctccctggggagcccctgcgagctgttgcacagagtggacataagtgaccatgaacttcaccctgctctgtcttgcgggtctaaacggggtgtgtgggtgtggaggaggaaggagcagcaacaggtcagtaggggtactttaaacatttgtaatagtaaatttagaactaggaatttaaaacagccaaggctgggtgcagtgactcacgcctgtaatctcagcactttgggaggccaaggcaggcggatcacttgagcccaggaattggagaccagcctggccaacatggagaaaccctgtctctaccaaaaacacacaaaaattagccaggtgtggtggtgggcgcctgtaatcccagctactagggaggctgaggcaggagaatggcttgaacccaggaagtggaggttgcagtgagctgagatcgttccactgcactccagcctgggcggcagagtgagactccgtctcaaaaaaacagccagacaggagacactgtgatctgctcaccaggtgggcaaaaacaaggggtctgatggcatcacgtggggtgagaacgtggggtcaaggggctggaaagcactccagagagaaacaccgaaaatggggttttacagtcacacaaggagacgagctcctggatgtcggctgatcacagaaaacctggcaacagccaaagggcaccccaagaaggtaaggcccactgtgcagccactaaaaaggcggaacagagcacagatgctggtggatgcaccccaaaccagctgagctgggagctgcactcccgggtgagctgactccacttggagc

SEQ ID NO: 35746 - DNA, 1042 bp, Artificial sequence
  DNA replication origin
agtgcctgctcaagtggggacccaaggacctgctggataccacagctgggcagagggttggggcactgagatgctaggcctggggggcttctgggccaaaggaggtggtttgtgtgctcacatttcagcagatgccccaggatgcaggtctgacccaaacctgaggcagttccgtgtcatggcctgggcctcgagccctgctgtgcagagcaagcatgaatctcctgggaaggttacaaagcaggtgggcatgggcaggcaactctagggggagatgcactcttggggacccagctgcttgcagggtctaggatagacatgaggctctgggggacactgttcccagcaggaggctctagtgactgaggagtcgtggccatgtgggaaatactggagaaggcagggccggcagggtggggtgggccaggggctgcatttgtggccaaagctgagcacgaggctggccccatcctgggcagggtccgcctgcaagaaaggcgcccccgcaccctggaggccgggcaggcacgtggagtcagaacaagaaggtccaggcgcggtctggctctgagcctggtggggacaggggtcactagaatcagcagcatgtcggaggacacacaggatcaggaggtggagctgaccacgccccactagggccttttgggcaacacctccggcagacagcgccagcgtctgcagaggaaggaagaggggagctgcgggaccccccacaccatcgccccaacactgcacttccagggctgccagctttgcgtttggacgtggactctgagcccaggcccctcaggcccacctgctcgttccataaagcgccccatgtgcctcctgaagtagaatcaagcgcacccccccaccgttccatgggcccagaatacaaaggggtcaccggtccaccgtcctgagagcagctcagggtcccctagctctgcaggtgccgcagcaggatctgcatgaggtcgaaggtggtgaagctgatgcccacggcgatgggacccttgacccagttcatgctcaagcc

SEQ ID NO: 35747 - DNA, 1517 bp, Artificial sequence
  DNA replication origin
gccaaagaagagccaggagcaggagaagaagtcatttaagtttttattaaatatactctcttggcacaaatctttaaaatatataaacattagatataaacagtgtcttcatggcatcaaaatataactccagaccaagaccagtgaccagcagggaggcgagtgaccgcagagcctgagggcctggctgtgtgcaggggtgggggacagcactgtccccaactcctgccgggtcccactcagctaggagccatctccggggagacacactggggtcagcagggactgggggaccctcccacctaccccttgtctctcctgcctagcctgtggccccaaatccactcatttggtctcacccacctggggcagacccccaattcctactgctgttgcatgcttgtgggagttgggtgccctcccatctccctgtgagggttgccctgcctctcctgccaagtttaagtgctgggtaagggatacccacacagtgggacagcccctcacagccatcacaggctgcctgggcctctggggacaagatcagggatggctggtggccacatgcaaggaaggcagagagagcggtctgcacacctgcaggtccaaggcaagaacaggaggaggacagaaggaagggaaatgaagtcacgactggagatgaacaagctcagatcccttcacacagcgtgtgctgagccagctgtcgaaagcaacactcacggtcacgctcaccctggcaccaggcagaccagtcaggggttcgatgtgaatagatcatagacccggggtcagccaagttgaaaaccaaaacaaaacaaacaaaaaaaagaaatcaagaaactcaccatgtcattaggaaatgggtgtttctgagtccctgtgatagctggcgggccctgggggactcctctgagagaccagttagctgggggttcccctgggtacctcagattttcctcacctcccacccccaagctatactctatcatgaggctcccacttcgggggattgaggctagcaggcaccccatgctccatttcatagaaactgaacaacccctgtgggctttaaattgctccatatcccagccaagtgcctgctcaagtggggacccaaggacctgctggataccacagctgggcagagggttggggcactgagatgctaggcctggggggcttctgggccaaaggaggtggtttgtgtgctcacatttcagcagatgccccaggatgcaggtctgacccaaacctgaggcagttccgtgtcatggcctgggcctcgagccctgctgtgcagagcaagcatgaatctcctgggaaggttacaaagcaggtgggcatgggcaggcaactctagggggagatgcactcttggggacccagctgcttgcagggtctaggatagacatgaggctctgggggacactgttcccagcaggaggctctagtgactgaggagtcgtggccatgtgggaaatactggagaaggcagggccggcagggtggggtgg

SEQ ID NO: 35748 - DNA, 1037 bp, Artificial sequence
  DNA replication origin
attctgccttcgactctgggcgcctctggttgctggtggtgctgtgcctgctgcggctggcggtgacccggccccacctgcaggcctacctgtgcctggccaaggcccgggtggagcagctgcgaagggaggctggccgcatcgaagcccgtgaaatccagcagagggtatggacgccccgatgacctaggccagagggaacctggggctcagggtggggttcctggtcctttgggcgtggagtcgtcccaaaccagaaggcctcctgctgcagccacccctgctacctgcccacaggtggtccgagtctactgctatgtgaccgtggtgagcttgcagtacctgacgccgctcatcctcaccctcaactgcacacttctgctcaagacgctgggtgagatgccgcggtgtgggggtggaggaggggcggagttggaagataaaacagagtggaggtggactctggcggggaccgcggtggggggggagaggcggggcctaggcagggggcggagactgtggtaaggcagggtctgagcaggaagcggagcctggagtggggcttgccttggacaggaagtggagcctggggatgggtgcaatctgagcaggaggcggggcctgggtagggggcggggactgtggtgaggcagggtctgagcaggaggtggagtttgggatggcgtttgccttaggaggtggagcctggggaggggttgcgtcttggcaggaggcggggcctggggagggggcagggcatgtattgaggcaggatctgagcaggaggtggggcctggggtagggtttgccttggacagggggcagcgcctgagggggtggagactgggctggagatggagtctgagacaggggtgggagtgtctggaggaatgggcctggccccccgtgccagccctgtccctcgccccctcccccatttttccactcatacctcgcttcatcctcttctcctaggaggctattcctggggcctgggcccagctcctctactatcccccgacccatcctcagccagc

SEQ ID NO: 35749 - DNA, 726 bp, Artificial sequence
  DNA replication origin
taagggagagactcgaggagagggggtacccaggcctcactccctcctgccctcaccccccaggttcctcctgcacaccagcttcctgtctcccctgttcatcctgtggctctggacaaagcccattgcacgggacttcctgcaccagccgccgtttggggagacgcgtttctccctgtgcgtattgggtggggctaggaggtagctggggctcccctgggtgccctagcctctgagattcagggaggagcctggggaagatcctggggggtcgggggcgaccttcttagtcccttgcccccggccctctccgcacaggctgtccgattctgccttcgactctgggcgcctctggttgctggtggtgctgtgcctgctgcggctggcggtgacccggccccacctgcaggcctacctgtgcctggccaaggcccgggtggagcagctgcgaagggaggctggccgcatcgaagcccgtgaaatccagcagagggtatggacgccccgatgacctaggccagagggaacctggggctcagggtggggttcctggtcctttgggcgtggagtcgtcccaaaccagaaggcctcctgctgcagccacccctgctacctgcccacaggtggtccgagtctactgctatgtgaccgtggtgagcttgcagtacctgacgccgctcatcctcaccctcaactgcacacttctgctcaagacgctgggtgaga

SEQ ID NO: 35750 - DNA, 1572 bp, Artificial sequence
  DNA replication origin
tgaggcctaaacttgactgttgtttttctgttaactctcctttatggtgatttgtttccttatgcatttggtgattttgcctgtgagctcatatgaatttgctcctttttttttttttttttgacaaggtcttgctctgtgctggagtgcagtggcatgatctcagctcactgcaacttccacatcctgggctcaacccatccttcccacctcagccttcacagtagctgggactataggcgtgcaccaccacccctggttttgtattttttgtagagatgggggttttgccatgttgcccaggctggtctcaaacttgtgagctcaaacgatccacccgccttggcctcccaaagtgctgagacttacaggtgcaagccactgcacccagccctgctcttaatttttgaaaaatcttgggtcctgaattgaggattccttcctccaggaggactttggttttctcctgcaggagtccttcatccccctctagattccttctataacctagggagctcaggctcaacagatacccctgaatgttcccagcccaatcaggagtgtctgcctggtgcattctgtttcgttttctttgagactgagtttcactcttgtccccaaggctggagtgcaatggtgcggtctcagctcactgcaacctccgctccccatgttcaagcgattctcctgcctcagcctctcaagtagctgggattacaggcacctgccaccacacctggctaatttttgtatttttagtagagacgggggtttcactgcattggccaggctggtctgaaactcctgatctcagatgatccgcctgcctcagcctcccaaagtgctgggattacaggcgtgaaccaccactccaatcttgtttcttgtaaaaagtactgtgtaactagagcacaaaattgtccttgtgcctggctcagggcctggcagacccttgttcattcctacttgggaagcaaacggatgcctgagggatggggggttagggaacagagtggccttagagaccctaggaattcactctactcggtcctcttcttatcgtccccaggtctggccagcatgacccagaacttagagccacttctgaagaagcagggctgggactgggcgtgagtcctgggaatgggggagggaggcaagggcaggctgggaccctcccagggtcccccaggcaggctcgtgacctggtgttctcctaggcttcctgtggccaagctggctatccgcgtgggactggcagtggtgggctctgtgctgggtgccttcctcaccttcccaggcctgcggctggcccagacccaccgggacgcactgaccatgtcggaggacagacccatgctgcagttaagtgggtcgcttggtgggtggggggactagggagcttaagggagagactcgaggagagggggtacccaggcctcactccctcctgccctcaccccccaggttcctcctgcacaccagcttcctgtctcccctgttcatcctgtggctctggacaaagcccattgcacgggacttcctgcaccagccgccgtttggggagacgcg

SEQ ID NO: 35751 - DNA, 1577 bp, Artificial sequence
  DNA replication origin
ccggagccctaggccggtgggtgagtgcaccgcgttctcgcacgcgtcatggtgagcgagcgtcccgcgaagtggggggttctgcagggccgaggtccagccgaaggggtccagggagacactgagggaatggattggggtttcttcttggggattggaggctctgagggattcgggggcacgctgaaggccgtgtgtccctctctgggagccctgctctcgctacaggacctccgagggagtcggcgggagttgtacccagggggactagaagcccctaagcgttctggggattctgccctcgagaccttttaggggtctgggatccttttgaggggtcgtggtcccacagaggggactggggaccccagcacatttggaacctggttaaggcggtgtggggtcctgttgggggtccactctggggacgggggtcctgcaggagcgtgggggccgcgccgacaggatccatcgggggtccctgctatatcggggtgtgtggaacgggcaggggaggccgtgggaggtggactcaggaggtctggttggcctcagggcgggcaaggttctcagagtgggagacaggaaagttggaaccttcaggtctcacgcggctctgggtccaacctattgagtgtgttcttaaaacttagcccagcccctgggggtcaggctggtgcagggagatgggggactcccacaaccctgacgggaccggcctgggcagagagagggacgtggaactggagggtctctgcctgggaccatccccgaggaggggcgctggagatggccctgaaggaagggcactgatggccggaattattgaaagtggggcgtcgtcccaggcggaggtgcaggacgccgtaggagatgaaggcacaggctcccgggaatgaggagggaggctgcattgattttatcagggttcttgagttcgagaatcgtaaatccagtgaagggaaaagaaggagctgatggaagactccagaaaattcttgcagatgtctgcagagccctgaccctgagacaggaggctgggtggagggcagggccatcagaacatccctggacagacctctgggagccttaggtggagagatgcacccctccaccaccttttcccttggggggttttggggggtggtggggtcattgatgaagagcccaaaggtccaggaagacctctgagactccagtggttgggtgcagggagggctgaggagagagctgagctgtggggaggtggagggatggtctctagctatgcctgcagggtgcagaaccaagttgggggctgactgtgagactgggaagggcctgaaccacctggaagggtatgggatgatgggtgagtgctagggtctcccaggagagcctggaggaggctactggttgagctcagcagagaggtctgggctggaggtgtcaccgtgctgaggttttgatgggctggctgattgggtggttaaaaccctggcaggtcacaggagagaggtcggagagagaggagaaaaacagactggggggtgggagggcagggtcctaggggaagggtggggcttcaacagccctga

SEQ ID NO: 35752 - DNA, 1803 bp, Artificial sequence
  DNA replication origin
agggcttctggagggggcaccccaagccaagactaggcaagaatgaggcgagtcacagtcagtctggtccacggacgccacgcgcgttttatttgtggatatacacacaaataggaagaaggaaaggagccccccagggtggattgagtccagccgcccacctccaagcccccaccgcggaggggggcgtcactgttgggtcttctctgaagaggcctggagggaggtggggtccccacgtgccctcgccgtacctggcgagcgctctgggctggtgccaccgggtgatctcctaccggggccagccgtcggccaagggcagccggcgcagggcgggcccaggccgcagaggctctgccagggaccgggcgaggagcaagggataggggaaggtcttaggaaagtcgccggggcccccgggggccggagagaggcgctcagacttgatgctgactgggggggtcggcggggaggcgccgcgggttgggggaccctcctcgcccaggcttcggcccccactgcagggggaaagagagagggaggccgtgagctcagcgaggaagggaaggaagccaggggatggcacagcgtgggcaaaggcttggcaggaggaccctgggaaaggagggggtggcggtccctcttggggcctcaaaatagctgcccatccgtaccggaagtgtgcgcagtaccagggatggccaccaggggtcagcagcggccggggctttggaggactgggacttgccgtcgtctcagggcacttacctgggctgggaggacacggcggggggcccatcacccctcgagggctgccagggggccagggtggggggctgcaacaagccagggggcggtggagggtctcccaggccatattctggtgggcaggaattgggggctgaggcctggacatctccttaagccttctgcaaacctaaccacccccagtgacagttttgagttctggtgggtgggagggtgtggaacccccagagggcaggagtgcggacgcttcccaggtggggcagggcaggttaggggatgtacctggggggcctccggggaggaaggggaagctccccagtgggggtccgggagttgcagtggagcaggggttctgcaggccactgtagaggcttctctgtgcggagagagggtgaaggggaaactgaggcccacacccaggtcgccctgcctgccctcatcagccctgccacaccctcccctcactcacggaggtgtttagtccccctcggggcccagccaggccaccaggcaggtctgacctccgcccttccgtcggcaggtacagtgggggtggtgtcttgctggtgaggtggcttggtgagaagagagggtgcaccaggcctggggaagaggagaccccagagagagaggacaggcaggccatgtcaactaatgaagtctgaggtttagaggtgatgcacgcagcctggcaatgccagagccaagatgcacccaaacagcccctcaggacctcacccctgccccactgtcccatgctcacctgggggcccggctttgggggctgctggtcggaagggagatgggcggctctgggcgggcagtgcttccccaagcccactggggtcacagcctggtggcggtaaggccccgtataccacatctgggctgggcatagcaggagctgcaggctgtgggtagagaagggatgggtcagaggaccccaggccagatgggggtgccaagtccaagggagaaaatcctgatgagttcaggggcccagctctaccttcaggaagcctttgctccacctcc

SEQ ID NO: 35753 - DNA, 812 bp, Artificial sequence
  DNA replication origin
ttaccatgttggccaggctggtctcaaactcctgacctcaagcgatctgcctgcctcggcctcccaaagtgccgggattgtaggcgtgagccaccgcgcccggcctcttaagcagcttttgatgccaggctatgaggctgcaagtgggggcagaatggaggtcctggagtcatgtcaggagcagcattaggacagcgccaacaggcctgcatggatctcagctcctgctgtgttgatctgggcaggtccttgggcttttcggtcccaggggaggaaactgctagctggtaactcaccggggtttggtcagtggggtttggctagagcaggccatgcctgcattcctccccactcatggagctgggtggggatggtctgtcccctctcccatagaactgggttccctgggtggggtaggggtaagggtctaccctgttgtctcctgtccccatagacgctgaagcggaggggcattggcctcgatgggccagagctggagccggatgaagggcctgaggagccaggagagaagtttcggaggctggcaggcgaagggggtgatccggccttgccccgaccccggctgtatgtaagtgactccctggccctgtgaatgaggcattcctcctacttcctaggcccaagtcgttgaggctggtactgagagaggggcttagagccagggatcctagagtttggaggcaggtctctacctggttggtcaggaaaggcttctttgagaagtgggcactgtagctggggctttgaaggatgaataagagttcaacaggcaaacagttccttccttcatt

SEQ ID NO: 35754 - DNA, 977 bp, Artificial sequence
  DNA replication origin
taggtgtgcgcttgtagccccagctgctgggaaatctgaggtgggaggaatgcttaagcccaggaattggaggctgcagtgagctatgatggcaccactgcactccagcttgggcaacagagcgagaccccatctcaaaaaaaaataataataattaaaaagaggaaacccagccaggtatggtggcctgtaatcccagcactttgggaggccgaagtaggcagatcacatgaggccaggagttcaagaccagcctggccaacatggtgaaaccctgtctgtactaaaaatacaaacattagctgggtgtggtagcgcatggctgtaatcccagctactggggaggctgaggcaggagaatcgcttgaacccaggaggcaggggttgcagggagcagagaacacgccactgcactccagcctgggtgacaaagtgagactctgtctcacaaaaaaaaaaaacaaaaaagaagaaagctagagtgtgggtggtatcactgcagggatgggggggccctacctatgtaatgggggaccagcatggattggggggagtctgcatatgtttggaagagtctgcatgcgtctggcgggggtctccacattgttcaggggaaaggggtctgtgtgtatttgcgggacggccatgtgtttagggagatctgtatgtgtctgtgcatttgggggattggcatgtgttggggcatctgggtatgtctgagtgtttttggggtctgtctatgcagagggaataggatgtgttttggggatgtgtgtgtttggagagctgtgtgggttggggggtttggcgtatcgtgaactgcatgtattttggggactttcgcaggaggaatacttgtgtatttgggggatctgttgtttcgggcatctgtggattttctgcggctctgtttgggggtctccgtgtgtggggaatatttctacctcccattatgcccatacaaggatggagtgacc

SEQ ID NO: 35755 - DNA, 1052 bp, Artificial sequence
  DNA replication origin
atccaggcaagttgggccgagttaggaaaaggtttagaattagggttagggtcacagtagggtcaggggtcggcagtaaggtcaagggcgcccagtgagggcggggaaagcctggccagtctgatccagccccctccctccgttctgcttcttccttatccgcgcccccacccatggcgccccagcatcctttcgcgtctgagtcccaggcccatgaactcccgggtcggggccacgcccaagtgcacgcccatcgccgcctccagggtgacgccctgtatgcaaataagcccgtcccgcccaatcagctcccgggggcaggaccgcccgctcccaaggcacctgcggccgcgggcccctgatcttcgtgcagccgccgcgggtccgtgcgcccagcgtcccagggcccaggccgagcaggtgcgtgtcatatcgggttgagactcctgtggtgtcctctgaacggcttctgcgggctgggtgggttttggaggtccgggtgtactgctgggcgtcccagggtggggtgtgtgtctaaaggggtgtgtgtcgtggggtggtgagtccccgaggttgtggcaggagggggttgtgtctccaaggggtgtgtgtctgaagggtgtgggtctggaagttgtgtgtccaagggctctgcgtctgagatttggtgtgagttggggagttggagagttagctgtgtgtccaaaatcatggtgctgtgaggccctattatgtgtctgtgagctctgtgatgtggcatgtgatgtccctctctcctggtgtgcactcctttagcattagcgcatcccctgtgcacaaccctatgccttcttgctgtgggtgtacactcgtttgtcacagcaggatggtaggcacaaaaccttggaacgggggagcaacagctgccggggccaactctcctccctttgcctcaatgggtacaggaacaagagtcacatccccgtgtggttgttagcacatgacaaggtggtggcagcattactttcacggtcacagtcctccctccctatctcttttggggtccagggctg

SEQ ID NO: 35756 - DNA, 1177 bp, Artificial sequence
  DNA replication origin
gctggtcccccaaactcagggggaggcatgtggcagatgctggagtgtgggggacactgagacagggaacagggggcctgggaggcttgtgtctctccccacacctcagtttacccgtctgtgacatgggcagtgtgggcctctagtctgagcacaactttctctttggacatgaaaactatagagttcatactgtgtcatcagtgggtccctcctgtccccatccagtgcccagtgccatacactggggtgccccaaggacatgccagggcctgggccaggctgggggcttctgcctccactccatggtgcagaacaaggcttggggagtgtggaggtggctggggagccctgggcccccggagggctgctctgtttaccggaggccacccgcccacctctgatgcaacaggcaggctctggttacgtgaggccggcagctgggccagctctgggggaagggctagcccagcagagcgaagctggctggggctggcccttatgcaccccaactccccagccccctccttctggtgggcaccatcttgttattcatggtctgtcccgtgtccttttgcctctgttcctatcctataccttccccaaccactaattgtgtcccctagcagggccaccaagagtcttaacctcattcttctcagatgaagggacacccttagttgctagagtaagaggttggaaggtagaagggaaggttgtgaggaggaagggatagaagggtccagagtgggtggtgagggagaagagtgacctgggaagcaggtctgggagatgggggaggtggtgggtgggggatggaggagaaggctagggtgggaggctgggggaggtggagaagctgcccccgctgtctccctcctccagattctctcccctctcccaggagaaggctttgaaggaccttccatgataaggatgtgtgacccagtaggtagggagggccctgaggttaaagaaccctgagtccccatcccagctgtgccgcccactcactgtgtgacctcaggatggtcactgcaccccttggggcctctttgctcatatgagaagtgtggataggctgggcgcggtggctcacgcctgtaatcccagcactttgggaggccgaggtgggtggatcccgaggtcaggagatcgagaccatcctcactaacac

SEQ ID NO: 35757 - DNA, 1202 bp, Artificial sequence
  DNA replication origin
ctgttattctttttttgtggatgaggaagctgaggctcagagaagctctgctctcccaagtccaagcttttaacttttcctgtgaacatgtaacctaatcagttgaaattggtattaagagaaaggaacaaaatgcctgccaaggtcctccgtgaggtggaggggtcatcttttaagcttggtagtcagggagggtcttgcccaggaggtgacatttgagcagacctgagggatgaaggagagccagtgacggaatggtgtctccaggtgggaataccaagtgcaaaggccttgaggtgaccaagtgtttagagctctgctgtaatgaataaaggagcaactggtcacatacgggcatttaatttttttttttttgggacagagtctcactcttttgcccagactggagtgcagtggtatgatcatggctcactgcagcctccacttgtcagacccaagcagtcctcccacctcagcctcctgagtagctgggactacaggtatagatcaccatgaccagcttatttttgcaattttttatagaggtggggtttcgccatgtctcccaggctggtcttgaactcctaggctgaatccatcctcctgccaaagtgctgggattacaggcgtgagccaccgcacccggcgttggtctcaaattcttatcctcaagtgatcctcctaccttgtcctctcgggcagtgagaaagttctgggcagtgctgggaggtccaaggaagagccaggggtggagggcaaggaaggcagggaggtcaagagcagccagaacatgcagggcaagaaaggcggattttattctctggcaggtgggagctatggaagagtttaaagcaagggtgggaatagatgatttgttcatttggagtttgcctcacgtgctgcatggaggttgaactgttggcagcaggggaagcagagaggccagggagaaggtggatctggcatccaggcaggagatggccgtgcctcgctgtgcctggaccggtgcgggcagtgtggtataatagaacaggtgagactggaaccatcaggatctgcccaagaatgggacaggaaaggcgggccctgctggctggctgggaatgccgttgttgaaacagaccctgtaatgaggatttgcgtgcaattaatttatcagggccgggcggtggctcactcctgtaatcccagcactctgggag

SEQ ID NO: 35758 - DNA, 1630 bp, Artificial sequence
  DNA replication origin
tgcatcactgcactccagccttagtaacagagcgagaccctgtatcaaaaaacaaaaacaggccgggcacagtggctcatgcctgtaatcccagcactttgggaggccgaggtgggcggatcacctgaggtcaggagttcaagaccagcctggccaacatggtgaaaccccgtctctactaaaaatacccaaaaaattagctgggcgtagtggcggaagcctgtaatcccagctactcaggaggctgagacaggagaatcagttgaacccaggaggcagaggttgcagtgagctgagatcacgccattgcactccagcatgggcaacaagagcaaaactccatctcaaaaaacaacaaaacaaaacaaaacaaaaacgaaagcaagacacaggttccatgtgaggcctgacattccatcatcatggaatcccagagggctaatcccagaggaggtatcctaccctgtggagaggaaacactggcatccggttcaggattcacaggctcaggggtgcagggaaagagactgaggaccacagtgtctgagccatctgcagcctcctctccggggtcttcagggtccccaagttctgaggcaggggtctgctgggtctggatgaggtcttctgcaggctgggtaagctccatggggaaagctggcggaggtgtcagaaggggagagatgacaataattatcaacagttataataaagtaggcaccgactgcatacctagccttgcactgtgagggtgggtaaactgaggtccaggttaattaccagagccagggaaatgaaaaccagagtccaactgctttcgaggtctaccattccccaccaccaaagcacctacaatgtgcaatgtttaagagcctgggctctggcagggcacagtggctcacggctgtaatcccagcactttgggaggccgaggagggtggatcatgaggtcaggagttcgagaccaggctggccaccatggtgaaaccccatctgtactaaaaatacaaaaattagccaagcgcggtggcgggcgcctgtgatcccagctactcgggaggctgaggcagaattgcttgaactcgggaggtggaggttgcggtgagcagagatcgcaccactgcactgtagctggggcgacagagcaagactctgtctcaaaaaaaaaaaaaaaaaaaaaaaagaaaggaaaaaaaagccggggctctggggtcagctgtctgggttcgaatccctcaatttataggccgtgagaacttgggcacgtgacttaacctttgagcctcagtttcctccacgacaaaatgtggaaatgagacctacaacgaattatgtctgtacatagcttatcgggggatctgctaagcgtggagctcaataaatattcgctatggttgttgggaggggctccccataatgagtgacggctcaacaaaggtgcgattggtcccagtcccacccgagcctcctaaatcgatccaggaggtccactcacctccccacgagcctcctctgtccccccgcgccgaaagcccagttctctcaaaacttgggggcccaagtcacaaacttttctcttccaatggatatagcaggaggcaaactggagaccggaccctcagcgatctgg

SEQ ID NO: 35759 - DNA, 1715 bp, Artificial sequence
  DNA replication origin
caaagtcatttggccaagatcaccaaggggaactgggatgcaaaccccagtctcactctggagttcccctaactgggcttgggttagcatttttctggggagaaattggaggtttagagagagtcagggacttgctggcagtcacacagcaagtttgggtcagtggggactctctgccttggtggtgtctggggaggcagccccacccatgcagaaaacaggtccttctgtccatgatttcattatcctggaacaaggcagggaatggccctcagatagcttcaagcctcagtttccccactgggagatggatgtaaccttttccctaaggtcttagcctggggcatctgcaagggagggtttgatgggattccctgagcctggagacccccatccggcaggtctgggtctgatttatctaccggagcccatcaggacccctctccgaggagacagatgttcacacagtagcagctggggttatgagtcctggtgcagtgcaagcctgggtcccactggaggtgacagtgggagtgggaggggtgtctgggtgtgaaaggattcaggtgggtgtgtatgggagcaccaggagctgcgtgtgtgtggctgttgtaacagtggctgggagggctacagatctcggggttggtggcattggtggtgttggtgtgaacatggttgtgtgctcactacctgtgggtgtgtctgtgactagaaacctggttgggtgtgagcaatgtggggccaacgtaggctctttgctgctggcaggaaggcgaaggtgttgtgggtgtgagcagcagtgggtgtgtttgcatgtggagggacactggtgcagcccagctcatagctttgccttcggttgtggagcaagtgtgacttgtgtgtggcccaggccaggtatggttgtgtgtggcctgaccaggttgattgtgtatgtgattgtgtgtggcccattgtggctgtgcatggctgggtgtggttgtgcatggctgggtgtggttgtgtacggctgggtgtagttgtgcatggctggatgtcgttgtacatggctgagtgtggttgtgtatggctgggtgtggttgtgcatggctgggtgtggttgtacatggctgagtgtggttgtgtatggctgggtgtggttgtgcacgaccaagtgtgattgtgtgtggctgagtgtgattgtatatggccaggtttgcctgtgcatggttggtgaaacctgtgtgtggcccggtgtggttgtgcatgactgggtgtggttgtgtatggctgagtgtggttgtatatggctgggtgtggttgtgtatggctgagtgtggttttatatggctgggtgtggttgtgtatggctggatgtggttgtcattggctgggtgtggttgtgcatggctgggtgtagttgtgcatggctgggtgtggcgtgtatggctgggtgtggttgtgcatggctgggtgtggttgtgtatggctgggtgtggtgtgtatggctgggtgtggttgtacatgaccaggtatgattgtgtatggctgggtgtcattgtgtatggtcaggtttggtcatgtgtggtgggtgagacctgtgtgtggccaggtgaggttgcatgtgagccacctgtgctgttagtgtggctggggtgtggctggggtgtgactgtgtgtgtcagtggttgttggtggcattgtgtgtgacttacccatgtgtcaccttgggc

SEQ ID NO: 35760 - DNA, 1023 bp, Artificial sequence
  DNA replication origin
ccccctccccaccggggggtagtctccggattccgcggacaaccttcctccccaaatgtctgttcacctagcattcccaagccccctcccagttcgcgctccctcctcaacctagggctcccctcccccgcttcagccccctccccattctggggacttctccctggtctcaggtcctctccctaatcctgagctctgtctctaatcccgaagtcttctcccgcaacacggccccctcacggatcccccacctggctcctagctcggacgcatcccggggcggccgccgggcacaaaggacgctgcgctccgactcagccagctccgcgccgggtccagcccctgcgccctgcgctccgctggccccagcgccgcctcagtgcttataaaggggccgcgagggctctctgcgcatgcgcccccgccagcccgaggcctctggctgcgcgagggagggggctcccctgcctaaaatccccaccccgcccattttttggacactcaccgcacccaggagaagatggcatcgattctcctcccattctctttgccccaggaaccgcgttaaacgtccccattatgccccaggatgaggccgtcccattttacaggtggggaaactgagccccaaggaggcaaagtcgcttcccaaggtcacgcacagaggcagagctgggattcgaacctcgccctgcctgattctccaggactcacgttcaaagcagttttggctacaattactggtttaccccatttacagagaggaaactgaggcacggacgagacggggagactccttgttcacacagctggtaagaggcacgcagggtgggagtccaggtgtgtgacacccccgagctgtttccagcaactacagccagattgtatcattcattcattcacctttgtctgatcagcatttatgtagcacactctatggactgggtactgctgttgacacatgaataattttgctttatgcagaggcataggcatgtccctgccatgagacatgagacccca

SEQ ID NO: 35761 - DNA, 1831 bp, Artificial sequence
  DNA replication origin
agaatcaggcagggcgaggttcgaatcccagctctgcctctgtgcgtgaccttgggaagcgactttgcctccttggggctcagtttccccacctgtaaaatgggacggcctcatcctggggcataatggggacgtttaacgcggttcctggggcaaagagaatgggaggagaatcgatgccatcttctcctgggtgcggtgagtgtccaaaaaatgggcggggtggggattttaggcaggggagccccctccctcgcgcagccagaggcctcgggctggcgggggcgcatgcgcagagagccctcgcggcccctttataagcactgaggcggcgctggggccagcggagcgcagggcgcaggggctggacccggcgcggagctggctgagtcggagcgcagcgtcctttgtgcccggcggccgccccgggatgcgtccgagctaggagccaggtgggggatccgtgagggggccgtgttgcgggagaagacttcgggattagagacagagctcaggattagggagaggacctgagaccagggagaagtccccagaatggggagggggctgaagcgggggaggggagccctaggttgaggagggagcgcgaactgggagggggcttgggaatgctaggtgaacagacatttggggaggaaggttgtccgcggaatccggagactaccccccggtggggagggggccgggctgggggtgggtctcagggttgaggagggagcaatgggaaacagggctaggggaggggccccccgagtttggagggaagaagaggacacccagatgccgaatgggggactctggaacagggcacccccgtatctcagccgagacaccccaggattttaagtagggattcccaatttgcggttgaatggaggattccgggccggactgcagtggggagggggcccccagatcaccctgtgcccaatggaagggtatctgcgctgagagcgaacggccatggggaaggggctccctgccatctccctgtccttttgggtcaggtccggtcaccacgttctgactcagggaggaggtcctgggggtccccatcccaacgtggttccccgttattcccttagaccttgggttgaggtgttgtcccttatcccagggaacacactgggtgtcccaggtgaatgttgggtgggggtcccctagaccccccagctatggatccccaggacctgtgagggataccagctcagagggggggctgtcccccagcaccttcacagcctcccacgtccttacagcatgacacagacccctacccccaccccctttagttccacctgtccatatggacacatgtggaagcgctggcttggtttgggggcacaggggctgggaagtaaggggctgggaagtaagggccctgtctgggcaggagagacccccatccctacgcgtggggctttgttcctctcaggcagcatcaatgagaaacagccaggccagggagagggttggctctgggccccagcgggggacgtgggggcagggcaggcaggaaggggtgggtgcactgtgggaccccagaacccagccgtcgcaatagctgatggacattctgaaatcaagttccccctcaaggatatgggggttttgtgtgtgtgtccaccccagacaggcagggagggggagtatgcccaggggttctagggtcccctgtgagtctgatgtgactgtggttgtgtctttgtcagaaaacttgtgccgagggccacatcaccatgtggcaaaatgatgggtgtccatcggtcaccaaggccacaattatccatctcggtttgtgccaggggct

SEQ ID NO: 35762 - DNA, 1134 bp, Artificial sequence
  DNA replication origin
tctctctctcacacacacacacacacacacacacacacacacacaccccgttaacaggtcagactacatccagatagctctgcttctaatccgggacaagctgcttcaatctctctgtgcctcagtttccccacctgtaaaatggagattatccagcaagtaccacctgcagctactgtgaggatgaaatgacctaagacttgcaaagtcctagaaatgttaaatttaaaaacagctctttagacacaaagcctcatgtatacgctaaaaatatactgaggttgcccaacatggtgacagacacagtttcaggtgcacaccccccacacacaccctcccactcccttccactcgcaccctcacacacccacacccttctcttaaaatacctcctccccagggcggccagagatgagcatttacacagctgtctggggcccgtgccctcatgaataatgtacaagcctcatgcatatgcaagcaggggcctgcggggtgctggaggaggggcagctcggatccatgtgaatgtgtgtgtgtgagagagtgtgtgtgagtgtgtgtgtgtaagtgtgtgtgtgtcccctccttcacttcacccccacctcaagtctccgttagcactgagtgaaggtgagtttgccaatgggcatttgtgagtgtttgtgactgggtgtgtgtccggggtgttgtgtcctggcaagggtgtgaaggcggttgtgccatgtggtgggtgcatgttgtgtgtgtgagcctgcagcagctccgtgcaccgggtggagcacatgggacctagtgtgatctgtggatgtgtgtgagtctgagtgaccctcagcagggggctgtgcgcacatgtgtgtgtttctgacctgagagtcagggtgtattagtgtgcatgggtgtgaatgtggaactccgtggaggagaaagggagatgggctcagtcatcatcccgggcttccccttggggatttcaacccctgctcaagctttccctgttagcgccccaactctgaacacagaccacgtcccacacccccgtgccaagggtgcacactgccaaccgcatggaaagaacccttggcccctccagatacacaagcgggacacacacagccacgcaccccagacaca

SEQ ID NO: 35763 - DNA, 1869 bp, Artificial sequence
  DNA replication origin
cggggctcctagggaaagacttgtcgtaacgggtgtggccttcacccgggggcgtggccctcacccagggatgtggcttatcacaaagcgagcttccatgtgtctctcccttggcttggcgaggctttcagggacgtggccttcgccaaagtgaaagccctgggggcgcggccaccaggggacgcacgcacctcggaagcagtaggcgtcgaagcgctcggcgggtgaggggaagccggtccggttagcgaagcggtagacggtgcgcacgcccggggctgggcccccgcagcgccggcgcggcgtctggatcgggtagcgcacgctgccgtcggccagccagcccgggtcgcactggtccaggccctcatgccaggccaggtgcagctgtcccaccgaggccagcgcggcaccctggcggcggcactgtgcacgcgcgccggccagtgtcaggcggcgggccgggcccacgtagaagacctcgcctgcgggaggggcgggtggaggtcaggggggctggggaaccctcccctggagcccaggaagtgggtccaactccaaatagttccgacctggacgtgttagggtggtggttagaagaggcggtgacaaccgcagctgtgcgtccagctccgggatcatccttgtccttacctctcatgcagagctaagcctctttttacaaatggagtaactcaggcccatgggcaagtcgggcttcagagagagggaggggctcggtgaagggggctcacagaggaggaaggggatagggacagggaggcaggcaggggacaggggattagagagggaaagaggatcagagagaggaagggggcaaagggagggagggggactcagggaggcatggaaagctcagaaaatgagtggaatcatgtcttggttgcaggtttagggaggtataagacaggggagttgcataaggaccccggaggatgggagttggggagaataatagatactcaaagagaggcggaggggccgggtcctgccagtcccagacttaccccccagctcccgggcaaagcaatacacatcgtagagttcctgtgggttgcgcctcccatagctccgaacccctggaaggctgctacggtcgccatagcaaccaggacgggactgggtgataggatacctgacaacacaaggggagggtccctctcagatgtgtgctcctggagcccccaaggaacctccttccccatgagctagtcttcatctccctgccctgtgtatccccctcaccgaacagtgcggtcagagagccagccagcatcacagttgtcaaagccatcctcaaaggcagcctgtagatgccgaggggctgcaatgatggctgagctgagacggcaggcctcctgggcctcagcgaaggtcagtgcatagcggtcccgggctgatcggtagtggaacacaacacctgtgggggaacatccaggatggggggacagttgacttatgctggaatcttcaagaacagacctacctcttgcagaatgactccccacccctgtctgataataatagacctagcgccaggcacagtgtgggtcgagggtggggagcaagatccatatgcccccattttacagatgaggaaactgataacaatggccataaagggttacaagttagcaaatatttacaatgtgaaaagcgtttacggccgttcaggcatgttggctcacttctgtaatcctagcactttgggaggccaaggtgggcagatcactttaggtcaggagttcgagaccagcctggctaacatggtgaaaccctgtctctactaaaaatacaaaaaatagctgggcatggtggcatgcgtctgtaatcccagctactagggcg

SEQ ID NO: 35764 - DNA, 2035 bp, Artificial sequence
  DNA replication origin
ttgccaactccagcatcttggagccactagagacctctgacacccaattgcgataactttgcacaaaagggtaaactgaggccagatggcagggctgatgtggctcagcagcctaggcccgcagcccctgccactcaccagcccggtgttgtccgtccactggaaatctctctccacgatcctgtcgttcaggccgatccacgtgttttcatgcccaaagcctgcagggtcgggggttgtgggtctgggtgttcacccatgcctctcctggcccagggcacaggctgcaggtgaggtggggtagggtgtgggaggaaagaattcctcaccttccccagcctggaggtgggctgggtggggggaaagatctagaaggtggaaatgaagagggaagaagcaggtacagggatggaggaggacccagagcccctccctcagcctctctgtgggctgggggccgggtgaggtatgtatgggaggggaagactcagccccttccccagcctggaggtgggctggaggttgaggtggagagggaaggagatagaagtgaagtttacagaggtgagggagtacacagatgccctccctaacctctgtaagagctggagaagggaagggggaaggaagggagaaggagagagatgagggggaggaaaaaggaggaggagtgaaagggaggaggggcaggagtgggaagaaggatggggaggagggaggaggaatggaagggaggatgaggagcaggagggaggaggggggaatgggaggaggagggggaggagaaaggaggagaaagatcagtggaagaaggagggggaggagtgggagggaggatggggaagagaaaggaggaggaagatgagtggaaggaggaggcagaggaatgggagggaggaaggagagaagagggaggaggaagggaaggagaaaggaggagaaagatgaatggaaggaggaggggaggagttggagggaggagggggaagagtgggagatgaatggggaggagaaaagaggaggagtggaagggaggaggaagagcaaggggaagaggaaggagaaggaggaggagtagaagggaggaggcctggggaggagcaggagggaggaggggatgaatgggaggagggagaggcaggatgaggagcagaaaggaggaagaagatgagtggaaggaggagggggagggaagggggaggagaggagagaggaagaggaggaatgggaggaggagagggaggaggggagggaggatggagaggagaaaggaggtggaagatgagtggaaggaggaaggggaggagaggagggagaaggggaggagtaggagggaggaggagaaagaatggaaggaggagggagaggagggggagggaggatggggaagagggaggaagaggtatagaaggaggagggggaggagtgggagggaagatggggaggtaggagggaaaggaaggaggaggagggtagggggcaggcatgaacccctctcccagcctcagtgtaggctggaggtgcatcctcaccccaccctccacaagtggggactctggctaccctcttttaggggggtgaggcatgggaagaaccggaagtaggcccaggctatcccagggtttgtggccaggagaagcaggagtaaacccgggcactgttgcatctttgcagaaatgagaagtaggggacaggagacgccagtgggcgctggacgggcagataggtgagaaggcgcgagccagtcgctcaggagggagaggcccagtgggatacatcaaggaaaaagaaacaaatcagggaaggaagaaaggaaggagtcacgagggatgggatggtggcaaacggaataaacagaataaatggatggatgagcagaaggcagagggataatgaataaatcaataagtcccggattacatgaatggaacacttgtctctctcctaggtctttgaacacattacaggtgcttctcccatcaccctccatctcctggccctgttttgttatcagcacacataggatctgttgaat

SEQ ID NO: 35765 - DNA, 1761 bp, Artificial sequence
  DNA replication origin
gtgggtgggggtcagggaaggagagaggaactgggtgagaatggagatggggtctcagaggacaaaagaggagctcagtgcttgcatatctcaacagaccagggcacgccataggctcggtttcctcatttgtaggacgacgacaaacatgcccgggtgttgcaagattgtctcgtgcacagctgctatccggcatagagttaacgtgcaaacggagggtggcttagcagctccagaagtccagccctgtctggggaaggggcagccatcaggcccctgatggggtgcagtagggtagccctagtaggaggcacccaggacttctggcccacaatgagaagttcctgagaactggaagtctggttgtcatgaggacaacgttgacagtctctatggcaacagcttggtgaacagggccccgttgtccacaaggaaaagcctagggggacaggtgttctgttacctcggactccagagtttggtcaccatggcaacagtggtggggtccaaaccgcctgggggtggagcatggagggtggtctggaactggagtgggcctggggacagggacagtttgtttccatggtgagagccggagaactggatgttgggtcaccctggcgacagcttcggggagggtgatctccatggcggtgagtcagggtagggacagccagaagttgaggtggaggtctctggggtgggggccaatgagatgagaaatgtgtggtatccatggttacagctggaggagggaggcactgtcttcatgggtgtgcctgatgagggaaggggtgtgtgactctaggtgacaggtagcagcaggactggttgccttggtgacagtgggacccaaggcaactgctctgcataactagtgacatggatcttaccggtccccaggcctgggaagatggtctgtttggtgacagttgggaaagggacgtcagaggacagggtgggtttgctctcccttcaaagaaatatctgaggggtgggacgtggcccccagtaagtgagccagctggctgtgtgtcagtctgaggtggcagatgggggtgctcgcccatgaaactagaggggtgtgccctgttacccagaaactgcaggggactctcagggagagggggagaatgggagtctccaggactcaggtcaccataagggaaaataagcgcctcggcccacaacctccatgtgaccacggggagtgaccctgaagttcctgtagtctctccaggtgaggaggagggggaggaggaggcgcccagtgtcccacgtgaccgcaagggactagtgttcagtctccagtgagatgcagaaggtgtacggccggtctctagtcaatcccgggggtccagccaccaggcgaccacgggggcagttggtctgtttccaagtggtctcaggaggcgtggccagtcttcaggagcctgcgggttctgctggcctcctgaggtcctcagggggcgtgaccctcatggagaaagttggggagttgggggaatcctctatccagaagaggtgagggctggccaggctccagggaactccaaagtactgttctgccaggactagccagtcttcagggaccccaggggcacagttagtttgtaagggaccacagggaatgtggccagtgtccagggcttcaagggcgtggccaggctccaggggaccacagggctctagaccagtggtcaagcgccctggctgtccgcctactcccagcctagacgtgcagaggggtccaggcagcag

SEQ ID NO: 35766 - DNA, 946 bp, Artificial sequence
  DNA replication origin
agttcaacaggtagaataaggtggaaagagcatgagcaaagtcctccagaggtggaaggggatggacacaaatagtatgttaagggggagggtcaagtgaatcccaagcttaaagtgaagggagacagctatatggggtgtgagctggggaggatcgtggtcaggtctgaggccagagtgaggaggaatggactgaaaggtcccggttgaagagtcacatagcaccccagacgtcaggtgcatgagggtgggctggggtgtacctgctgatcccgtgcgccccccgccaggcgtggtctttccctaccacccccgtggaggccgatacaagctgaccttcgcggaggcgcagcgcgcgtgcgccgagcaggacggcatcctggcatctgcagaacagctgcacgcggcctggcgcgacggcctggactggtgcaacgcgggctggttgcgcgacggctcagtgcaataccccgtgaaccggccccgggagccctgcggcggcctgggggggaccgggagtgcagggggcggcggtgatgccaacgggggcctgcgcaactacgggtatcgccataacgccgaggaacgctacgacgccttctgcttcacgtccaacctgccgggtgcgtaggcctcaccccaagactggcctctgctgcaacactaccccaaccccggggccttcttccccacccagctcttagcgatcagaaacaggagacccctctcccaagagtgcctaggcgcagcacacaccgcctggtaccaacgctggttgggcctaggctggggtcccaggctgcaaaggaggaactgttcctggatcccggggccgaggccagagtcctaggctgcatgcggggggcagtcctgaatcccaccgaagcagggtcccaggagccgcactaataacccaccccccacctcacccccgcagggcgcgtgt

SEQ ID NO: 35767 - DNA, 951 bp, Artificial sequence
  DNA replication origin
ccttgcttgctgacctccctaacaataacaaataacaacaataatagcagcagctctcctttactggacattttctgtggcaggtgcttagttgaagagttctcaggagtctctaatttaatttcctaaaaaccccaagggagacagctattaccagcagatggacaacaggctcagagaggttagagccttgcccaggacagtgctagttggtggcagagacaggattcaatccccagtctgtcagctccaggccttctccctggaccctgtctgcctctttccagggtaccccactcacccccaacccgcgtccctcaaacacagacacacaaaatacttgagctgaacggactgtgagtccaatgagggacaagttccaaagtcatcagaactgaaggtagaagggaacccagtgggtactcccttggacaatgctgggggaatcaaaggggtcttcacctagggccaatcttccagggggtcctagtctaggagagtcagcactgaacgcaggctccgtgggctcagggctggaccagagggagggacccagtactggcggaatgtcagaggcacacaggactcaatggaagagggtttgggagttggattttgaaggatgaataggagttcaacaggtagaataaggtggaaagagcatgagcaaagtcctccagaggtggaaggggatggacacaaatagtatgttaagggggagggtcaagtgaatcccaagcttaaagtgaagggagacagctatatggggtgtgagctggggaggatcgtggtcaggtctgaggccagagtgaggaggaatggactgaaaggtcccggttgaagagtcacatagcaccccagacgtcaggtgcatgagggtgggctggggtgtacctgctgatcccgtgcgccccccgccaggcgtggtctttccctaccacccccgtggag

SEQ ID NO: 35768 - DNA, 1990 bp, Artificial sequence
  DNA replication origin
tgctgggtgagtcagggccgctaaaagtggtcttctccgcgaaaagcagaagtggccaagtgcggagaggggtagcgggtagggcgttcctgacgtccgcggttcccccagccactccccatctgagcccctcgccctctccctgagcccctggacccttctgattccccgacccccacccgagtcttcccacgttcccctccccagagacaccttccccagaggcccccttctgcccctaggcccctcctctgaaccctgcttggttgtcctcagagggtgagtcgggctcggtagtggtacagacagcgcctgggcaggtggtaagccaccgtggtggcaccatcgtcttgccctgccgctaccactatgaggcagccgcccacggtcacgacggcgtccggctcaagtggacaaaggtggtggacccgctggccttcaccgacgtcttcgtggcactaggcccccagcaccgggcattcggcagctaccgtgggcgggctgagctgcagggcgacgggcctggggatgcctccctggtcctccgcaacgtcacgctgcaagactacgggcgctatgagtgcgaagtcaccaatgagctggaagatgacgctggcatggtcaagctggacctggaaggtgatcagccggtggggaggataaaccttgcttctgaggaaggaggggggcggggatggcaagggacataaaccaaatcaagttggcctgcaggcatttagaaggttggttggggtagagcccccatatctggttctgggtgattttcctccccagggacattggcgatgtctggagatattttacgttgtcacatctggagaaggcagttgctactagcccctagtgggtagaggccagggatgcagctatacatcctaccaggcacaggatagtcccccacaaggagtgatccaggccgggcatggtggctcacgactgtaatcccagcactttgggaggttgaggcaggcggatcacctgaggtcaggagttcaagaccagcctggccaacatgccaaaaccccatctctagtaaaaatacaaaaattagccaggcatggtggtgcattcctgtaattctagctacttgggaggctgaggcaggaaaatctcttgaacccgggaggtggaggttgcggtgagtggagatcgtgccactgcactccagcctgggcgacagagcgagactccatctcaaaaataaataaataaatacataaataaaataaaataaaagtgatccagtccaaaatgtccacaatgaggacactgagaagtcctgggataggattcaggcacagtgagatccaggcactcacaccgtgtcaggaaccatccttctgctctgcttcccaggtaggctttcttccgacaggcttctctttctggaaccaagaccacagtgcctaggctttcacttccctgcttagcaactgatttcctaggagcagcagctagagtcccagagttgtccctcactggctcagcttgagtcatgtgcccaactgtgagccaatcactgtagctggaagatgggatgctctgattggctcaccctggagctgggaggtggggtttctatttgaagaattccctcccatttgattggccttttccagttctctttagaagattctaggtgagatttcagggcccttgcttgctgacctccctaacaataacaaataacaacaataatagcagcagctctcctttactggacattttctgtggcaggtgcttagttgaagagttctcaggagtctctaatttaatttcctaaaaaccccaagggagacagctattaccagcagatggacaacaggctcagagaggttagagccttgcccaggacagtgctagttggtggcagagacaggattcaatccccagtctgtcagctccaggccttctccctggaccctgtctgcctctttccagggtaccccactcacccccaacccgcgtc

SEQ ID NO: 35769 - DNA, 940 bp, Artificial sequence
  DNA replication origin
ctccccgcgtctctccctctttctctccagctctcccccctccctgcccgccccggcccggtttgctgcagtctcctggcgcacggataaccttgctgccgccgctcctccagctcttccccacccccctatccccggcccgggccagggccagaagggggcggggcagcgagcctcgggttttggggtgggggggaatgaggcgggatctggggcaggactgagggcgggggggagtctaggggcgtgggttcttgcagaagctaggatgtgaggtcccaagaggaggagggggagttctccaggaccccggaaagggtggggacatgggcgtgagagaggtcctcgctgtggggaaggcaggcccgggagggagccaggcctccgaaaagccaaggctgggaggctggactgagcgccccgtgcccgccccccaggtgtgcgctcgggcggccctcggtcccggcgcgctctgggccgcggcctggggcgtcctgctgctcacagcccctgcgggggcgcagcgtggccggaagaaggtcgtgcacgtgctgggtgagtcagggccgctaaaagtggtcttctccgcgaaaagcagaagtggccaagtgcggagaggggtagcgggtagggcgttcctgacgtccgcggttcccccagccactccccatctgagcccctcgccctctccctgagcccctggacccttctgattccccgacccccacccgagtcttcccacgttcccctccccagagacaccttccccagaggcccccttctgcccctaggcccctcctctgaaccctgcttggttgtcctcagagggtgagtcgggctcggtagtggtacagacagcgcctgggcaggtggtaagccaccgtggtggcaccatcgtcttgccctgccgctaccactatgaggcagccgcccacggtca

SEQ ID NO: 35770 - DNA, 1337 bp, Artificial sequence
  DNA replication origin
acttggccacttctgcttttcgcggagaagaccacttttagcggccctgactcacccagcacgtgcacgaccttcttccggccacgctgcgcccccgcaggggctgtgagcagcaggacgccccaggccgcggcccagagcgcgccgggaccgagggccgcccgagcgcacacctggggggcgggcacggggcgctcagtccagcctcccagccttggcttttcggaggcctggctccctcccgggcctgccttccccacagcgaggacctctctcacgcccatgtccccaccctttccggggtcctggagaactccccctcctcctcttgggacctcacatcctagcttctgcaagaacccacgcccctagactcccccccgccctcagtcctgccccagatcccgcctcattcccccccaccccaaaacccgaggctcgctgccccgcccccttctggccctggcccgggccggggataggggggtggggaagagctggaggagcggcggcagcaaggttatccgtgcgccaggagactgcagcaaaccgggccggggcgggcagggaggggggagagctggagagaaagagggagagacgcggggagagaacagggacagagagaaaggcagggagaggcagagaagagagtgcgcgacacagaaaaaggggaagggaagagagagaggcagagatggagagggagagacagatggaaaagaagagacagatgtagagggagagacagagatggagagggagagacagagaggcagagggagagacagaggggcagaggaagatacagagatggagagggaaagacagagatggaaagggagagacagagaggaagagacagagaagcagagggagagagagagaggcagaggaagagacagagatggagagggagagacacagatggagagggagagacagagaggcagagggagacagagaggcagagggagagacagagaggcagagggagcgacagagagggagagggagagacagaaagggagagggagagacaggagagtgccagaggcagagagactcagagaagaggagggagagatagggacagggaaagacagaaacggagaggagaggaaaaaggcagagaggatgacagagatggagagaggcagggagaaatggagagggagagaacctagagtgccaaaaagagagatcaaagagggtgagagacagagaaaaggaagagacagaagaaactcagagggatatagattcagaggcagagagatatagaatccaagattggggagacggggcacacaccacccgcgcccgcagccccactt

SEQ ID NO: 35771 - DNA, 1015 bp, Artificial sequence
  DNA replication origin
gagatagggacagggaaagacagaaacggagaggagaggaaaaaggcagagaggatgacagagatggagagaggcagggagaaatggagagggagagaacctagagtgccaaaaagagagatcaaagagggtgagagacagagaaaaggaagagacagaagaaactcagagggatatagattcagaggcagagagatatagaatccaagattggggagacggggcacacaccacccgcgcccgcagccccacttaccatcttgcccgcgcggcccccgccgagcggcccctacgcacccggactgcgctccccgcacacccggttaagactgggcaggtccctgcaggcggcgcaatcccggcgtctgcctgcaaggggaggaggaaggcgggcgaggcggggtgtattaaaggggccgcgggggcccacgctcccctggagcagtggctggagcgcgggcggagaaagaagcgctctggacttggagtgcagagctagttccctcaccctgctagctgaacttaggccagggaagaacctctctgagcctcagtttaaccatctttgaaatggaggagggggctgagtcttctatcttggttactgtgctttggcaggggacctgggggatctggtgaaagagatcatttggcctgcaggccacctgtccattgggtagtcatagtggagtcctggtctccagcaccccaaaggcgctccctgtgcagggtgggggcctcacgatagtcacactctgctgtggactggagccacaggccccaattcaagtctgcccctcactggctgtgagaccttggaggagacagttggcctctctgagcctgctgctgactctttggtgaagatccagtagctagacatacagtagatctccggtaggggttgggaggggcaagaaaaagggacatctaggccgggcgcggtggctcacgtctgtaatcccagcactttgtgaggccaagatgggaggatcacctgaggtcaggagtgcga

SEQ ID NO: 35772 - DNA, 1685 bp, Artificial sequence
  DNA replication origin
gtgagggaaactgaggctgagtagcgggacggccattggagacgagggtgtcgatggtgaggggcgaaggggcggggcagctgccagggggagggccggggaggggccttggaggctccctgggaacacgcagggcggtcacggcggcctgcccagggcgcagcggggtcgacctttgtgcggggcgggtccctggcagcctcggcccggactcgccgccaacgaggagccgagcgccctggagaacgcgtcggggctgagccggggtccagcagccgccgctatggacatcccgccgctggccggcaagatcgcggcgctgtcgctgagcgccctcccggtgtcctacgcgctcaaccacgtctcggcgctctcgcagtgcgtgcggagaggggccagggcggccttggggacagtgggggcgggcgggggcggggaggactggaggtgggctggagggaggatgcgcggtccgcggacctggcttctgcgagccctgcgccccagctcagctccgacccggcaggattggggtgggccagaagaacacccccctctaaccggaagtccccttcccgccgggctggaggctgggatgcggccgctcctgggatgtttgtggcctgggaagaaggaatgatgagtccccacaagccagagctttggagggtttctggggttttcccagggatgcgccctgcctaggttccaaagtcaccaagggtaaaagtattgtcccagataaggccccgggtacctgactcctgctcacacacacacacacacacacacacacacacacacaccctactccattgcctgtctcaggcctgtgactttcctcttgttcagggctggctaaccatgtccctagactcagttccccctactggttccctttcctggtccctgtctcctaaccctagatcctagccctgtgggtccagccaccggatagtgggcatctgcaagcccctcgtacttctaaacccagctcaacccaagccatggggtggagagagtcttaaccatgagcctggctccctgggtgggaatacccatctccatctcctgggatcctgggtgagccaagttcctctgggagcctcagttccctcatcagtgtaatgggcacgatcctagatctcatctcatagttacggttaaggattataaactgtgtacaaagatttgtcttggtctcatctgagtactataatgtcattgttagatggggtcaggatggaaatcttgggttctgaggggatcatgagaaaataggggcctggagagtgatggacagagtcttgagtgtgaccctggacaactggacagtactcccatcctctctgggcctggatttgcccacctgggttgagggctgcccagagacctggcttctgttatctatgcaactggttgacctgtcttatcaggttgtgggtgcagatcagggcaggggtagggtggagttaatagaggcatttggactttagctgggaggagctgggagcgtcagacaatgaagtctacagaactgagcactcgagaccctgtggcttgggagctgggcctggccacagaggggcttgacgttgtcgaatgactgaacagactgagtcaaacacataacaaatgatgggataaatggtaaagtcagaaggggcaggccaggcgtggtggct

SEQ ID NO: 35773 - DNA, 1941 bp, Artificial sequence
  DNA replication origin
agccaggctgctggggatgaggtctgaggctgctactgagaggaaccagggagccgtggtggggcggtctgcagagtgtctcagtggggtctgagaccagggaggtgccagatgcagtggcagagccaaggctggggtgatataccaccctttgttctttcctgacgctgtggctgaggcagagcaaagagtaacattggtgggcttggcctgggtgcccatgaatgagggctgcccagaaggcagtgggccaggaccctgagcacagcggggtagttctctgcagccagtggttcagggaatcctggcactgggtcccaggcattcagccatccaagtcacttctcagttctcagcaacctggaggctcaccaggctcagggcatggactttaccccttgccaggggacgaggcctccaagtgctgtgtgcgtgtgcaggtgcatcctgtacacgggacaaggccaagcccctaggctgagctgggcacaggcaccctggccttgtgtggagaaggtggggtgggggtggcaggcagggctgcctggaggaggggatgctggggcccgcttacaagaaggctcattttacagacagaaagcaggcctggggggtgttgaccctgctagagttggggaaagtccaggggaacctgaacttcacccatgggcagtggacacctggggaaggaggctgagtcagacctgcggccagaagaccctcttgtggcccagttcaggaagacctgtgacccagttggcatcaagctaaggggctgcgtgcagaatggggcctgaggtaggggcagtggttagaatttgtgccagctgcagactggggtcccgcagggcaggcgtcaggtgggcatggttcaccttgctgtctgcagcatccacaagtactccacatgggccagagtctggttggagggggtgacaaagacagatggtctccttattctcccccccaatactgtggccccctcccagctgttcaaaacctcccacagcctctcacagctgtctcgcttctcatcacaccccagcagaaccgacctcctttccactgctcagttccaagcctgagccactttcctccctgccaggaacaccgttcccaaactcttcaccaaactggctccatcccgatattctaacttcagcccccacccgctaggaccccttctaccctctccccgaaatgaagaaccctaaacccgggactagcctgcaaagggacagccccggagtcaaagcctcacacttaaagacccctcgcagtggctcacgcctgtaatcccagctcctcgggaggctgatgtgggaggatctgttgagcccaggagtttgaaaccagtctgggcaaaaaagtgagacctctgtctttacaaaaaataactagctgcgcgtggtggtgcatacctgtagtcccaactacttgggaggctgaggtaggaggatctcttgaggctgggagttcaaggaggagggccactgcactccagtctgggccacagagtgagacctctcaaaaaacaaacaaaaaaacttcacacctgcctggaaacacgtttacatttgtggccaccttatgaaaactcaaatctaagcccactgaaaggcattttgcacccaagagctggaggttgctccatccgtgcgcacagggaatgccgacttgatctttgggtggggatgggaaactctggggaatgcagaggtttagaagcgcagagtccaggagaaaatttccttagaacgaagttgtggaggcaggggaaagagggggcacgccaggacctccagggcgcaccccttggcctaagagcagaagcatcccgaggtgttgtgtcccagcctttgacagtgagggaaactgaggctgagtagcgggacggccattggagacgagggtgtcgatggtgaggggcgaaggggcggg

SEQ ID NO: 35774 - DNA, 1497 bp, Artificial sequence
  DNA replication origin
ggggtcctgcggctttgacggaggtcgcgcccccaggtcgccgaggagcggccccccacccgccgcggtcgcgacccgtcagcccagatcttgcaaggagcccgcgactcctccctcgcggcccggcccgcgctcaccgccttctccaggtggctgcgcgcctgctcgctgttcttggtgtggtgatagagaacggagcccagctgcaggtgtgtacgggcctcgatgcgctgcggcggcttgaaggggaacacggcctgcaggcagtgcacgcacaggcggattttgggcgggctggaagtgcggaagtgctcagcgaagcccagaagcgccaggtaccacgagtcggccgcctcggcctgcgcagcctgggccgccgccgcctgggccgctgccgccgcctgagccgccattttggcctccacaacaacaagccgccgccacagggaggcggaagcaggcgcgcgagacggggccgggctctcctcgcggcttccgcgagatctgccgcccaaagcatcctggaacatgtagtttgtatttgggatgactgccgctccgggaaggtgtaaaagggcgacgccgtttggttatcgtgactgggacttaggcatcgctgataggctgaggcttccgtttctggaggttaaaaaaaaaaaaacccagtcgttcacgcagtaatagggcgagtctgaccgaggcggactacatctcccatcaggcgatgcacactataacagggccccttaaggggcgccggagcattgtgggattggatgagtctcaagatggacaaccgggatgttgcaggtaacagcccccgcctcctctcaggcggccgcctgggtccctggggctaggtgtctcccctgactcctcgggtccgtcctgctgcgacccgtggatccctcgcttcagccccggggcagcccacagcgtcggcttctgcacctcttggtttctcgagaccccagacccaggttgctggccgcccccgcttggtttgctgaggacgcacggatctccgtagaggccgccacccggctcggccctgcgtcccgtttccgaaacaaccgccttcagggctgctccaacctccgttccccaatacggcgacaaccttgggctgtccctgcacccctcttttcgtcgcagctggcctctggcctgtgtcccgctttctggaaaagctgcttttccgaagtgctttgaggctcccttgacacactttcccgcgtcttttgaccctcactttgctgcaagccttggcctttctgcttccccagaatagaatgcatttacccatcagcagatacttagggcgtgctcactgtgtgccaagcagtgtgctgggcgctacgcatgcagcggtgaccgaaacagggccctgccttcctggaggttgctttctactggggtgtcagtgcattaatgagaaaatatttacaaaaacttacgtatgatgtgaggttacgtatgatatgatcagagtggagg

SEQ ID NO: 35775 - DNA, 1173 bp, Artificial sequence
  DNA replication origin
cctgcttccgcctccctgtggcggcggcttgttgttgtggaggccaaaatggcggctcaggcggcggcagcggcccaggcggcggcggcccaggctgcgcaggccgaggcggccgactcgtggtacctggcgcttctgggcttcgctgagcacttccgcacttccagcccgcccaaaatccgcctgtgcgtgcactgcctgcaggccgtgttccccttcaagccgccgcagcgcatcgaggcccgtacacacctgcagctgggctccgttctctatcaccacaccaagaacagcgagcaggcgcgcagccacctggagaaggcggtgagcgcgggccgggccgcgagggaggagtcgcgggctccttgcaagatctgggctgacgggtcgcgaccgcggcgggtggggggccgctcctcggcgacctgggggcgcgacctccgtcaaagccgcaggacccccacccgcctctgccggaccccaaagccaccagcctctcaagggacacgaaagcctcgccccccacgccttatttcccgtttctggtgacagggctccaggagccccgtcaccgtactctgaaagttgcctgttattgggagcaacaggatccgcaaatcgtctggttttcaggaggatcccacctgttggtggcgatggggacatcacagggtcctgaagctattagctcctcctggttcagcttccggagcatcagccccaaacgcttccacctaaagtgacttggggtaggggttggcgaaggcgagacccctggcattctcccgggaatctgaagtctggtctctcaggaacctggaagggcatgattctccttggacacagaagtttggtaatcgtggtttttggagggtcttgtgcccccatcaataatgcctggtgtcgtacgagggaagctgagacccggagtctggagttggtcatttgaggcctatgaggaggagaaacaggggttctggattccaggccccgctgttcagtttcagtattaggggaactaaaagcagctcctgctttttctccatccactggtgacttctaccatccatcagtccatcctcttccgtcagagtgagtccctcccctgacccaacttgatttgtgtcatcttggtgcctcaaagaatgcgggagagtggctgtcattctgccc

SEQ ID NO: 35776 - DNA, 2345 bp, Artificial sequence
  DNA replication origin
ctcgcacacttccgggttgaggcgcgtctctccgagtgaaggcgccacaagccaatgaggtccagccaggactcccaggacccgcaccccatggaaggtgtggccagcttcatgacagacagcgcatgacgaccagtgagtgcgcgggccggctggttctcgggatcgcgccgccggccggggcgggtccgaggaggcgggacggaatgactgacaggcatcctgccaatggtagatgggagcgggccgcagagccactcaaggccatgcgggggcgggacttaaacttcggggcgggaaccccgcgaggggcggggcctagggggacgagtcaattcgtggccggctccctgggaccccggagggcggatcgcctgggccacccggcggccggcaactggctgggcagggggttccccgcagtgctctgcaggggctccccacccataatgcaccggaggcggccttggccaggcgggcgtggggcagctacgacgggctgcgagcggcgcctctgaggagcccgggcgcttcgtggcctggcagtgtttctaaggggctccggtggccgcgcgctctttctgcctcgtcttgtggcttcgaccctctctatccaggagaatcttggagattctggcgcgcgccccggttctgagaagactctgcttcgggattcttttccctggcccccgttctgaggaggatcttcggaaatcttgccccgacccctcttctgagagagtttgggggtttcttgccctgcccggttttctgaggacaattgccgggatcacgattatgttgtagattcgggaccccagctctgtttcctaagaaaacatgggagttcgggatccctaaggagcatttggagaatccagggtccaccgccttttccgaggaatatttggggcacatacactccttttctaagcactcttgggggccgctctccctgtccctcctttatctgaggaaagtgagggctgcgcgcccccctccaccttcgtttctgaagatatcttggggattttctgcctcccctgttttctcactacacgaggaatttgggacttcaagcacctcgcctctctccagagaaggatggcaggagatgggcgcccctcacccctttactaaggaaatgcgaccgggcgcggtggctcacgcctggaatcccagcactttggaaggttgagactggagggtcgattgagcccaggagtttcagaccagcctgggcaacatggcaaaatcctgtctctacaaaaattaaaatcaaaatgaaaaaatcagcaggggtggtggcgcacacctgtagtcccagctactccggaggctgaggtgggaggatcgtttgaaccgagaggtcgaggctgcagtgagccaagatcgtgccactgcactccagcctgggcgacagagcgagaccctgtctcaaaaaaaagaaaaaagaaagttatcgggcgcggtggctcacgcttgtatcccagcactttgggaagccgaggtgggcggatcacctgaggtcaggagttcgagaccagtctggccaagatggtgaaaccctgtctttactaaaaatacaaaaattagccgggcgtggtagtgggcgcctatagtcccagctactcgggaggctgaggcaggagaaccgcttgaacctgggaggcaggttgcagtgcgccgagatccaccactgcactccagcctggatgacagtgagactccgtctcaaaaagaaagaaagaaaaagaaaaatgcgagggagttgtgctccatgtgcttttctaagcagcatctgagtgtgggaggaaggggtccccttttcctgaaacttcgactttctgacgcctcagccctaggacaatgcggtgagttagacctttttagaaaagcaacccaggccgggcgcggtggttcacgcctgtaatcccagcattttgggaggctgaggcgggcggatcacgaggccaaaagatcgagaccatcctggctaacacagtgaaaccccgtctctactaaaaatacaaaaaattagccaggtgtggtggcgggcgcctgtagtccaagctactcaggaggctgaggcaggagaatggcgtgaactcgggaggcggagcttgcagtgagcggagatggcgccactgcactccagcctgggcgacagagggagactccctctcaaaaaaaaaagaaaacgaaagaaaagcagcccattttgccccctttccctttttttttttttttttttgacacagtctcactctgttgtgcagtggcactatcttgccatctccgcctcccaggttcaagccattctcctgcctcagcctccagagcag

SEQ ID NO: 35777 - DNA, 1291 bp, Artificial sequence
  DNA replication origin
cgcttgaacccaggaggcagaggttacagtgagcccagatcgcaccactgcactccagcctgggagacggaatgagactctgtctcaaaaaaaaaaagaaagggggacaagtcagaaaagtaggaccacagctgagagaggtgggggtggggagatccccacagagaggcaaggcttcctccgagaagcagcaatgtcttctgaaaagaggggtcccccggggaagaaggggttccccaggggtccacaaaaggtgggggatccctcagagaaagtacaccctgatagaatcaggggtctctccttagaggagtgaggatagggtcttagagaggccagggcccctcaaagaaagcgggggaccctcagagaggcagagggtctctcagagagatggggattcccctcaaagaggcaggggtccctcagagaaagggactcccctcagaggcgggggtcctcagataggaaggggtctctagggaggcaggggtccctcaaaaggatgggttcctgagaaaagtagagggaccctcagtgaagaagggagtcccctcagataagcgggaattctcaaagagttggggatccccaaagaagggagttagttcctgtcaaaggcaggattcctcagagaggtgggggttccctccggcaggggtcctcagagaggcgggggagcccctgataagaggggttgtcccctcagagaagcagggtcgcctagagagacagggctcccctcggagagacgggggttccctagagacgaggtcccctagagagacggggtcccctagagaggtggggatcctctagaaaggcacggatcctctagagaggcagcgttcccctagagaagcggggtcccctgcctggagagatgggagtcccctagagaggcaagggtcccctagatgggaagaaagtcccctagaaaggtgggggtcgctagaaagatgggatcccctgcctggagagacggggtccccaagagagacggggtcccctagagaggcaagggtctcctggagaggagggaggcccctagagaggcgggtgtgtccccaagagaggcgagggtccctaagagagacggggtctcctagagaggcgggggtcccctggagaggcgggggggcccagagcaggggctcccctgagggggaagtgctgtggagaagggagtaaactcggccaaggtagtgcgggagaagcggaagccccagagagcctggggcaccggaaaccggggacccgccagcggcgcctgccccttactcaccgaagt

SEQ ID NO: 35778 - DNA, 1299 bp, Artificial sequence
  DNA replication origin
cccgggcccgcggcgctcgctgcgccggtccgcccgcccgcccgcgccgccggccagataatgcgcccctcggccgcacacatggagcccggcgccggcgtcaccgcccgggacatgcgcaccaggtcagcgcgcccggcccgcggcccccaaaacaccggggagctcttaaaggcgacgccgcccgcccgcgcccggctgggcggggcgtggcgaccgaggggcggggcctgacgagaagggaggagctcgtgggcggggttccaggcgtagaaggcgggcccctgagttgagggggcggggccggacggtaccgccccggaagcaccgcccctctccggcgcgctcccacgcgacacctcgttgggcgcgctggtttcccacgcgggctccggctggctccctccccgccgagtcccagcgccctccgcaggccgaagggtcgtggccaactcaccggcggcaaagccgggcgggccgcacccaaggctgactcacgacgcgctcactgctgacctcgcgccagctgagctgggcgacctcaagcaactcagggttgcctctgaaacgcgggttagaatgtcacccccgcggggtcgtcacgcggaagctcttctctgggaacttcggccccggtgtctgtggggagggcggggtgtggatcggctgaacgatcacttctccagtgcagtgaacagaattctacaaagaaagctccagacccacccacctcaagacacttggggacgactgctctccctctccagttacctcccaatctgccctcgtgcctcagggagaaggtgaaaacccctcaagaaagcaaatctgcacccctccctctccagtaacaaggaggaaacacaggagacagaatgaaagcctgaaagagaatggactttggagatgttaaactacataaagcgaaatacaatttcaatagggaaaatatcaagttcatggaaaatctaccacaagaaggctctcaataccaaaatcaggttctgaggaatccccaaaaccgcctcttttcatgttgttttaaaacaaacgattcctgatgagacacctagactcctgaagagtggtggtgacatgctttatcgcataccctaataaatctatatgtacaactgaaacaaaagtttcaccaaacataaatttaccacatgcaacgtactgttttcttttttcttttttttggagacagagtcttgctctgtcgccaggctggagtggtgcagtggcgctatctcggctcactgcaacctccacttcccaggttcacggattcccctg

SEQ ID NO: 35779 - DNA, 1093 bp, Artificial sequence
  DNA replication origin
ccaaacttggcggggggcgggggctggggacgcacggctgagactggagcggcgcgggccgcgcagggtcggggcctcggggggctctgaaggacccctgcatgagcgtggaaaagtgagagcgagcgagttctactccttgtattctgggagcgtcttcttgcgctgccctggaaagttccttgccccgaggcggcccgggcacgtgggggccgggcgggggtcccggaaagtcgcggcgtcgccccgcttccgtcctgcgcttcctgcggggtcgggggaagggctgggccgcgaggcgcctcttccgagtggtcgggacgggtggaggcggcgggaagacggcacgtgggcgcgcggggcgggggtcccgctcaggggcgggggtccggggcgggttgggcagcaacgctgaaccccgcggcggcggcggcggcggcggcggcggatcccgtgtcagaataagagtccccgcgcgcccacgcctggagggccggccctcccccagctcgcgcccttcctgcctaacccccgggagccgcgggaccctttcccctctctgatctccggcctttctcaaggcccgacactttaaatttgcctccccatctaggcggtggctccattgatttcttttttcccacctagagtgggtcggcatcagtgactagacagcagcagctggccttttaaagggattattgccaagaatcggaattgatcacttcaacaaggaaaggcttatgggcagggcccaggctgagagcctgacggacacttggattgtgcgcacactgggacccagaaatgaatggtgacccctcccttaggaagtgaatgacaacccttaggtgcgtgtttctgccctgagaattttgcacagggcaaaattttgtaggtctgacttaacgtctttaggtgtatagttcatccttatcttaagagctgtggattctttagatcaaagtccgagtgagtcacttgagcctttaattttctttcttcctaccagtttacttctttcagttttcttggagtacatagtgctggttacatctctggttctgtgtgcccattcacacagtgacacctc

SEQ ID NO: 35780 - DNA, 1676 bp, Artificial sequence
  DNA replication origin
caggtgcccagcagagctgctccctccagccccagagacctctcttgttgggccccctgttgtggtagcaggtcagggtcctcagcagagggctggctggcgtgtactcaaggtgcacagcagctcactatgaagcctaaggcctggaactctgccaatcccaggcccggcactgacggctggcctcacagcgcccgcctgccctatgcctgtgcctcccagaggcaggccactgcggggcggggccctgcggcacccctcccccacctcaggaaggacaggcacagctggagggggtggggccagcccccgagtgcagggggctcctttggcaggagcctcctccactgccaagaccaatgacgcagggcctgctactggccaatcctcggccaccacaggacacttgctcctggggagggcaggtgccagtaaggagtggctcctccctcctcgaagcaagcgggactagtgcccccagcacaacagggctggcggccaccgcacagcaagcacagacccaggagcaaagttgtcaggaagaagaaagcgcgacagatgactcctgcaaagagcagtggggggtacattagaacacttcctaaaagtaggtgaagaggctaggtcaccctgactggcaaatgaggattcatttcaaaattcccagtgacaggggagagtgaggggaaggcagctccggtggcggaagttccaggcaagggttgtgcgggagctgccagtgcatggagagtagccccgtcctgggggctgagatcctctgccggctgctgcctgcacagacagatcccaacagcagtgtgcccatttgaaagaggagagcactgaggctgccagggctgcctgagacacaaggttgaaggtcagcctcaccctcctcctcactctctccaaacaccccaggccggactgcaagccagcacagatgagcagcaccagcaaggctgagtgggcatcggtctcctctgatacgtcccgcacacactgggctggcaggtggtgggggcgtagcccagctcttcctcaactaggggccaaaaaggacaggttccagccacactagagaccccacacaggtacagcgcagctctgaccgggagcacctccatgggctttagggcagataggaatgctgctttattttcgtaaaatgccaccatccaactggcctgagagcctcaggcagaaaacatgttctagaacaattccaaaaggctgactgatgctgtggcaggaaccagaactcttaaagaggacttgggggacaaacagaaggcacccagcacacttctggcacaccaggccagtacgcatctcttgataattaaaagagaaattaagtacatgacacaaatcataaaaccaaacccctgagatcacaatgctaatactaactctaccataaaatgccatctgtggcacccatcactaacatacccatagtaacacccttatttcagacaggaagaaagtgaggcttcgcagtaagtgggttaaagcactggcgggagcagcagggctgatgctcttaacggtggattttaggcgtctttctgcctcctcacccgacagcagctcaccgagcctccactgtgggctggggactcagtggtgaacaagacagagggaacaccatccacccccatgctggaaaacga

SEQ ID NO: 35781 - DNA, 1473 bp, Artificial sequence
  DNA replication origin
ggaggaggctcctgccaaaggagccccctgcactcgggggctggccccaccccctccagctgtgcctgtccttcctgaggtgggggaggggtgccgcagggccccgccccgcagtggcctgcctctgggaggcacaggcatagggcaggcgggcgctgtgaggccagccgtcagtgccgggcctgggattggcagagttccaggccttaggcttcatagtgagctgctgtgcaccttgagtacacgccagccagccctctgctgaggaccctgacctgctaccacaacagggggcccaacaagagaggtctctggggctggagggagcagctctgctgggcacctgaggccctgctccatcctgcatctctcagaacctctgggtagcctctggtcctataccagtgagaacgaagtgaggccacacaggcacggcccccctgatctggctgtcagttccaccttgtccatgtgggctggagcagcttcgagaactcattcagggtcttgggttcaaatgggcttcatggaactgagcccagagcttacagggtgggaggctgtgctgggaggggccctgcctggctggaacaggggcagagtggggagcatgggggtttctttgagtcacagggaagggtgctatgtcctggaggtggaggtgcattctccctgtccacctggggacctcatccccaacagtagttataaggccagactgggaagcttcatccgtagagtggggcccttacttgtccgaggtcctggcctcccctcatctctcacctaaacaggcttttccctgccctgggcctgggagtgcacatacctgctgtctaaggcagtgcttgaaggagaaatgtcccacccctcccacagtgagggaaatgagaggaggggacccacactctgagggcagtgacttatctgtggtctcatgggaggcaagacagacaacctgttagtgagcagttcagatggggtttatgggcaaggcatgtcggaggaaggaaggacagagaccatagaacttcagggctgagagggacaccgtagcattcctcacctcccccagagaagtgaggccatgacctccacattcgacctctacctgggctccattccacggaggagctgaggggcagctgagcaggagcgggggcgggggtggacagggtggccgggggcagcggaggccgcacagttggtgtgggataggtggtaggtgcaggctgggatgccagaggggctggggacaggtggaggcaagtctgaaaacctgtgcccttgagattcggagtctccctgcctcagcctggtcatgttaagggtcagccatggcacctgggtggtggtgagacagggtagggagcacagagctgctctgggcctgtgtgaagcaccagggatttcctggccttgaggagaccccagtgtttcaagccggtgcccgggtgccctggctggaccaca

SEQ ID NO: 35782 - DNA, 1272 bp, Artificial sequence
  DNA replication origin
gcagaaccaaggggcgggtgggctggaaacaggcgccttggctgacagataaaattaccaggtctgcaggggcttttgttggtgggcgtgttcgctctttcttccctctttggcacagtttgttcttgcccaccctcctcagacaagagcaaggctctgggcagtgtccctgcctgctttcgaaggtcaggttcgagtgcagagaagatggctagtcctggactgacccaggcaggtagtttcatacacctgttgactttttttcttttttggagacagtcttgctctgttgcccaggctggatggagtacagtggtgtgatcaaatatctttattttattatgagacaagagtctccctctgttacccaggctggagtgcagtggcatgatcttggctcactgcaacctccatctcccaggagatactcctgcgtcagcctcccaagtagctgggactacaggcgcctgccaccatgcccagctagttattgtatttttagtcaagacagtgttacaccatgttggccaggctggccctgaactcctgaccttaagtgatccgcccgacttggcctcccaaagtgctgggattacaggcgtgagccaccacatcctgcccacccgtgaacttttatccagtcctttctcttgtctttgtttcctgagggtgggcacaggcagtcagtggcagagaaggtggtctgctcctagcgtggctgggggaggctctgaggggaaggaggaggggaactggctggtcagaggtgagggaggcctgggtttggtcttggttgctgaggggacaacaaaccagcaggccggtctctgggaacctttcttggggggtgggaccctgggaaggcatcctgcacaccctgtgccccacagtgtggcatttgcaagtcattgggtgtgtccattttctgggggtggggtgcacagctttcatcatatttccagaggggtcctcagcccctaaaagcaataacattggcatgtgggcagttctgggtttcagggagagccctatccagcagttgtggggctggtggagacagtcaagggtctgctcctgggatccaggcaggactgtgaggtggcactggagcggtgaggactgggtggagggcaaggggaagaggttggcctaggagctgcttcccccatcgccccataaggactcggggactacctcaaacattagcatcccaggggagcacatgcagagaggctcatgggggtgctgcggtgagcaccctcttaccctgtg

SEQ ID NO: 35783 - DNA, 1943 bp, Artificial sequence
  DNA replication origin
gcaaagaacttccaagaaaacaaaaattgccaaaagggagcttcgagtctacaagagggtgggaaggagaagcattaaaataaaacaacacgagaacaaaaaacttgatttcaaacttgttcctctccaaatttagcaagaacatttttccaaacgcccctttggtatctcaacgtggctttcagaaaagaccttgaagacaagcagtacttgtcagccggcagcctgcaagtgagagctacaaagtctaaagaaactgcaaattagtgtttttgccgcccaacaccaccattaactgcaatttagacgtgcagttaacaatcaggcggtgcagcgcaggcgtggggtggatcgcggaacggcctctgcctcctagggacggcactgccggcagcaggccaggctcacctgcttcagcacggggtgtggggcagcggtgggctcggccttggcctgtgcaggggccgtgccctgctgcaggagccgctgctcaatctcctgttcctgctgcagcgccttcacaaaggcggccttcagccggctggtgtgctccaccttgagcgccttcttctggttggttgtcatgcagttctcacacatgatggcgccgctcttctcctcccgccagcggcacgtgaagtccgtcttgcactgtgcacacatgtagggctcccgggacagcacagtggcggccgacatcctgcctgctgcaagcagacagcacatggctcacgtcagagggccaggacgacagtcagggccctggccgcccccagcccaggatgctggagtctcagtcgccacagtctgtccgttctgcaaatgcctactgggcaccaatgacatgtggacatggggccggccaacgccgaacagcttcagaaaacgtcggcctcctgtcccacccatcgctggacatgacaccactgaggaccagcagggaccatgccaagccctgcctcagtgtggtgggcacccttgcttgtgtacgagttaataagggtgacaggcaagtcacccagcaagtgctttgtgggtgctgaggtactcagttcattcttaggacggggaacccccaaatgcgccatgtcctgatgaggaaactgaggccaagagagaccaagtgacctgtagatcacattgtcactcagtggcagggcaggactcacacccgggataggccccaggccttgggctgcacccactgcacaaggtgggcagcaggctacaggggcagcaagggcttggtccccttgtctgggggacagaatgcatagtctccttgggggctgcaagaggtagctggggaagtgtacatgaagcatgtgctcgggcgtgaggtctgggcgtatttgtgccgaccttttttgtgttcagcacttaggggccttaattgctcttggtcatcacagacaatgtcagaggactgcaggggctggggggtggggagatggatgtggcgagactctcggccttccctctcctgcctggactggcctggccccttctaagcccctgacccatgagaccgccacctgcagcttacatgctctggtgacaacggcacatctccttgcacacgtccaacccatggccagcgtgagcggcgccagaaccagacatggtgcgaggctgggggctctgggaggtgtcaggagatgcctccagcagggctcaaagtctctcccacagtgaggtcctatccttggcaacaggagagggagactgagccctgatgagggaacggcagagacagactggtctgggagagcggatgcccgcacaggcaggggcaaggagaggcactggtcccaactcggcccccaatcctcatttcctacagcagccccaggtggctcttttgccgacatcaccttgtcgaaaaggaggcaccaaaggcaccagccgggctgtgtcagagcctcacctccccatagctcccc

SEQ ID NO: 35784 - DNA, 1238 bp, Artificial sequence
  DNA replication origin
gcggcaggctcagcaggctctcaggctccccccaccactctgcctggggcctgtctcatgattgtcctctcctacctgcagggccacaggcttcagggtgcatgtgggacactttgcttcctctcccagagggtgcccatctccttaacttggcccttcctgaccaccttttctttccctatttttgacacaagaaatataacacttttgttctaatgttaacacatacatgaaaaaataaacaggccatcgggaccatgccagggacggtggggccgcacctgactccggagagcccactggaggaccttcacccccactggttgttcttcaaacaccgtctccggcaaggcctccactacctgccccgggtgagccagccgctgccctgggcacaccccctgccccgcattactgttctactttgcaccactcagtgtgaccgcagcatggatggcacaatgacagaaaaaagatgtttgctgcggcacaaagagaaaagggggaccctgagtgggcaagataggggtgtgtgctgacaagagtccacatggatggctgtgggggcaccctctgagccaggcctggcccatgttttgtcggtcaaagactgagcctgggtgcagagagtgagggtggttactatttcctatctgctcggggctgtcacttcttcagggtatcctggttaggggcaagagggaaagccagagtccgaggaggctgagcttgggaagcgggcctgggggttcacccgctgcacatgtgcctctgtttcggttaaggaagggtgaaccccacaatgggcaggtcccctggggagccctgtggaggtcacccacctgtgctgaggggcgtcttcttccagttggaggtggcgctgcccttgccggcgctcacggttctctcagaatgtctgccggtcctgctgaccagggctgtggccgaggctgagttctgcagtttgggtgacggactgaacgtgtgcaggacacctcggggcgtcgtggccgaaccccgggacagctggctggaggcctgcagtggagaaaggggggtgacggctcatgcagggaaaagacagcagcaggcgagacactcagcgcagcctctccttgctctggctgacctcttcccacccacatggggtccctaaagtccaaaatcaggagaccaggtaagttacacagaggggtgggggaggggagagagtgaaacagaaacagggagagacagac

SEQ ID NO: 35785 - DNA, 1579 bp, Artificial sequence
  DNA replication origin
cagatcgccggcgccgtgcgctacctgcacgatcatcacctggtgcaccgcgacctcaagtgcgaaaacgtgctgctgagcccggacgagcgccgcgtcaagctcaccgacttcggcttcggccgccaggcccatggctacccagacctgagcaccacctactgcggctcagccgcctacgcgtcacccgaggtgctcctgggcatcccctacgaccccaagaagtacgatgtgtggagcatgggcgtcgtgctctacgtcatggtcaccgggtgcatgcccttcgacgactcggacatcgccggcctgccccggcgccagaaacgcggcgtgctctatcccgaaggcctcgagctgtccgagcgctgcaaggccctgatcgccgagctgctgcagttcagcccgtccgccaggccctccgcgggccaggtagcgcgcaactgctggctgcgcgccggggactccggctagaagccgggtggttccagccattcctgcagccaagggcactgggccagggcggcgcacgcgcaagaggcgcgcttcgagggaatatgcgaagctgccgcgtgctgctgcacatgcgctttttcccttccgcttccctccctttcttcccacgggggagtccgcagttgcccttgttcggaatccacgttccccgcgatcccgggagctggaggcgcatgcgcatccgcgattccctgcgaccaggccccgagagggcgagaccagaggggacggaagcattgcgcctgcgcggaactctcagcctctgcgcggagggcgtcccttcccaaccagccgtgggtgccaggttcccggttggaacctgcaataaactcgctgttcctcgcacctggctctaacggtggcccccatttgcggactagtggagaagcgatcgctccatccggggaaggcaggcgcgggtaccctattttagagtcacgcatgttgaggttattgctccaagactcaaaagggagtcgggaggattcgagcctggaccttttgagctccccagtatgggcaaactcaaaggagctttgttgtccccgggtcgtgatgtcgctgtgatgatgggctgggaagcaagtggaccccagcgcctcgccgtccacatcttttaagaatggaacagccaggggtggggcgagggtggcctgtctccacgtaaagtaggagtttatagataaggaaactgaggcccacatggatgtcacttgccaaaaggcagagccaagggccaggcgcggtggctcacgcctgtaaccccaacactgcgagtccgaagcgggcagatatcttgaggtcaggagttcgaaaacagcctgggcatcacagccgagacctcatctcttgtttgtttgtttgtttgtttgtttgttttttgagacagagtctcgctctgtcgcccaagctggagtgcagtggcacgatctcggctcactgcaacctccgcctcccgggttcaagcgattctcccgccttagcctcccaagtagctgggactacaggcgcgtgtccccccacccggctaatttttgtatttttagtagagacggggtttcaccat

SEQ ID NO: 35786 - DNA, 2537 bp, Artificial sequence
  DNA replication origin
aatgggggccaccgttagagccaggtgcgaggaacagcgagtttattgcaggttccaaccgggaacctggcacccacggctggttgggaagggacgccctccgcgcagaggctgagagttccgcgcaggcgcaatgcttccgtcccctctggtctcgccctctcggggcctggtcgcagggaatcgcggatgcgcatgcgcctccagctcccgggatcgcggggaacgtggattccgaacaagggcaactgcggactcccccgtgggaagaaagggagggaagcggaagggaaaaagcgcatgtgcagcagcacgcggcagcttcgcatattccctcgaagcgcgcctcttgcgcgtgcgccgccctggcccagtgcccttggctgcaggaatggctggaaccacccggcttctagccggagtccccggcgcgcagccagcagttgcgcgctacctggcccgcggagggcctggcggacgggctgaactgcagcagctcggcgatcagggccttgcagcgctcggacagctcgaggccttcgggatagagcacgccgcgtttctggcgccggggcaggccggcgatgtccgagtcgtcgaagggcatgcacccggtgaccatgacgtagagcacgacgcccatgctccacacatcgtacttcttggggtcgtaggggatgcccaggagcacctcgggtgacgcgtaggcggctgagccgcagtaggtggtgctcaggtctgggtagccatgggcctggcggccgaagccgaagtcggtgagcttgacgcggcgctcgtccgggctcagcagcacgttttcgcacttgaggtcgcggtgcaccaggtgatgatcgtgcaggtagcgcacggcgccggcgatctgcgcaaagaggtcgcgcgcctgaactccggggatgcgcccgttgcgctgcacggcttgcagcaggtcggtggcggccgcttccatcacgatgtacagtttcccgttgcacacctcgatgaactcgaagacgtgcacgatgtgcgggtgtcgcacgccccgcaggatggacagctctcgcggcaggaacttgttgacgaagtccgggggcgctcgccgccggtccaccaccttgatggccacggtacccttgtacttcttggatgtggccaccttcaccttggagtagctgccctctccaattgtgcggcccagcttataaccgagttcgctcagaagtttgtctcccgacatggtggcgcctagggcgcacggggggcaggaggcggctgctgtcggggggcggccggactccaatctcgggtctaagccatggcgcttggcacctacacccccgcacccccatgtgcccactgccagacattggccgctgttgtgccttttattgccccgtaacaatttttgccttgtgaagtgactgcgggcgtcactccgccttagggtgggggtccgggaccccgccccggggccaccctagcctccctgctttgtgactcataatcatcctgaatggtcagtttccgatgagaggccactagcaagggatacccatcaccaccagggagcagaatccgttccagggattggggtgagtccgacttcgagcagcagctgccccccaacatcatgtacccagcccgtgactacgtggagccctgggcttcgcgtagagtccctagacggggcgaaaacgggaaaaggggccttaactggggcacctggctcctttgagagctcggagtttctgactggcctgcgcaacaccccagaggcaaggtgaacgcgagggcctataatgcaagaaccaaggcgagtcacgccctgtctgggcaaaagaggagtaaagacccctcagctgcagcccggcagcgcattcctacccagggtccgccgccagagctttcccgcgcggtcggatagttacactactgtccgggacttcctagccgtgccgcggaccatctcaagtgcttccgccacactcatcatggcggtggcagtaagtcacttccgcccgggaccggaagtgtgggatactgcgagtatggcggcgtcaaaggtgaagcaggacatgcctccgccggggggctatgggcccatcgactacaaacggaacttgccgcgtcgaggactgtcgggtcagtatcactctgcgccggggtctcagagtctgggcactcggggctcgggggcggggttccggggacacaggcgggcctcagttttcccggcggtgtgaccggaggcggagcccggggatccatcatagcttctgtaataacgctaagtgctgcagtttgttgaggtctttcccagctcctcttccttctcgtaacagcccaggaaatcggtccctctagttatttacgttttacagtgggttaaactgagtcatagcctgtgctctggccctcagccacccttggatttctaagatggggaaactgaggcccaaagaaggccgcggctccccaaggcaaagctgaggccgcaacccggaacctggagggaatttacaagatgttctatgcagtgg

SEQ ID NO: 35787 - DNA, 1481 bp, Artificial sequence
  DNA replication origin
gtcagtcaggattagagcaaggccccactggtgctcagtaaatattcatgatggcctaggtccttcctggggtgcagggcagggggcttcaccctgcagagccaagaggtagcacggccacccctagagtccggggggtggctgggcagcccccacagggcactgcctgtccctggcagctgtgtgcagcccccgcagggcagcacgcggaactgtggcccaggtggccgggagccaccatggacactgtcagaactgcccttccacttcagggccagcctgccgcccagggtccaaacagccttctagaacacgatggacctggggcccccctagcaaccaccatctagaccctcaggcctcctgaggttgctgcctggcttgtacctttcagaaaacccctggcatgggggcagaggtgtcacagtccaagcagcctcactcctgagaagccgccagtgtcccctgattgcagagtgggcagcgcctggagctgtggaggagggtgtctgggggcgggctggcccgctgagcagcgcctctcttcacaggctacagcatgctggccatagggattggaaccctgatctacgggcactggagcataatgaagtggaaccgtgagcgcaggtagggcccctggtgggcgttgtctgaaagtgcccccccggcgagttgtcggggtcctgtagcattccgctgttgtctgtgctggcgaggggtgaacgggccccttggacttggctgtgcaatcccaggccccagaaagtgcagatccagacccagcacttccacttctaggctctgtcctcgagatgtctccatgtctgcaatcccagcactttgggaggccaaggtgggagcattgcttgagcccaggagttcaagaccagcctgggcaacagagggaaaccctgtcctcgccaccccaaaaaatgtgtctagtgaggagggttgggacccgtggatccagattaggacaggatatgagtggggggcctgcctcgggccctctaagcaggattttgtcagaggtgaccaggctcaaaccagaccacaccaggcagtggacacacagggccagatgaactagggccaggcgcccccctctccctgtgtcacaggctgggcactccttccccacccctcccccaaccccaacgcaggccaggcaggactgggagatgggggtcattgcagggaacttggaaactgccagaaagcagggagaagaaaggaaagattgtggccccgcctgccccagcctcacacactgattattttgagatgaaggggacgtggttttgtgaggcccagagccccgtgatgaagtcaccccctcttcgtcgcgatcatcaggcagagttatttttaggataaaaaaagtttttaattgaaaagaaagtagaaagccaacagtcttgtgggcagtcacccgtgcagctgcctgcacccgccctcctctcaggctcctggtgggc

SEQ ID NO: 35788 - DNA, 2132 bp, Artificial sequence
  DNA replication origin
cacaccaggcagtggacacacagggccagatgaactagggccaggcgcccccctctccctgtgtcacaggctgggcactccttccccacccctcccccaaccccaacgcaggccaggcaggactgggagatgggggtcattgcagggaacttggaaactgccagaaagcagggagaagaaaggaaagattgtggccccgcctgccccagcctcacacactgattattttgagatgaaggggacgtggttttgtgaggcccagagccccgtgatgaagtcaccccctcttcgtcgcgatcatcaggcagagttatttttaggataaaaaaagtttttaattgaaaagaaagtagaaagccaacagtcttgtgggcagtcacccgtgcagctgcctgcacccgccctcctctcaggctcctggtgggctctgcccacagcccttgcccttcccgcgaccctcgccctgccccctgcctgcctccccgcccccctccgcctcttcccccagcagcaccctggcccctgaggtctgtgctgcctgtgctcccccgacctagcctggtctgacctgagtgtgggtttcgggctttcacaggcgcctacaaatcgaggacttcgaggctcgcatcgcgctgttgccactgttacaggcagaaaccgaccggaggtagcaccgcaggggccaaggttgggaggtcactggccggaaggccccaggctgcagggcctgacctgcatccccgaaggtggccagaatgcacgtgggggccatcgccctgtgccgtcagctgcatcctcaggcgtggagacttagtggagacccaagggggcgaaccggaaggcttcctggaggaggaggcagcactggggttggggcaagagaaaagctaggagttggctgggggaaaaggagacagggtcggagggaggcttgaaggggtgctactaggggccctaggcaggggcccctcagggcactgaggccccacccccaccatcggccccatccccacaggaccttgcagatgcttcgggagaacctggaggaggaggccatcatcatgaaggacgtgcccgactggaaggtgggtcccggctgggagggcagaggtgccagccacggcagagacagggcctggggttggggagctcccacagctttctatagaaaccccaggaccaagggggtggtgggtgccaggtcccacaagggaaggctgtagcgcctgccacgcacaggggccactgatcctgggggatgggtcctagcaggctgtatatgggtggctgtgcctctacccataccccactgtccccacaggtgggggagtctgtgttccacacaacccgctgggtgccccccttgatcggggagctgtacgggctgcgcaccacagaggaggctctccatgccagccacggcttcatgtggtacacgtaggccctgtgccctccggccacctggatccctgcccctccccactgggacggaataaatgctctgcagacctggcctgcctgttttcctggggactgggggaaagaagggggagagggcccagctaggcaccaccggatcacatgtagcatggggacgcagcagatatgcacagggtgacctcaaaacacacctaggggctgcccctggatccactggcggcctcctctctgcctccgatatacctggactctcctgcctcccttttgaaaccatgcctgtcagcagcccacttacctctccaggctgggggcccctgggtcagctttgggtcagaccttctccacggaggtctggagagtggggggagccttgacctcccggatacaagtgatcctcccgcctcagcctcccgtgtcactgcgattacaggattacaggcgtgagccaccataccttgtgcagccctgccaattgtaggcatggcgagggtatttgtctgcggaggggctcctcgctccctgagagggaagctcagagacacggggatatctgcagggaaagtaagtcgggggaagcaaccaagattggccaggtgcctctgctgtgggctcctggcacgaaagggtgaagtccgtctgagtccaccgaccaatggtgacgcgcagcgccttcgcggcgcttcctgattggc

SEQ ID NO: 35789 - DNA, 1936 bp, Artificial sequence
  DNA replication origin
cagaccttctccacggaggtctggagagtggggggagccttgacctcccggatacaagtgatcctcccgcctcagcctcccgtgtcactgcgattacaggattacaggcgtgagccaccataccttgtgcagccctgccaattgtaggcatggcgagggtatttgtctgcggaggggctcctcgctccctgagagggaagctcagagacacggggatatctgcagggaaagtaagtcgggggaagcaaccaagattggccaggtgcctctgctgtgggctcctggcacgaaagggtgaagtccgtctgagtccaccgaccaatggtgacgcgcagcgccttcgcggcgcttcctgattggcgggcatgcagggtgggcgggagggaggagaagagggggcgtcccctccctccacggatgcgcttaaaaggcggtggcggtggcggcagcgcccggcgcccgggctcacctcggccatgagcagcgcagccggcccagacccgtcggaggcgcccgaagagcggcatttcctcaggtcagctggggagagggaagctggagacgggcatggttcccatggggccaggagcagcccgtaggaccggaggcagggtcatagctgggacagaatggggtccggggactggagacgggcacagccgggatggaggttcaacggcagaggcatgaccacggtggggaaccggaggcagggatatggccaagacgggcctgggaatcccgggaatccgagaccctcctggcatcttgctggagacactaagctgcgttgctggggaaactgcctccggggcagcccgcccctcatgaatgattcatcagcagcgctggtcgctcccccaccgaaccccaaccgtggcccacccccactctccatctctcccagggccttggagctgcagcccccacttgccgacatgggaagagcggagcttagctcaaatgctaccacctcccttgtccagaggaggaaacaggcctggggaaggcagtcatggctagagcagatttggaacgcagggcctgtttgccagaggttggtgagtttgggatctagaactggcgccgtggctgtgactctcacctcatcctcctcagcctttgtgacatgggaccccaggcaaggctgttgacctcactgtgaaccagatgcgtccaacagctcctgcccactgcccacctagcagggcacgtgtcccctcagccgatgtccagactcagtctagggaagagtgttttaggagctgtgacttcaccttggggtgaaggggtgaggtgaggggggcctcaaatgctaagtgaggggagtgagggggctctcaggggtgggtaggagctagaacgtagtggggaactggctgacgaggctggagacacagaagggcctcttaggcatggtgaggagtttggagtttgaatgttcccagagccctcgggagccatcagcaggtttgggacccggtgatgcaatctggtgttcgagttttcaaagcccccccaggctcatgttgagttttgggggcaggaggctgctgtgtgcggccaggtgatcccccgtggtggtctggtgggcagaggtgtgaggtggagagaagcaggtaggactgagagcagggtgagtgtggcatggccaccctggcctgaggtttcacctcccagaaagccccctcctggaagcatttggcgagtgtcaggcccagttccctttggacccaggccacttcaggcctcctgggtctgacagggaaatccttggggccttgaagcttctctcatctaggggccgagattcgggatagcaaaaggcaccactgaacacccccagaatcccacaacagcagaagggacctgccctgcctgccaccctccttcaccaggctccaattcccacgcagcctcccacccccaccccaca

SEQ ID NO: 35790 - DNA, 803 bp, Artificial sequence
  DNA replication origin
taattatgtcactgcccctgaaaatcggtcaccaaagggtctcatagccccaggccccaaggcctccccgctgagtgtgccatcaaacactgcagccttaaaaacccatggaccccagatgcccccagtcctgtccacccctttcagcgtcctgaagcttgttccgtggctcccactgcctgaaatcagcccatcgcccccatcgaagtccttcatgctccattcccctttcttggttccctccgccttgggagctggggacgtctaggtccggttccgtgtcccacgctttggagcagtagaaccaacgcgcggccagcgcatcttctgccaccagagggcgcccgcgcctcgggctttggctcccacaccgcggcccgccaggcctcgattcaacccgcgcgtcgcacggtgaaactgagggcatccccagctcaaggctgcagacgctactcgggggtacggggtgggagggtggcattgggaccgggttcagaagcttggcggaacatttctggctccatctgaggctctgtctctgtgtgtctctgagtgtcccatcccactctgtccccagcaccgcggaggcagccgccctggagcgggagctgctggaggattatcgctttgggcggcagcagctcgtggagctgtgcggtcatgctagtgccgtggctgtgaccaaggtacctgacccctgacccccaaccctgaccccaaccagacggccaactctcctgagctgcatgactgctgtgaccagggtggttcacccctcaagaactccctttttgcttgggcct

SEQ ID NO: 35791 - DNA, 1290 bp, Artificial sequence
  DNA replication origin
atctgtctctctccatctgtctctggccatctctgtatctctcagactctgtctctccaggcattttggccccagccctgccctgattctgcgtggccccagccccttctctcccagactcagtttggcctttatcaaatgcgatgacagtgccaccgcctgacaggcactctgggtgtctcttgagccccagctgtactttaagctccaaccacacagacagcagattactcccctttcaagtatcctccccaaaggcttagcgcagtcctgacctgccatgaacatgcctgcgatcccagccacaccgggcccagagcccaagacccaagactgggactgaggggcttctggacagacaaggggctttcagtgcaaaaaccagacagttggccactgagcgccaggcgagtagtgactactgggtttctttctggggttttgattttccttctcctttgggcgcctcacccgggatctatttcatttggaaatacaaacatttaagtccacatgaagaaaaacattgagtttttaaaaagtataccgtggtaataagaagaaaaagaggaggaggggtgaggagggagagaatggggaggaggaggatggggaggaggtagggtaagtgggaaggaggaaggagaacaggaggagggggaggaggagggagaggaaggagaaaggagagaagaaaggggcggaaggggaggaggagggagagagaaaggaggaggagggtaagaggagggggcaggaggaggaggaaggaggagaaaggcgagggggatgaggagggcaggggaggaagaggaggcagtcacgctagagcctcgactgtatgggacagttttctgaggcgttcacgtttagggactgactcgtcagtaccatttattatgctgttgcagaggaaactgatgcccagcactgctggctgcacggtgaagcactccatagtatgattattgctatcacccttgtgtcatcctcctggcccctcgaggtgtgggggtttactccagagccagacacacctgggttgcagctctgcttccatccccctctgacccagggcaggcccctcgccacctctgagcttcagtttccccacctgcagaacagggttgtttaggggtgttcagatcgcaggagcagatgtccctggtgcccaagacccaggaggtggcagaagcaggcgggtcacatgtgcaggaggggttgcacttccagggtcgtggcactgtccctgcaataacctccaccctggccttctctgataccaggggt

SEQ ID NO: 35792 - DNA, 1916 bp, Artificial sequence
  DNA replication origin
tttgttccgtctgcctgtcgcctaatggttccaacaggcatggggcggcagccagggcgggcgcggcctttgccgagtgagctcacgtctgcccaggcaactgggccaggggtgggcagagggcatgtgggctgggcactggggtggaggaaagaggagacctggggtcacctggggtggcagcctcgatcttccccatcagagggatgggtgtgacccttagcctcagccaagtgtgggtccatccaagctggggagattgaggttcagacaggcaggggcgaccaggagctggggcacaggggcctccacccaagccccccaggccccaatgtgcccccctctgcctggcatgcctgaggggatgtccaggctcacgagggggatggacagcagcttgagcgtggccagcgcgcgggtgcaggggcccccgacctcgcccggctccacgccggggcccagtacggcatccaccaccagcccataggcttcgttaatgagctgcacctggggaaggcaggcagggtcagggtggcccagggccactgcacaccatgtcccccttgcttgccacccagcgctgacctcagtgggcaggtagctcaggaaggggatgtccatcttctcgcactgggtggtcaggtcccgatgcagcaggtccagcgagcgtgtggggtagaagatggtgggttcatactcctgggggtgggagaagagggggtcagactcccctgacctggtcaccagcaccagaccctgcctgggacaagcactgggcatattctataacctggccctgcgtcaatgtccccctgggaagctatcaaaagaaggcagtgatttctgcaggggcagggactttgggaggtcgaaggggtccttgctacttacaaacacccgcaggtgccgggcacagaccagccccactgccccgttctgctccgggccacacacgaccagcaccgtcctctgcttccgggagagagcgggcaacgggaacgcctggtggtaggggacacagcaaaggcacaggcacagtccagattcctccttgcctggagaggaaactgaggcccggagtaggggaagggatggggcttgggcctggaggcaacaggataggacaggaggtgagctgttctggatgaggggttgggcctcttggggcctcagtttccccgctggagatgcagaggcccggtctcaggctctgccaggtcggtgcaggaaaaacgtgcatccagccactgcccgtcgcccggagtgcggtttgtttattctccgcctgagttgcagacattcttccacctttctcaccgcgggcccacccccgcccatgtttccagacctcagcccctcctggaggctgtggagtaggggagcccaaccttagccacgatgccctggggcctctctgtctctctctggctgtctctgtgtctctctgtatctctcagactctccgtgtctctgtctctctgtgtgtctctgtctctctgtatgtctctggctctcttcatgtctctctccccacctgtctctggctgtttctgtatctctcagactctctgtgtctctgtctgtctgtctctgtctctctccgtctctggccgtctctgtgtctgtctgtatctctcagactctctgtgtctctggctctctttgtgtctctgtctctctccatctgtctctggctgtctctgtgtctgtctgtatctctcagactctagtgtctctgtctttctgtatgtctctggctctctttctccatttgtctctctctccatttgtctctggctgtctctgtatctctctgttatctgtctctctccatctgtctctggccatctctgtatctctcagactctgtctctccaggcattttggccccagccctgccctgattctgcgtggcc

SEQ ID NO: 35793 - DNA, 1059 bp, Artificial sequence
  DNA replication origin
ggcatgccaggcagaggggggcacattggggcctggggggcttgggtggaggcccctgtgccccagctcctggtcgcccctgcctgtctgaacctcaatctccccagcttggatggacccacacttggctgaggctaagggtcacacccatccctctgatggggaagatcgaggctgccaccccaggtgaccccaggtctcctctttcctccaccccagtgcccagcccacatgccctctgcccacccctggcccagttgcctgggcagacgtgagctcactcggcaaaggccgcgcccgccctggctgccgccccatgcctgttggaaccattaggcgacaggcagacggaacaaacagccgctggccagccggaccctccgtgggggtggctggactccgggggatgtcccctggctctcgggatcccagggacatcccagcaggtgccacagagcaggggcaccaagggaggcggcgtgctgtctgatctgagtagggaggctgcaggctcagcctaggacagagagggtggctctgtcaggtcagaggggatggttaggaacctctagtctgagggtggtggctagggtcagagaaggattaaagtctgagggaggatccagtgtcttctggtgagtggccccagaatcaagtcagagataggagagaaggcaaggctcctaggctgaaagtggaggctcattcaagaggtgacggaggctgggtgcaggggtcacacctgtaatcccagcactttgggaggtcgaggtgggcgggtcacctgatgtcaggagttccagaccagcctggccaacatggcgaaacccagtctctacaaaatacaaacatttgctgggtgtagtggtgcacgcctgtagtcctagttacttgggaggctgaggcaggagaatcgcttgaacccgggaggcagaggttgctgtgagctgagatcgtgccactgcactccagcctgggcaatagagagagactgtatcttaaaaacaaacaggctgggcgcaatggctcacacccataatcctagcactttgggaggcc

SEQ ID NO: 35794 - DNA, 1022 bp, Artificial sequence
  DNA replication origin
gctgaaagtggaggctcattcaagaggtgacggaggctgggtgcaggggtcacacctgtaatcccagcactttgggaggtcgaggtgggcgggtcacctgatgtcaggagttccagaccagcctggccaacatggcgaaacccagtctctacaaaatacaaacatttgctgggtgtagtggtgcacgcctgtagtcctagttacttgggaggctgaggcaggagaatcgcttgaacccgggaggcagaggttgctgtgagctgagatcgtgccactgcactccagcctgggcaatagagagagactgtatcttaaaaacaaacaggctgggcgcaatggctcacacccataatcctagcactttgggaggccgaggtgggcagatcacaaggtcaggagttcgagaccagcctggccaatatggtgaaactccatctctactaaatatacaaaaattagccaggcatggtggcgtgtgcctgtagtcccagctactcgggaggctgagacaggagaattgcttgaacccgtgtggcagaggttgcagtgagccgagattgcaccattgcactccagcctgggtgactgaagacagaggctgggtcagatggaggagggcgattgaatagtaggataggagcagaagcagaaagtctgagtgcagaagctctggtctgattgggagggaaacacctccaaggactgggagagacttgtctgagggcggaggcagagttctagggggcgacaagtctcaccaggacccatgtgccagagagaaaaggctgggtctgatgggggaggggaagtgggggtggggcagcaggactctggtctgagggcagaggctcagtgttggaggggagaggagaggaggcagggacaggatggactctaggctgagggcaggccaccctcccagttcccaatccccccggaccctcctccctcaggctgggacgcagagaccggcagcgattcggaggacgggctgcggcctgacgtgctggtgtctctcgcgg

SEQ ID NO: 35795 - DNA, 1104 bp, Artificial sequence
  DNA replication origin
gagaaaaggctgggtctgatgggggaggggaagtgggggtggggcagcaggactctggtctgagggcagaggctcagtgttggaggggagaggagaggaggcagggacaggatggactctaggctgagggcaggccaccctcccagttcccaatccccccggaccctcctccctcaggctgggacgcagagaccggcagcgattcggaggacgggctgcggcctgacgtgctggtgtctctcgcggcgcccaagcgctgcgctggccgcttctccgggcgccaccacttcgtggccggcaggttcgtgcccgatgacgtgcgccgcaagttcgctctgcgcctgccgggatacacgggcaccgactgcgtcgcggcactgtgaccgccacccgcggccacaccgcagggaccctcgccaataaacagccctcccaccaccgccgcctcgcctccgcctcctttgtgcaccgggcccgctgcgggggtgggcacactcgaagagggacttcacacggtccctgggtgatccaaggcggggagcatgagaagggcggtggagtgggacttcccgctggcctagaaaacttcagctagggctgggggcggtggctcctgcctgtaatctcagcactttgggaggctgaggctggaggatcgcttaaggccaggagtttgggaccagcctgggcaacatagcaagatcccgactctacaaattaaaagaaaaagaagaaagaaaactcgagccagaagaatggagggtagattcagggtgggactcccagactgtttggggtggcctaaagcctataggatcgaagtgagacgcgagacaggacttccagccacctaaagcgggtccgagcagcttgaggctggattccaagtgacacttccctcaggcagcttgggatgcagcttggaggactgagtgggctcggggagggagttccagcaggccacggggaacccaggacagcctgaggacggaggcacagccagacgcaccaaggggggcgacccagaggggttgctcgagcgccgtcacccagggccagggggcgtggcctgaatggggcgtggccagggcgggatctgcggtc

SEQ ID NO: 35796 - DNA, 1914 bp, Artificial sequence
  DNA replication origin
cacggggaacccaggacagcctgaggacggaggcacagccagacgcaccaaggggggcgacccagaggggttgctcgagcgccgtcacccagggccagggggcgtggcctgaatggggcgtggccagggcgggatctgcggtcgcatcccgcccccactctcagtcccagcggccgccagacccgccggagttggacccgagcacgccgcggagcccggaccctccctcggacgctctgccccggccatggcgtcgctgctgccactgctctgtctctgtgtcgtcgctgcgcacctggcgggggcccgaggtgaggcgcctccagcccccgcgcccagcccctgaggctcccgagggcctggcagccggccttgggtgaagccgcactcggggagagaacccagggacccacgcgcttccccggggactgggtccccttcaccagtcggatccccgcgaccacctggggcgcggagcgggcctcatccattctcttccttggctaagccgggagtgtggataagaacctagggttcctcccggggtttggactctgaatcaccggccaggtctcccaccctggaccgaaggggtcggaactggcccctcccacctaactcccacacacgcactcactccaaccgctggagaaagaaatgcccatccctggaacactcaatggggcgggggacgggcccacttctcaagtgaggagactgaggcacccagaaggaaggggcttgtctgacctcatcactctgctgggagtatcttggacagctcctatcttggagaagccagtctagattccaaggacttcccggcagctcggactgtagtacagggatggaagacagactaagggaggggcttccagcaggccaagtggatgagggggagcccagcctgagggcagaggcacagccagctgaacttgattgatctcgcggcagctgaacatagtgggagggagactctagcctaggggaactgggtggtacttgcacttccccagccggggggttagggctaggtcagagagaggtacctggctttgggggcctggtggtggtcatgggcagcgcgctggaggagagtgtatggcagcccttggggctagagctgggttctggcctctcagagcctcaattttccctcctgttaaaatggggatcatgggccaagcacggtggctcacgcctgtaatcccagcactttgggaggccgaggcgggcggactacctgaggtcaggagtttgagaccaacctggccaacatggtgaaaccccgtctctactaaaaatataaaaattagctaggcctggtggagcgtgcctgtaatcccagctactcaggaggctgaggtgtgagaatcacttgaacccaggaggcagaggctgcagtgagccgagatcgtgccactgcactccagcctgggtgacagagggagattccgtctcaaaaaaaaaaaaaaaaaggggggggatgatcgtggctgcaccttgcctaaaaggaggctcccagcggtccccatcagtagcagcgtgcttccttctccccactcctcacccacagacgccacccccaccgaggagccaatggcgactgcactgggcctggaaagacggtccgtgtacaccggccagccctcaccagccctggaggactgggaaggtgagttagcctgcctcggagtcccgtctctgctgcgggcttgttgggggtggggcttgggctactggggtcgtgtgaggagagggcacacactagacgaagggcccggcgccgtcctggtccccggacatgacagcccctggaggtgatgccccaagttcaagatctaagtgagaggccggtcagacagaggcaagagctcagcgcaccgggatggaccaggtcaggccctgggcggc

SEQ ID NO: 35797 - DNA, 1021 bp, Artificial sequence
  DNA replication origin
ggcgcgctcggctagccggtgcccaccgggggagggggctgagacagcaagtaaggcctttgcacgcatgcatgggggcctacaggccgccgccctggtcccagcgcgtgcggtgcccgcagaggccagcgagtggacgtcctggttcaacgtggaccaccccggaggcgacggcgacttcgagagcctggctgccatccgcttctactacgggccagcgcgcgtgtgcccgcgaccgctggcgctggaagcgcgcaccacggactgggccctgccgtccgccgtcggcgagcgcgtgcacttgaaccccacgcgcggcttctggtgcctcaaccgcgagcaaccgcgtggccgccgctgctccaactaccacgtgcgcttccgctgcccactaggtgagggcggggctggatgacgggggcggggctttgaatgggcggggctggcgaacgccgggaagagtcgtggtgggtggggctgggaggggcaggaccgtgtgggtgtgggcgtggctgggaagagccgggggacccttaggcgtaggacgacgtcagggggcggggccaggcagggcggggcttttgaagagaggcgctgggaacagcgcggggcccaagtgcaccgtcaggaggcccagcgggtcaggacccatgtccggccccctggaacgcatctccctcccgctgccctcatttgagcatctgtaagagctcagttctgtggagtgtcttgagcccaaatgcgtgcaggatgcagggagaaaagcaggactgatccccgggaccttatgcgggggtggggaggtgggtcggtacctaaactatgtcttcgacaggcgcgcctaggggagcatgggtgggggcgatggcagatctgctctctggagtgtccgcccttggatgcacatatgtgagggggttggggaagaagggtcctttagtcccaggttacccggaggcgcagttcctggggagggcggccacctgatctccgtccctgccttccgcagaagcctcgtggg

SEQ ID NO: 35798 - DNA, 1153 bp, Artificial sequence
  DNA replication origin
ccgtcaggaggcccagcgggtcaggacccatgtccggccccctggaacgcatctccctcccgctgccctcatttgagcatctgtaagagctcagttctgtggagtgtcttgagcccaaatgcgtgcaggatgcagggagaaaagcaggactgatccccgggaccttatgcgggggtggggaggtgggtcggtacctaaactatgtcttcgacaggcgcgcctaggggagcatgggtgggggcgatggcagatctgctctctggagtgtccgcccttggatgcacatatgtgagggggttggggaagaagggtcctttagtcccaggttacccggaggcgcagttcctggggagggcggccacctgatctccgtccctgccttccgcagaagcctcgtggggcgcgtggggcccgtggggtccctgctcggggagctgtgggccaggccgtcgcttgcgccgccgccactgcccaagccccgctggggatgcgtgtcccgggcgtcctctggaggcgcagaagtgcgtgcggcctcggtgtccaggtaggaggggcggggtctggaggctgggacctgtacagaggggaggaaggggaggttaggggctgagcctgggagagagggtggagttagaggcggtgcctggatgtagagaggcagtgcttctcctgagcgatgcctagaggggaggagctagttgggggcggggcctcgtggacggggctgtgaagggcggggcctggtgcgggggcggagcctggaggacccaaactctggagccaggtggagaccagcccttccttccctcctgggcccaaggagcactggtaactatgcacatctggacaggtggatgccagggggctcttgtgcaggcagacatgggcagataggagggggtgcttcccctgtgtgcattccagactgtacagatgtcttcgtggggaaacagaattcagttcatgcactcagggtgcacacgtgcatggcatttgcagcccccaccccggtcccccacgcccacacagacacccgctcacagcctggcagacatgatgcctaggccctcccagggccagacaccgggcaagccaggaggagactggaaattccgctagcgcctgggctccacaaacacggcctggaggctgc

SEQ ID NO: 35799 - DNA, 1021 bp, Artificial sequence
  DNA replication origin
tttgcagcagaaagtcacattctggccagcctctcgcactcgggactcagggtgtttcaccaggtacggcttctctggggtcaaaggtggtaaagatcagagcttctcccacccacccttcctaggagcaacgtccccatcctctcctttctcccagaaatgccgactcactctgtgccttcgccaatgactgtgtcacatctcatttcttcctctcttgatcgagtgctagaacttcctccccagatcctcagccccttcatgccccatgttgcaagggtgcttacccaacttatcaaggatgatggtgaccacagagatggatccgttggcctgggcctgggcctcccctgcagagaagccatccatctgggccctgatgttggcgcggctgtcagcacagacaccaggcacccggaaggttccgtgagcatcgctggtggccacagtgccaggctggtctcgcagggagaccctggctcctagcagtggttgcccagatggggtgaccaccgagcccaggaggatgtggtccgggcattcacaggtgtcaaggctgcaccctggggggatatggagaggaagcaggacagagaaaccttcacactccctcctgaggagggctttccattcaatcagtcactcaacaaatatgcctggggcccccccataaggtgcctctcagaggcctcagcatggccctgcttggagcagtccctagtgtgaaggggagatgggctaagtggtcaggactgggccagggcataggaactgggatccagagacgtagggaagaggtcctataggaggggacaggagaggtaagtctcaaaatatggcactgccctttccagcagaagagaaaatgtctggacaggggctgggggcccagtaaggggctggatcttgggctgagaacaactgccccccttcccaatcctgcggtttctccataaaatggaaaattccactggaaacttcagggcacaggcaccgggagagcagagccaggcgcgatggg

SEQ ID NO: 35800 - DNA, 1701 bp, Artificial sequence
  DNA replication origin
ggaccagctcgcccaggggcgcctcatcttccagctcgcccagggggatcgtgttgctctggctggtatgtaaaatgaccggggctttcttccgcatggccttgacctcgtggtacacgccggcacctcgaggatcaaaaggcaagacccggacagcgtccatgaactcaccgctggggtccacaaaagtcaccaccagccgctgggtggagggcggcacctcaatggtaaagtcgccctggtaggcggtgaagccgatgggctcctggcccagcagaatcctggcgaagcgtagcggctccccggagtcagcagccacaacacggccccggaccagcccccgagggggcagacacttctggcagccacactctgccaccaccttcactgggaggacgtagccagggcagtgaatctcccttctctccagacggcgcacagagcagcagcgggagctggcgtccccgcagcgggggctggagcctgccaggctggggcagcgggtgtcgggacagaggcccacatccaggtaggcagggccactacctggctgaccacagtcctcagggagcttgatcaggtactctcggggccgggggtcgcaggctggctggcctggggctggggacaaagaaaacatgcaggtcagggcagggaggaggacttcatggaggccaaggctggggactctgtctgcagtcaaggactccacctaagggacaggggtctgcccagggtaaggactgaaggttggtgctcagagtggtatgggggctcagtggaggcctaggattggatcagtctgaagtgggggctccatttggggttgagcttagctacagtccgggttccgtttgggtgaaggcttgctcggggctgtggccaaggacactcaccaagtacagtgagccgggcagtgcccgagcgcacggcacccgcctcattccatgccttgcagtggtagatgccagcctggtctgggcgcagtccccgcagctccaggtgggccccgtacccatgagctcgcctgtccagcagggtcccattgtggaacctggatggcaggtgagcgacaccataggactcagtgggaggggctgtgttgcccccagtctgcaggctggggagctgcagagaggctttgccaaagtcagcctcctccccagcaagactggccccattcagcctccttggtagtccctctcccacccaattcattccccgttaacgctttccccactctccagatgggaaaccacataacaacatgaaattgaatctaaccccaaagccacagaagatgcccctgagcccggggcgggcgctcaccaggagtatttcttgggcatgggggtcccggaggctttgcagcagaaagtcacattctggccagcctctcgcactcgggactcagggtgtttcaccaggtacggcttctctggggtcaaaggtggtaaagatcagagcttctcccacccacccttcctaggagcaacgtccccatcctctcctttctcccagaaatgccgactcactctgtgccttcgccaatgactgtgtcacatctcatttcttcctctcttgatcgagtgctagaacttcctccccagatcctcagccccttcatgccccatgttgcaagggtgcttacccaacttatcaaggatgatggtgaccacagagatggatccgttggcctgg

SEQ ID NO: 35801 - DNA, 1012 bp, Artificial sequence
  DNA replication origin
aggcacgggggttggcggagaagccgggggcgggctccagattgaccagcgtgaccaccacgccctccacctgctcgctgggggtgaacttgtcgttggcgtaggcgcgcaccttcacgaagcagcggcggcgctcaggcacgtccagattgaacaggcgccgctcccggatctccacgttgcccaccaggaagacgcgctcctcccggcgcacccgggggcccgaggacccctcgcgccggaagccgctctcctcctcccacaagccggtctcggggttcagcgaccacagcttgagggcctccacgtggcctggcatgtggatctggctggcggccacccgcacggccaccggccccacctgcagctgctccgcggagccgggcgcacggaggtccacggagaacatgccgtaggtgcgcagtggagccagctcgccgtcgctgtccacgaagcgcaggtcactgggggcagacgccgccgaggtgaggtctcgggggtccacgaacgtcacccgggcctccacaggccccgagtagggtttgccgtcggctctgcggaaagcgccagaaggcaggaccagctcgcccaggggcgcctcatcttccagctcgcccagggggatcgtgttgctctggctggtatgtaaaatgaccggggctttcttccgcatggccttgacctcgtggtacacgccggcacctcgaggatcaaaaggcaagacccggacagcgtccatgaactcaccgctggggtccacaaaagtcaccaccagccgctgggtggagggcggcacctcaatggtaaagtcgccctggtaggcggtgaagccgatgggctcctggcccagcagaatcctggcgaagcgtagcggctccccggagtcagcagccacaacacggccccggaccagcccccgagggggcagacacttctggcagccacactctgccaccaccttcactgggaggacgtagccagggcagtgaatctcccttctctccagacggcg

SEQ ID NO: 35802 - DNA, 1254 bp, Artificial sequence
  DNA replication origin
gttcaagtgcagcgggatgctgttcgaccagcggcaggtggacaggacgctggtgaccattatgccccagggcagctgccggcgcgtggccgtcaacggactccttcgggattacctgacccggcaccccccaccggtgcccgcggaggacccagctgccttctccatgctggcccccctagaccctctgggccacaactatggcgtctacactgtcactgaccagagcccacgcttggccaaggagatcgccattggccgctgctttgatggttcctctgacggcttctccagagagatgaaggctgatgccggcacagccgtcaccttccagtgccgggagccaccggccggacgacccagcctcttccagaggctgctggagtccccggcgacagcacttggtgacatccgcagggagatgagcgaggcggcgcaggcacaggcccgggcctcaggtcccctccgcacccgccggggtagggtccggcagtgacctgggcaggggcctcgctttcccacctccctccagactcctttgaccccaggaagttttgcccctccttcttctccagacagccccctccccaggtgtctgggtcccctttcccgcccctttccagaactcagagtcagacaagaacccagagcatccgatggtagaaacaccaggaagacaattgttgctgtgtggtatggaatggagtttgcggtgactctggggccagcacccaggggacgacgttcaaccctagcctgaagggacccgctcccagctcagaagccgtctctgacttctcgtgcgtattttgaccctgatttcaatcttctacccttgggagttctggcgtttggcacaaagtcccctctgcctgtttggagctcagtgctagaccaggtcccctgccccgagctttgtttttggggttatttattgaaacaaagtgtggggagctggttgtgggtgtgagtgggggtgtggggtccaggctgggcccagtgaaaaggaggaaggggttcccatgcgggggaggctctggggctgaggggaacaattctcacgtgtttggtgcttagagacctgcccggggcgttgggcaggccctccgggggctgaattaaaaatgctttatttccaactcatggtgtcaggctctagggaggaaggatggaggctggggctgcccggcccagatacacctttcaggcagaaacacgcggaggcacacgcgggtgccgggggcaagaagcacg

SEQ ID NO: 35803 - DNA, 1045 bp, Artificial sequence
  DNA replication origin
cctgacacctcatcaccctccgcctggaaagctgcagccagctttgcccgcttcaagtgggagcgcccccattcccacccctccccaggacccccaccaggcagccctgagcagggttctgtggcaggcaggccgggaacctaggttgccttgggaggggcctgtgcctctgagcctatcagctgggggtatagagacagtaagttctggataaatgtgtgttctcccaagccctgccagctccctcagggacctctcgcctctcttgcctgtcacagcctatcgagggtgaggctggggtgccaatgtctggggctgcccaaacccaaactccagcagagcccttagggcccaccttcagagaccaggggtgacgcctcgcatcttgggcttctcccatgcctccaggcccccaagtccaccctagggcaaaggaagtgtttccctgactgaaagggtgagagctgcggaggttcggatttgccaagacctcagccgaaggggggatgtggccagtggacaagagccagggaccctctgggtggagcactggcccagggcatattggggtatgcacgtgtgagcctgtctccccctagagagataggctctctcaggtcccctgaagttgctagtgcagagctcacacctctaaatgctggatgggtgaatgatgagatcgggggtctggagaggggagccagtgaatgggtgggagattgaagaggaagtgggtggttgccccctaagctaagggacgctccatacccccactccctagggggtgtcagccagggacaagtctcccatcccaggtgccctggaggccactccagtcttgccacattgatgccttcatccccagaccctggggaatcacacacctagagctatagggggctcaaacctgctgggattcatgccagaccccaggacttcagtttttctgtctggacagtgggggtgtggtcaggacagcgccggccctgtggagcgccaggaggacacacgtgcacacagactgccagccagccgtgattctgcc

SEQ ID NO: 35804 - DNA, 1097 bp, Artificial sequence
  DNA replication origin
tgcatgggtccctgtgctgggccccaggatgggcagccaggccacctcccaccagacagtgctgtctttatgaggccacagtcaggctgggatactctggctgggctgggagcttattcttccaccaaccctcagccgggaggaactggggtgggagcagccggcctcaggctccatcgtgctggccccatgccctgaacgccacggttaaagctgcagctccatctggggcaaggagggaggctggggcccagggaaggactgagtcccgagtgggagcccccgcccccacctcagaggccccgccaggcagccttcaaggacatacctgaggtttggcagcccccagcctagccagcccccagggctgagtcagcaggaagggattcaggacttccctggaaaagtggctgggaccttgaggcctcccgccagtccccagccccagggccgacccgctccccagggccccgagagagtgggaggtgctgcctgtgctcggcatggcttcatgtgcctggtggggctgagttgtggagggtcgtggggggttgagactggccagctgggagtctgggggtcaagtgtgtcccgatgtgtggggtgatgatgggtgagtcaaaggggagctgggcacaggtgcgcacaggtgtgcacaggtatgcacaggtgcacgcagctgcaggcaccgctacctgaccctaagcgtgggcctttctctgtgttgagggtgcatctgtctacccgtgctgctgtgatgaggggggacagtgtccagcgtgtcccatgggtctggtgtgtctgggctcatgctcttttcgagtgcaactgcctatgtggctgtcctgagggtgacagtgtcaccaatcaggtgacgagaagttggctaggaagtatgggaaggagggagtcatgcccctgactacaggggacagggatggggcgtgacgagggcagcgtgacctcgagatcgatgacaggcgtgtctggctctgtgtgacacactcgccctgcctagggtagtgtttgtttccctgcatccacctccaaacctcagggtctgctgattccccgatggccggggtctcctccctcct

SEQ ID NO: 35805 - DNA, 966 bp, Artificial sequence
  DNA replication origin
cccctgcggacgctcctagccccttagctaaggtctcaggacaccggctggcggtgaggacggggcagctcaggggaaaagaaagccagggagggccgggggctccgaggggttttagggaggggtacagcagttagccaggcggagggaatgccagtgcaaaggccctccctgcggtgggaatgagcttactcaggggcagtgaggggtcagcgaagagggagatgcccggatcctcttctattgtaagatcgccccctggcggcccagtagagaaggggcagggagatggggccggtccaacctcccgtctaccctccagctctcccagcctggcagatgagtggcccccttctcccagcctgggtgtccccaaaggcaagaaggaaaaacagaatcccagaccttgcgagagcacccctgcatggacacagccgtcagcacctttctgtgctcatgggattgccaccaagcccttcgagcaggagcacatgtgcccattttatagaggggcaaatgggctcagggagagaggggagcaagcagggtgcagaggcaggactcaaacccaagactccggccctgtctggggctctggcaggttgggctggaccaggttgagggtgtctgttgggagctggaggagccactatgggcctgtgagggtcccaggtaggtggtcaaggtgggaggctggggaatccagaacgcgggcgcaggggacagtacacatcaccagggttccctctctgtgccttggtttccctagcacttcgttgaggaaggtgagaacatcactggctccctcctcaaatggtcccccactcgttttgggatctgctggggattcttgcttcaatccatgtgcccacgggccactgggagtccctacaacgctgccagtggccccatttaacatgcaggtcccaggtcaggcatggtggctcacacctgtaatcctagcgc

SEQ ID NO: 35806 - DNA, 1794 bp, Artificial sequence
  DNA replication origin
aaaaaaaaaaaaatctgaaagcagaatttttttgtagagacgaggtctcactatgttgcccagacgggtctcaaactcctaggctcaagcaatcctcctacctcgacctctcaatgtgctgggattacaggcatgagccactgctcccagccaggacattttaaaatcagaacagaatgatacggtcccacagaagacagtgttgggagtctgtgcctgagcggcgcaggtgagtggcaaaatcacagcacacatgacactgcagctgtgaccggtgtcaactaccacccaaaacaaatctggcaaacagacatcggaattaaaataagtcaaaaattttaatgggaaaatctgtgcccagtcctagaacagacaattcaattcatagcgttaccataaaattactgtcaaaaaaacgaactgaagtgggagaatgagtggcgtttcaggccatctcgagtcgcagcagacacatgagccggcgccacgggcctggctgaggagcaggggctcatgggcaccaccacccatctgggttttctgaggtcgtcggcggcacgttcagtaacaaagcaacggctggcgatacatggcagctcacgcagcgctctttcctgcttatcccccaaacttaattagatgtactggagttgatgctgccagggtctccagcaggtgaggcagttgcaggttggggggtggccccctgccagctaccctgggcctgaaacgacagagactgagcatcagagtgggtggccgtgagactggtgactacccagcccacgtgctgcaggcggagcctccaggggtccctgggaaggcttggaaaagatccacagatgacctccagctcagtggaggagggaagggatggaggggtcggtcctgggtcacagctggccttgccacctgacatgggacatggacgagcttccccggcaggaaaactggcctctagtggcttccctggggcttaggcaaaggactgactggcatcgggtacaacaagggctcctgcccggcgaggggcagggaggcaaggtcaggcctggagcccatgatgacgcccggagcgtcatggtgagactcggtgggaaaaaggggctctgaaacctggcccaacactggcctggctgggcagcaaggagggtgggaggcaaccacttgtcataaggggtgggggctctgtctgcagtgcagagacggcatcacgtccaacggcgctaagacgtttgtccacaggacccacccccactatggtgggcacggtacaggttaaggaagtggctgggactgctctgcccgtgagtgtgggagcagctcagacgggtgcaccacctgggggcactctgctctgaactggggtggacacacagctgctggcgcgtagtcaggtcccaggggtgcaaagggcaaggtgaggcccctcacgtgtgtccctggctgggggctgcatggtgatggggggcagctgccacagcaggacagtgtgggacgtgtgcttcccaggaccaggtgggaccccacagacagcacaggaggcatccgttctctgaacccctgggagagagtggtgagttgggaggggcacccggctctgcagtgccctggcacacaccacacacacagcctcgtgcctgtgctgggcacatgacacctgggcctcctcagtgtcttcaagacggtccccactcgctgccttcccagccaagctgcggcactgaggtctgagcccgagggaaggccccatctctcctccggcctcctctgctggctgcctgcccctccctc

SEQ ID NO: 35807 - DNA, 1215 bp, Artificial sequence
  DNA replication origin
cggccctggccaccgctcctcctcttcctctcttctcgggcctgcacacgccctcagccagcagcatgttatccagcctcaggagctgggcgtcagggggatcttcgtcttgaatgccacggatgcttaccactagataagagagaccgggacaagtcacaattcattttctggagagaaaacaaaccatgagaaaatgtgagcactggtgttatgtctgaagatttttgcatagaacccttcgggagaaaggaatactccactttatcaccaaattggatgatggacactgagcaccccgctaagacatgggtccaagtgccatccttagagcgcagtctggggaggaacggggagacacaggtcgcagtttggcatagcctgtgagggcaaaccttggtcacagctgtgtgcacgcagcagggccaggcaggcgcctgttgctggggtcacctgaacccctgaaccgagtctcaagaagtgctggggaagagggggcacccaagatgctgcatactgataaaggcaagtggcaggctggcattggcagcgtggctggcctgggcccaggactgtgcagctgtaggcctgttgtggctggtgggtggggtgtgtgtgtgttggggtgggggtgctgttataaaactggataggaaaagcctgataaagaaagtgccagaaaagatgaaataacccactgaaagattttaagcagagaaacaagataatgggccctacaatttggaaatgccgtcccagctctgcagagaggggacctggataggggcagggctggactgcaggggaagcagtcaaagggcagccaccatcaaggtatacacagctgtggggtctgcaggtcagctacagggcagtcagagaacccccaggattcgtgtcctgggacacgggtgtcagagaagggaagactccagggtcattcccagattctgccatgggcagcacagccaatggcatcgcattctcccaagtaaaaagcctggagctgcagcttgtgcaggtggggctgagtgaaaaggtggcttcacggccgggcacagtggctcacgcctgtaatcctagcactttagaaggctgaggcgggcggatcacttgaggtcaggagttcgagatcagcctggccaacatggtgaaaccccgtctctactaaaaatacaaaaattagccaagcgtggtggcgcctgcctgtaatcc

SEQ ID NO: 35808 - DNA, 937 bp, Artificial sequence
  DNA replication origin
ggccttatggggccgagcagtggcgtgaaggattttcagcagctcatcttggggcgagaaggttgggtttaggggtttagggagtagggctgagaaatgggcacgtacgggacttttgacgagtgaatgactaaatgggtacgttaatgggactcctgcggctggaagtttttttgttgttgtttgacacggtcttgctctgtcgcccaggctggagtgcagtggcgtgatcatggctcactgcagcatccacctccccggctcagttgattctcctgcctcagcctcccgagtagctgggaccacaggcgcacgtgcaaccacgcccggctgatttttttgtatattttgtagagacaggggtctcgctatagttgcttaaactcctgggttcaagcactcattccgtctcggcctccctaagtgctgggattacaggcgcgagccaccgagcccggcctgtgggtgggaagtttccagggcagatgatggagagtgagtggctgggaatgggactcaggaatgtctgcaggagactgaagaactgaactggggtaacttggtgtgggaaccatcgagaacttttgggaaaagggttagtagaggagtgggtggagatggaagacctattttctttttaatgaattcagcaaatttttattgaatccttacaataactggatagggaaccgggtgctgacatagtccctgctctcgagtacatgatttaggggagggaatgtaaatagcaaaaaataaggactgggtggagtggctcacatctctaatcacagcactttaggaggctgaggcaggaggattgcttgagctcaggagttcgagaccaacctggacaatgtagtaagacctcgtctctactaaaaataaaattaaaaaattagttaggtgtgatgatgcaagcctgtagtcccagcta

SEQ ID NO: 35809 - DNA, 897 bp, Artificial sequence
  DNA replication origin
cagcgctgccctctctcaaggggaaggagggcgcttatgagaagtgccgttgcctcggcaaccccaaacccagtccaagcccggagagggggaagttcggggcgagtcccgggggcggtgcgtggcgccggttggctgacggagatgaaggggcgtgtctgtaggcggtgcaatacacgggttggctggcgatagcggcggtgggcgtggcttaggcgcgagcgagagcgggcgcggcgctcaggcagcggcggttggctgcggcgccagtggtagtgctccaggctcgacggcaccctcacagcgcccgcccggccctgccgctcatggccgccccgccgcgccccgcgccatcgccccccgccccgcggcgcctcgacacgagcgacgtcctgcagcagatcatggccatcaccgaccagagcctggacgaggcacaggccaggtgctgcccgcgggctcggcaggggccacgcagggtcgtggcagtgaggttggcgggctgaggggacggggcgtggaggccagactgacgaggggcgcttgaggagggctggaggggggtcccgaggacgaagggatgtatggggttcaaacggaacgggctggataggccttatggggccgagcagtggcgtgaaggattttcagcagctcatcttggggcgagaaggttgggtttaggggtttagggagtagggctgagaaatgggcacgtacgggacttttgacgagtgaatgactaaatgggtacgttaatgggactcctgcggctggaagtttttttgttgttgtttgacacggtcttgctctgtcgcccaggctggagtgcagtggcgtgatcatggctcactgcagcatccacctccccggctcagttgattctcctgcctcagc

SEQ ID NO: 35810 - DNA, 1002 bp, Artificial sequence
  DNA replication origin
aaatagctgggaccacaggcgtgcaccaccacggggtctcactatgttgcccaagctggtctcaaactcccgtgctcaagtgatcctcccgcctctgccgcccaaagtgctaggattacaggcatgagccaccgcccagttccttttcttgtgcactaggagccttcgatgctgtgtcctaaggactagaaacaaagatgtgaggattcgctctgatttggggtacactgcaggggagtctctcagtaaacatccttccttcattcggtaaccacgtggtagcattttctatgcccagaactgtaatctgcgaagatgaataaacaagcgaggtcactcttcagctggaccttgaaaggtgactggaattgatttctgcagtggagaaaagcgctgcgttctgacctcctcgttgccatcaaccacgcacgcctgcgccccgccttagccaggtgaacggggcgtggaaagctctagaggaagagccaggggccccagtggcccacctgatggggctgaggatgcagggagcattagggggactgagcaggggtctggggcttggggcttctggaaatgaatgggggctgtcgatcaagctataagaggtgtggggttctgaggaggagggggtggcttggaggaagagttggggtgctctggggagtgagggtctctgaggaccgagggctttgaggagaagggggccctgaggaggagcaggaactctgaggagatgcgagtggggctgaaggaggcgtgcaccgcgcgagatgtgagggatgggggcctctggctggagcggagccagcgctgccctctctcaaggggaaggagggcgcttatgagaagtgccgttgcctcggcaaccccaaacccagtccaagcccggagagggggaagttcggggcgagtcccgggggcggtgcgtggcgccggttggctgacggagatgaaggggcgtgtctgtaggcggtgcaatacacgggttggctggcgata

SEQ ID NO: 35811 - DNA, 1330 bp, Artificial sequence
  DNA replication origin
ttccaagaagtgccacatgcactgatctcttgtgtccccagatggtcatcatgggccagtgctactacaacgagaccatcggcttcttctataacaacagtggcaaagagctcagctcccactggcggcccaaggatgtggtcgtggtggcactggggctgaccgtcagcgtgctggtgctgctgaccaatctgctggtcatagcagccatcgcctccaaccgccgcttccaccagcccatctactacctgctcggcaatctggccgcggctgacctcttcgcgggcgtggcctacctcttcctcatgttccacactggtccccgcacagcccgactttcacttgagggctggttcctgcggcagggcttgctggacacaagcctcactgcgtcggtggccacactgctggccatcgccgtggagcggcaccgcagtgtgatggccgtgcagctgcacagccgcctgccccgtggccgcgtggtcatgctcattgtgggcgtgtgggtggctgccctgggcctggggctgctgcctgcccactcctggcactgcctctgtgccctggaccgctgctcacgcatggcacccctgctcagccgctcctatttggccgtctgggctctgtcgagcctgcttgtcttcctgctcatggtggctgtgtacacccgcattttcttctacgtgcggcggcgagtgcagcgcatggcagagcatgtcagctgccacccccgctaccgagagaccacgctcagcctggtcaagactgttgtcatcatcctgggtaagtggggcccccagggggcaacagggaccctgcttccccctatctcccacaagacactgcgaagcaatgaacaaaacaagctacctgatagagggtgatgggggatgatttaggtggggaatgtcctccaaggaggtgataatgtatgtgagcagaggcctgaatgctgaggataggaacagagagccttccaggcagaggaaacggaaagtaaaaacctcaaggcagtacgaggccagagcctctaaagaggaaagtgggcttgtgaggaggagagatcagcaaggccttaaggggcacggacaggagtcttattttgagtttcatgggaaccccttaagagtttttagcagtgctagccgggcacagtggctcacgcctgtaatcccagcactttgggaggccgaggcgggcagatcagctgaggttgggagttcacgaccagcctgaccaacatggagaaaccccatctctactaaaaatgcaaaattagccaggtatggtggtgtgtgcctgtaatcccagctactcgggagcctgaggc

SEQ ID NO: 35812 - DNA, 1577 bp, Artificial sequence
  DNA replication origin
catcaccctctatcaggtagcttgttttgttcattgcttcgcagtgtcttgtgggagatagggggaagcagggtccctgttgccccctgggggccccacttacccaggatgatgacaacagtcttgaccaggctgagcgtggtctctcggtagcgggggtggcagctgacatgctctgccatgcgctgcactcgccgccgcacgtagaagaaaatgcgggtgtacacagccaccatgagcaggaagacaagcaggctcgacagagcccagacggccaaataggagcggctgagcaggggtgccatgcgtgagcagcggtccagggcacagaggcagtgccaggagtgggcaggcagcagccccaggcccagggcagccacccacacgcccacaatgagcatgaccacgcggccacggggcaggcggctgtgcagctgcacggccatcacactgcggtgccgctccacggcgatggccagcagtgtggccaccgacgcagtgaggcttgtgtccagcaagccctgccgcaggaaccagccctcaagtgaaagtcgggctgtgcggggaccagtgtggaacatgaggaagaggtaggccacgcccgcgaagaggtcagccgcggccagattgccgagcaggtagtagatgggctggtggaagcggcggttggaggcgatggctgctatgaccagcagattggtcagcagcaccagcacgctgacggtcagccccagtgccaccacgaccacatccttgggccgccagtgggagctgagctctttgccactgttgttatagaagaagccgatggtctcgttgtagtagcactggcccatgatgaccatctggggacacaagagatcagtgcatgtggcacttcttggaaggacacagggaggggcggcagctgcagaggagggtcagcgcaggaaggacaagggtctcaaattcagatacctcgaagcaaagtggcagtggtgaggactacggtggcctggaaaaagcaagctccatggggctggggtggaggtggaggagcagctgtttcttacctactaataagacctgtgtgcaagacatcacccaagtcaataggtttttgaaccagaagtgaaacaaaacccatctatggtcgaatcccagcccacctgccgccaatgtgtgacccggtttgggttgtggggagaggagggttagggaaagacaaaggggtgtgagctgcgggaagagatgagggaggatcactttggtgccggagtcagtgtagggagcagagacccgggagcgtgtgcacacaagggtgaggtcacttgctagaaccctgcgagggggcggtgccgaggcgtggaggtgatcggagtggacagagaggcggccccagaagttagtcggcgggatttgggcgcgagtgcttcccaagcgggcggggcaataggctgttccgggtgggacggaggacactggcggtctccgggacaaagacagcggttggggaagggatggatggccgggcctccaggcgtctccagactggggaaggggtagggggttaagggatcagagggcggcgtcctggc

SEQ ID NO: 35813 - DNA, 1166 bp, Artificial sequence
  DNA replication origin
ccccgggcccaggcccgcacccgcccgcctcccgtccgtgcaggcctcacctgggcctccagtcacgccgcagacaaggcgggctcgcgggggttcggggcgggctcgaggcccatggcccggcgactgcggcgggagcggtagagcgtccgggtgcgccctgtgcgggttgctgagagggcgcgggaggcggggtctccccggcgccccgcccccaccacctgggggagccctgccccgccccgccacctgggggagccccgcctccacggccgcgtcgggggcggtgtcgcccggaaccgcagcccccctgtttcctccccgcctcgcggcccctcagtcgcccctatttccggcgcgggacccccaccccggtacctgcacacctcatgcgcccgcagtttcgagcctgcggggctgagtcactcggcgacccgaaaattcccgccgtgaccccgcgctgcccgggcggagctccaggtggtcttgggtccgcgcccccgctccggacccccaaccctcccagccccaccccgctctcttcttcgtgtccaatcggccgccgagttacaagccactccctgatccgacttggctcccaccgcccggacccccgcccagcttcggctttgccagctcgcagtatcagcgagccgcggcctcctgtgcgaggcccacctctgcggccccagctgatcatcgggcgcacgctagggttttgcaatcccgcccccgtacccctcaccctgggacagcgctgccccctgcaaagcccggccctgccctgccctgccctgtggcttcctccctcggcctccctgcggcggccccgggctcccacggtccggagcacacagccccattgtcccggttatcggtactttgttatactgtatttgattatgcaggaccggatcggggacgcagagctccgggagggccgggctggcgtgactcagccgggtgctgcgacccagctccaactgcctttacgtaggtgctgcagggtgtttgatgatgcaagaaggaggccttgaggccgggcgcagtggctcacgcctgtaatccctgcattttgggaggccgatgcgggacgatcacgagatcaggagatcgagaccatcctggccaacatgctgaaaccccgtctctactaaaaatacaaa

SEQ ID NO: 35814 - DNA, 1307 bp, Artificial sequence
  DNA replication origin
aggccatttccctcgacagccagttcccgcccccagacccactgtctcggctccgccccatgaggtcctgtcccctggatgaccagcccctgctctgaccatgcctgggtcccctggccgactgccctagttcctaagccgcccaggtgcgtcccaaaccctgaccacgttcgcgtctctcaagccccgccccagctctggccctgcccccaggctcccaggctccgcccctccccaacctgctgtctccacccggcaggtgacgctgagtctcttcgggctgcggggggcgcaggcagagcgtggcccccgcgccttcgccgccctggccgagtgctgtgcgccctttgagccgggccagcgctaccaggagtttgtacgggcgctgcggcccgaggccccgccgcccccgccgcccgccttctccttccaggagttccttccctccttgaacaggtgggtcactggagcagggagtcgggaacgagccccggaatcgcgatgccaggctgttggcaccgcaggctggttactcgaggttagagaacgcaaagccttagtggaatttagtactccaggctctcgggggccataggagggtgaatgggttgtcccagtcctaggggcaggggcaggaatgtggggctactgtatttcaggggccacaatgccctgggtgtcagggtttgcagacccaagtgcttggagttggtacctagacatgatgcctgggtgccatcaccccaggccagtttcctgggattcaaaccttcaaacttctgtcttctcagctcccctctggacatcagaaagaagctctctgggcctcttcctccaaggctggatgagaattcagctgagccaggcccttgggaggatccgggcacaggctggcgctggcaaggtgagtgcaatgagggccaggtgggagtggtgccaggagttcgttccaccaacacataggtgggctgcaggagtggggtttgtgagcaggggaccatccttattgacctgtgccacctagggactccaggccccactccgggcagcgatgtggacagcgtgggtggcggcagcgagtctcggtccctggactcacccacttccagcccaggtagggataggacctggtcctgacccacactccacctgtgaccatcctccagcccctggccaagctctgaccctcaatctttaactatctttgacctctgacctaccccacacccctgacctatttcctcaacctctttttttacctttttaaaaattatttatttatttatttgtttgtttatttgagacag

SEQ ID NO: 35815 - DNA, 885 bp, Artificial sequence
  DNA replication origin
gggtctgcaaaccctgacacccagggcattgtggcccctgaaatacagtagccccacattcctgcccctgcccctaggactgggacaacccattcaccctcctatggcccccgagagcctggagtactaaattccactaaggctttgcgttctctaacctcgagtaaccagcctgcggtgccaacagcctggcatcgcgattccggggctcgttcccgactccctgctccagtgacccacctgttcaaggagggaaggaactcctggaaggagaaggcgggcggcgggggcggcggggcctcgggccgcagcgcccgtacaaactcctggtagcgctggcccggctcaaagggcgcacagcactcggccagggcggcgaaggcgcgggggccacgctctgcctgcgccccccgcagcccgaagagactcagcgtcacctgccgggtggagacagcaggttggggaggggcggagcctgggagcctgggggcagggccagagctggggcggggcttgagagacgcgaacgtggtcagggtttgggacgcacctgggcggcttaggaactagggcagtcggccaggggacccaggcatggtcagagcaggggctggtcatccaggggacaggacctcatggggcggagccgagacagtgggtctgggggcgggaactggctgtcgagggaaatggcctagtcctggtgtctccagggtggcttaggggcgaggagtggggcactcagtcggggccccaacggggtgaggggaggatggccttggggatgggcctcacccgcctcagcacttcatccccctgaaacaccagcttgcgcacgtgcgacacgattcgctgcttggcgatctccaggtcctgctgccgcgc

SEQ ID NO: 35816 - DNA, 871 bp, Artificial sequence
  DNA replication origin
ggaactggctgtcgagggaaatggcctagtcctggtgtctccagggtggcttaggggcgaggagtggggcactcagtcggggccccaacggggtgaggggaggatggccttggggatgggcctcacccgcctcagcacttcatccccctgaaacaccagcttgcgcacgtgcgacacgattcgctgcttggcgatctccaggtcctgctgccgcgcgttggcctcgcggacacaggcctggtacagcgcctcggcctcctgcgcctggggaaacgggaggccaggagcggggtggggcgcgtgtgggcgagagtggagggcagggggcgccacagcgctacaggggctcggggccgggtgcccaccttggcctgggcctcctctcgcgagcgccgccgccgctcctgctgcttgctaggtcccggcgaggcctggggggccgagtcctcaggggacccctgggagcgtgcccgcaggtcctcgctgcgttgcacatactgcagctgggcgcgccgcagtgcctgcaccgcctcattctgggggatgatgagaaggtcagcgtcccggcctctctctcaccctacccttccaccaattccaagcctcaccatccgcttctgctccttcatccactgctccttgaactccttccgccacttctcaatctcagtccgtttggcggcgaggggctggcaagggttggggatggggatggagacgctgccttagggccaacccagaagcagccacccagtccttccattcctgcgccatgtgctttgccacctctggactctatttttttttttttcgagacggagttttgctcttgttgcccaggttggagtgcaagtgggcaatcatggctcac

SEQ ID NO: 35817 - DNA, 638 bp, Artificial sequence
  DNA replication origin
tgcggcggcaggaaatcggggctcggccccgccggcgcgcgaccccatccccatcccggtccctgcagagcgatccccgggcccagatatggacgcagcagagccgggtagggggtcggggatccgggaggggcctcccccgaccatcccctgcttcctacattgagggcacacacttgtcccgctccgtcctgagagccaggagaggagttcctgaatgggaaggacccagggatcctccattgtggggagccctgtgcccggatgggttcaggaccccagcccttcactccccctcccccttttgatccctcaccccagacgcctgggggagggggcccaggaaggggaagtgactgcttctgcttctgatttttgtgatgggggcagggtgccacgactgctgagggagagggcaacgcggtaggatccccacagggcccctctgtagccctggggagtcggcagtgctggtctaggccccttaggagagggggcaggggggcagcagtagaaatgtggcggggtccgacttggtgtttccggccgtctttgtgtctgtgttgtgtatgtggagtgtcattcggtctttatgtccctcacggcttcagtctctccatgtgtgtttctgccccagg

SEQ ID NO: 35818 - DNA, 1066 bp, Artificial sequence
  DNA replication origin
cagtgaaaccccatctctactaaaaatacaaaaaattagccaggcatggtggcgagtgcctgtagtcccagttactcgggaggctgaggcaggagaatggcgtgaacccaggaggtggagcttgcagtgagccgagataacgccactgcactccagcctgggcaacagagcgagactccaactcaaaagaaaaacaaacaagtactgactctgtcatgctctttgggggcctgcgctgctctaccatctcatgtcacagtcagggagctctggctgagcatcagccaggatgtgacctggaaacctggcttggctcttaggttgatagtgttattcctttcaatggactcactcatcacaactcaagaactgcagagtaggcagcacggagccagtcagagaatccttgcctccttaacagccaaagcctttggacacaaagttataaacatactttaaagtctatttccagccccaaaattccactgtgctgggggtgggagcatttttataacaggcggcttgtggcaaccccagagctggtgcttttggacaaacctccactccctacctaaaagggctgctccctggtgtgctgtaattggggccttgagcctgatccagctttgagggtcacggaaggggcgtcccccaggccaggggttctccagcccgagtattagaattttggttggaatcggacagaatatcaggcctccaccagggggcgccatggctccagcgaggcccaggtggtttcagggctccgagagacaacctgggcaaggggatcaccagggtcgcgggttgtgggagctcctgggagaggccccccgggacaggtggactctgcaaccattcagggaggagggggctggggctccgtgggatttggggtagcacaaagatctgagagggaacctatggcccagatgaagtcttaggatgcccaggtcaggggcactgcagcctcgagtggtcgctcagggggccctggcccgacccagtttcaagcggctcaggtagagaagggcactatcaaggcttccgggctacgggggcgtgg

SEQ ID NO: 35819 - DNA, 994 bp, Artificial sequence
  DNA replication origin
gggggtcacctgggtgggtagggaggtgcgggctccagagaggagagactggctggtgctggggtccgagtggagggagggtgcttctgagcccggtcagccaagcccccagccctaaccctaggtgctgcccgcaggccggcagtgcgagtggcgctccattgacggcagcatcgtgctgcccctggcccggggctccccaaaggcactggccctggagtacgcactgtgcctcacaggcgacggcttggcccacctgcaggccaccgacccccagcagctgctccgcctcatcccccatgtgcaggtgttcgcccgtgtggctcccaagcagaaggtatgtgcacagccctaggggtcaggggcacagcggtaggcacgcagcccctgctcagcctgtctccgcccatacaggagtttgtcatcaccagcctgaaggagctgggctacgtgaccctcatgtgtggggatggcaccaacgacgtgggcgccctgaagcatgctgacgtgggtgagtgctgtgggctagggtatttcgtttgtggacgaggtgttgaggacatgtcactgagctagaaagacagacctggcccttggtgacagccacgggggcactaattcctgtgaggatgggagggggtggcaaggtcaggggctttgagggcaggaagggatgcgaatatcccaggaacagagcagggcggaggccagaggccaggagagaggcaacaagttgggagagtgactcagaaaacccagagctgaagccatgaagatggttcatagccccagatctctgtcaaaagcacacagatggctgagcactgtggctcctgcctggaatcccagtgctttgggaggctgaggcgggaggatcacttgagtctgggagttcaaggcagtggtgtgatccactctaacctaagtgacagtgcaagaccctgtcttttttttttttgacggagccttgctctgtcacccaggctggagtaca

SEQ ID NO: 35820 - DNA, 1533 bp, Artificial sequence
  DNA replication origin
tctggaaacaaataagtacgagtcctgaggggctttgctccaaagaggcagccaagcccctacctctcaccccggcctcccccacctccctcctgcctcccccagggcctgatcggggctctgggctagagcaggtgttggtccagagctggaagacctgggcttggaggaccctggcactgtggcttcggccagggcagggcagattccaacccagagggacacccaaggacgtggcctatcctgggtctaaagtgagcctctggccacccacctcggggagcatcagagctgtaggcctgcctgtccccaagatgctctgaggggtgcagcccacctgcctagggctgtgagagccagtggctcccccttgctgggcctgaggccccagcccctcacctttggtcagcgtccagtccacggccgtcagcatggccttctctagagggtcacccacgagggtgccgtcgtccagctgcatgagcgagtggcacgaggccagggcccggtgtgtttctacagggatgctggacactggggtcacctccttcccgtctctgcaaggtcggggaacagctggttacagagtgcaggcgggtagggcgaagctgcatccccaccagcagaaggacccccaaggccattcattccgtgcttgtcactggggtggcttgggcgccaactgggtctttatgagacctgcacctgcttcacagatgcccccagaagccaggcattgtgcctgggggtcatgtggtgcatggctggtgtgggatgttccaggcctgagctgagcccccgtgccgctaccatggctgacacccaggactttgtggggagcccctggaaatgaacccgaggcagggcctctgacgggccctcactgcaagggcttggggtggatgggccacctgtctctcgacttcccagaaaccccatctgggtgacctttgctgcagggcccctgatgcttacctcagcccggccacaccgcgcaccaccaggctgtcactggtcaacgtccccgtcttgtcaaagcagcacacctcgaccttgccagcaaaggggatccggaagggctctgtgcagtacatgtctaggggcgggagtgaggtcaggggtcctgcttggccccagcccactcggcaccccatcccatttgacacactcacagagcttggccagggcgatgagggaggtgttgacggccagggacagctcgatgggcagctcaggaggcacgaccgaggtgaggatcagggtgcactccagaaacagcttgtagcggttccggctggggtccttggtacctgtggagacagggcctgccaacctggagcctcggagggtgggcgcaggggaccacagaggccgtggcgcttaccttcaatccatacataggcagctgcagcgatggcaaacaccaggaggaagaggatgaagatgaaggtctccaggttgttcgcagtcaccctcttgaccccgaagaggatggtgcgcagcagcttgccctggaggaatggaggaacagcc

SEQ ID NO: 35821 - DNA, 1196 bp, Artificial sequence
  DNA replication origin
ggtgcagcagcagatgcggaacatgtcggagatccggaagatgggcaacaagccccacatgatccaggtgtggctgccagggagacccaggttgggggtgcagcacaggtgcggcttctgtgctgacacccatgccccgcccaggtctaccgaagccgcaagtggaggcccattgccagtgatgagatcgtaccaggggacatcgtctccatcggtgaggccgggttccgctcagtcccagtgggagccccagcctcagggcctctggccaaccctcctgcctctgccctgcaggccgctccccacaggagaacctggtgccatgtgacgtgcttctgctgcgaggccgctgcatcgtagacgaggccatgctcacgggggagtccgtgccacagatgaaggtacttggtggaggatggggatcctcaagctgttcaggaggaaacaggccaggaggtggaggcccagggggtggcggggatccccctcaggcacaggcggaggaggcagtgtgggcacagatgagctctgtggactggggagccgggtggtgggggcgaggaaggaggtgagagagccaagggcatccagggtacattggtgccctgggatgtcagaccaaggtgggctgggagcagtccagaggggtgagtcccagacgaggccaagtgcaggccccagagagcaggcactgtgagtgcaatggggagaagacaggacggggtgagggtgaggatctgggagctgggtgggatgtattggtcgggtggggatccccctggctcattccagcctcaaggtccagctgtccaggaactcagatggagaaggaagcaaggtaggcctggccatccagattcacgatcttcctccccaggagcccatcgaagacctcagcccagaccgggtgctggacctccaggctgattcccggctgcacgtcatcttcgggggcaccaaggtggtgcagcacatccccccacagaaagccaccacgggcctgaagcgtaggtgcctcatgggcgtctgggggtatctgggcttccaccccctttgcccgtctgcttgatcatgagggagtcaggacgaggagacaggcatgacggtgactctgcttctctccccagcggttgacagcgggtgcgtggcctacgtcctgcggaccggattcaacacatcccaggtgcggggccagg

SEQ ID NO: 35822 - DNA, 1056 bp, Artificial sequence
  DNA replication origin
aacttcagctgccttttgacctgcagctaagcagcttagctcttaacttcctctccagggatggagaagtgggaggagctgaacagccatcagccaggagaggtggatctgggtttgattcagatctcagaaagggccgcttctgctctctgagtttcagtttcccccttctgtaaactgagaaccgtaactaacaactactgggtgccatcttgagaagcggagatgatatctgcagagtgcccgccctggggccatcacagcgtatagcctcttgtacctttcttccgtgacgtcacgtttgtagttatgtgattgttgttatttgctgcctgctttggaggcccatgaaccacccgtgcggtggcgctttgtttctgcgggtcatcattgtgctccccccatctccatgcagctcgtctccatgcagctcggtctagcagagcagcagaggaatggatggcggttcacggggtccagggagcactgaacgagttccattcaacatttctgtgtcttaggtgctggggaaacagcagtgaacaaaacaggcaaatccccctgcctttgtggtgttactgggagggagaactcatagtcagcagttgatgccaaacagagatgacatctaacatcaggacaggatgggacattgccgggaactttagatggggcagccagggaggggctcctgagaaggtgatgtttcagcaaaagcctgaggcagcaagggagctgtgtgactgtgtattccgggcagagaaaacagcacatgccaaggccctttgctgaggcacgatcgagccccatgtgcgtgtggagctgtggagtgtagtgagcagggttggtggaagaggcagagctgagcaggaggccgggggcctgtgatggggcgggggcttggctcacgtgaattgaggacgtactgggtgggtgcctggcagcgttcttcctatttgagttcatgtcaccttcagcagagcagagccctgggcattaggtgctgtctgtgcacccagcttcccagctttttttgttgttgtttttgtttttgtt

SEQ ID NO: 35823 - DNA, 1316 bp, Artificial sequence
  DNA replication origin
aggaaagatggcggcagcggcggcggtgggcaacgcggtgccctgcggggcccggccttgcggggtccggcctgacgggcagcccaagcccgggccgcagccgcgcgcgctccttgccgccgggccggcgctcatagcgaacggtgacgagctggtggctgccgtgtggccgtaccggcggttggcgctgttgcggcgcctcacggtgctgccattcgccgggctgctttacccggcctggttgggtgccgcagccgctggctgctggggctggggcagcagttgggtgcagatccccgaagctgcgctgctcgtgcttgccaccatctgcctcgcgcacgcgctcactgtcctctcggggcattggtctgtgcacgcgcattgcgcgctcacctgcaccccggtaagtgtgtacacgcgagcccgacccccagcacggtcgagcctcgccgtgggtcccagctgcggccttcctgtcggtcaccatcgcgacctgggccactcatctgcctggcctggattcccaggggcaccctctacactttggcgcaggcttaatcatgaccccactgctgacttgctgtgcatgcctggtgcgggttatttcctttttctgaagtcctccctgttatggtcatttagattcagtgatgtaatacttgtaaaaggcttagcgcagggcccagcatacgtcgcccaggtcaggtaggagttgtttatactagttcccatattagcgactactcttgttctggaaacggccctaccttccatctcatctgtctcctaccttggttttcaaagtgtaaggcgagatcactgggataggtttcccccatctatgaagcttagttggttcttagactgaaccaagtcttgctgtccagtgcttagtggtcttccatactgtgatggaaaggagcatgaaatgcagttaattacagtgttgaagagaggcagaggtgtttatgagcgagtcatttacatgatgtctttccgcaaaatgagggtggtgatactgagttctgtcggggatacaacagcaagcaaggtcgcgctcctgacccacagtttagagttctgagtgaccaagtgtcgtcggaggagttggtgactgtgagcttccctgggcctgaagcagtgactgtgtcgtctctctctgggcctgcctcaggtgacaccagcaggtttggagccatggacactgaggtatatcaggaagcttcccctctgattccaggagtgtgtttgcctcaagaagaggaaaagggaacagcatcaagggctacagaaagacagaagccccccaccctggc

SEQ ID NO: 35824 - DNA, 882 bp, Artificial sequence
  DNA replication origin
ggaaggccgcagctgggacccacggcgaggctcgaccgtgctgggggtcgggctcgcgtgtacacacttaccggggtgcaggtgagcgcgcaatgcgcgtgcacagaccaatgccccgagaggacagtgagcgcgtgcgcgaggcagatggtggcaagcacgagcagcgcagcttcggggatctgcacccaactgctgccccagccccagcagccagcggctgcggcacccaaccaggccgggtaaagcagcccggcgaatggcagcaccgtgaggcgccgcaacagcgccaaccgccggtacggccacacggcagccaccagctcgtcaccgttcgctatgagcgccggcccggcggcaaggagcgcgcgcggctgcggcccgggcttgggctgcccgtcaggccggaccccgcaaggccgggccccgcagggcaccgcgttgcccaccgccgccgctgccgccatctttcctagcgccgcgctcacttccgggcagaggaacgcctcacttccgaagttttacttccggtaagccctgagcgccgccatggcagcctggactaggaagagccagggcaacagaacaggctggccccggcagggactacttcgggtgccgccatgacaggctgtggccggaagaagaggctgggcgtcgccatgacagagagggactggaagacctaacggtgcctgcctccgctgccacgccggactgagaccggaaaagacaaggccggcaaggcgggcttgggcgccaccatgacaacctgaaccaaaaaaagcgagccctcctccttgactacaccagcaccacctgtcaccaggggcgaagcctggaccctgcggaggcggggtcgggagcttcggagttcaggag

SEQ ID NO: 35825 - DNA, 1744 bp, Artificial sequence
  DNA replication origin
ggcagccttgtttaggcctgcaatgaggcaagtaatcatatgattatgggatgccaggctggggtctgtgggttggtactcccaaggaggctcctgccagggtactgcagcggctcctatgggcttggtaaaatcttgctgatggagatcatcagcacgcgtcggggctgcgagccacactctttccttcttttccagaaggagggtaaaagacaggataatatagagatcatgccaagtgagttcataagactgagtaagatacgtacattctttgatataggtatcaggatcggaggagaaaaatccgagacatttttcaacttggaagagatcggaaagggagaaggggatgtggacacagacgatccctttggcccctgctgcttcccaaaggggcaacaagggaactggctgcttggcctgagagtgggtaaggggtggtgatggggaggactcagagtcagaaggagggttgttggagagagggggagaaagaagtagagccagagcgggggcatacggaggaggatcatgatgctctggcagaggatcatgatgttgacggggagggggaaaattggtggggtcaaaggaagaggagtcatcagctggggcgatggggagggtagtaggggatgagtcgtcggctggggtcgtagggagggtggtaggaggcaaatcaggtttagagcaggcaaggaggatttggaaagtagaacaggactggcagagagaagggtggctatggagagtgaagaaagcctgaacataaggaatctcagaccatttcccattgcggtggcaaaagttgtctaagtctgtaagcatgttgaaatcaaaagtgccattttcgggtgattgggagccattgtccaatttgtattgaggccaggcagtattacggtagaaaataagcctcttaggatggacccttgaatggaggctgagagcattgaggttgtgcaaaagatacccaaggggggtggttttaggaggggtagaatgagaagctcccatggtaaatagaggaggggggtagaggaagaagagactgccagttgacaaggatggcaggtgagggcgtcccctgtcccacaagccctgtccggaatgtaggaggtagctgcctcctgaaatggagaaaccagaggactggaggctgaagaaagcccttggctcagcgctgggtcttttgggaatgcagagacagtcaagggttccgggtaaatggcaagactctctctcttacccctttggaggctctgaaggtgaatgaagtcaccaacaatgggagagtctaggagatcctttgggccttcagcaggtttgggaaggggagggtggctagcagggggtggcaggagagggggaaaggcacctaggctccagcgcacaatgaccagcaagcctgggaggagggagagtgtgagagagagagtgacagaaagtcctctagggacgcccggccagagtctacctcttcccaggttttgacaccaaaatgtaaggttggccgagagaaaggacaagtagacccaaagtcaggcaagtaagtttattaacctaccgggctggtccacagcaatcagaagaggtagccctgagcttacaaagtgaggggtttatgtgagatgagaggggcttaagggagttaactttgccgctagatagtttatcagttaggaacaggcacaaaggcagtttatcagtttaccatgaacttgcaacacctcatcatgtg

SEQ ID NO: 35826 - DNA, 799 bp, Artificial sequence
  DNA replication origin
cccctactgggaagtgaggagcccctctgcccggccaccaccccgtctgggaggtgtacccaacagctcattgagaacaggccatgatcacaaggttggttttgtggaatagaaaagggggaaaggtggggaaaagattgagaaatcggatggtggctgtgtctgtgtagaaagaagtagacatgggagacttttcatcttgttctgtactaagaaaaattcttcggccgggcgtggtggctcacgcctgtaatcccagcactttgggaggccgaggcgggtggatcatgaggtcaggagatcgagaccatcctgggtaacacagtgaaaccccgtctctactaaaaatacaaaaaattagccgggagcggtggcgggctcctgtagtcccagctacttgagaggctgaggcaggagaatggcgtgaacccaggaggcggagcttgcagtgagccgagattgcgccactgcactccagcctgggcgacagagccagacgctgtctcaaaaaaaaaaaaaaaaaaaaaaaaaaaaaaattcttctgccttgggatcctgttgatctatgaccttaccctcaaccctgtgctctctgaaacatgtgctgtgtccactcagggttaaatggattaagggcggtgcaagatgtgctttgttaaacagatgcttgaaggcaacatgctggttaagagtcatcaccactccctaatctcaagtacccagggacacaaacactgcggaaggccgcagggtcctctgcctaggaaaaccagagacctttgttcacttgtttatctgc

SEQ ID NO: 35827 - DNA, 1075 bp, Artificial sequence
  DNA replication origin
agtgctgggattacaggcgtgagccaccacgcccggccgaagaatttttcttagtacagaacaagatgaaaagtctcccatgtctacttctttctacacagacacagccaccatccgatttctcaatcttttccccacctttcccccttttctattccacaaaaccaaccttgtgatcatggcctgttctcaatgagctgttgggtacacctcccagacggggtggtggccgggcagaggggctcctcacttcccagtaggggcggccgggcagaggcgcccctcacctcccggacagggcggctggcctggtgggggctgacccccacctccctcccggatggggtggctgccgggcagagacgctcctcacttcccagacggggtggctgccgggcggaggggctcctcacttctcagacggggcggctgccaggcggagggtctcctcacttctcagacggggcggccgagcagaggcgctcctcgcatcccagatggggtggcggggcagaggcgctccccacatctcagatgatgggcggccgggcagagacgctcctcacttcctagatgggatgacggccgggcagagatgctcctcactttccagactgggcagccaggcagaggggctcctcacatgccagacgatgggcggccaggcagagacgctcctcacttcccagacggagtggcggccgggcagaggctgcaatctcggcactttgggaggccaaggcaggcggctgggaggtggaggttgtagccagccgagatcacgccactgcactccagcctgggcaccattgagcactgagtgaacgagactccgtctgcaatccagacacctcgggaggccgaggctggcggatcactcgcggtgaggagctggagaccagcccggccaacacagcgaaaccccgtctccaaaaaaaaaatacgaaaaccagtcaggcgtggtggcgagcgcctgcaatcgcaggcacttggcaggctgaggcaggagaatcaggcagggaggtgcagtgagccgagatggcagcagtacagtccagcttctgctcggcatcag

SEQ ID NO: 35828 - DNA, 1356 bp, Artificial sequence
  DNA replication origin
cacatgtttcagagagcacagggttgggggtaaggtcacagatcaacagaatcccaaggcagaagaatttttcttagtacagaacaaaatgaaaagtctcccatgtctacttctttctacacagacacggcaaccatccgatttctcaatcttttccccacctttcccccctttctattccacaaaaccgccattgtcatcctggcccgttctcaatgagctgttgggtacacctcccagacggggtggtggccgggcagaggggctcctcacttcccagtaggggcggccgggcagaggcgcccctcacctcccggacggggcggctggccgggcgggggctgacccccacctccctcctggatggggtggctgctgggcggagacgctcctcacttcccagacggggcggctgccgggcggaggggctcctcacttctcagacggggcggcggggcagaggcgctcgcacatctcagatgatgggcggccgggcagagacgctcctcacttcctagatgggatggcggccgggaagagacctcctcactttccagactgggcagccaggcagaggggctcctcacatcccagacgatgggcggccaggcagagacgctcctcacttcccagatggggtggcggccgggcagaggctgcaatctcggcactttgggaggccaaggcaggcggctgggaggtggaggttgtagcgagccgagatcacaccactgcactctagtctaggcaccattgagcactgagtgaaccagactccgtctgcaatcccggcaccttgggaggcccaggctggcggatcactcgcggttaggagctggagaccagcccggccaacacagtgaaaccccgtctccaccaaaaaagtacgaaaaccagtcaggcgtggcggtgcgcacctgcaatcgcaggcactcggcaggctgaggcaggagaatcaggcagggaggttgcagtgagcagatatggcagcagtacagtccagcttcggctcggcatcagagggagaccgtggaaaggagggagagggagagggagagggagagacagagacagcctgagctttttcttaagatcgttttaacttctgtcaaaatcatcttgcccagatggagatctgtttttctctccaatgctttgtctgtttcagaagccctattagtattccatggtgtctcaatgaggtgggctgtcacagaaagaacttttggagctatctctatttggactcatgctggaaatttagcagcattatttccttgtcaccattataagtagaacctgagactgaaacactggtcttattttgattattgtgaaggtgtaattctacccagg

SEQ ID NO: 35829 - DNA, 958 bp, Artificial sequence
  DNA replication origin
ctacaacctccacctcccagccgcctgccttggcctcccaaagtgccgagattgcagcctctgcccggccgccaccccatctgggaagtgaggagcgtctctgcctggccgcccatcgtctgggatgtgaggagcccctctgcctggctgcccagtctggaaagtgaggaggtctcttcccggccgccatcccatctaggaagtgaggagcgtctctgcccggccgcccatcatctgagatgtgcgagcgcctctgccccgccgccccgtctgagaagtgaggagcccctccgcccggcagccgccccgtctgggaagtgaggagcgtctccgcccagcagccaccccatccaggagggaggtgggggtcagcccccgcccggccagccgccccgtccgggaggtgaggggcgcctctgcccggccgcccctactgggaagtgaggagcccctctgcccggccaccaccccgtctgggaggtgtacccaacagctcattgagaacgggccaggatgacaatggcggttttgtggaatagaaaggggggaaaggtggggaaaagattgagaaatcggatggttgccgtgtctgtgtagaaagaagtagacatgggagacttttcattttgttctgtactaagaaaaattcttctgccttgggattctgttgatctgtgaccttacccccaaccctgtgctctctgaaacatgtgctgtgtccactcagggttaaatggattaagggcggtgcaagatgtgctttgttaaacagatgcttgaaggcagcatgctcgttaagagtcatcaccactccctaatctcaagtacccagggacacaaacactgcggaaggccgcagggtcctctgcctaggaaaaccagagacctttgttcacttgtttatctgctgaccttccctccactgttgtcctatgaccctgccaaatccccctctgcg

SEQ ID NO: 35830 - DNA, 927 bp, Artificial sequence
  DNA replication origin
gccccccgcccggccagccgccctgtccgggagggaggtggggggatcagccctccgcccggccagccgccccgtctgggaggtgaggggcgcctctgcccggccgcccctactgggaagtgaggagcccctctgcccggccagccgccccgtccgggagggaggtgggggggtcggccccccgcccggccagccgccccgtccgggaggtgaggggcgcctctgcccggccagccgcccgtccgggagggaggtgggggggtcagccccccgcccggccagccgccccgtccgggagggaggttggggggtcagccccccgcccggccagccgccccgtccgggagggaggtggggggggtcagcccccctgcccggccagccgccccgtccgggaggtgaggggcgcctctgcccggccgcccctactgggaagtgaggagcccctctgcccggccaccaccccgtctgggaggtgtacccaacagctcattgagaacgggccaggatgacaatggcggctttgtggaatagaaaggcgggaaaggtggggaaaagattgagaaatcggatggttgccgtgtctgtgtagaaagaagtagacatgggagacttttaattttgttctgcactaagaaaaattcctctgccttgggatcctgttgatctgtgaccttacccccaaccctgtgctctctgaaacatgtgctgtgtccactcagggttaaatggattaagggcggtgcaagatgtgctttgttaaacagatgcttgaaggcagcatgctcgttaagagtcatcaccactccctaatctcaagtacccagggacacaaacactgcggaaggccgcagggtcctctgcctaggaaaaccagagacctttgttcacttgtttatctgctgaccttccctccactattgtccc

SEQ ID NO: 35831 - DNA, 2317 bp, Artificial sequence
  DNA replication origin
gggctgatccccccacctccctcccggacagggcggctggccgggcggggggctgacccccccacctccctcccggacggggcggctggccgggcagaggggctcctcacttcccagtaggggcggctgggcagaggcgcccctcacctcccagacgggacggctggccgggcggagggctgacccccccacctccctcccggacggggcggctggccaggcggggggctgacccccctacctccctaccggacggggcggctggccgggtgggggggctgacccccccacctccctcccggatggcacggctggccaggcggggggctgacccccccacctccctcccggatggcacggctggccgggcgtgggggctgaccccccacctccctcccggatggggcggctggccgggcggggggctgacccccccccccccacctccttcccggacggggtggctgccgggcggagacgctcctcacttcccagatggggtggctgccgggcggagaggctcctcacttctcagacggggcagctgccgggcggaggggctcctcacttctcagacggggtggttgccaggcagagggtctcctcacttctcagacggggcggccgggcagagacgctcctcacctcccagacggggtctcggccgggcagaggcgctcctcacatcccagatggggcggcggggcagaggcgctccccacatctcagacgatgggcggccgggcagagacgctcctcacttcctagatgtgatggcggctgggaagaggcgctcctcacttcctagatgggatggcggccgggcgtagacgctcctcactttccagactgggcagccaggcagaggggctcctcacatcccagacgatgggcggccaggcagagacactcctcacttcccagacggggtggcagccgggcagaggctgcaatctcggcactttgggaggccaaggcaggcagctgctccttgccctcgggccccgcggggcccgtccgctcctccagccgctgcctcccgggcggcgctcgccggcgccgactcccataatttactttttctagacagagtctttctctgtcgcccaggctggagggaagtggcatgacctcagctcactgaaacctactccttccgggttcaagcgattctcacctctgcctttggagtagctgggactacagacattcaccatcacacccagccaatttatgtatttttagtagagatggggtttccccattttggccaggcttatcttgaactcctgacctcaagtgatccacccgcctcggcctcccaaagtgctgggattacagacgtgagccaccgcgccaggccccataaattttttcttttccttctttcttttttttttgagacagagtctcgctctgttgccaggctggaatgcagtagcacgatcttgtcttactgcaacttccgcctcccaggttcaagcgaattctcctgcctcagcctcctaggtagctgggactacaggcccccgccgctatgtttggctaatttttgtgttttagtagagacagggtttcaccatgttggccaggatggtctcgatctcttgactttgtgatccacccgcctcggcctcccaaagtgctaggattacaggcatgagccaccacacctggccacccgtccccataaatttttaataagagaaaacagaaactgtgaaccccacagaccaaagctcttcccattcatgaacccacaccccgagtcagggttcccccccaaagatcctcctggagtccccgcacaatctaggagagacgtggcactgtgggtgcagggctgccctgagaaggtttcaggccagggcacagtcaccgcgcagggaagagacaggacacccctggaccgcctgtcagcgcagctgccatcttagggctgaaggggactgaggccgagctgggcaaggagaacttgtggcacagattgtggagctgactgaggagaggcctgagtcctgccactgccacttgtcaccggttccaaccatcccctcccgctcactcaggatgtcggaccggcactctcactgtttctaggcttccaggaggtcctggtgtcttagctgtggatctcccaatacctgcaggtcacagggctatagaggttgcgcctctaggagcagaggacacagactagtgaagaggagacccagagctcaggctgcagccagagacaaaggctgcagccaaacactgaagacgtcctgttcactccagctgcgtgcctgattgggcagttttcaggccagcgttt

SEQ ID NO: 35832 - DNA, 883 bp, Artificial sequence
  DNA replication origin
gagggtctctgcccggccgccatcccatctaggaagtgacgagcacctcttcccagccaccatcccatctaggaagcaaggagcgtctctgcccggccgcccatcgtatgagatgtggggagcgcctctgccccgctgccccgtctgggatatgaggagcgcctctgcccagccgcgaccccgtctgggaggtgaggagcgtctctgcctggccgccccatctgagaggtgaggagaccctctgcctggcagccgccccatctgggaagtgagtagcatctccgcccggcagccaccccgtccgggagggaggtgggggtcagcccccgccaggccagccgccccgtccgggagggaggtggggtcagtcccctgcccggccagccgccccatccgggaggtgaggggcgcctctgcccagccgcccctactgggaagtgaggagcccctctgcccggccaccaccccatctgggaggtgtacccaacagctcattgagaacgggccatgatgacaatggctgttttgtggaatagaaaggggggaaaggtgcggaaaagactgagaaatcggatggttgccgtgtctgtgtagaaagaagtagacatgggagacttttcattttggtctgtactaagaaaaattcttctgccttgggatcctgttgatctctgaccttacccccaaccctgtgctctctgaaacatgtgctgtgtccactcagtgttaaatggattaagggcggtgcaagatgtgctttgttaaacagatgcttgaaggcagcatgctcattaagagtcatcaccactccctaatctcaagtacccagggacacaaacactgcggaaggccgcagggtcctctgcctaggaaaaccagagac

SEQ ID NO: 35833 - DNA, 1171 bp, Artificial sequence
  DNA replication origin
gtaaggtcagagatcaacaggatcccaaggcagaagaatttttcttagtacagaccaaaatgaaaagtctcccatgtctacttctttctacacagacacggcaaccatccgatttctcagtcttttccgcacctttcccccctttctattccacaaaacagccattgtcatcatggcccgttctcaatgagctgttgggtacacctcccagatggggtggtggccgggcagaggggctcctcacttcccagtaggggcggctgggcagaggcgcccctcacctcccggatggggcggctggccgggcaggggactgaccccacctccctcccggacggggcggctggcctggcgggggctgacccccacctccctcccggacggggtggctgccgggcggagatgctactcacttcccagatggggcggctgccaggcagagggtctcctcacctctcagatggggcggccaggcagagacgctcctcacctcccagacggggtcgcggctgggcagaggcgctcctcatatcccagacggggcagcggggcagaggcgctccccacatctcatacgatgggcggccgggcagagacgctccttgcttcctagatgggatggtggctgggaagaggtgctcgtcacttcctagatgggatggcggccgggcagagaccctcctcactttcagactgggcagccaggcagaggggcccctcacatcccagacgatgggcggccaggcagagacgctcctcacttcccagacggggtggcggccgggcagaggctgcaatctcggtactttgggaggccaaggcaggcggctgggaggtggaggttgtagccagctgagatcacgccactgcactccagcctgggcaacattgagcactgagtgaacgagactccgtctgcaatcccggcacctcaggaggccgaggctggcggatcactcgcggttaggagctggagaccagcccggccaacacagcgaaaccccgtctccaccaaaaaagtacgaaaaccagtcaggcgtggcggcgcgcacctgcaatcgcaggcactcggcaggctgaggcaggagaatcaggcagggaggttgcagtgagccgagatggcagcagtacagtccagcttcggctcggcatcagagggagactgtgggga

SEQ ID NO: 35834 - DNA, 1122 bp, Artificial sequence
  DNA replication origin
cttaatccatttaaccctgagtggacacagcacatgtttcagagagcacagggttgggggtaaggtcaagagatcaacagaatcccaaggcagaagaatttttcttagtacagatcaaaatgaagtctcccatgtatacttctttctacacagacacggcaaccatccgatttctcaatcttttcctcacctttcccccctttctattccacaaaaccgccattgtcatcatggcccgttctcaatgagctgttgggtacacctcccagacggggtggtggcctggcagaggcgcccctcacctcccggacggggtggctggccgggctgggggctgaccccccccacctccctcccggacggggcggctggccgggcggggggctgacccccacctccctcccggatggggcggctggccgggcggggggctgaccccccccacctccctcccggacggggtggctgccgggcggagacgctcctcacttcccagacagggcggtggggcagaggcgctccccacatctcagacgatgggtggccaggcagagacgctcctcacttcccagatgtgatggcggccgggaagaggcgctcctcacttcctagatgggatggtggccaggcagagacgctcctcactttccagactgggcagccaggcagaagggctcctcacatcccagatgatgggcggccaggcagagacgctcctcacttcccagatggggtggcgaccgggcagaggctgcaatctcggcattttgggaagccaaggcaggcggctgggaggtggaggttgtagcgagccaagatcacgccactgcactccagcctgggcaccattgagcactgagtgaaccagactccgtctgcaatcccggcacctcgggaggccgaggctggcggatcactcgcggttaggggctggagaccggcccggccaacacagcgaaaccccgtctccaccaaaaaaacacgaaaaccagtcaggcgtggcggcgcgcgcctgcaatcacaggcactcggcaggctgaggcaggagaatcaggcagggaggctgcagtgagctgagatggcagcagtacagtccagcttcggctcggcatcagagggaga

SEQ ID NO: 35835 - DNA, 849 bp, Artificial sequence
  DNA replication origin
ttgcagcctctgcccggtcgccaccccatctgggaagtgaggagcgtctctgcctggccgcccatcatctgggatgtgaggagcccttctgcctggctgcccagtctggaaagtgaggagcgtctctgcctggccaccatcccatctaggaagtgaggagcgcctcttcccggccgccatcacatctgggaagtgaggagcgtctctgcctggccacccatcgtctgagatgtggggagcgcctctgccccaccgccctgtctgggaagtgaggagcgtctccgcccggcagccaccccgtccgggagggaggtggggggggtcagccccccgcccggccagccgccccatccgggagggaggtgggggtcagccccccgcccggccagccgccccgtccgggagggaggtggggggggtcagcccccagcccggccagccaccccgtccgggaggtgaggggcgcctctgccaggccaccaccccgtctgggaggtgtacccaacagctcattgagaacgggccatgatgacaatggcggttttgtggaatagaaaggggggaaaggtgaggaaaagattgagaaatcggatggttgccgtgtctgtgtagaaagaagtatacatgggagacttcattttgatctgtactaagaaaaattcttctgccttgggattctgttgatctcttgaccttacccccaaccctgtgctctctgaaacatgtgctgtgtccactcagggttaaatggattaagggtggtgcaagatgtgctttgttaaacagatgcttgaaggcagcatgctcgttaagagtcatcaccactccctaatctcaagtacccaggga

SEQ ID NO: 35836 - DNA, 1263 bp, Artificial sequence
  DNA replication origin
tgatgactcttaacgagcatgctgccttcaagcatctgtttaacaaagcacatcttgcaccgcccttaatccatttaaccctgagtggacacagcacctgtttcagagagcacaggggtgggggtaaggtcataggtcaacaggatcccaaggcagaagaatttttcttagtacagaacaaaatgaaaagtgtcccatgtctacctctttctacacagacacagcaaccatccgatttctcaatcttttccccacctttcccccttttctattccacaaaactgccattgtcatcatggcccgttctcaatgagctggtgggtacacttcccagacggggtggtggccgggcagaggggctcctcacttcccagtagggaccgccgggcagaggcgcccctcacctccaggacggggcggctggccgggcggggggctgaccccccccacctccctcccggacggggcccctgccgggcggagggtctcctcacttctcagatggggcggccgggcagagatgctcctcacctcccagacggggtcgcggccgggcagaggcactcctcacatcccagacggggcggcggggcagaggcgctcctcacatcccagacggggcggcggggcagaggcactccccacatctcagacgatgggcagccgggcagagatgctcctcacttcatcccagacgatgggcagccaggcagagacgctcctcacttcctagacaggatggcggctgggcagagacgctcctcactttccgactgggcagccaggcagaggggctcctcacatcccagatgatgggtggccaggcagagacgctcctcacttcccagactgggtggcggccgggcagaggctgcaatctcggtactttgggaggccaaggcaggcggctgggaggtggaggttgtagccagctgagatcacgccactgcaccccagcctgggcaccattgagcactgagtgaacgagactccgcctgcaatcctggcacctcgggaggccgaggctggtggatcactcgcggttagaagctggagacgagcccggccaacacagtgaaaccccgtctccaccaaaaaagtacgaaaaccagtcaggcgtggcggcgctcgcaggcactaggcaggctgaggcaggagaatcaggcagggaggttgcagtgagccgatatggcagcagtacagtccagcttcggctcggcatcagagggagaccgtggaaagagaggcagaggggagagggga

SEQ ID NO: 35837 - DNA, 866 bp, Artificial sequence
  DNA replication origin
cctggccacccatcatctgggatgtgaggagcccctctgcctggctgcccagtcggaaagtgaggagcgtctctgcccagccgccatcctgtctaggaagtgaggagcgtctctgcctggctgcccatcgtctgggatgaagtgaggagcatctctgcccggctgcccatcgtctgagatgtggggagtgcctctgccccgccgccccgtctgggatgtgaggagcgcctctgccccgccgccccgtctgggatgtgaggagtgcctctgcccggccgcgaccccgtctgggaggtgaggagcatctctgcccggccgccccatctgagaagtgaggagaccctccgcccggcaggggccccgtccgggagggaggtggggggggtcagccccccgcccggccagccgccccgtcctggaggtgaggggcgcctctgcccggcggtccctactgggaagtgaggagcccctctgcccggccaccaccccgtctgggaagtgtacccaccagctcattgagaacgggccatgatgacaatggcagttttgtggaatagaaaagggggaaaggtggggaaaagattgagaaatcggatggttgctgtgtctgtgtagaaagaggtagacatgggacacttttcattttgttctgtactaagaaaaattcttctgccttgggatcctgttgacctatgaccttacccccacccctgtgctctctgaaacaggtgctgtgtccactcagggttaaatggattaagggcggtgcaagatgtgctttgttaaacagatgcttgaaggcagcatgctcgttaagagtcatcaccactccctaatctcaagtacccagggacacaaacactgcg

SEQ ID NO: 35838 - DNA, 953 bp, Artificial sequence
  DNA replication origin
cgtccgggagggaggtgggggggtcagccccccgcccggccagccgccccgtccgggagggaggtgggggggtcagccccctgcccggccagccgccctgtctgggagggaggtgggggggtcagccccccgcccggtcagctgccccatccgggaggtgaggggtgcctctgcccggccgcccctactgggaagtgaggagcccctctgcccggccagccgccccgtccgggagggaggtggggggggtcagccccccgcccggccagccgccccgtctgggagggaggtgggggggctcagccctcccgcccggccagccgccccatccgggagggaggtggggggctcagcccccggcccggccagccgccccgtccgggagggaggtggggggctcagccccccgcctggccagctgccctgtccaggaggtgaggggcgcctctgcccagccgcccctactgggaagtgaggagcccctctgcccggccaccaccccgtctgggaggaggtacccaacagctcattgagaacgggccatgatgacaacggcggttttgtggaatagaaaagggggcaaggtggggaaaagattgagaaatcggatggttgctgtgtctgtgtagaaagtagtagacatgggagacatttcattttgttctgtactaagaaaagttcttctgccttgggatcctgttgatctatgaccttaaccccaaccctgtgctctctgaaacatgtgctgtgtccactcagggttaaatggattaagggcggtgcaagatgtgctttgttaaacagatgcttgaaggcagcatgctcgttgagagtcatcaccactccccaatctcaagtacccagggacacaaacactctgcctaggaaaaccagagacctttgttcacttgtttgtttgctgaccttccctccgctgttgtcctatgaccctg

SEQ ID NO: 35839 - DNA, 1216 bp, Artificial sequence
  DNA replication origin
ctccctcccagacagggcggctggccgggcagggggctgacccccccacctccctcccggacggggcggctggccgggcggggggctgacccccccacctccctcccggacgtggcggctggccgggcggggggctgacccccccacctccctcccggacggggcggctggccgggcagaggggctcctcacttcccagtaggggcagccgggcagaggcgcccctcacctcctggacggggcggctggccgggcggggggctgagccccccacctccctcccggatggggcagctggccgggcggggggctgaccccccacctccctcccggacggggcagctggccgggcggggggctgaccccccacctccctcccggacggggcgactggcctgacgggggctgaccccccacctccctcctgggcggggtggctgccgggcggagacgctcctcacttcccagatggggtggcagccgggtggaggggctcctcacttctcagatggggcggttgccaggcggagggtctcctcacttctcagatggggcggccgggcagagacgctcctcacctcccagacggggtcgtggccgggccgaggtgctcctcacatcccagacggggcggcggggcagaggcgctccccacatctcagacgatgggcagccgggcagagatgctcctcacttcctagatgggatggcggccgggcagagaccctcctcactttccagactgggcagccaggcagaggggctcctcacatcccagatgatgggcggccaggcagagatgctcctcacttcccagacggggtggcggccgggcagaggctgcaatctctgcactttggggggccaaggcaggcggctgggaggtggaggttgtagcgagccgagatcacaccactgcactccagcctgggcaccattgagcactgagttaacgagactccgtctgcaatcctggcacctcaggatgctgaggctggcggatcactcgcggttaggagctggagactagcccggccaacacagcaaaaccccgtctccaccaaaaaaatacgaaaaccagtcaggcgtggcggcgcgcgcctgcaatcgcaggcactcggcaggctgaggcaggagaatcaggcagggaggttgcagtgagccgagatggcagcagcacagtccagctttggcttggcatgagagggagaccgtg

SEQ ID NO: 35840 - DNA, 1116 bp, Artificial sequence
  DNA replication origin
tccatttaaccctgagtggacacagcacatgtttcagagagcacagggttgggggtaaggtcatagatcaacagcatcccaaggcagaagaatttttcttagtacagaacaaaatgaagtctcccatgtctacttctttctacatagacacagcaacaatctgatttctctatcttttccccacctttcccccttttctattcgacaaaaccgccatcgtcatcatggcccgttctcaatgagctgttgcgtacacctcccagacagggtggcggccgggcagaggggctcctcacttcccagaaggggcggctgggcagaggcgcccccccacccaacttcctggacggggcggcggccaggcggaggcgggccccccacctccctcccggacggggcggctgccgggcggagacactcctcacttcccagacggggtggctgccgggcggaggggctcctcacttctcagacggggcggccgggcagagacgctcctcacctcccagacggggccgcggccgggcagaggcactccctgcatctccgacgatgggcggccgggcagagacgctcctcacttcctagacgggatggcggctgggaagaggcgctcctcacttcccagactgggcagctgagcagaggggctccttacatcccagacgatgggcggccaggcagagccgcgcctcacttcccagacggggtggcagccaggcagaggctgcaatctcggcactttgggaggccaaggcaggcggctgggaggtggaggttgtagcgagccgagatcacgccactgcactccagcctgggcaacattgagcactgagtgaacgagactccgtctgcaatcctggcaccttgggaggccgaggctggcggatcactcgcggttaggagctggagaccagcccagccaacacagcgaaaccccgtctccaccaaaaaaatacgaaaaccagtcaggcgtggcagcgcacgccttcagtcgcaggcactcggcaggctgaggcaggagaatcaggcaaggaggttgcagtgagccgagatggcagcagtacagtccagcttcggctcggcatcagagggagaccgtggaaagagagggag

SEQ ID NO: 35841 - DNA, 1005 bp, Artificial sequence
  DNA replication origin
aaaccgccatagtcttcatggcccgttctcaatgagctgttgggaacacctcccagacggggtggtggccaggcagaggggctcctcacttcccagatggggtggctgggcagaggcgccccccacctccctcccggatggggcagctggccgggcgggggctgccccccacctcctggacagggcggctgccgggcggaggggctcctcacttctcagacggggtggctgccgggcggaggggctcctcacttctcagatggggcggctgccaggcggaggggctcctcacttctcagatggggcagccgggcagagacgatcctcacctcccagatggggtggcggtcaggcagagacactcctcagttcccagatggggtcgcggtcaggcagaggcgctcctcacatcccagatggggcggcagggcagaggtgctccccacatctcagacgatgggcggccgggcagagacactcctcacttcctagacgggatggcggccgggaagaggcgctcctcacttcccagactgggcagccggtcagaggggctcctcacatcccagacgatgggtggccaggcagagatgctcctcacttcccagacggggtggtggccgggcagaggctgcaatctcagcacattgggaggccaaggcaggcggctgggaggtggaggttgtagcgagccgagatcacgccactgcactccagcctgggcaacattgagcactgagggagtgagactccgtctgcaatcctggcacctcgggaggccgaggcaggcagatcactcgcggtcaggagctggagaccagcccggccaacacagcgaaaccccatctccaccaaaaaatgcaaaaaccagtcaggcgtggcggcgcgcgcctgcaatcccaggcactcggcaggctgaggcaggagaatcaggcagggaggttgcagtgagccgagatggcggcagtacagtccagcctcggctttcacaactttggtggcatc

SEQ ID NO: 35842 - DNA, 862 bp, Artificial sequence
  DNA replication origin
tgaggagcccctctgcccggctgcccagtctgggaagtgaggagcgcctcttcccggccgccatcccatctaggaagtgaggagcgtctctgcccagccacccatcgtctgagatgtggggagcgcctctgccccgctgccccgtctgggatgtgaggagcgcctctgcccggccacaaccccgtctgggatctgaggagtgtctgtctctgcccgaccgccaccccgtctgggaggtgaggagcgtctctgcctggccgccccgtctgagaagtgaggagcccctccgcccggcagccgccccgcctgggaagtgaggagcgtctccgcccggcagccgccccgtccgggaggtggggggcagcccccgcccagccatccgccccgtccaggagggaggtgggggggtgcctctgcccggccaccccgtctgggaagtgaggagcccctctgcccggccgccaccccgtctaggaggtgtacccaacagctcattgagaacgggccatgatgacaatggcggttttgtcgaatagaaaagggggaaatgtggggaaggaaagagagatcagattgttgctgtgtctgtgtagaaagaagtagacatgggagactccattttgttcggtactaagaaaaatttttctgccttgggatgctgttaatctataaccttaccccccaccccccaccccgtgctctctgaaacatgtgctgtgtccactcagggttaaatggattaagggcggtgcaagatgtgctttgtgaaacagatgcttgaaggcagcatacttgttaagagtcatcaccactccctaatctcaagtacccagggacacaaacactgtggaaggccgcaggg

SEQ ID NO: 35843 - DNA, 1147 bp, Artificial sequence
  DNA replication origin
tcttgcaccgcccttaatccatttaaccctgagtggacacagcacatgtttcagagagcacggggtggggggtggggggtaaggttatagattaacagcatcccaaggcagaaaaatttttcttagtaccgaacaaaatggagtctcccatgtctacttctttctacacagacacagcaacaatctgatctctctttccttccccacatttcccccttttctattcgacaaaaccgccattgtcatcatggcccgttctcaatgagctgttgggtacacctcctagacggggtggcggccgggcagaggggctcctcacttcccagacggggtggccgggcagaggcacccccccacctccctcctggacggggcggatggctgggcgggggctgccccccacctcccggacggggcggctgccgggcggagacgctcctcacttcccaggcggggcggctgccgggcggaggggctcctcacttctcagacggggcggccaggcagagacgctcctcacctcccagacggggtggcggtcgggcagagacagacactcctcagatcccagacggggttgtggccgggcagaggcgctcctcacatcccagacggggcagcggggcagaggcgctccccacatctcagacgatgggtggctgggcagagacgctcctcacttcctagatgggatggcggccgggaagaggcgctcctcacttcccagactgggcagccgggcagaggggctcctcacatcccagatgatggacggccaggcaaagacgctcctcacttcccagacagggtggcagccgggcagaggctgcaatctgggcattttgggaggccaaggcaggtggctgggaggtggaggttgtagcgagctgagatcacgccactgcactccagcctgggcaagattgagcactgagtgagcgagactccgtctgcaatcccggcacctcgggacgcccgggcaggcagatcactcgcggtcaggagctggagaccagcctggccaacatggcgaaaccccgtctccaccaaaaaatacaaaaaccagtcaggcgtggcggcatgcgcctgcaatcccaggcactcggcaggctgaggcaggagaatcaggcagggatgttgcagtgag

SEQ ID NO: 35844 - DNA, 808 bp, Artificial sequence
  DNA replication origin
ggcgcatctctgcctggccgcccatcgtctgggatgtgaggagcccctctgcctggctgcccagtctggaaagtgaggagcgtctctgcccagccgtcatcccgtctaggatgtgaggagcgcctctgcccggccgcgaccccgtctgggaggtgaggagcgtctctgcccggccgccctgtctgagaagtgaggagaccctctgcctggcaaccgccccgtctgagaagtgaggagcccctccgcccggcagcctccccgtctgagaagtgaggagcccctccgcccggcagccaccccgtctgggaggtgaggagcgtctccgcccagcagccacactgtccgggagggaggtgggggtcagcccccgccaggccagccgccccgtccgggaggtgaggggcgcctctgcccggccgcccctactgggaagtgaggagcccctctgcccggccaccaccccgtctgggaggtgtacccaacagctcattgagaatgggccatgacgacaatggcggttttgtggaatagaaaagggggaaaggtggggaaaagattgagaaatcagatggttgctgtgtctgtgtagaaagaattagacatgggagacttttcattttgctctgtactaagaaaaattcttctgccttgggatcctgttgatctatgaccttacccccaactctgtgctctctgaaacatgtgctgtgtccactcagggttaaatggattaagggcggtgcaagatgtgctttgttaaacagatgcttgaaggcagcatgctcgttaagagtcatcaccactccct

SEQ ID NO: 35845 - DNA, 1376 bp, Artificial sequence
  DNA replication origin
agcatgctgccttcaagcatctgtttaacaaagcacatcttgcaccgcccttaatccatttaaccctgagtggacacagcacatgtttcagagagcacagagttgggggtaaggtcatagatcaacaggatcccaaggcagaagaatttttcttagtacagagcaaaatgaaaagtctcccatgtctaattctttctacacagacacagcaaccatctgatttctcaatcttttccccacctttcccccttttctattccacaaaaccgccattgtcgtcatggcccattctcaatgagctgttgggtacacctcccagacggggtggtggccgggcagaggggctcctcacttcccagtaggggcggccgggcagaggcgcccctcacctcccggacggggcggctggcctggcgggggctgacccccacctccctcccggacagtgtggctgctgggcggagacgctcctcacctcccagacggggtggctgccgggcggaggggctcctcacttctcagacggggaggctgccgggcggaggggctcctcacttctcagacggggcggttgccaggcagagggtctcctcacttctcagacagggcggccgggcagagacgctcctcacctcccagacggggtcgcggccgggcagaggcgctcctcacatcctagacgggatgacggctgggcagagacgctcctcactttccagactgggcagccaggcagaggggctcctcacatcccagacgatgggcggccaggcagagatgcgcctctcttcccagacggtgtggcggccaggcagaggctgcaatctctgcactttgggaggccaaggcaggcggctgggaggtggaggttgcagcgagccgagatcacgccactgcactccagcctgggcaccattgagcactgagtgaacgagactctgtctgcaatcccggcacctcgggaggccgagggtggcggatcactggcggttaggagctggagaccagcccggccaacacagcgaaaccccgtctccaccaaaaaaacacgaaaactagtcaggcgtggcggcacgcgcctggaatcgcaggcactcggcaggctgaggcaggagaatcaggcagggaggttgcagtgagccgagatggcagcagtctatgctgacatactcttatgccttgacactgcccctagaaggcatggtgattgattgctgggcccagaaccaatgtgatgtgagtctcctgcctggaccctgcctacaaggtgcattgtgacatatctctgggacctttaactattttatgtgactctcctctcttacctggatgttgcccaaaaagagattgtgacataaatttgggcccaacacata

SEQ ID NO: 35846 - DNA, 872 bp, Artificial sequence
  DNA replication origin
gagcgtctctgtccagccgccatcccatctaggaagtgaggagcgcctcttcccggctgccatcccatctaggaagtgaggagcatctctgcctggccacccatcgtctgagatgtggggagcgcctctgccccactgccccgtctgggatgtgaggagcgcctctgcccggccgtgaccctgtctgggaggtgaggagcgtctctgcccggccgcccagtctgagaagtgaggagaccctccgcctggcagccgtcccatctgggcagtgaggagcgtctccgcccggcagccaccccatctgggagggaggtgggggtcagccccccaccgggccagccgccccgtccgggagggaggtggggggtcagcccccgcccggccagccgccccatccgggaggtgggggactcctctgcctggccgccccttctgggaagtgaggagcccctctgcccggccaccaccccgtctgggaggtgtacccaacagctcattgagaacgggtcatgatgacaatggcggttttgtggaatagaaaagggggaaaggtggggaaaagattgagaaatcggatggttgctgtgtctgtgtagaaagaagtagacatgggagacttttcattttgttctgtactaagaaaaattcttctgccttgggatcctgttgatctatgaccttacccccaaccctgtgctctctgaaacatatgctgtgtccactcagggtaaaatggattaagggcggtgcaagatgtgctttgttaaacagatgcttgaaggcagcatgctcgttaagagtcatcaccactccctaatctcaagtacccagggacacaaacactgcggaaggccacagggtcctctgcctag

SEQ ID NO: 35847 - DNA, 1119 bp, Artificial sequence
  DNA replication origin
agcaaccatccgatttctcaatcttttccccacctttcccccttttctattccacaaaaccgccattgtcatcatgacccgttctcaatgagctgttgggtacacctcccagacggggtggtggccgggcagaggggctcctcacttcccagaaggggcggccaggcagaggagtcccccacctcccggatggggcggctggccgggcgggggctgaccccccacctccctcccggacggggcggctggcccggtggggggctgacccccacctccctcccagatggggtggctgccgggcggagacgctcctcactgcccagatgggacggctgccaggcggagggtctcctcacttctcagactgggcggccgggcagagacgctcctcacctcccagacagggtcacggccgggcagaggcgctcctcacatcccagacggggcagtggggcagaggcgctccccacatctcagacgatgggtggccaggcagagatgctcctcacttcctagatgggatggcagccgggaagaggcgctcctcacttcctagatgggatggcggctggacagagacgctcctcactttccagactgggcagccaggcagaggggctcctcacatcccagatgatgggcggccaggcagagacgctcctcacttcccagacggggtggcggccgggcagaggctgcaatctcggcactttgggaggccaaggcaggcggctggaaggtggaggttgtagcgagccgagatcacgccactgcactccagcctgggcaccattgaacactgagtgaatgagactccttctgcaatcccggcaccttgggaggctgaggctggcggatcactcacggttaggagctggagaccagcccggccaacacagcgaaaccccgtctccaccaaaaaaatacgaaaaccagtcaggcgtggcggtgcgcgcctggaatcgcaggcactcggcaggctgaggcaggagaatcaggcagggaggttgcagtgagctgagatggcagcagtacagtccagcttcggctcagcatcagagggagaccatggaaagagggagagggagaccgtggggagagggagagggagagcggtaa

SEQ ID NO: 35848 - DNA, 876 bp, Artificial sequence
  DNA replication origin
cctctgcccggccacgaccccgtctgggaggtgaggagcgtctctgcctggccgccccgtctgagaagtgaggagcccctccgcccagcagccgccccgtctgagaagtgaggagcccctccgcccggcagccaccccgtctgggaagtgaggagcgtctctgcctggcagccaccccatccgggagggaggtgggggtcagcccccgcccggccagccgccccatccgggagggaggtggggggccagcccccgcccggccagccaccccttccgggagggaggtggggggccagcccccgcccagccagccgccccgtccgggagggaggtggggggtcagcccccgcccggccagccaccccgtccgggaggtggggggcgcctctgcccggtcgccccttctgggaagtgaggagcccctctgcccggccaccaccccatctgggatgtgtacccaacagctcattgagaacgggtcatgatgacaatggcggttttgtggaatagaaaagggggaaaggtggggaaaagattgagaaatcggatggttgttgtgtctgtgtagaaagaaatagacatggaagacttttcattttgttctgtactaagaaaaattcttctgccttgggatcctgttgatctatgaccttaccgccaaccctgtgctctctgaaacatgtgctgtgtccactcaaggttaaatggattaagggcggtgcaagatgtgctttgttaaacagatgcttgaaggcagcatgctcgttaagagtcatcaccactccctaatctcaagtacccagggacacaaacactgcggaaggccgcagggtcctctgcctaggaaaaccagagacctttgttcacttgtttatc

SEQ ID NO: 35849 - DNA, 1570 bp, Artificial sequence
  DNA replication origin
gaaaagtcttccatgtctatttctttctacacagacacaacaaccatccgatttctcaatcttttccccacctttcccccttttctattccacaaaaccgccattgtcatcatgacccgttctcaatgagctgttgggtacacatcccagatggggtggtggccgggcagaggggctcctcacttcccagaaggggcgaccgggcagaggcgccccccacctcccggacggggtggctggccgggcgggggctgaccccccacctccctcccggacggggcggctggctgggcgggggctggccccccacctccctcccggaaggggtggctggccgggcgggggctggccccccacctccctcccggatggggcggctggccgggcgggggctgacccccacctccctcccggatggggtggctgccaggcagagacgctcctcacttcccagacggggtggctgccgggcggaggggctcctcacttctcagacggggcggctgctgggcggaggggctcctcacttctcagacggggcggccaggcagagacgctcctcacctcccagacggggtcgtggccgggcagaggcgctcctcacatcccagatggggcggcggggcagaggcgctccccacatctcagacgatgggcggccgggcagagacgctcctcacttcctagatgggatggcagccgggaagaggcgttcctcacttcccaggctgggcagccaggcagaggggctcctcacatcccagacgatgggtggccaggaagagacgctcctcacttcccagaaggggtggcggccgggcagaggctgcaatctcggcactttgggaggccaaggcaggcagctgggaggtggaggttgtagcgagccgagatcatgccactgcactccagcctgggcaccattgagcactgagtgaacgagactccgtctgcaatcccggcacctcggggggctgaggctggtggatcactcgcggttaggagctggagaccagcccagccaacacagcgaaaccccgtatccaccaaaaaaaatacgaaaaccagtcaggcacggcggcgtgcgcctgcaatcgcaggcactcgtatttctgccttaattttattatttacccagtagtcattcagcagcagattgttcaatttccatgtagttgtgcagtttggagtgaatttcttaatcctgagttctaatttgattgcactgtcatctgatagactgtttgttatgatttcagttcttttgcatttgctgaggagtgttttacttccaattatgtggttgatttcagaataagtgctatgtggcactgagaagaatgtatattctgttgatttggggtggagagttctggagatgtctattaggttcgtttggtccagagctgagttgaagtcctgaatatccttgctaattttcggtcttgttatctgtctaatattgacactggggtgttaaagtctcccactattattgtgtgggcatctaagtttctttgtaagttactaagaacttgttttatcaatctgggggctcctgtattggctg

SEQ ID NO: 35850 - DNA, 1973 bp, Artificial sequence
  DNA replication origin
gatggtctcgatttcctgacctcgtgatccacctgcctcgggttcctaaagtgctgggattacaggcctgagccactgtgcccggcctagctatcttttttccactggaaaaaagaaggaaggcttgcaggtttatttttgtcagcatgtcgagggatatgatgtatggacctggaaagtcctgtgaaagcctagaagagagactggttcataccactttaggaaactgaagagaagtcacccacagaaggtgacctgaattttaaaggaagtgcatgagttcaccagatgaaagaacttttgtagccaaggtgtgacattagacccgggacacaataaacagtgaatttaggtgcaggaagtgagactaggaggtggccagggacctcatcacaaggttgtggatgcttaggaactgggattattccgagggcaatgaggagccactgaaaggcacagccagggctgggcgcggtggctcatgcctgtaatcccagcaatttgggaggctgaaatgggcggatctcctgagatcaggagtttgagaccagcctggccaacatggcgaaaacctgtctctactaaaaatacaaaaaaattagccaggcatggtggtggtggcctgtaataccagctactcgggaggctgaggcaagagaactgcttgaaccctggagtcggaggttgcagtgggcccagactgtgccattgcactccactctggtcaacagagtgggtctccatctcgaaaaaaaaaaaaaaggcacagccaggtgagggactggttgggtgctgttttggtagctcaagctggtgcttcatgaagggcaggcagcctggggacagagaggccagtgagaggcaggagcagcagcccaggctgtcactgaggagggaacaatgtggcaaaaatggagaagtgcataggagtctggaaggtccagacagatgtgggaaccccacctcctctccccactccccactcacttattagctgtgaaacccaagcaaggcactgccctctgagcctttatgacttagccacttttcactaaatgtgaaaagtgcctgactggtgaccagtaataagtaggtgaagtggtagctcctttccctgccctgttgaggcggaagctggtgaccaagggttccctctgagtgacccagctggtggcagggaaaatctgaggctgcttgttcagagagggttaccactatgcccgggcagcacggcagacttgctgctgggaccagttctggaggtcagagacctggagggcttggtgtctgacggctgaacaaacaagctggttgaggcgaggttgccgtgagccgagatcgcgccattcaccccagcctgggcaacaagagcgaaactccgtctcaaaaaaaaaaaaaaatgccggttttgtcaaagcagcaggtggcaaacactgagtcaaaagactttcccggccgggcacagtggctcacgcctgtaatcccagcactttgagaggccgaggcgggcggatcacaaggtcaagagattgagaccatcctggccaacatggtgaaaccccgtctctattaaaagtataaaaattagctgggcatggtggcgggcgcctgtagtcccagctacttgggaggctgaggcaggagaatcgcttgaacccgggaggcggaggttgtagtgagccgagatcacgccattacactccagcctgggcgacagagcgagactccgtctcaaaaaaaaaaaaaaaaaaaaaaaaaagactttcccctctttgggcctcagtttccctttctgtaaaatgcaggtgaagaggcatgagctcaggattcctaaagccctacggggctgagcaaggacggtgctttgcgtttgcctcccttcccccagcccgcccgagagggtttgctggggcagggtggcccctgggacgggttccagacagttctaggcgctcaggtccgcagctgtgcta

SEQ ID NO: 35851 - DNA, 1010 bp, Artificial sequence
  DNA replication origin
cctcccttcccccagcccgcccgagagggtttgctggggcagggtggcccctgggacgggttccagacagttctaggcgctcaggtccgcagctgtgctacccccgccgcccgggacgcccggtccccgccagggccctctcactgtagctttaaggagggctggggccgggtgcagcggcacctggagtctcggtggaacccggcagcggtgggcgcggaccccggagaggctgccccgagcccgagcaccccctgaccgggcgctcaccacgggtgttgggacaagcagcggagcctgcgggctggagccaggctcggaccctccgcgccggggcgggcggccgagcggacgcagctggcagtggcggcgggagagcgccccggatccgcccggagcccaaccccgtggcacttcggctggctgggcagcggcgctggggacaacgcggggccttctgcaacgagcgcctgcgtgggactccaggggccggcgccccgctccgctccccccaggcctcaaccccgctggctacccgcgctgaaacctcacctgccgccggctgcaaacggactgcgctccaggtgggtggaaacgtccttctcctactttctgggctcactcggctccctgtgacgcgatcccgcttgcacccttgcccttcacgttgaccgcagtggctggtgggcagtgggggacaccctgggctccgcctgggttttctcttgctggtgacttgggccctggcgctcagtgtccctggtcgttagacaagggtgccttgagccacttgttgttcaggcggtttcttctttacagaaagtggccccccacacgcccttcctggtggcaggagcagggcagtgggcagcgtttctgccctgctccatggggctggggttggaggcggctctcccattcctgctgtccggacaggagcggggcctttctatccgcagacttttgctgaagacactgtcccccgcccccgcccctacgccagcggcaga

SEQ ID NO: 35852 - DNA, 1878 bp, Artificial sequence
  DNA replication origin
tggaaacgtccttctcctactttctgggctcactcggctccctgtgacgcgatcccgcttgcacccttgcccttcacgttgaccgcagtggctggtgggcagtgggggacaccctgggctccgcctgggttttctcttgctggtgacttgggccctggcgctcagtgtccctggtcgttagacaagggtgccttgagccacttgttgttcaggcggtttcttctttacagaaagtggccccccacacgcccttcctggtggcaggagcagggcagtgggcagcgtttctgccctgctccatggggctggggttggaggcggctctcccattcctgctgtccggacaggagcggggcctttctatccgcagacttttgctgaagacactgtcccccgcccccgcccctacgccagcggcagagaagagatccaggctggccccgctcctggttggtgggcagggcaagctggaggggggggcaggtactaagtgttgctgtggaaataaaaatcattgtaacaggagaataaatggttttcgtatattttaattctatcaaaaggatattcttctgcccatttgacagaggaaggcaccacgtggagaagcttcataacatgagggccagggcccatcctctgtccatccctgggtaacctgcttcccttacagctcgctgtctcacgctctcatcttcataacctgcatcccctggagcagagattcgagctcagaggtgttgagcagcctctgcaaggtcccagagttcagaggaggaaggaccaccatagtgacagggagtgacaggtggagccatctggtcagggagcaccctcccctggctggagggaggtggggacagccgcagacaggcttcagggaaggggtgaaatgagggccctggatgggagcagagggttccctggaatggggcacaggcctagtagaggcttccaggtgataggagtttggggggagggcatttgagggaggcagggccaccctccgaggccctgcatgagtgctagggttgggggtgggacttctcagggacaggggagttcctggcttgccctggggtgggcttatgcattccagggcaggtaactcttcttttcctagcagggtacaggttctggaggtacacagtgtaagggaccagtaacctgcttcaccaattctctgatatggctcaaggaaattcttggggtgggacaccctgctgacagttactgcaaaaatagtcacggcaaaacaaaacaggctgtccttcatccagtagacactgaccctctccacgtgcccctaatcccccagatggcaggttagcacgtgccctgcctgccatgggggagccacatggaaggagggagacccacatagaaggagatgaccatgatgccacgtgagaccatgcaaaggacaattgcaggggctggtccaaggtgtgggagaggttaagccagtaaggcaggcagtgcattccagagtgagagctgcctatgccaaagacttaacacctgcacccattcacagcatggcctcaactttatgtattaaaagatagtggctgggcgtggtagctcacgcctataattccagcactttcagaggccaggttgggcagatcatgaggtcaagagatcgagaccattctggacaacatggtgtgttgggagcaagccccccaaagtctggccataaactggtccccaaactggccataaacaaaatctctgcagcactataacatgtccataatagccctaacgcccaagctggaaggttgtaggtttacaggaatgagggcaaggaacacctggcccgcccagggtggaaaaccacttaaaggcattcttaagccacaaacaaaagcc

SEQ ID NO: 35853 - DNA, 1029 bp, Artificial sequence
  DNA replication origin
ctgagtcaagcttttttgatttctttaaaccccttctcctgggagcgtctctgcccggccgccatcccatctaggaagtgaggagcgtctctgcccggccccccatcgtctgagatgtggggagcgcctctgccccgccgccccgtctgggaggtgaggagcgtctctgcccggccgccccgtctgagaagtgaggagcccctccgcccggcagccgccccgtctgagaggtgaggagcccctccgcctggcagccgcccggtctgggaagtgaggagcgtctccgcccggcagccaccccatccgggagggaggtaggggtcagccccccgcccggccagccgccccatctgggagggaggtggggggtcagcccccgcccggccagccgccccgtctggtaggtggggggtgcctctgcccggccgcctctactgggaagtgaggagcccctctgcccggccaccaccccgtctgggaggtgtacccaacagctcattgagaacgggccatgatgacaatggcggttttgtggaatagaaaagggggaaaggtggggaaaagattgagaaatcggatggttgctgtgtctgtgtagaaagtagtagacatgggagacttttcattttgttctgtactaagaaaaattcttctgccttgggatgctgttgatctatgaccttacccctaaccctgtgctctctgaaacatgtgctgtgtccactcagggttaaatggattaagggtggtgcaagatgtgctttgttaaacagatgcttgaaggcagcatgctcgttaagagtcatcaccactccctaatctcaagtacccagggacacaaacactgcggaaggccgcagggtcctctgcctaggaaaaccagagacctttgttcacttgtttatctgctggccttccctccactattgtcctatgaccctgccaaatccccctctgcgagaaacacccaagaatgatcaatttaaaaaaaaaaaaaaaaaaaagataagctccatggcatctgccatg

SEQ ID NO: 35854 - DNA, 1126 bp, Artificial sequence
  DNA replication origin
tttcagagagcacagggttgggggtaaggtcatagatcaacaggatcccaaggcagaagaatttttcttagtacagaacaaaatggagtctcctatgtctacttctttccacacagacacagcaacaatctgatttctcaatcttttccccacatttcccccttttctattcgacaaaaccgccatcgtcatcatggcccgttctcaatgagctgttgggtacacctcccagatggggtggcggccgggcagaggggcacctcacttcccagaaggggcggccaggcagaggcgcccccccacctcccggacggggcggctggccggccaggggctggcccccccaacctccctcccggacggggcggctggcagggcaggggctgaccccccacctcccggacggggcggctgccaggcggagacgctcctcacttcccagacggggcggctgccgggcggaggggctcctcacttctcagacggggcggccgggcagagacgctcctcacttcctagacgggatggcggccgggaagaggcgctcctcacttcccagactgggcagctgggcagaggggctcctcacatcccagacgatgggcggccaggcagagacgctcctcacttcccagatggggtggcggctgggcagaggctgcaatctcggcactttgggaggccaaggcaggcggctgggaggtggaggttgtagcgagccgagatcacgccactgcactccagcctgggcaccattgagcactgagtgaatgagactccgactgcaatcccggcacctcgggaggccgaggctggcagatcactcccagttaggagctggagaccagcccggacaacacagcgaaaccccgtctccaccaaaaaaatatgaaaaccagtcaggcgtggcagcgcacgcctgcaatcgcaggcactcggcaggttgaggcaggagaatcaggcagggaggttgcagtgagcagaaatggcagcagtacagtccagcttcggctcggcatcagagggagaccgtggagagggatagggatagggatagggatagggatagggatagggatagggataggaataggaatagggagagcaacattaaactttcgatagt

SEQ ID NO: 35855 - DNA, 868 bp, Artificial sequence
  DNA replication origin
ccagccgcctgccttggcctcccaaagtgccgagattgcagcctctgcccagccgccaccccatctgggaagtgaggagcgtctctgcctggccgcccatcgtctgggatgtgaggagcccctctgcccagctgcccagtctgggaagtgaggagcgcctcttcccggccgccatcccgtctaggaagtgaggagcgtctctgcccggccgccccgtctgagaagtgaggagcccctccgcccggcagccgccccgtctgggaagtgaggagcgtctccgcctggcagccgccccgtccgggaggtggggggtcagcccctgccctgccagccgccccgtccgggagggaggttgggggggccagcccctggccggccagccgccccgtccgggaggtgggggggcgcctctgcctggccgccccttctgggaagtgaggtgcccctctgcccggccgccaccccatctgggaggtgtacccaacagctcattgagaacgggccatgatgacgatggcggttttgtcgaatagaaaagggggaaatgtggggaaaagattgagaaatcagattgttgctgtgtctgtgtggaaagaagtagacataggagactccattttgttctgtactaagaaaaattcttctgccttgggatcctgttgatctatgaccttacccccaaccctgtgctctctgaaacatgtgctgtgtccactcagggttaaatggattaagggcggtgcaagatgtgctttgttaaacagatgcttgaaggcagcatgctcgttaagagtcatcaccactccctaatctcaagtacccagggacacaaacactgcggaaggccccagggccctctgcctaggaa

SEQ ID NO: 35856 - DNA, 1320 bp, Artificial sequence
  DNA replication origin
ggctgacccccccacctccctcccggatggggcggctggccaggcggggggctgacccccccacctccctcctgggcggggcggctggccgggcagaggggctcctcacttcccagtaggggcggccgggcagaggcgcccctcacctcccggacggggcggctggccaggcggggggctgaccctccacctccctcccggactgggcggctggccgggcggggggttgacccccccacctccctcctggacggggcgactggccgggcagaggggctcctcacttcccagtaggggcggccgggcagaggagcccctcacctcccggccggggcggctggccgacccccccccccccgcctccctcccggacggggcgactggccgggcagaggggctcctcacttcccagtaggggcggccgggcagaggagcccctcacctcccggacggggcggctggccgggcggggggctgaccccccccacctccctcccggacggggtggctgccgggcggagacgctcctcacttcccagacggggtggttgccagacggaggggctcctcacttctcagacggggcggttgccaggcagagggtttcctcacttctcagacggagcggccgggcagagacactcctcacctcccagacagggttgcggcccagcagaggcgctcctcacatcccagacagggcggtggggcagaggtgctccccacatctcagacgatgggcggccgggcagagacgctcctcacttcctagatgggatggcggcggggaagaggcgcttctcgcttcctagatgggatggcggccgggcagagacgctcctcactttccacactgggcagccaggcagaggggctcctcatatcccagacgatgggtggccaagcagagacgctcctcacttcccagacggggtggcggccgggcagaggctgcaatctcggctctttgggaggccaaggcaggcggctgggaggtggttgtagcgagccgagatcacgccactgcactccagcctgggcaccattgagcactgagtgaacgagactccatctgcaatcccggcacctcgggaggccgaggctggcggatcactcgcggttaggagctggagaccagcccggccaacacagcgaaaccccatctccaccaaaaaaaaacgaaaaccagtcaggcgtggcggcgcgcgcctgcaatcgcaggcactcggcaggctgaggcaggagaatcaggcagggaggttgcagtgagccgagatggcagcagtaccgtccagctttggctcggcatgagagggagag

SEQ ID NO: 35857 - DNA, 945 bp, Artificial sequence
  DNA replication origin
ccccacccggccagccgccccgtccaggaggggggagggggggtcagccccccgcccggccagccgccccgtccgggagggaggtggggggggtcagccccccgcccggccagccgccccgtccgggagggaggtggggggatcagccccctgcctggccagccgccccgtccgggaggtgaggggcgcctctgcccggccgcccctactgggaagtgaggacccctctgcccggccagccgccccgtccgggagggaggtggggggaacagccccccccccggccagccgccctatccaggaggtgaggggcgcctctgcctggccgcccctactgggaagtgaggagcccctctgcctggccagccgccccgtccgggagggcggtgggggggtcagccccccgcccggccagccgccccatctgggaggtgaggggcacttctgccgggccgcccctactgggaagtgaggagcccctctgcccggccacgaccccgtctgggaggtgtgcccagcggctcattggggatgggccatgatgacaatggcggttttgtggaatagaaaggcgggaagggtggggaaaaaattgagaaatcggatggttgccgggtctgtgtggatagaagtagacatgggagacattttgttctgtactaagaaaaattcttctgccttgggatcctgttgatctgtgaccttatccccaaccctgtgctctctgaaacatgtgctgtgtccactcagggttaaatggattaagggcggtgcaagatgtgctttgttaaacagatgcttgaaggcagcatgctcgttaagagtcatcaccactccctaatcttaagtacccagggacacaaacactgcggaaggccgcagggtcctctgcctaggaaaaccagagacctttgttcacttgtttatctgctgaccttccctcca

SEQ ID NO: 35858 - DNA, 1003 bp, Artificial sequence
  DNA replication origin
acctctttctacacagacacggcaaccatccgatttctcaatcttttccccacctttcccccttttctattccacaaaaccgccattgtcatcatggcccgttctcaatgagctgttgggtacacctcccagacggggtggtggccgggcagaggggctcctcacttcccagtaggggcggccgggcagaggtgcccctcacctcctggatggcacggctggccgggcagggagctgaccccccccacctccctcccggacggggtggctgctgggcggagacgctcctcacttcccagatggggcggctgccgggcggagggtctcttcacttctcagacggggcggccgggcagagacgctcctcacctcccagacggggtcgcggccgggcagaggcactcctcacatcccagacggggcggcggggcagaggcgctccccacatctcagacgatgggcagccgggcagagacgcttctcacttcatcccagacgatgggcggccgggcagagacgttcctcacttcctagacaggatggcggccgggcagagatgctcctcactttccagactgggcagccaggcagaggggctcctcacatcccagacgatgggcggccaggcagagacgctcctcacttcccagacggggtggtggccgggtagaggctgcaatctcggcactttgggaggccaaggcaggcggctgggaggtggaggttgtagcgagccgagatcatgccactgcaccccagcctgggcaccattgagcactgagtgaacgagactccgtctgcaatcccggcacctcgggaggccgaggctggcggatcactcacggttaggagctggagaccagcccggccaacacagcgaaaccccgtctccaccaaaaaaatatgaaaaacagtcaggtgtggcggcgcgcgcctgcaatcgcaggcactcggcaggctgaggcaggagaatcaggcagggaggttgcagtgagccgagatg

SEQ ID NO: 35859 - DNA, 894 bp, Artificial sequence
  DNA replication origin
tgaggagcatctctgcccggccgccatcctgtctaggaagtgaggaacgtctctgcccggccgcccatcgtctgggatgaagtgagaagcgtctctgcccggctgcccatcgtctgagatgtggggagcgcctctgccccgccgccccgtctgggatgtgaggagtgcctctgcccggccgcgaccccgtctgggaggtgaggagcgtctctgcccggccgccccgtctgagaagtgaagagaccctccgcccggcagccgccccatctgggaagtgaggagcgtctccgcccagcagccaccccgtccgggagggaggtggggggggtcagctccctgcccggccagccgtgccatccaggaggtgaggggcacctctgcccggccgcccctactgggaagtgaggagcccctctgcccggccaccaccccgtctgggaggtgtacccaacagctcattgagaacgggccatgatgacaatggcggttttgtggaatagaaaagggggaaaggtggggaaaagattgagaaatcggatggttgccgtgtctgtgtagaaagaggtagacatgggagacttttcattttgttctgtactaagaaaaattcttctgccttgggatcctgttgatctatgaccttacccccaaccctgtgctctctgaaacatgtgctgtgtccactcagggttaaatggattaagggcggtgcaagatgtgctttgttaaacagatgcttgaaggcagcaggctcgttaagagtcatcaccactccctagtctcaagtacccagggacacaaacactgcggaaggccgcagggtcctctgcctaggaaaaccagagacctttgttcacttgtttatctgctgaccttccctccactattgtccta

SEQ ID NO: 35860 - DNA, 882 bp, Artificial sequence
  DNA replication origin
gtcggggaggtgaggggcgcctctgcccggccgcccctactgggaagtgaggagcccctctgcccggccagccgccccatccgggagggaggtgggagggtcagccctccacccggccagccgccccgtctgggaggtgaggggcgcctctgcccggccgccccttctgggaagtgaggagcccctctgcccggccagccgccccgtccgggagggaggtgggggggtcggccccccgcccggccagccgccccatccgggagggaggtgggggtgtcagccccccgcccggccagcctccccgtccgggagggaggtgggggggtcagccccccgcccggccagccgccccctccgggagggaggtggggggggatcagcccccctgcccggccagccgccccgtccgggaggtgaggggcgcctctgcccggccgcccctactgggaagtgaggagcccctctgcccggccaccaccccgtctgggaggtgtacccaacagctcattgagaacgggccaggatgacaatggcggctttgtggaatagaaaggcgggaaaggtggggaaaagattgagaaatcggatggttgccgtgtctgtgtggaaagaagtagacatgggagacttttcattttgttctacactaagaaaaattcctctgccttgggatcctgttgatctgtgaccttacccccaaccctgtgctctctgaaacatgtgctgtgtccactcagggttaaatggattaagggcggtgcaagatgtgctttgttaaacagatgcttgaaggcagcatgctcgttaagagtcatcaccaatccctaatctcaagtaatcagggacacaaacactgcggaaggccgcagggtcctctgccta

SEQ ID NO: 35861 - DNA, 1212 bp, Artificial sequence
  DNA replication origin
ctcacctcccagacggggcggctggccgggtggagggctgaccctcccacctccctcccggatggggcggctggccgggcagaggggctcctcacttcccagtaggggcggccgggcagaggcgcccctcacctccccgacggggcggctggccgggcggagggctgaccccctcacctccctcccagacggggcggctggccaggcggggggctgacccccccacctccctcccggacggggcggctggccaggcggggggctgacccccccacctccctcccggacggggtggctggccgggctgaggggctcctcacttcccagtaggggcggccgggcagaggcgcccctcacctcccggacggggcggctggccgggcggggggctgacccccccccacctccctcccggacggggtggctgccgggcggagacgctcctcacttcccagatggggtggctgccgggcggagaggctcctcacctctcagacggggcagctgccgggcggaggggctcctcacttctcagacggggcggccaggcagagacgctcctcacctcccagatggggtctcggccgggcagaggcgctcctcacatcccagatggggcggcagggcagaggcgctccccacatctcagacgatgggcggccgggcagagacgctcctcacttcctagatgtgatggcggctgggaagaggcgctcctcacttcctagatgggatggcggccgggcggagacgctcctcactttccagactgggcagccaggcagaggggctcctcacatcccagacgatgggcggccaggcagagacactcctcacttcccagacggggtggtggccgggcagaggctgcaatctcggcactttgggaggccaaggcaggcggctgggaggtgtaggttgtagtgagccgagatcacgccactgcactccagcctgggcaccattgagcactgagtgaacgagactccgtctgcaatcccggcacctcgggaggccgaggttggcggatcactcgcggttaggggctggagaccggcccggccaacacagcgaaaccccgtctccaccaaaaccagtcaggcgtggcggcgcgtgcctgcaatcgcaggcattcggcagactgaggcaggagaatcaggcagggaggttgcagtgagccgagatggcagcagtacagtccagcttcggccc

SEQ ID NO: 35862 - DNA, 826 bp, Artificial sequence
  DNA replication origin
ggctgcaatctcggcactttgggaggccaaggcaggcggctgggaggtgtaggttgtagtgagccgagatcacgccactgcactccagcctgggcaccattgagcactgagtgaacgagactccgtctgcaatcccggcacctcgggaggccgaggttggcggatcactcgcggttaggggctggagaccggcccggccaacacagcgaaaccccgtctccaccaaaaccagtcaggcgtggcggcgcgtgcctgcaatcgcaggcattcggcagactgaggcaggagaatcaggcagggaggttgcagtgagccgagatggcagcagtacagtccagcttcggccccgcatgagagggagaccggagggagagggagagggggagggggagggggagggggagggggagggggagggggagggggagggagagctagtttttaaaggactccagctctttctctttctcagggggagttgggttttcttacgtacaactgagtttctgcttacacattctttaatttcttttaattcctgttccagaagaaccacaaaagaagtgaaaatgtccagttcctgccttaattgatgacattccaccactgtgatttgttcctgccccactctgactgatcaattaaccttgtgaccttccttctcctggacaatgagtctcagaagctcccccaccaagcaccttgtaacccccgcccctgcccacaagagaaaaaccccctttgactgtagttttccactacctacccaaattctataaaactgccccacccctatctccctttgctgactctcttttcggactca

SEQ ID NO: 35863 - DNA, 892 bp, Artificial sequence
  DNA replication origin
cccggccgcgaccctgtctgggaggtgaggagcgtctccacccggccgccccgtctgagaagtgaggagcccctccacctggcagccgccctgtctgagaagtgaggagcccctccgcctggcagccgccccatccgggagggaggtggggggcagcccccgcccggccagccgccccttccgggagggaggtggggggcagcccctgcccggccagccgccccatcagggagggaggtgggggccagcccccgctcggccagccgccccatcgcgggggaggtgggggccagcccctggcccgccagccgccccgtcagggagggaggtggggggcagcccctgcccggccagccgccccgtctgggaggtggggggcgcctctgcccggccgccccttctgggaagtgaggagcccctctgcccggccgccaccctgtctgggaggtgtacccaacagctcattgagaacgggccatgatgacgatggcggttttgtcaaatagaaaagggggaaatgtggggaaaagatagagaaatcagattgttgctgtgtctgcgtagaaagaagtagacataggagattccattttgttctgtactaagaaaaattcttctgccttgggatgctgttgatctatgaccttacccgcaacccggtgctctctgaaacatgttctgtgtccactcagggttaaatggattaagggggtgcaagatgtgctttgttaaacagatgcttgaaggcagcatgcttgttaagagtcatcaccactccctaatctcaagtacccaggtacacaaacactgcagaaggccccagggtcctctgcctaggaaaaccagagacctttgttcacttgtttatctgctgaccttccctccactattg
